(19) United States
(12) Patent Application Publication
(10) Pub. No.: US 2023/0212674 A1
(43) Pub. Date: Jul. 6, 2023

(54) COMPOSITIONS AND METHODS FOR IDENTIFYING CELL TYPES

(71) Applicants: YISSUM RESEARCH DEVELOPMENT COMPANY OF THE HEBREW UNIVERSITY OF JERUSALEM LTD., JERUSALEM (IL); HADASIT MEDICAL RESEARCH SERVICES AND DEVELOPMENT LTD., JERUSALEM (IL); GRAIL, LLC, MENLO PARK, CA (US)

(72) Inventors: TOMER KAPLAN, JERUSALEM (IL); YUVAL DOR, JERUSALEM (IL); RUTH SHEMER, MEVASSERET ZION (IL); BENJAMIN GLASER, JERUSALEM (IL)

(21) Appl. No.: 18/147,647

(22) Filed: Dec. 28, 2022

Related U.S. Application Data
(60) Provisional application No. 63/295,319, filed on Dec. 30, 2021.

(51) Int. Cl. C12Q 1/6881; C12Q 1/6883

(52) U.S. Cl. CPC C12Q 1/6881; C12Q 1/6883; C12Q 2600/154

(57) ABSTRACT

The present disclosure relates generally to compositions and methods for determining cell type based on a methylation profile of associated DNA. For cell free DNA, such determination can be used to identify disease or conditions relating to the cell type. For tumor cells, such determination is useful for identifying their primary origin.

### CROSS REFERENCE TO RELATED APPLICATIONS

[0001] This application claims the benefit under 35 U.S.C. § 119(e) of the U.S. Provisional Application Ser. No. 63/295,319, filed Dec. 30, 2021, the content of which is hereby incorporated by reference in its entirety.

### REFERENCE TO AN ELECTRONIC SEQUENCE LISTING

[0002] The contents of the electronic sequence listing (334655US.xml; Size: 13,761,379 bytes; and Date of Creation: Dec. 27, 2022) is herein incorporated by reference in its entirety.

### BACKGROUND

[0003] Identification of the origin of a cell or cell free DNA has important implications. For instance, tumor cells may migrate to other tissues, making it challenging to identify their origin. Cancer of unknown primary origin (CUP) is a cancer that is determined to be at the metastatic stage at the time of diagnosis, but a primary tumor cannot be identified. CUP is found in about 3 to 5% of all people diagnosed with invasive cancer and carries a poor prognosis in most (80 to 85%) of those circumstances.

[0004] Small fragments of nucleic acids, e.g., DNA, circulate freely in the peripheral blood of healthy and diseased individuals. These cell-free nucleic acids, such as DNA (cfDNA) molecules may originate from dying or damaged cells and thus reflect ongoing cell death or injuries taking place in the body. In recent years, such understanding has led to the emergence of diagnostic tools, which are impacting multiple areas of medicine. For instance, next-generation sequencing of fetal DNA circulating in maternal blood has allowed non-invasive prenatal testing of fetal chromosomal abnormalities; detection of donor-derived DNA in the circulation of organ transplant recipients can be used for early identification of graft rejection; and the evaluation of mutated DNA in circulation can be used to detect genotype and monitor cancer.

[0005] Such technologies are powerful at identifying genetic anomalies in circulating DNA, or displaced cells, but are not informative when the DNA does not carry mutations. A key limitation with sequencing is that it does not reveal the tissue origins of the DNA, precluding the identification of tissue-specific cancer or cell death. The latter is critical in many settings such as neurodegenerative, inflammatory or ischemic diseases, not involving DNA mutations. Even in oncology, it is often important to determine the tissue origin of the tumor in addition to determining its mutational profile, for example in CUP and in the setting of early cancer diagnosis.

[0006] Identification of the tissue origins of DNA may also provide insights into collateral tissue damage (e.g., toxicity of drugs in genetically normal tissues), a key element in drug development and monitoring of treatment response.

### SUMMARY

[0007] The present disclosure provides compositions and methods for determining cell type based on methylation status of DNA fragments. Also provided are compositions and methods for identifying diseases and conditions in a subject, e.g., a human subject, through cell free DNA released by cells impacted by such diseases or conditions. In oncology or within another disease state, the present technology can be used to identify the primary origin of tumor cells.

[0008] In one embodiment, the present disclosure provides a method for identifying that a biological sample comprises DNA from a cell type. In some embodiment, the cell type is selected from the group of oral, larynx and esophageal epithelium, gastric epithelium, small intestine epithelium, colon epithelium, colon fibroblasts, gallbladder epithelium, liver hepatocytes, pancreatic acinar cells, pancreatic alpha cells, pancreatic beta cells, pancreatic delta cells, pancreatic ductal cells, endometrium epithelium, fallopian epithelium, kidney epithelium, bladder epithelium, prostate epithelium, breast basal epithelium, breast luminal epithelium, lung alveolar epithelium, lung bronchial epithelium, heart cardiomyocytes, heart fibroblasts, vascular endothelial cells, blood b cells, blood granulocytes, blood monocytes+macrophages, blood NK cells, blood t cells, erythrocyte progenitor cells, epidermal keratinocytes, dermal fibroblasts, osteoblasts, skeletal muscle cells, smooth muscle cells, thyroid epithelium, adipocytes, neuron CNS, and oligodendrocytes.

[0009] In some embodiments, the method entails detecting the methylation status of each of at least four, or at least five, six, seven, or eight CpG sites of a target DNA fragment in the biological sample and identifying the target DNA fragment as being from a human cell type when the methylation status of the target DNA fragment corresponds to the methylation status for the DNA fragment as defined in Table A for that cell type.

[0010] As used herein, in some embodiments, the methylation status refers to the percentage of CpG sites being methylated within the target DNA fragment (e.g., 25%). In some embodiments, the methylation status refers to whether the target DNA fragment is over-methylated (M, at least 60% CpG methylated) or under-methylated (U, no more than 40% CpG methylated) as compared to the same fragment in other cell types.

[0011] The target DNA fragment, in some embodiments, has the DNA sequence as shown in the accompanying Table B and Sequence Listing. As demonstrated in the experimental examples, however, the methylation pattern is uniform across a continuous region. Therefore, the sequences, or their genomic locations, are representative of the nearby genomic area.

[0012] In some embodiments, a target DNA fragment is one that includes at least a CpG site within a sequence included in the sequence listing. In some embodiments, a target DNA fragment is one that includes at least two CpG sites within a sequence included in the sequence listing. In some embodiments, a target DNA fragment is one that includes at least three or four CpG sites within a sequence included in the sequence listing.

[0013] In some embodiments, a target DNA fragment is within 1000 bp from either the 5′ end or 3′ end of a sequence included in the sequence listing. In some embodiments, a target DNA fragment is within 900, 800, 700, 600, 500, 400, 300, 250, 200 or 150 bp from either the 5′ end or 3′ end of a sequence included in the sequence listing.

[0014] In some embodiments, the target DNA fragment is obtained from a biological sample selected from the group consisting of blood, plasma, serum, semen, milk, urine, saliva and cerebral spinal fluid.

[0015] In some embodiments, the target DNA fragment is a cell-free DNA fragment. In some embodiments, identifying the cell-free DNA fragment as being from a cell type comprises detecting abnormal cell death of the cell type, or a disease relating to the cell type. In some embodiments, the method further entails identifying the human subject as having or likely having an injury, inflammation, or cancer at the corresponding cell type.

[0016] In some embodiments, the disease or condition is physical injury, inflammation, infection, cancer, diabetes, autoimmune disease, multiple sclerosis (MS), or a neurodegenerative disorder.

[0017] In some embodiments, the target DNA fragment has a length of 20-500 bp. In some embodiments, the target DNA fragment has a length of 30-400 bp, 40-300 bp, 50-250 bp, 50-200 bp, or 50-150 bp, without limitation.

[0018] In some embodiments, the methylation status is conversion of a cytosine to a 5-methylcytosine (5-mC) or to a 5-hydroxymethylcytosine (5-hmC). In some embodiments, detecting the methylation status comprises bisulfite or enzymatic treatment of the DNA fragment, or digestion of the DNA fragment with a restriction enzyme sensitive to DNA methylation. In some embodiments, the enzymatic treatment comprises treatment with APOBEC-Seq. In some embodiments, detecting the methylation status further comprises determining the sequence of the DNA fragment. In some embodiments, the sequence is determined by deep sequencing.

[0019] In some embodiments, the method further detecting a genetic variation in the target DNA fragment, thereby determining that the cell from which the target DNA fragment is released contains the genetic variation. In some embodiments, the method further comprises administering to the patient an agent useful for treating the identified disease or condition.

### BRIEF DESCRIPTION OF THE DRAWINGS

[0020] FIG. 1 presents a methylation atlas of the adult human body. 207 healthy samples were obtained from adult humans, isolated and deeply sequenced (WGBS, mean depth >30×), to form a comprehensive human cell type-specific methylation atlas.

[0021] FIG. 2 shows segmentation of the human genome into 7,264,350 continuous homogeneous blocks. The histograms show the number of segmented blocks as a function of their length in bases (left), or as a function of the number of CpGs they contain (right). In addition to the 2,746,623 blocks of length 3-30 CpGs (plotted above), there were additional 3,271,607 blocks of one CpG, and 1,185,719 blocks of two CpGs, as well 60,401 of >30 CpGs.

[0022] FIG. 3 shows biological replicates of the same cell type, from different individuals show a surprisingly low rate of differentially methylated blocks. This focused on 37 cellular subtypes with n≥3 replicates (e.g. endothelial cells from a specific tissue) and measured the average percent of methylation blocks (≥3 CpGs) that differ in their methylation by 50% (absolute delta beta), across replicates (shown as Y-axis). Nearly all cellular subtypes (36/37) differ by ≤0.5% of blocks suggesting a very high degree of conservation among replicates. Dotted red line marks the average number of differential blocks between two random samples of different cell types (4.9%).

[0023] FIG. 4 shows unsupervised agglomerative clustering reflects human developmental lineage of healthy cell types.

[0024] FIG. 5 shows average methylation in top differentially methylated blocks. Shown are the average methylation values at the 1% most variable blocks of 4 CpGs or more (21,077 blocks). For each block, we computed the average methylation in each sample, and classified them as unmethylated (<50%) or methylated (>50%). Boxplots show the 25th through 75th percentiles among the average methylation levels in unmethylated blocks/samples (blue), methylated ones (yellow) or the difference between methylated and unmethylated samples in the same block (green).

[0025] FIG. 6 show a Human Methylation Atlas of 207 samples across 39 cell types. (A) 953 genomic regions, unmethylated in a cell type-specific manner. Each cell in the plot marks the average methylation of one genomic region (column) at each of 39 cell types (rows). Up to 25 regions are shown per cell type, with a mean length of 251 bp (9 CpGs) per region. (B) Top 25 cardiomyocyte regions. For each region, the average methylation of each CpG site (columns) across all 207 samples is plotted in the atlas, and is grouped into 39 cell types as before. (C) A locus specifically unmethylated in cardiomyocytes. This marker (highlighted in light blue) is 120 bp long (6 CpGs), and is located in the first intron of MYL4, a heart-specific gene (TPM expression of 2518 in atrial appendage, GTEx inset). Genomic snapshot depicts average methylation (purple tracks) across six cardiomyocyte samples, four cardiac fibroblast samples, and three aorta samples (two endothelial, one smooth muscle cells). (D) Visualization of bisulfite converted fragments from three cardiomyocyte samples, one cardiac fibroblast sample, and two aorta samples (endothelium and smooth muscle). Shown are reads mapped to chr17:45289451-45289570 (hg19), with at least 3 covered CpGs. Yellow/blue dots depict methylated/unmethylated CpG sites.

[0026] FIG. 7 shows that cell type-specific markers are enriched for regulatory motifs. Shown are the top transcription factor binding site motifs, enriched among the top 250 differentially unmethylated regions per cell type, using HOMER motif analysis. Motifs similar to prior (more significant) hits are skipped.

[0027] FIG. 8 shows that cell type-specific hyper-methylated regions are enriched for CpG islands, polycomb targets, and CTCF and REST/NSRF. (A) 37.9% of top cell type-specific hyper-methylated markers (1,185 of 3,125, p<1E-100) overlap CpG islands. For comparison, 1.7% of cell type-specific hypo-methylated regions (198/11,371, p<2E-29) overlap CpG islands, which make up <0.9% of the genome (black line). (B) These regions are typically enriched for H3K27me3 in other cell types. Shown are the average H3K27me3 signals in monocytes and macrophages near all cell type-specific hyper-methylated regions (top, blue) or near monocytes/macrophages-specific hyper-methylated regions (green). (C) Similar plots for Polycomb annotations in monocytes and macrophages (chromHMM), for all or monocyte/macrophage-specific markers. (D) Motif analysis of cell type-specific hyper-methylated regions (top 100 per cell type) identifies known CTCF and REST/NSRF motifs. (E) Analysis of ChIP-seq data for one such site (chr1:209364093-209364250, highlighted in blue, hg19), specifically methylated in the small intestine and colon epithelium (box 1), and unmethylated elsewhere. As shown below, this site is bound in multiple cell types and tissues, but is mostly unbound in the stomach and colon epithelium, in vivo (box 2). (F) REST/NSRF motif is present within 15 of top 100 (15%) cell type-specific hyper-methylated regions in the endocrine pancreas (alpha, beta, and delta cells), 5 of top 100 pancreatic delta cells, and 2 of top 100 pancreatic beta cells, compared to ˜0.1% in background sequences, in accordance with REST target expression in the endocrine pancreas.

[0028] FIG. 9 shows the results of lung epithelium methylome analysis. A. Comparative tissue methylome analysis reveals multiple methylation blocks that are uniquely unmethylated in lung alveolar (1,663 blocks), bronchial epithelial cells (673 blocks), or both (139 blocks) and methylated in all other tissues. Additional 11 markers specifically methylated in the lung are not shown. Each marker covers ≥3 CpGs, and presents an average methylation delta of ≥0.4 between target cell type 25^{th} percentile and other tissues 97.5^{th} percentile. B. Characterization of one lung alveolar-specific methylation marker, located at chr16:667119-667272 (hg19), in the Rab40C gene. This region is unmethylated only in lung alveolar epithelium and is enriched for chromatin markers H3K27ac, H3K4me1 and H3K4me3. C. Lung-specific methylation markers are enriched for enhancer regions. For each of the three marker sets, shown is the number of markers with enhancer-related chromatin states in the lung, showing an enrichment of 2.5 to 10-fold change. D. GREAT annotations, identifying gene sets enriched among genes closest to lung-unique methylation markers. Shown are 5 of the most significant (BinomFDRQ) gene sets for the methylation markers of each lung cell type.

[0029] FIG. 10 shows the performance of the selected lung specific markers. A. Assay specificity. Methylation status of lung epithelial markers (alveolar in green, bronchial in orange and common lung in pink) in DNA from multiple tissues. Shown is the percentage of molecules in which most CpG sites were methylated or unmethylated. B. Assay specificity in Lung cancer. Methylation status of lung epithelial markers in DNA from multiple Lung Cancers. Shown is the percentage of molecules in which CpG sites were methylated or unmethylated according to the marker. The analysis is based on TCGA Illumina BeadCheap array data, where each locus is represented by one CpG site. Note that lung cancers retain methylation patterns of the normal lung. C. Assay sensitivity and accuracy in vitro. DNA from healthy human lung alveolar (left) or bronchial (right) epithelium was mixed with blood DNA as indicated, and the fraction of molecules methylated or unmethylated in the lung markers was determined. D. Assay robustness. cfDNA samples extracted from same donor in duplicates were analyzed for lung markers. Shown is the number of genome equivalents per ml plasma present in each duplicate.

[0030] FIG. 11 shows the testing results of lung-derived cfDNA in healthy individuals. A. Concentration of lung cfDNA in the plasma of 30 healthy donors. The concentration was measured by multiplying the fraction of lung cfDNA by the concentration of total cfDNA. B. Fraction of lung cfDNA in the plasma of 30 healthy donors and in lung lavages of 6 donors.

[0031] FIG. 12 shows identification of Lung-derived cfDNA in lung cancer patients. A. Lung cfDNA in the plasma of 26 patients with advanced lung cancer. The concentration was measured by multiplying the fraction of lung cfDNA by the concentration of total cfDNA. Dashed line in this panel and in C indicates average+2 standard errors of healthy controls. B. Lung cfDNA in the plasma of patients with lung cancer. Top, P value determined by 2-tailed Mann-Whitney test. Bottom, ROC curve of all advanced lung cancer patients vs. healthy samples. C. Lung cfDNA in the plasma of 51 donors undergoing bronchoscopy. The concentration was measured by multiplying the fraction of lung cfDNA by the concentration of total cfDNA. P value determined by 2-tailed Mann-Whitney test. Left, each color represents the cumulative value of markers for the indicated cell type. Right, each dot represents the cumulative value of all lung markers measured. D. Concentration of lung cfDNA in the plasma of donors undergoing bronchoscopy vs healthy patients (left), and a ROC curve for distinguishing patients with lung pathologies from healthy controls.

[0032] FIG. 13 shows the effect of number of lung markers on assay sensitivity. A. ROC curves using the indicated combination of lung methylation markers, for identifying patients with any lung pathology vs. healthy controls. B. Sensitivity of the indicated combination of lung markers at 70% specificity. Patients with lung pathologies vs healthy controls.

[0033] FIG. 14 shows the testing result of lung-specific cfDNA in patients with COPD. A. Concentration of lung cfDNA in the plasma of 77 patients with COPD. The concentration was measured by multiplying the fraction of lung cfDNA by the concentration of total cfDNA. Dashed line indicates average+2 standard errors of healthy controls. B. Lung cfDNA in the plasma of patients with lung cancer, exacerbated and stable COPD, and healthy controls. C. Lung cfDNA in the plasma of COPD patients that were still alive 14 months after sampling vs patients that died during this period.

[0034] FIG. 15 is a schematic illustrating the computing components that may be used to implement various features of the embodiments described in the present disclosure.

### DETAILED DESCRIPTION

[0035] The following description sets forth exemplary embodiments of the present technology. It should be recognized, however, that such description is not intended as a limitation on the scope of the present disclosure but is instead provided as a description of exemplary embodiments.

### Definitions

[0036] Unless defined otherwise, all technical and scientific terms used herein have the meaning commonly understood by a person skilled in the art to which this description belongs. As used herein, the following terms have the meanings ascribed to them below.

[0037] The term “methylation” as used herein refers to a process by which a methyl group is attached to a nucleic acid, e.g., DNA, molecule. For example, a hydrogen atom on the pyrimidine ring of a cytosine base can be converted to a methyl group, forming 5-methylcytosine. The term also includes a process by which a hydroxymethyl group is attached to a DNA molecule (specifically, “hydroxymethylation”), for example by oxidation of a methyl group on the pyrimidine ring of a cytosine base. Methylation, including hydroxymethylation, generally takes place at dinucleotides of cytosine and guanine referred to herein as “CpG dinucleotides” or “CpG sites.” The principles described herein are also applicable for the detection of methylation in a non-CpG context, including non-cytosine methylation. In such embodiments, a wet laboratory assay used to detect methylation may vary from any described herein. Further, the methylation state vectors may contain elements that are generally vectors of sites where methylation has or has not occurred (even if those sites are not CpG sites specifically).

[0038] The term “methylation site” as used herein refers to a region of a DNA molecule where a methyl group can be attached to the DNA molecule. “CpG” sites are the most common methylation site, but methylation sites are not limited to CpG sites. For example, DNA methylation may occur in cytosines in CHG and CHH, where H is adenine, cytosine or thymine.

[0039] The term “CpG site” as used herein refers to a region of a DNA molecule where a cytosine nucleotide is followed by a guanine nucleotide in the linear sequence of bases along its 5′ to 3′ direction. “CpG” is a shorthand for 5′-C-phosphate-G-3′ that is cytosine and guanine separated by only one phosphate group. Cytosines in CpG dinucleotides can be methylated to form 5-methylcytosine.

[0040] The term “under-methylated” or “over-methylated” as used herein refers to a methylation status of a DNA molecule containing multiple CpG sites (e.g., 2 or more, 3 or more, 4 or more, 5 or more, 6 or more, 7 or more, 8 or more, 9 or more, or 10 or more, etc.) where a higher percentage of the CpG sites (e.g., 5% or more, 10% or more, 15% or more, 20% or more, 25% or more, 30% or more, 40% or more, 50% or more, 70% or more, 75% or more, 80% or more, 85% or more, 90% or more, or 95% or more, or 97.5% or more, 98% or more, 99% or more, or 99.9% or more, or any other numerical percentage within the range 0% to 50% or within the range 50%-100%, wherein each provided range of the subject disclosure includes the range limit endpoints, e.g., 50% and 100%) are unmethylated or methylated, respectively, as compared to the corresponding DNA molecule from one or more reference samples. In the context of cancer, the reference sample may be a normal tissue. Under-methylation of a DNA molecule from a tumor cell means decreased methylation percentage as compared to the normal, e.g., healthy, non-diseased, e.g., non-cancerous, tissue, which is also known as “hypomethylation.” “Hypomethylated” nucleic acid, e.g., cfDNA, fragments can be fragments having a number, e.g., 3 or more, 4 or more, 5 or more, 6 or more, 7 or more, 8 or more, 9 or more, or 10 or more, of CpG sites with a percentage, e.g., 70% or more, 75% or more, 80% or more, 85% or more, 90% or more, or 95% or more, or 97.5% or more, 98% or more, 99% or more, 99.9% or more, of the CpG sites being unmethylated. Over-methylation of a DNA molecule from a tumor cell means increased methylation percentage as compared to the normal e.g., healthy, non-diseased, e.g., non-cancerous, tissue, which is also known as “hypermethylation.” Likewise, “hypermethylated” nucleic acid, e.g., cfDNA, fragments can be fragments having a number, e.g., 3 or more, 4 or more, 5 or more, 6 or more, 7 or more, 8 or more, 9 or more, or 10 or more, of CpG sites with a percentage, e.g., 70% or more, 75% or more, 80% or more, 85% or more, 90% or more, or 95% or more, or 97.5% or more, 98% or more, 99% or more, 99.9% or more of the CpG sites being methylated. “Under-methylated” can also refer to a lower percentage of methylation of a DNA molecule in a target cell as compared to cells of other types, and over-methylated can also refer to a higher percentage of methylation of a DNA molecule in a target cell as compared to cells of other types.

[0041] The term “cell free nucleic acid,” refers to nucleic acid, e.g., DNA in “cell free DNA,” and “cfDNA”, fragments that circulate in an individual's body (e.g., bloodstream) and originate from one or more healthy cells and/or from one or more diseased, aged, or damaged cells. Additionally, cell free nucleic acids such as cfDNA may originate from other sources such as viruses, fetuses, etc.

[0042] The terms “circulating tumor DNA” and “ctDNA” refer to DNA fragments that originate from tumor cells, which may be released into an individual's bloodstream as result of biological processes such as apoptosis or necrosis of dying cells or actively released by viable tumor cells.

[0043] The terms “abnormal methylation pattern” and “anomalous methylation pattern” as used herein refer to a methylation pattern of a nucleic acid, e.g., DNA such as a cfDNA, molecule or a methylation state vector that is found and/or expected to be found in a sample less frequently than it would be in a healthy, e.g., non-cancer, sample. In various embodiments, such a methylation pattern is found and/or expected to be found in a sample with a lower frequency than a value, e.g., a threshold value, of a non-cancer or healthy, e.g., non-cancer, sample. As such, for example, the terms “abnormally methylated” and “anomalously methylated” as used herein describe a nucleic acid, e.g., DNA such as a cfDNA, molecule or a methylation state vector exhibiting an abnormal methylation pattern. An aspect according to the subject disclosure that is differentially methylated can in some versions include an aspect that is abnormally methylated. Also, whether an aspect is differentially methylated can be used as an indicator for a determination of healthy, e.g., non-cancer, as opposed to diseased, e.g., cancer, in referring to the health of a subject from which a subject sample was originated. In some versions, the subject methods include determining whether a nucleic acid, e.g., DNA, molecule or a methylation state vector is abnormally methylated.

[0044] The term “methylation state vector” as used herein refers to a vector comprising multiple elements, where each element indicates the methylation status of a methylation site in a nucleic acid, e.g., DNA, molecule including multiple methylation sites, in the order they appear from 5′ to 3′ in the DNA molecule. For example, <Mₓ, Mₓ₊₁, Mₓ₊₂>, <Mₓ, Mₓ₊₁, Uₓ₊₂>, . . . , <Uₓ, Uₓ₊₁, Uₓ₊₂> can be methylation vectors for DNA molecules comprising three methylation sites, where M represents a methylated methylation site and U represents an unmethylated methylation site.

[0045] The terms “converted DNA molecules,” and “converted cfDNA molecules,” refer to DNA, e.g., cfDNA, molecules obtained by processing the molecules in a sample for the purpose of differentiating a methylated nucleotide and an unmethylated nucleotide in DNA or cfDNA molecules. For example, in one embodiment, the sample can undergo bisulfite conversion and thus be treated with bisulfite ion (e.g., using sodium bisulfite), to convert unmethylated cytosines (“C”) to uracils (“U”). In another embodiment, the conversion of unmethylated cytosines to uracils is accomplished with enzymatic conversion using an enzymatic conversion reaction, e.g., a reaction using a cytidine deaminase (such as APOBEC). After treatment, converted DNA molecules or cfDNA molecules include additional uracils which are not present in the original cfDNA sample. Replication by DNA polymerase of a DNA strand comprising a uracil results in addition of an adenine to the nascent complementary strand instead of the guanine normally added as the complement to a cytosine or methylcytosine. In some embodiments, the converted DNA molecules are converted hypermethylated DNA molecules.

[0046] The term “converted DNA sequence” refers to the sequence of a converted DNA molecule.

[0047] The term “tissue of origin” or “TOO” as used herein refers to an organ, organ group, body region and/or cell type that nucleic acid, e.g., cfDNA, such as healthy or disease-associated, e.g., cancer-associated, cfDNA, originates from. The identification of a tissue of origin and/or disease, e.g., cancer, cell type can allow for identification of the most appropriate next steps in a care continuum of a disease to further diagnose, stage and decide on treatment.

[0048] Identification of Cell Type Based on DNA Methylation Status

[0049] The present disclosure provides compositions and methods for determining cell type based on methylation status of associated DNA fragments. Such DNA fragments typically harbor multiple adjacent CpG dinucleotides having relatively uniform methylation status, methylated or unmethylated, within a cell type. Meanwhile, the methylation status of such CpG sites is different among other cells, thereby enabling the respective cell type(s) to be distinguished from other cell types. Each individual CpG dinucleotide is herein referred to as a “CpG site.” Likewise, a collection of multiple CpG sites within a DNA fragment is referred to as a “CpG cluster.”

[0050] Previously, DNA methylation analyses have used primarily bulk tissue, measuring the average methylation for the probed CpG sites, thus precluding the study of minority cell types that may differ in DNA methylation, such as tissue resident immune cells, fibroblasts, or endothelial cells. Alternatively, the analysis of cultured cells often suffers from the inherent limitation of non-physiological methylation patterns introduced in vitro.

[0051] To overcome these limitations and to accurately characterize the complexity of the human cell methylome, the instant inventors isolated FACS purified populations of 39 primary human cell types from freshly dissociated adult healthy tissues. Unlike many previous studies which used shallow sequencing or were limited to a subset of genomic regions (reduced representation bisulfite-sequencing, RRBS), this disclosure used deep genome-wide sequencing, with paired-end reads at an average sequencing depth of 32× (±7.2×), in purified human cell populations. For each cell type, the analysis aimed at multiple replicates obtained from different individuals. The analysis coalesced read-specific methylation patterns across the entire genome into larger blocks, allowing simultaneous readout of the methylation status of multiple CpG sites which captured the dependencies between neighboring CpG sites while reflecting the variance of methylation patterns across individual cell types.

[0052] As demonstrated in the accompanying experimental examples, surprisingly, in every one of a large number of human cell types examined, a sufficient number of CpG clusters can be identified as having statistically different methylation status between a cell type and all other cell types. Such CpG clusters, also referred to as “methylation markers,” allow identification of each cell type based on its DNA methylation status.

[0053] In accordance with one embodiment of the present disclosure, provided are methods for identifying the cell type of the DNA in a biological sample. In some embodiments, the method entails detecting the methylation status of a plurality of CpG sites in a DNA fragment and identifying the corresponding cell type based on the methylation status of the sites. According to various embodiments, the subject DNA fragments are derived from one or more cells of the cell type determined.

### Methylation Detection

[0054] Detection of DNA methylation according to the subject embodiments can be carried out with various methods. In some embodiments, the methylation is conversion of a cytosine to a 5-methylcytosine (5-mC). In some embodiments, the methylation is conversion of a cytosine to a 5-hydroxymethylcytosine (5-hmC).

[0055] In some embodiments, the methylation status is detected directly, such as with mass spectrometry or methylation-sensitive restriction enzymes. A step of DNA methylation methods can produce converted DNA molecules. In such embodiments, the methylated cytosines are converted prior to further analysis. The terms “convert” and “modify” refer to processing of DNA molecules in a sample for the purpose of differentiating a methylated nucleotide and an unmethylated nucleotide. For example, in one embodiment, the sample can be treated with bisulfite ion (e.g., using sodium bisulfite) to convert unmethylated cytosines (“C”) to uracils (“U”). In another embodiment, the conversion of unmethylated cytosines to uracils is accomplished using an enzymatic conversion reaction, for example, using a cytidine deaminase, such as APOBEC-Seq (NEBiolabs, Ipswich, Mass.). Examples of DNA methylation detection methods are further described below.

[0056] Methylation-Specific PCR (MSP), which can be based on a chemical reaction of sodium bisulfite with DNA that converts unmethylated cytosines of CpG dinucleotides to uracil or UpG, followed by traditional PCR. Methylated cytosines will not be converted in this process, and primers are designed to overlap the CpG site of interest, which allows one to determine methylation status as methylated or unmethylated.

[0057] Whole genome bisulfite sequencing, also known as BS-Seq, which is a high-throughput genome-wide analysis of DNA methylation. It can also be based on the sodium bisulfite conversion of genomic DNA, which is then sequenced on a Next-Generation Sequencing platform, such as deep sequencing. The sequences obtained are then re-aligned to the reference genome to determine the methylation status of CpG dinucleotides based on mismatches resulting from the conversion of unmethylated cytosines into uracil.

[0058] The HpaII tiny fragment Enrichment by Ligation-mediated PCR Assay (HELP Assay) compares representations generated by digestion by a restriction enzyme, e.g., HpaII or MspI, of the genome followed by ligation-mediated PCR. HpaII digests 5′-CCGG-3′ sites when the cytosine in the central CG dinucleotide is unmethylated, the HpaII representation is enriched for the hypomethylated fraction of the genome.

[0059] Glal hydrolysis and Ligation Adapter Dependent PCR assay (GLAD-PCR assay) can determine R(5mC)GY sites produced in the course of de novo DNA methylation with DNMT3A and DNMT3B DNA methyltransferases. GLAD-PCR assay do not require bisulfite treatment of the DNA. GLAD-PCR assay uses site-specific methyl-directed DNA-endonucleases (MD DNA endonucleases), which cleave only methylated DNA and do not cleave unmethylated DNA.

[0060] The “Illumina Methylation Assay” measures locus-specific DNA methylation using array hybridization. Bisulfite-treated DNA is hybridized to probes on “BeadChips.” Single-base base extension with labeled probes is used to determine methylation status of target sites. The Infinium MethylationEPIC BeadChip can interrogate over 850,000 methylation sites across the human genome.

[0061] The “Enzymatic Methyl-seq” or “EM-seq” method developed at New England Biolabs provides an alternative to bisulfite modification. This method relies on the ability of APOBEC (e.g., APOBEC-Seq by NEB) to deaminate cytosines to uracils. Then, cytosines are sequenced as thymines and methylated cytosines are sequenced as cytosines.

### DNA Sample Preparation

[0062] DNA fragments subject to the methylation status detection can be prepared from cell-containing or cell-free samples. A biological sample that contains cells can be readily obtained, such as from biopsies, cultured cells, skin tissues, cells, body fluids, without limitation. In some embodiments, a cell-containing biological sample is a tumor tissue or tumor cell. In some embodiments, a cell-containing biological sample is a body fluid sample that contains at least one cell. Non-limiting examples of body fluids that can be implemented according to the subject methods include blood, plasma, serum, semen, milk, urine, vaginal fluid, uterine or vaginal flushing fluids, plural fluid, ascitic fluid, sweat, tears, sputum, bronchoalveolar lavage fluid, stool, saliva and cerebrospinal fluid.

[0063] Cell-free DNA samples, in some embodiments, can also be used. Cell-free DNA circulates in an individual's body and may originate from a healthy cell or a diseased, aged, or damaged cell. For a pregnant female, the cell-free DNA may also originate from the fetus. In some embodiments, the cell-free DNA is obtained from a biological sample that includes blood, plasma, serum, semen, milk, urine, saliva or cerebral spinal fluid, or any other body fluid or tissue.

[0064] DNA fragments can be isolated from the biological sample with methods known in the art. In some embodiments, the DNA fragments are substantially free of protein, lipids, and other common materials from tissue or fluid samples. In some embodiments, the DNA fragments have suitable length for methylation analysis.

[0065] In some embodiments, the DNA fragments have an average length of at least 18, 20, 25, 30, 40, 50, 60, 70, 80, 90, 100, 110, 120, 130, 140, 150, 200, 250, 300, or 350 bp. In some embodiments, the DNA fragments have an average length of not longer than 100, 110, 120, 130, 140, 150, 160, 170, 180, 190, 200, 210, 220, 230, 240, 250, 260, 270, 280, 290, 300 or 350 bp. In some embodiments, the DNA fragments have an average length of 40-300, 400-250, 40-200, 50-300, 50-250, 50-200, 50-150, 100-300, 100-250, 100-200, or 150-300 bp, without limitation.

[0066] In some embodiments, the DNA fragments from the biological sample is processed to obtain the desired average lengths. This may be achieved by, for instance, ultrasonic degradation. In some embodiments, the desired average length can be obtained by enriching DNA fragments of the desired lengths while discarding those that are too short or too long, such as by liquid chromatography.

[0067] In some embodiments, no degradation of the DNA fragments is needed even if their average lengths are longer than desired. Alternatively, DNA methylation detection can be limited to the desired fragment/sequence with designs of suitable primers (e.g., in methylation-specific PCR) or targeted mapping of detected methylation status within the desired fragment/sequence.

[0068] Methylation detection can be performed for the prepared DNA fragments. In some embodiments, it is desirable to detect the methylation status of CpG sites that are adjacent to one another, which collectively form a CpG cluster. The term “adjacent” as used herein, refers to two or more CpG sites all of which are located within region on a DNA fragment. In some embodiments, the region has a length that is not longer than 100, 110, 120, 130, 140, 150, 160, 170, 180, 190, 200, 210, 220, 230, 240, 250, 260, 270, 280, 290, 300, 350, 400, 450 or 500 bp. In some embodiments, a CpG site is considered to be adjacent to another CpG site when their distance is not longer than 100, 110, 120, 130, 140, 150, 160, 170, 180, 190, 200, 210, 220, 230, 240, 250, 260, 270, 280, 290, 300, 350, 400, 450 or 500 bp.

[0069] In some embodiments, the methylation status of at least three adjacent CpG sites is detected. In some embodiments, the methylation status of at least four adjacent CpG sites is detected. In some embodiments, the methylation status of at least five adjacent CpG sites is detected. In some embodiments, the methylation status of at least six adjacent CpG sites is detected. In some embodiments, the methylation status of at least seven adjacent CpG sites is detected. In some embodiments, the methylation status of at least eight adjacent CpG sites is detected. In some embodiments, the methylation status of at least nine adjacent CpG sites is detected. In some embodiments, the methylation status of at least ten adjacent CpG sites is detected. In some embodiments, the methylation status of at least 11, 12, 13, 14, or 15 adjacent CpG sites is detected. In some embodiments, the methylation status of at least three, four, five, six, seven, eight, nine, ten, eleven, twelve, thirteen, fourteen, or fifteen CpG sites is detected. Each of such sites can be fully or partially non-adjacent to others. For example, a site can be adjacent to another site on one side and not on the opposite side or can be non-adjacent to other sites on both sides.

### Use of Methylation Markers

[0070] The methylation status of these adjacent CpG sites on a DNA fragment can be used according to the subject methods to identify the cell type of the cell from which the DNA fragment originates. In some embodiments, the methylation status of these CpG sites is the frequency of methylated CpG sites, which may be indicated as a percentage (M %). For instance, for DNA fragment F1, which is 200 bp in length and includes 10 CpG sites, its methylation status in a NK cell may be expressed as 20% when two of the CpG sites are methylated and eight of them are not. If the average methylation status of F1 in all other cell types, i.e., cell types that do not include NK cells, ranges from 70% to 90%, then F1 can be a suitable marker for identifying NK cells. For instance, it can be determined according to the subject methods that a cell-free DNA that includes F1 with two of the 10 CpG sites within F1 methylated was released from a NK cell.

[0071] Cutoff methylation percentage values, in some embodiments, may be used when determining the cell types. Such cutoff values can be determined based on experimental data such as those presented in the accompanying experimental examples, with suitable statistics and applied according to the subject methods. For instance, if the methylation percentages of F1 in all tested NK cells range from 0-40%, and in all tested non-NK cells range from 60%-100%, then 50% can be applied as a suitable cutoff value. It is to be appreciated that cutoff values are not always required. For instance, when the methylation status of an F1 fragment from an unknown cell is detected and shows 30% methylation, the 30% number can be compared to F1 from NK cell and non-NK cells, and a nearest neighbor can be analyzed and applied to determine the type of the unknown cell.

[0072] The methylation status of multiple DNA fragments, in some embodiments, can be used collectively to determine the type of a cell, in a multivariant analysis manner. For instance, when analyzing a cancer cell of unknown primary origin, the methylation status of DNA fragments F1, F2 and F3 can be detected. Methods such as random forest, linear regression, support vector machine, and nearest neighbor, without limitation, can be used to use multiple methylation percentages to determine the primary cell type of the cancer cell.

### Disease Detection and Treatment Monitoring

[0073] Cell type identification has important clinical uses. For instance, in many diseases, DNA from dying cells is released into the bloodstream or other body fluids (e.g., semen, milk, urine, saliva and cerebral spinal fluid). Tools that can identify the source tissue of this DNA are useful in identifying and locating diseases. Likewise, a change of the amount of such released DNA can indicate disease progression or treatment effects. For example, the subject methods include measuring an amount of such released DNA at a plurality of time points, such as a first time point and at a second time point later than the first. In some versions, measurements are also taken at a third time point after the second, and/or following consecutive time points. In some versions, a second or additional such time point is after a disease, e.g., cancer, treatment is administered to a subject, e.g., after a resection surgery and/or or therapeutic intervention) and/or a first time point is before such a treatment. The methods can include determining that a disease, e.g., cancer, is worsening or improving based on the difference in DNA amounts between the two or more, e.g., 3 or more, 4 or more, 5 or more, or 10 or more time points. For instance, an increase in an amount of disease, e.g., cancer, DNA can be indicative that the disease, e.g., cancer, condition is worsening whereas a decrease in such DNA can be indicative that the condition is improving. Accordingly, the subject methods can include providing a disease diagnosis and/or treatment protocol based on the determined differences between the plurality of measurements.

[0074] Also, for a cancer of unknown primary origin (CUP), the identification of the cell type can help identify its primary origin, which can be key to providing an initial disease diagnosis and/or identifying the suitable treatments.

[0075] The subject methods can include detecting such as detecting the tissue(s) of origin of, without limitation: carcinoma, lymphoma, blastoma, sarcoma, and leukemia or lymphoid malignancies. Particular examples of cancers can include, but are not limited to: liver cancer (e.g., hepatocellular carcinoma (FICC)), hepatoma, hepatic carcinoma, bladder cancer (e.g., urothelial bladder cancer), testicular (germ cell tumor) cancer, breast cancer (e.g., HER2 positive, HER2 negative, and triple negative breast cancer), brain cancer (e.g., astrocytoma, glioma (e.g., glioblastoma)), colon cancer, rectal cancer, colorectal cancer, endometrial or uterine carcinoma, salivary gland carcinoma, kidney or renal cancer (e.g., renal cell carcinoma, nephroblastoma or Wilms' tumor), prostate cancer, vulval cancer, squamous cell cancer (e.g., epithelial squamous cell cancer), skin carcinoma, melanoma, lung cancer, including small-cell lung cancer, non-small cell lung cancer (“NSCLC”), adenocarcinoma of the lung and squamous carcinoma of the lung, cancer of the peritoneum, gastric or stomach cancer including gastrointestinal cancer, pancreatic cancer (e.g., pancreatic ductal adenocarcinoma), cervical cancer, ovarian cancer (e.g., high grade serous ovarian carcinoma), thyroid cancer, anal carcinoma, penile carcinoma, head and neck cancer, esophageal carcinoma, and nasopharyngeal carcinoma (NPC). Further examples of cancers include, without limitation: fibrosarcoma, choriocarcinoma, laryngeal carcinomas, retinoblastoma, thecoma, arrhenoblastoma, hematologic malignancies, including but not limited to non-Hodgkin's lymphoma (NHL), multiple myeloma and acute hematologic malignancies, endometriosis, Kaposi's sarcoma, rhabdomyosarcoma, osteogenic sarcoma, leiomyosarcoma, urinary tract carcinomas, Schwannoma, oligodendroglioma, and neuroblastomas.

[0076] In some embodiments, cancer according to the subject disclosure can be uterine cancer, upper GI squamous cancer, all other upper GI cancers, thyroid cancer, sarcoma, urothelial renal cancer, all other renal cancers, prostate cancer, pancreatic cancer, ovarian cancer, neuroendocrine cancer, multiple myeloma, melanoma, lymphoma, small cell lung cancer, lung adenocarcinoma, all other lung cancers, leukemia, hepatobiliary carcinoma, hepatobiliary biliary cancer, head and neck cancer, colorectal cancer, cervical cancer, breast cancer, bladder cancer, anorectal cancer, or any combination thereof. Cancer according to the subject embodiments can also be anal cancer, esophageal cancer, head and neck cancer, liver/bile-duct cancer, lung cancer, ovarian cancer, pancreatic cancer, plasma cell neoplasm, stomach cancer, or any combination thereof. Cancer according to the subject embodiments can be thyroid cancer, melanoma, myeloid neoplasm, renal cancer, prostate cancer, breast cancer, uterine cancer, ovarian cancer, bladder cancer, urothelial cancer, cervical cancer, anorectal cancer, head & neck cancer, colorectal cancer, liver cancer, bile duct cancer, pancreatic cancer, gallbladder cancer, upper GI cancer, multiple myeloma, lymphoid neoplasm, lung cancer, or any combination thereof.

[0077] Various examples of clinical applications of the present technology are described in further detail below, with respects to example cell types and groups of cell types.

### A. Gastro-Intestinal Cells

[0078] The gastro-intestinal (GI) system, or the GI tract, is the tract from the mouth to the anus which includes all the organs of the digestive system in humans and other animals. Food taken in through the mouth is digested to extract nutrients and absorb energy, and the waste expelled as feces. Given their shared functionality, the various different types of cells and tissues in this system share some common molecular, including genetic and epigenetic, characteristics.

### A.1. Oral, Larynx and Esophageal Epithelial Cells

[0079] It is discovered herein that some genomic locations are uniformly under-methylated or over-methylated in oral, larynx and esophageal epithelial cells as compared to all other cell types in the human (see, e.g., Table A). For instance, the genomic sequences as provided in SEQ ID NO: 1-15, 16-90, 91-91, 92-101 or 102-125 (annotated with start and end locations on the respective chromosome) all have lower than 40% methylation percentages in oral, larynx or esophageal epithelial cells, and higher than 60% methylation percentages in all other cell types. Likewise, the genomic sequences as provided in SEQ ID NO: 126-133, 134-134 or 135-150 all have relatively higher methylation percentages (>60%) in oral, larynx or esophageal epithelial cells, and lower methylation percentages (<40%) in all other cell types.

TABLE A
Listing of Markers

| | | | SEQ ID NOs | |
|---|---|---|---|---|
| | | | of Markers | |
| Cell type(s) | M/U* | Ranking | From | To |
| Oral, Larynx and Esophageal epithelium | U | Most preferred-top | 1 | 15 |
| Oral, Larynx and Esophageal epithelium | U | Most preferred-extended | 16 | 90 |
| Oral, Larynx and Esophageal epithelium | U | Preferred-extended | 91 | 91 |
| Oral, Larynx and Esophageal epithelium | U | Selected-top | 92 | 101 |
| Oral, Larynx and Esophageal epithelium | U | Selected extended | 102 | 125 |
| Oral, Larynx and Esophageal epithelium | M | Most preferred | 126 | 133 |
| Oral, Larynx and Esophageal epithelium | M | Preferred | 134 | 134 |
| Oral, Larynx and Esophageal epithelium | M | Selected | 135 | 150 |
| Gastric Epithelium | U | Most preferred-top | 151 | 170 |
| Gastric Epithelium | U | Most preferred-extended | 171 | 330 |
| Gastric Epithelium | U | Preferred-extended | 331 | 335 |
| Gastric Epithelium | U | Selected-top | 336 | 340 |
| Gastric Epithelium | U | Selected-extended | 341 | 378 |
| Gastric Epithelium | M | Most preferred | 379 | 401 |
| Gastric Epithelium | M | Preferred | 402 | 402 |
| Gastric Epithelium | M | Selected | 403 | 428 |
| Small Intestine Epithelium | U | Most preferred-top | 429 | 446 |
| Small Intestine Epithelium | U | Most preferred-extended | 447 | 527 |
| Small Intestine Epithelium | U | Preferred-extended | 528 | 529 |
| Small Intestine Epithelium | U | Selected top | 530 | 536 |
| Small Intestine Epithelium | U | Selected-extended | 537 | 554 |
| Small Intestine Epithelium | M | Most preferred | 555 | 564 |
| Small Intestine Epithelium | M | Preferred | 565 | 565 |
| Small Intestine Epithelium | M | Selected | 566 | 579 |
| Colon Epithelium | U | Most preferred-top | 580 | 596 |
| Colon Epithelium | U | Most preferred-extended | 597 | 657 |
| Colon Epithelium | U | Preferred-extended | 658 | 660 |
| Colon Epithelium | U | Selected-top | 661 | 668 |
| Colon Epithelium | U | Selected-extended | 669 | 704 |
| Colon Epithelium | M | Most preferred | 705 | 715 |
| Colon Epithelium | M | Selected | 716 | 729 |
| Colon Fibroblasts | U | Most preferred-top | 730 | 732 |
| Colon Fibroblasts | M | Most preferred | 733 | 739 |
| Colon Fibroblasts | M | Selected | 740 | 741 |
| Gallbladder Epithelium | U | Most preferred-top | 742 | 758 |
| Gallbladder Epithelium | U | Most preferred-extended | 759 | 829 |
| Gallbladder Epithelium | U | Preferred-extended | 830 | 831 |
| Gallbladder Epithelium | U | Selected-top | 832 | 839 |
| Gallbladder Epithelium | U | Selected-extended | 840 | 867 |
| Gallbladder Epithelium | M | Most preferred | 868 | 875 |
| Gallbladder Epithelium | M | Selected | 876 | 876 |
| Liver Hepatocytes | U | Most preferred-top | 877 | 896 |
| Liver Hepatocytes | U | Most preferred-extended | 897 | 980 |
| Liver Hepatocytes | U | Preferred-top | 981 | 983 |
| Liver Hepatocytes | U | Preferred-extended | 984 | 986 |
| Liver Hepatocytes | U | Selected-top | 987 | 988 |
| Liver Hepatocytes | U | Selected-extended | 989 | 1002 |
| Liver Hepatocytes | M | Most preferred | 1003 | 1018 |
| Liver Hepatocytes | M | Preferred | 1019 | 1023 |
| Liver Hepatocytes | M | Selected | 1024 | 1027 |
| Pancreatic Acinar cells | U | Most preferred-top | 1028 | 1041 |
| Pancreatic Acinar cells | U | Most preferred-extended | 1042 | 1112 |
| Pancreatic Acinar cells | U | Preferred-extended | 1113 | 1116 |
| Pancreatic Acinar cells | U | Selected-top | 1117 | 1127 |
| Pancreatic Acinar cells | U | Selected-extended | 1128 | 1155 |
| Pancreatic Acinar cells | M | Most preferred | 1156 | 1161 |
| Pancreatic Acinar cells | M | Selected | 1162 | 1180 |
| Pancreatic Alpha cells | U | Most preferred-top | 1181 | 1198 |
| Pancreatic Alpha cells | U | Most preferred-extended | 1199 | 1282 |
| Pancreatic Alpha cells | U | Preferred-top | 1283 | 1284 |
| Pancreatic Alpha cells | U | Preferred-extended | 1285 | 1287 |
| Pancreatic Alpha cells | U | Selected-top | 1288 | 1292 |
| Pancreatic Alpha cells | U | Selected-extended | 1293 | 1306 |
| Pancreatic Alpha cells | M | Most preferred | 1307 | 1315 |
| Pancreatic Alpha cells | M | Preferred | 1316 | 1316 |
| Pancreatic Alpha cells | M | Selected | 1317 | 1331 |
| Pancreatic Beta cells | U | Most preferred-top | 1332 | 1351 |
| Pancreatic Beta cells | U | Most preferred-extended | 1352 | 1440 |
| Pancreatic Beta cells | U | Selected-top | 1441 | 1445 |
| Pancreatic Beta cells | U | Selected-extended | 1446 | 1460 |
| Pancreatic Beta cells | M | Most preferred | 1461 | 1471 |
| Pancreatic Beta cells | M | Selected | 1472 | 1485 |
| Pancreatic Delta cells | U | Most preferred-top | 1486 | 1508 |
| Pancreatic Delta cells | U | Most preferred-extended | 1509 | 1594 |
| Pancreatic Delta cells | U | Preferred-extended | 1595 | 1596 |
| Pancreatic Delta cells | U | Selected-top | 1597 | 1598 |
| Pancreatic Delta cells | U | Selected-extended | 1599 | 1613 |
| Pancreatic Delta cells | M | Most preferred | 1614 | 1624 |
| Pancreatic Delta cells | M | Preferred | 1625 | 1625 |
| Pancreatic Delta cells | M | Selected | 1626 | 1638 |
| Pancreatic Ductal cells | U | Most preferred-top | 1639 | 1658 |
| Pancreatic Ductal cells | U | Most preferred-extended | 1659 | 1742 |
| Pancreatic Ductal cells | U | Preferred-top | 1743 | 1743 |
| Pancreatic Ductal cells | U | Preferred-extended | 1744 | 1747 |
| Pancreatic Ductal cells | U | Selected-top | 1748 | 1751 |
| Pancreatic Ductal cells | U | Selected-extended | 1752 | 1767 |
| Pancreatic Ductal cells | M | Most preferred | 1768 | 1779 |
| Pancreatic Ductal cells | M | Selected | 1780 | 1792 |
| Endometrium Epithelium | U | Most preferred-extended | 1793 | 1864 |
| Endometrium Epithelium | U | Preferred-extended | 1865 | 1872 |
| Endometrium Epithelium | U | Selected-extended | 1873 | 1892 |
| Endometrium Epithelium | M | Most preferred | 1893 | 1905 |
| Endometrium Epithelium | M | Selected | 1906 | 1917 |
| Fallopian Epithelium | U | Most preferred-top | 1918 | 1937 |
| Fallopian Epithelium | U | Most preferred-extended | 1938 | 2022 |
| Fallopian Epithelium | U | Preferred-extended | 2023 | 2024 |
| Fallopian Epithelium | U | Selected-top | 2025 | 2029 |
| Fallopian Epithelium | U | Selected-extended | 2030 | 2042 |
| Fallopian Epithelium | M | Most preferred | 2043 | 2061 |
| Fallopian Epithelium | M | Selected | 2062 | 2067 |
| Kidney Epithelium | U | Most preferred-top | 2068 | 2080 |
| Kidney Epithelium | U | Most preferred-extended | 2081 | 2141 |
| Kidney Epithelium | U | Preferred-extended | 2142 | 2144 |
| Kidney Epithelium | U | Selected-top | 2145 | 2156 |
| Kidney Epithelium | U | Selected-extended | 2157 | 2194 |
| Kidney Epithelium | M | Most preferred | 2195 | 2209 |
| Kidney Epithelium | M | Selected | 2210 | 2219 |
| Bladder Epithelium | U | Most preferred-top | 2220 | 2233 |
| Bladder Epithelium | U | Most preferred-extended | 2234 | 2298 |
| Bladder Epithelium | U | Preferred-top | 2299 | 2299 |
| Bladder Epithelium | U | Preferred-extended | 2300 | 2303 |
| Bladder Epithelium | U | Selected-top | 2304 | 2313 |
| Bladder Epithelium | U | Selected-extended | 2314 | 2345 |
| Bladder Epithelium | M | Most preferred | 2346 | 2350 |
| Bladder Epithelium | M | Preferred | 2351 | 2351 |
| Bladder Epithelium | M | Selected | 2352 | 2370 |
| Prostate Epithelium | U | Most preferred-top | 2371 | 2389 |
| Prostate Epithelium | U | Most preferred-extended | 2390 | 2476 |
| Prostate Epithelium | U | Preferred-extended | 2477 | 2480 |
| Prostate Epithelium | U | Selected top | 2481 | 2486 |
| Prostate Epithelium | U | Selected-extended | 2487 | 2495 |
| Prostate Epithelium | M | Most preferred | 2496 | 2500 |
| Prostate Epithelium | M | Preferred | 2501 | 2501 |
| Prostate Epithelium | M | Selected | 2502 | 2520 |
| Breast Basal Epithelium | U | Most preferred-top | 2521 | 2536 |
| Breast Basal Epithelium | U | Most preferred-extended | 2537 | 2616 |
| Breast Basal Epithelium | U | Selected-top | 2617 | 2625 |
| Breast Basal Epithelium | U | Selected-extended | 2626 | 2651 |
| Breast Basal Epithelium | M | Most preferred | 2652 | 2659 |
| Breast Basal Epithelium | M | Selected | 2660 | 2676 |
| Breast Luminal Epithelium | U | Most preferred-top | 2677 | 2688 |
| Breast Luminal Epithelium | U | Most preferred-extended | 2689 | 2748 |
| Breast Luminal Epithelium | U | Preferred-extended | 2749 | 2749 |
| Breast Luminal Epithelium | U | Selected top | 2750 | 2762 |
| Breast Luminal Epithelium | U | Selected-extended | 2763 | 2802 |
| Breast Luminal Epithelium | M | Most preferred | 2803 | 2815 |
| Breast Luminal Epithelium | M | Preferred | 2816 | 2816 |
| Breast Luminal Epithelium | M | Selected | 2817 | 2827 |
| Lung Alveolar Epithelium | U | Most preferred-top | 2828 | 2838 |
| Lung Alveolar Epithelium | U | Most preferred-extended | 2839 | 2899 |
| Lung Alveolar Epithelium | U | Preferred-top | 2900 | 2900 |
| Lung Alveolar Epithelium | U | Preferred-extended | 2901 | 2903 |
| Lung Alveolar Epithelium | U | Selected-top | 2904 | 2916 |
| Lung Alveolar Epithelium | U | Selected-extended | 2917 | 2953 |
| Lung Alveolar Epithelium | M | Most preferred | 2954 | 2960 |
| Lung Alveolar Epithelium | M | Selected | 2961 | 2978 |
| Lung Bronchial Epithelium | U | Most preferred-top | 2979 | 3001 |
| Lung Bronchial Epithelium | U | Most preferred-extended | 3002 | 3087 |
| Lung Bronchial Epithelium | U | Preferred-extended | 3088 | 3090 |
| Lung Bronchial Epithelium | U | Selected-top | 3091 | 3092 |
| Lung Bronchial Epithelium | U | Selected-extended | 3093 | 3104 |
| Lung Bronchial Epithelium | M | Most preferred | 3105 | 3109 |
| Lung Bronchial Epithelium | M | Selected | 3110 | 3129 |
| Heart Cardiomyocytes | U | Most preferred-top | 3130 | 3147 |
| Heart Cardiomyocytes | U | Most preferred-extended | 3148 | 3223 |
| Heart Cardiomyocytes | U | Selected-top | 3224 | 3230 |
| Heart Cardiomyocytes | U | Selected-extended | 3231 | 3254 |
| Heart Cardiomyocytes | M | Most preferred | 3255 | 3266 |
| Heart Cardiomyocytes | M | Preferred | 3267 | 3267 |
| Heart Cardiomyocytes | M | Selected | 3268 | 3279 |
| Heart Fibroblasts | U | Most preferred-top | 3280 | 3300 |
| Heart Fibroblasts | U | Most preferred-extended | 3301 | 3394 |
| Heart Fibroblasts | U | Preferred-extended | 3395 | 3396 |
| Heart Fibroblasts | U | Selected-top | 3397 | 3400 |
| Heart Fibroblasts | U | Selected-extended | 3401 | 3407 |
| Heart Fibroblasts | M | Most preferred | 3408 | 3414 |
| Heart Fibroblasts | M | Preferred | 3415 | 3416 |
| Heart Fibroblasts | M | Selected | 3417 | 3432 |
| Vascular Endothelial cells | U | Most preferred-top | 3433 | 3456 |
| Vascular Endothelial cells | U | Most preferred-extended | 3457 | 3547 |
| Vascular Endothelial cells | U | Preferred-extended | 3548 | 3550 |
| Vascular Endothelial cells | U | Selected-top | 3551 | 3551 |
| Vascular Endothelial cells | U | Selected-extended | 3552 | 3559 |
| Vascular Endothelial cells | M | Most preferred | 3560 | 3579 |
| Vascular Endothelial cells | M | Preferred | 3580 | 3580 |
| Vascular Endothelial cells | M | Selected | 3581 | 3584 |
| Blood B cells | U | Most preferred-top | 3585 | 3607 |
| Blood B cells | U | Most preferred-extended | 3608 | 3701 |
| Blood B cells | U | Preferred-extended | 3702 | 3702 |
| Blood B cells | U | Selected-top | 3703 | 3704 |
| Blood B cells | U | Selected-extended | 3705 | 3712 |
| Blood B cells | M | Most preferred | 3713 | 3733 |
| Blood B cells | M | Selected | 3734 | 3737 |
| Blood Granulocytes | U | Most preferred-top | 3738 | 3758 |
| Blood Granulocytes | U | Most preferred-extended | 3759 | 3849 |
| Blood Granulocytes | U | Preferred-extended | 3850 | 3851 |
| Blood Granulocytes | U | Selected-top | 3852 | 3855 |
| Blood Granulocytes | U | Selected extended | 3856 | 3862 |
| Blood Granulocytes | M | Most preferred | 3863 | 3884 |
| Blood Granulocytes | M | Preferred | 3885 | 3885 |
| Blood Granulocytes | M | Selected | 3886 | 3886 |
| Blood Monocytes + Macrophages | U | Most preferred-top | 3887 | 3909 |
| Blood Monocytes + Macrophages | U | Most preferred-extended | 3910 | 3997 |
| Blood Monocytes + Macrophages | U | Preferred-extended | 3998 | 4000 |
| Blood Monocytes + Macrophages | U | Selected-top | 4001 | 4002 |
| Blood Monocytes + Macrophages | U | Selected-extended | 4003 | 4012 |
| Blood Monocytes + Macrophages | M | Most preferred | 4013 | 4036 |
| Blood Monocytes + Macrophages | M | Selected | 4037 | 4037 |
| Blood NK cells | U | Most preferred-top | 4038 | 4061 |
| Blood NK cells | U | Most preferred-extended | 4062 | 4146 |
| Blood NK cells | U | Preferred-extended | 4147 | 4148 |
| Blood NK cells | U | Selected top | 4149 | 4149 |
| Blood NK cells | U | Selected-extended | 4150 | 4162 |
| Blood NK cells | M | Most preferred | 4163 | 4184 |
| Blood NK cells | M | Selected | 4185 | 4187 |
| Blood T cells | U | Most preferred-top | 4188 | 4205 |
| Blood T cells | U | Most preferred-extended | 4206 | 4274 |
| Blood T cells | U | Preferred-top | 4275 | 4275 |
| Blood T cells | U | Preferred-extended | 4276 | 4276 |
| Blood T cells | U | Selected-top | 4277 | 4282 |
| Blood T cells | U | Selected-extended | 4283 | 4312 |
| Blood T cells | M | Most preferred | 4313 | 4322 |
| Blood T cells | M | Preferred | 4323 | 4323 |
| Blood T cells | M | Selected | 4324 | 4337 |
| Erythrocyte progenitor cells | U | Most preferred-top | 4338 | 4361 |
| Erythrocyte progenitor cells | U | Most preferred-extended | 4362 | 4449 |
| Erythrocyte progenitor cells | U | Preferred-extended | 4450 | 4453 |
| Erythrocyte progenitor cells | U | Selected-top | 4454 | 4454 |
| Erythrocyte progenitor cells | U | Selected-extended | 4455 | 4464 |
| Erythrocyte progenitor cells | M | Most preferred | 4465 | 4470 |
| Epidermal Keratinocytes | U | Most preferred-top | 4471 | 4492 |
| Epidermal Keratinocytes | U | Most preferred-extended | 4493 | 4573 |
| Epidermal Keratinocytes | U | Preferred-top | 4574 | 4574 |
| Epidermal Keratinocytes | U | Preferred-extended | 4575 | 4577 |
| Epidermal Keratinocytes | U | Selected-top | 4578 | 4579 |
| Epidermal Keratinocytes | U | Selected-extended | 4580 | 4595 |
| Epidermal Keratinocytes | M | Most preferred | 4596 | 4598 |
| Epidermal Keratinocytes | M | Preferred | 4599 | 4599 |
| Epidermal Keratinocytes | M | Selected | 4600 | 4618 |
| Dermal Fibroblasts | U | Most preferred-top | 4619 | 4641 |
| Dermal Fibroblasts | U | Most preferred-extended | 4642 | 4719 |
| Dermal Fibroblasts | U | Preferred-top | 4720 | 4720 |
| Dermal Fibroblasts | U | Preferred-extended | 4721 | 4727 |
| Dermal Fibroblasts | U | Selected-top | 4728 | 4728 |
| Dermal Fibroblasts | U | Selected-extended | 4729 | 4741 |
| Dermal Fibroblasts | M | Most preferred | 4742 | 4747 |
| Dermal Fibroblasts | M | Preferred | 4748 | 4748 |
| Dermal Fibroblasts | M | Selected | 4749 | 4766 |
| Osteoblasts | U | Most preferred-top | 4767 | 4783 |
| Osteoblasts | U | Most preferred-extended | 4784 | 4869 |
| Osteoblasts | U | Preferred-top | 4870 | 4872 |
| Osteoblasts | U | Preferred-extended | 4873 | 4877 |
| Osteoblasts | U | Selected top | 4878 | 4882 |
| Osteoblasts | U | Selected-extended | 4883 | 4891 |
| Osteoblasts | M | Most preferred | 4892 | 4897 |
| Osteoblasts | M | Selected | 4898 | 4916 |
| Skeletal Muscle cells | U | Most preferred-top | 4917 | 4937 |
| Skeletal Muscle cells | U | Most preferred-extended | 4938 | 5016 |
| Skeletal Muscle cells | U | Preferred-top | 5017 | 5017 |
| Skeletal Muscle cells | U | Preferred-extended | 5018 | 5023 |
| Skeletal Muscle cells | U | Selected-top | 5024 | 5026 |
| Skeletal Muscle cells | U | Selected-extended | 5027 | 5040 |
| Skeletal Muscle cells | M | Most preferred | 5041 | 5043 |
| Skeletal Muscle cells | M | Preferred | 5044 | 5045 |
| Skeletal Muscle cells | M | Selected | 5046 | 5064 |
| Smooth Muscle cells | U | Most preferred-top | 5065 | 5086 |
| Smooth Muscle cells | U | Most preferred-extended | 5087 | 5178 |
| Smooth Muscle cells | U | Preferred-top | 5179 | 5179 |
| Smooth Muscle cells | U | Preferred-extended | 5180 | 5181 |
| Smooth Muscle cells | U | Selected-top | 5182 | 5183 |
| Smooth Muscle cells | U | Selected-extended | 5184 | 5191 |
| Smooth Muscle cells | M | Most preferred | 5192 | 5204 |
| Smooth Muscle cells | M | Preferred | 5205 | 5207 |
| Smooth Muscle cells | M | Selected | 5208 | 5216 |
| Thyroid Epithelium | U | Most preferred-top | 5217 | 5230 |
| Thyroid Epithelium | U | Most preferred-extended | 5231 | 5284 |
| Thyroid Epithelium | U | Preferred-extended | 5285 | 5285 |
| Thyroid Epithelium | U | Selected-top | 5286 | 5296 |
| Thyroid Epithelium | U | Selected-extended | 5297 | 5343 |
| Thyroid Epithelium | M | Most preferred | 5344 | 5358 |
| Thyroid Epithelium | M | Preferred | 5359 | 5359 |
| Thyroid Epithelium | M | Selected | 5360 | 5368 |
| Adipocytes | U | Most preferred-top | 5369 | 5389 |
| Adipocytes | U | Most preferred-extended | 5390 | 5445 |
| Adipocytes | U | Preferred-top | 5446 | 5446 |
| Adipocytes | U | Selected-top | 5447 | 5449 |
| Adipocytes | U | Selected-extended | 5450 | 5453 |
| Adipocytes | M | Most preferred | 5454 | 5463 |
| Adipocytes | M | Preferred | 5464 | 5464 |
| Adipocytes | M | Selected | 5465 | 5470 |
| Neuron CNS | U | Most preferred-top | 5471 | 5488 |
| Neuron CNS | U | Most preferred-extended | 5489 | 5556 |
| Neuron CNS | U | Preferred-extended | 5557 | 5559 |
| Neuron CNS | U | Selected top | 5560 | 5566 |
| Neuron CNS | U | Selected-extended | 5567 | 5594 |
| Neuron CNS | M | Most preferred | 5595 | 5613 |
| Neuron CNS | M | Selected | 5614 | 5619 |
| Oligodendrocytes | U | Most preferred-top | 5620 | 5649 |
| Oligodendrocytes | U | Most preferred-extended | 5650 | 5721 |
| Oligodendrocytes | U | Preferred-extended | 5722 | 5724 |
| Oligodendrocytes | U | Selected-top | 5725 | 5744 |
| Oligodendrocytes | U | Selected-extended | 5745 | 5771 |
| Oligodendrocytes | M | Most preferred | 5772 | 5782 |
| Oligodendrocytes | M | Preferred | 5783 | 5783 |
| Oligodendrocytes | M | Selected | 5784 | 5796 |
| Neurons + Oligodendrocytes | U | Most preferred-extended | 5797 | 5870 |
| Neurons + Oligodendrocytes | U | Selected extended | 5871 | 5898 |
| Neurons + Oligodendrocytes | M | Most preferred | 5899 | 5911 |
| Neurons + Oligodendrocytes | M | Preferred | 5912 | 5912 |
| Neurons + Oligodendrocytes | M | Selected | 5913 | 5923 |
| Pancreatic Alpha + Beta + Delta cells | U | Most preferred-top | 5924 | 5935 |
| Pancreatic Alpha + Beta + Delta cells | U | Most preferred-extended | 5936 | 6011 |
| Pancreatic Alpha + Beta + Delta cells | U | Preferred-top | 6012. | 6012 |
| Pancreatic Alpha + Beta + Delta cells | U | Preferred-extended | 6013 | 6014 |
| Pancreatic Alpha + Beta + Delta cells | U | Selected-top | 6015 | 6026 |
| Pancreatic Alpha + Beta + Delta cells | U | Selected-extended | 6027 | 6050 |
| Pancreatic Alpha + Beta + Deita cells | M | Most preferred | 6051 | 6057 |
| Pancreatic Alpha + Beta + Delta cells | M | Selected | 6058 | 6075 |
| Breast Basal + Luminal Epithelium | U | Most preferred-top | 6076 | 6090 |
| Breast Basal + Luminal Epithelium | U | Most preferred-extended | 6091 | 6159 |
| Breast Basal + Luminal Epithelium | U | Preferred-top | 6160 | 6160 |
| Breast Basal + Luminal Epithelium | U | Preferred-extended | 6161 | 6162 |
| Breast Basal + Luminal Epithelium | U | Selected-top | 6163 | 6171 |
| Breast Basal + Luminal Epithelium | U | Selected-extended | 6172 | 6201 |
| Breast Basal + Luminal Epithelium | M | Most preferred | 6202 | 6206 |
| Breast Basal + Luminal Epithelium | M | Selected | 6207 | 6226 |
| Lung Alveolar + Bronchial cells | U | Most preferred-top | 6227 | 6243 |
| Lung Alveolar + Bronchial cells | U | Most preferred-extended | 6244 | 6326 |
| Lung Alveolar + Bronchial cells | U | Preferred-top | 6327 | 6327 |
| Lung Alveolar + Bronchial cells | U | Preferred-extended | 6328 | 6329 |
| Lung Alveolar + Bronchial cells | U | Selected-top | 6330 | 6336 |
| Lung Alveolar + Bronchial cells | U | Selected-extended | 6337 | 6352 |
| Lung Alveolar + Bronchial cells | M | Most preferred | 6353 | 6353 |
| Lung Alveolar + Bronchial cells | M | Selected | 6354 | 6365 |
| Fallopian + Ovary Epithelium | U | Most preferred-top | 6366 | 6399 |
| Fallopian + Ovary Epithelium | U | Most preferred-extended | 6400 | 6468 |
| Fallopian + Ovary Epithelium | U | Preferred-extended | 6469 | 6475 |
| Fallopian + Ovary Epithelium | U | Selected-top | 6476 | 6491 |
| Fallopian + Ovary Epithelium | U | Selected-extended | 6492 | 6515 |
| Fallopian + Ovary Epithelium | M | Most preferred | 6516 | 6527 |
| Fallopian + Ovary Epithelium | M | Selected | 6528 | 6540 |
| Gastric + Small Intes. + Colon Epithelium | U | Most preferred-top | 6541 | 6556 |
| Gastric + Small Intes. + Colon Epithelium | U | Preferred-top | 6557 | 6557 |
| Gastric + Small Intes. + Colon Epithelium | U | Selected-top | 6558 | 6565 |
| Gastric + Small Intes. Epithelium | U | Most preferred-top | 6566 | 6589 |
| Gastric + Small Intes. Epithelium | U | Most preferred-extended | 6590 | 6672 |
| Gastric + Small Intes. Epithelium | U | Preferred-extended | 6673 | 6673 |
| Gastric + Small Intes. Epithelium | U | Selected top | 6674 | 6674 |
| Gastric + Small Intes. Epithelium | U | Selected extended | 6675 | 6690 |
| Gastric + Small Intes. Epithelium | M | Preferred | 6691 | 6691 |
| Gastric + Small Intes. Epithelium | M | Selected | 6692 | 6694 |
| Small Intes. + Colon Epithelium | U | Most preferred-top | 6695 | 6702 |
| Small Intes. + Colon Epithelium | U | Most preferred-extended | 6703 | 6760 |
| Small Intes. + Colon Epithelium | U | Selected-top | 6761 | 6777 |
| Small Intes. + Colon Epithelium | U | Selected-extended | 6778 | 6820 |
| Small Intes. + Colon Epithelium | M | Most preferred | 6821 | 6825 |
| Small Intes. + Colon Epithelium | M | Selected | 6826 | 6845 |
| Colon + Heart Fibroblasts | U | Most preferred-top | 6846 | 6863 |
| Colon + Heart Fibroblasts | U | Most preferred-extended | 6864 | 6869 |
| Colon + Heart Fibroblasts | U | Preferred-top | 6870 | 6872 |
| Colon + Heart Fibroblasts | U | Selected-top | 6873 | 6876 |
| Colon + Heart Fibroblasts | U | Selected extended | 6877 | 6878 |
| Colon + Heart Fibroblasts | M | Most preferred | 6879 | 6890 |
| Colon + Heart Fibroblasts | M | Selected | 6891 | 6898 |
| Cardiomyocytes + Skeletal + Smooth | U | Most preferred-top | 6899 | 6906 |
| muscle cells | | | | |
| Cardiomyocytes + Skeletal + Smooth | U | Most preferred-extended | 6907 | 6907 |
| muscle cells | | | | |
| Cardiomyocytes + Skeletal + Smooth | U | Selected-top | 6908 | 6909 |
| muscle cells | | | | |
| Cardiomyocytes + Skeletal + Smooth | M | Most preferred | 6910 | 6911 |
| muscle cells | | | | |
| Skeletal + Smooth muscle cells | U | Most preferred-top | 6912 | 6929 |
| Skeletal + Smooth muscle cells | U | Most preferred-extended | 6930 | 6930 |
| Skeletal + Smooth muscle cells | U | Selected-top | 6931 | 6931 |
| Skeletal + Smooth muscle cells | M | Most preferred | 6932 | 6936 |
| Skeletal + Smooth muscle cells | M | Selected | 6937 | 6939 |
| Heart Cardiomyocytes + Fibroblasts | U | Most preferred-top | 6940 | 6959 |
| Heart Cardiomyocytes + Fibroblasts | U | Most preferred-extended | 6960 | 7045 |
| Heart Cardiomyocytes + Fibroblasts | U | Preferred-top | 7046 | 7046 |
| Heart Cardiomyocytes + Fibroblasts | U | Preferred-extended | 7047 | 7049 |
| Heart Cardiomyocytes + Fibroblasts | U | Selected-top | 7050 | 7053 |
| Heart Cardiomyocytes + Fibroblasts | U | Selected-extended | 7054 | 7065 |
| Heart Cardiomyocytes + Fibroblasts | M | Most preferred | 7066 | 7082 |
| Heart Cardiomyocytes + Fibroblasts | M | Selected | 7083 | 7090 |

*U: lower methylation (unmethylated) in the specific cell type and higher methylation in oilier cell types;
M: higher methylation (methylated) in the specific cell type and lower methylation in other cell types.

[0080] Each genomic sequence in the sequence listing (according to the human genome version hg19, Genome Reference Consortium Human Build 37 (GRCh37), published Feb. 27, 2009) represents DNA fragments that includes or overlaps with the genomic sequence. In some embodiments, a DNA fragment that includes a CpG cluster which can be used as methylation marker, includes at least a CpG site contained in a genomic sequence as defined in the sequence listing. In some embodiments, the DNA fragment includes at least two, three, four, five, six, seven, eight, nine, ten or more CpG sites contained in a genomic sequence as defined in the sequence listing.

[0081] The Sequence Listing is concurrently submitted in ASCII format and is hereby incorporated by reference in its entirety. A listing of all sequences, without the actual sequences, is provided in Table B. Each sequence (see example shown in Table C) is annotated with respect to its genomic location (e.g., chr9:119238427-119238709), nearby gene and location (e.g., intron of ASTN2) and region, the corresponding cell type (e.g., Oral, Larynx and Esophageal epithelium), whether it is under-methylated (U) or over-methylated (M) in the corresponding cell type, and average methylation frequency within the cell type versus all other cell types (e.g., 0.05:0.94).

TABLE B
Target Sequences

| SEQ ID NO: | Chr | start | end | Cell | W/I | Out | Genomic class | Gene | U/M |
|---|---|---|---|---|---|---|---|---|---|
| 1 | chr1 | 2323726581 | 232372668 | Oral, Larynx and Esophageal epithelium | 0.05 | 0.94 | Intergenic | SIPA1L2 | U |
| 2 | chr9 | 119238427 | 119238709 | Oral, Larynx and Esophageal epithelium | 0.05 | 0.94 | intron | ASTN2 | U |
| 3 | chr22 | 45557574 | 45557798 | Oral, Larynx and Esophageal epithelium | 0.03 | 0.91 | intron | LOC100506714 | U |
| 4 | chr4 | 69018630 | 69018724 | Oral, Larynx and Esophageal epithelium | 0.05 | 0.9 | Intergenic | TMPRSS11F | U |
| 5 | chr12 | 53251350 | 53251751 | Oral, Larynx and Esophageal epithelium | 0.07 | 0.9 | Intergenic | KRT78 | U |
| 6 | chr1 | 550960653 | 55096321 | Oral, Larynx and Esophageal epithelium | 0.08 | 0.88 | exon, intron | ACOT11 | U |
| 7 | chr7 | 110559652 | 110559954 | Oral, Larynx and Esophageal epithelium | 0.12 | 0.91 | intron | IMMP2L | U |
| 8 | chr14 | 99419301 | 99419516 | Oral, Larynx and Esophageal epithelium | 0.04 | 0.83 | Intergenic | C14orf177 | U |
| 9 | chr13 | 68460537 | 68460622 | Oral, Larynx and Esophageal epithelium | 0.1 | 0.88 | Intergenic | PCDH9 | U |
| 10 | chr10 | 124095969 | 124096178 | Oral, Larynx and Esophageal epithelium | 0.13 | 0.91 | exon | BTBD16 | U |
| 11 | chr1 | 249138696 | 249138854 | Oral, Larynx and Esophageal epithelium | 0.16 | 0.94 | exon | ZNF672 | U |
| 12 | chr11 | 128518761 | 128519110 | Oral, Larynx and Esophageal epithelium | 0.11 | 0.88 | Intergenic | FLI1 | U |
| 13 | chr5 | 92022171 | 9202323 | Oral, Larynx and Esophageal epithelium | 0.11 | 0.86 | exon | SEMA5A | U |
| 14 | chr11 | 130242997 | 130243057 | Oral, Larynx and Esophageal epithelium | 0.23 | 0.93 | Intergenic | ADAMTS8 | U |
| 15 | chr11 | 65680975 | 65681143 | Oral, Larynx and Esophageal epithelium | 0.21 | 0.87 | Intergenic | C11orf68 | U |
| 16 | chr22 | 45526552 | 45526623 | Oral, Larynx and Esophageal epithelium | 0.09 | 0.93 | Intergenic | LOC100506714 | U |
| 17 | chr1 | 156682901 | 156683132 | Oral, Larynx and Esophageal epithelium | 0.04 | 0.88 | Intergenic | CRABP2 | U |
| 18 | chr5 | 125932585 | 125932791 | Oral, Larynx and Esophageal epithelium | 0.08 | 0.89 | Intergenic | ALDH7A1 | U |
| 19 | chr18 | 9012779 | 9013019 | Oral, Larynx and Esophageal epithelium | 0.06 | 0.87 | Intergenic | NDUFV2 | U |
| 20 | chr3 | 1266507061 | 126650821 | Oral, Larynx and Esophageal epithelium | 0.13 | 0.93 | intron | CHCHD6 | U |
| 21 | chr15 | 43589375 | 43589552 | Oral, Larynx and Esophageal epithelium | 0.08 | 0.88 | intron | TGM7 | U |
| 22 | chr17 | 70698846 | 70699033 | Oral, Larynx and Esophageal epithelium | 0.08 | 0.88 | intron | SLC39A11 | U |
| 23 | chr15 | 67728831 | 67729070 | Oral, Larynx and Esophageal epithelium | 0.11 | 0.91 | intron | IQCH-AS1 | U |
| 24 | chr3 | 24511875 | 24512177 | Oral, Larynx and Esophageal epithelium | 0.04 | 0.84 | intron | THRB | U |
| 25 | chr3 | 591467741 | 59147199 | Oral, Larynx and Esophageal epithelium | 0.08 | 0.88 | Intergenic | C3orf67 | U |
| 26 | chr19 | 51862398 | 51862855 | Oral, Larynx and Esophageal epithelium | 0.09 | 0.89 | intron | ETFB | U |
| 27 | chr15 | 89035700 | 89035877 | Oral, Larynx and Esophageal epithelium | 0.07 | 0.86 | Intergenic | MRPS11 | U |
| 28 | chr20 | 49053090 | 49053397 | Oral, Larynx and Esophageal epithelium | 0.08 | 0.87 | Intergenic | PTPN1 | U |
| 29 | chr15 | 44197814 | 44198149 | Oral, Larynx and Esophageal epithelium | 0.13 | 0.92 | exon, intron | FRMD5, FRMD5 | U |
| 30 | chr2 | 17623091 | 17623243 | Oral, Larynx and Esophageal epithelium | 0.12 | 0.9 | Intergenic | RAD51AP2 | U |
| 31 | chr8 | 365545681 | 36554809 | Oral, Larynx and Esophageal epithelium | 0.04 | 0.82 | Intergenic | KCNU1 | U |
| 32 | chr16 | 84438956 | 84439252 | Oral, Larynx and Esophageal epithelium | 0.09 | 0.87 | intron | ATP2C2 | U |
| 33 | chr10 | 1160741173 | 116074458 | Oral, Larynx and Esophageal epithelium | 0.09 | 0.87 | intron | AFAP1L2 | U |
| 34 | chr12 | 31831608 | 31832041 | Oral, Larynx and Esophageal epithelium | 0.11 | 0.89 | intron | AMN1 | U |
| 35 | chr9 | 126114492 | 126114599 | Oral, Larynx and Esophageal epithelium | 0.08 | 0.84 | Intergenic | CRB2 | U |
| 36 | chr3 | 126650914 | 126651054 | Oral, Larynx and Esophageal epithelium | 0.13 | 0.89 | intron | CHCHD6 | U |
| 37 | chr15 | 43388602 | 43388802 | Oral, Larynx and Esophageal epithelium | 0.17 | 0.93 | intron | UBR1 | U |
| 38 | chr13 | 101197929 | 101198167 | Oral, Larynx and Esophageal epithelium | 0.13 | 0.89 | intron | GGACT | U |
| 39 | chr1 | 23583336 | 23583588 | Oral, Larynx and Esophageal epithelium | 0.15 | 0.91 | Intergenic | HTR1D | U |
| 40 | chr1 | 45542837 | 45543022 | Oral, Larynx and Esophageal epithelium | 0.12 | 0.87 | intron | ZSWIM5 | U |
| 41 | chr5 | 135370936 | 135371140 | Oral, Larynx and Esophageal epithelium | 0.11 | 0.86 | intron | TGFBI | U |
| 42 | chr4 | 113338667 | 113339055 | Oral, Larynx and Esophageal epithelium | 0.15 | 0.9 | intron | ALPK1 | U |
| 43 | chr16 | 18938831 | 18938862 | Oral, Larynx and Esophageal epithelium | 0.07 | 0.81 | Intergenic | SMG1 | U |
| 44 | chr11 | 16799587 | 16799678 | Oral, Larynx and Esophageal epithelium | 0.15 | 0.89 | Intergenic | C11orf58 | U |
| 45 | chr16 | 8850737 | 8850920 | Oral, Larynx and Esophageal epithelium | 0.12 | 0.86 | intron | ABAT | U |
| 46 | chr4 | 13587143 | 13587548 | Oral, Larynx and Esophageal epithelium | 0.14 | 0.88 | intron | BOD1L1 | U |
| 47 | chr5 | 18993241 | 18993458 | Oral, Larynx and Esophageal epithelium | 0.08 | 0.81 | Intergenic | CDH18 | U |
| 48 | chr5 | 167431793 | 167432185 | Oral, Larynx and Esophageal epithelium | 0.06 | 0.79 | intron | TENM2 | U |
| 49 | chr5 | 171042175 | 171042260 | Oral, Larynx and Esophageal epithelium | 0.11 | 0.83 | Intergenic | FGF18 | U |
| 50 | chr4 | 543478651 | 54348009 | Oral, Larynx and Esophageal epithelium | 0.2 | 0.92 | exon | LNX1 | U |
| 51 | chr12 | 116825665 | 116825821 | Oral, Larynx and Esophageal epithelium | 0.15 | 0.87 | Intergenic | MIR4472-2 | U |
| 52 | chr1 | 241419066 | 241419258 | Oral, Larynx and Esophageal epithelium | 0.16 | 0.88 | intron | RGS7 | U |
| 53 | chr7 | 105391774 | 105392015 | Oral, Larynx and Esophageal epithelium | 0.16 | 0.88 | intron | ATXN7L1 | U |
| 54 | chr19 | 39766779 | 39767161 | Oral, Larynx and Esophageal epithelium | 0.14 | 0.86 | Intergenic | IFNL2 | U |
| 55 | chr6 | 158619634 | 158619734 | Oral, Larynx and Esophageal epithelium | 0.19 | 0.9 | exon | GTF2H5 | U |
| 56 | chr6 | 83781122 | 83781223 | Oral, Larynx and Esophageal epithelium | 0.18 | 0.89 | intron | DOPEY1 | U |
| 57 | chr6 | 783511 | 783625 | Oral, Larynx and Esophageal epithelium | 0.15 | 0.86 | Intergenic | EXOC2 | U |
| 58 | chr8 | 134687594 | 134687716 | Oral, Larynx and Esophageal epithelium | 0.2 | 0.91 | Intergenic | ST3GAL1 | U |
| 59 | chr17 | 49227132 | 49227351 | Oral, Larynx and Esophageal epithelium | 0.18 | 0.89 | Intergenic | NME1-NME2 | U |
| 60 | chr11 | 60902945 | 60903186 | Oral, Larynx and Esophageal epithelium | 0.18 | 0.89 | intron | VPS37C | U |
| 61 | chr1 | 113740846 | 113741106 | Oral, Larynx and Esophageal epithelium | 0.12 | 0.83 | exon | LOC643441 | U |
| 62 | chr2 | 99649323 | 99649435 | Oral, Larynx and Esophageal epithelium | 0.19 | 0.88 | intron | TSGA10 | U |
| 63 | chr16 | 2998130 | 2998389 | Oral, Larynx and Esophageal epithelium | 0.15 | 0.84 | intron | FLYWCH1 | U |
| 64 | chr1 | 9426821 | 9427135 | Oral, Larynx and Esophageal epithelium | 0.21 | 0.9 | intron | SPSB1 | U |
| 65 | chr14 | 86143084 | 86143161 | Oral, Larynx and Esophageal epithelium | 0.21 | 0.89 | Intergenic | FLRT2 | U |
| 66 | chr16 | 1742392 | 1742538 | Oral, Larynx and Esophageal epithelium | 0.22 | 0.9 | intron | HN1L | U |
| 67 | chr3 | 58455461 | 58455629 | Oral, Larynx and Esophageal epithelium | 0.18 | 0.86 | Intergenic | KCTD6 | U |
| 68 | chr7 | 120066865 | 120066978 | Oral, Larynx and Esophageal epithelium | 0.25 | 0.92 | intron | KCND2 | U |
| 69 | chrX | 37096601 | 3709819 | Oral, Larynx and Esophageal epithelium | 0.2 | 0.87 | Intergenic | LOC389906 | U |
| 70 | chr16 | 18045493 | 1804755 | Oral, Larynx and Esophageal epithelium | 0.22 | 0.89 | intron | MAPK8IP3 | U |
| 71 | chr19 | 19081147 | 19081494 | Oral, Larynx and Esophageal epithelium | 0.19 | 0.86 | Intergenic | HOMER3 | U |
| 72 | chr5 | 159717995 | 159718380 | Oral, Larynx and Esophageal epithelium | 0.27 | 0.94 | intron | CCNJL | U |
| 73 | chr10 | 15414241 | 1541859 | Oral, Larynx and Esophageal epithelium | 0.15 | 0.82 | intron | ADARB2 | U |
| 74 | chrX | 36011273 | 3601616 | Oral, Larynx and Esophageal epithelium | 0.19 | 0.86 | intron | PRKX | U |
| 75 | chr17 | 378979983 | 37898156 | Oral, Larynx and Esophageal epithelium | 0.19 | 0.85 | intron | GRB7 | U |
| 76 | chr2 | 72255311 | 72255585 | Oral, Larynx and Esophageal epithelium | 0.25 | 0.91 | Intergenic | CYP26B1 | U |
| 77 | chr1 | 112090880 | 112091243 | Oral, Larynx and Esophageal epithelium | 0.22 | 0.88 | intron | ADORA3 | U |
| 78 | chr16 | 23548205 | 23548633 | Oral, Larynx and Esophageal epithelium | 0.25 | 0.91 | intron | EARS2 | U |
| 79 | chr19 | 11630205 | 11630292 | Oral, Larynx and Esophageal epithelium | 0.28 | 0.93 | intron | ECSIT | U |
| 80 | chr6 | 134717812 | 134718235 | Oral, Larynx and Esophageal epithelium | 0.28 | 0.93 | Intergenic | LOC154092 | U |
| 81 | chr17 | 36874349 | 36874501 | Oral, Larynx and Esophageal epithelium | 0.27 | 0.91 | exon, intron | MLLT6, MLLT6 | U |
| 82 | chr21 | 188761433 | 18876378 | Oral, Larynx and Esophageal epithelium | 0.26 | 0.89 | Intergenic | CXADR | U |
| 83 | chr10 | 73629716 | 73630010 | Oral, Larynx and Esophageal epithelium | 0.26 | 0.89 | Intergenic | PSAP | U |
| 84 | chr7 | 101651783 | 101652111 | Oral, Larynx and Esophageal epithelium | 0.23 | 0.85 | intron | CUX1 | U |
| 85 | chr2 | 1604579613 | 160458125 | Oral, Larynx and Esophageal epithelium | 0.32 | 0.93 | intron | BAZ2B | U |
| 86 | chr10 | 73630048 | 73630380 | Oral, Larynx and Esophageal epithelium | 0.29 | 0.9 | Intergenic | PSAP | U |
| 87 | chr22 | 46980960 | 46981213 | Oral, Larynx and Esophageal epithelium | 0.28 | 0.88 | Intergenic | GRAMD4 | U |
| 88 | chr19 | 6442589 | 6442809 | Oral, Larynx and Esophageal epithelium | 0.32 | 0.91 | intron | SLC25A23 | U |
| 89 | chr11 | 66881355 | 66881491 | Oral, Larynx and Esophageal epithelium | 0.31 | 0.87 | Intergenic | KDM2A | U |
| 90 | chr4 | 109465282 | 109465506 | Oral, Larynx and Esophageal epithelium | 0.34 | 0.88 | intron | RPL34-AS1 | U |
| 91 | chr20 | 51105019 | 51105183 | Oral, Larynx and Esophageal epithelium | 0.24 | 0.88 | Intergenic | ZFP64 | U |
| 92 | chr9 | 139546439 | 139546629 | Oral, Larynx and Esophageal epithelium | 0.03 | 0.91 | Intergenic | EGFL7 | U |
| 93 | chr7 | 1016525691 | 101652819 | Oral, Larynx and Esophageal epithelium | 0.06 | 0.92 | intron | CUX1 | U |
| 94 | chr22 | 47436553 | 47436863 | Oral, Larynx and Esophageal epithelium | 0.08 | 0.93 | intron | TBC1D22A | U |
| 95 | chr9 | 107109138 | 107109514 | Oral, Larynx and Esophageal epithelium | 0.06 | 0.9 | Intergenic | OR13F1 | U |
| 96 | chr20 | 44416524 | 44416740 | Oral, Larynx and Esophageal epithelium | 0.06 | 0.89 | exon, intron | WFDC3 | U |
| 97 | chr22 | 50954593 | 50954993 | Oral, Larynx and Esophageal epithelium | 0.09 | 0.89 | intron | NCAPH2 | U |
| 98 | chr2 | 65251128 | 65251226 | Oral, Larynx and Esophageal epithelium | 0.14 | 0.93 | TTS | SLC1A4 | U |
| 99 | chr2 | 121550957 | 121551277 | Oral, Larynx and Esophageal epithelium | 0.09 | 0.86 | Intergenic | GLI2 | U |
| 100 | chr22 | 336564653 | 33656602 | Oral, Larynx and Esophageal epithelium | 0.07 | 0.79 | Intergenic | MIR4764 | U |
| 101 | chr16 | 215692071 | 21569364 | Oral, Larynx and Esophageal epithelium | 0.23 | 0.9 | Intergenic | SLC7ASP2 | U |
| 102 | chr15 | 31289788 | 31290120 | Oral, Larynx and Esophageal epithelium | 0.1 | 0.94 | Intergenic | MTMR10 | U |
| 103 | chr2 | 2176744223 | 217674498 | Oral, Larynx and Esophageal epithelium | 0.09 | 0.92 | Intergenic | TNP1 | U |
| 104 | chr19 | 19214027 | 19214234 | Oral, Larynx and Esophageal epithelium | 0.06 | 0.89 | intron | SLC25A42 | U |
| 105 | chr9 | 88048026 | 88048312 | Oral, Larynx and Esophageal epithelium | 0.03 | 0.86 | Intergenic | AGTPBP1 | U |
| 106 | chr16 | 11342023 | 11342315 | Oral, Larynx and Esophageal epithelium | 0.03 | 0.86 | Intergenic | SOCS1 | U |
| 107 | chr22 | 24976072 | 24976253 | Oral, Larynx and Esophageal epithelium | 0.03 | 0.85 | Intergenic | GGT1 | U |
| 108 | chr7 | 5692480 | 5692793 | Oral, Larynx and Esophageal epithelium | 0.07 | 0.89 | intron | RNF216 | U |
| 109 | chr6 | 17575539 | 17575726 | Oral, Larynx and Esophageal epithelium | 0.07 | 0.88 | Intergenic | FAM8A1 | U |
| 110 | chr14 | 74849506 | 74849735 | Oral, Larynx and Esophageal epithelium | 0.09 | 0.88 | Intergenic | VRTN | U |
| 111 | chr16 | 39984213 | 3998887 | Oral, Larynx and Esophageal epithelium | 0.12 | 0.91 | Intergenic | CREBBP | U |
| 112 | chr13 | 113105830 | 113105972 | Oral, Larynx and Esophageal epithelium | 0.14 | 0.91 | Intergenic | SPACA7 | U |
| 113 | chr4 | 184554422 | 184554639 | Oral, Larynx and Esophageal epithelium | 0.16 | 0.93 | Intergenic | RWDD4 | U |
| 114 | chr4 | 184754711 | 184754932 | Oral, Larynx and Esophageal epithelium | 0.09 | 0.86 | Intergenic | STOX2 | U |
| 115 | chr2 | 190369207 | 190369538 | Oral, Larynx and Esophageal epithelium | 0.1 | 0.86 | Intergenic | WDR75 | U |
| 116 | chr20 | 35858645 | 35859093 | Oral, Larynx and Esophageal epithelium | 0.14 | 0.9 | intron | RPN2 | U |
| 117 | chr20 | 31649647 | 31649945 | Oral, Larynx and Esophageal epithelium | 0.1 | 0.82 | intron | BPIFB3 | U |
| 118 | chr14 | 74513552 | 74513683 | Oral, Larynx and Esophageal epithelium | 0.21 | 0.91 | intron | CCDC176 | U |
| 119 | chr20 | 33144418 | 33144780 | Oral, Larynx and Esophageal epithelium | 0.21 | 0.9 | intron | MAP1LC3A | U |
| 120 | chr2 | 47094735 | 47095109 | Oral, Larynx and Esophageal epithelium | 0.22 | 0.92 | Intergenic | LOC100134259 | U |
| 121 | chr4 | 1782780013 | 178278459 | Oral, Larynx and Esophageal epithelium | 0.21 | 0.9 | intron | NEIL3 | U |
| 122 | chr1 | 271832691 | 27183618 | Oral, Larynx and Esophageal epithelium | 0.19 | 0.86 | Intergenic | SFN | U |
| 123 | chr20 | 358576683 | 35858009 | Oral, Larynx and Esophageal epithelium | 0.24 | 0.9 | intron | RPN2 | U |
| 124 | chr6 | 16323477 | 16323635 | Oral, Larynx and Esophageal epithelium | 0.21 | 0.83 | intron | ATXN1 | U |
| 125 | chr22 | 18287102 | 18287302 | Oral, Larynx and Esophageal epithelium | 0.27 | 0.85 | intron | MICAL3 | U |
| 126 | chr4 | 86747319 | 86747660 | Oral, Larynx and Esophageal epithelium | 0.7 | 0.14 | intron | ARHGAP24 | M |
| 127 | chr5 | 139030310 | 139030623 | Oral, Larynx and Esophageal epithelium | 0.61 | 0.09 | intron | CXXC5 | M |
| 128 | chr16 | 1970516 | 1970659 | Oral, Larynx and Esophageal epithelium | 0.74 | 0.26 | Intergenic | HS3ST6 | M |
| 129 | chr8 | 94995343 | 94995468 | Oral, Larynx and Esophageal epithelium | 0.66 | 0.21 | Intergenic | PDP1 | M |
| 130 | chr1 | 226187637 | 226187770 | Oral, Larynx and Esophageal epithelium | 0.58 | 0.14 | promoter-TSS | SDE2 | M |
| 131 | chr19 | 52223282 | 52223427 | Oral, Larynx and Esophageal epithelium | 0.59 | 0.2 | intron | HAS1 | M |
| 132 | chr6 | 1330893223 | 133089520 | Oral, Larynx and Esophageal epithelium | 0.61 | 0.25 | Intergenic | VNN2 | M |
| 133 | chr21 | 43199238 | 43199497 | Oral, Larynx and Esophageal epithelium | 0.52 | 0.18 | Intergenic | RIPK4 | M |
| 134 | chr8 | 38299962 | 38300250 | Oral, Larynx and Esophageal epithelium | 0.57 | 0.13 | intron | FGFR1 | M |
| 135 | chr3 | 181421265 | 181421663 | Oral, Larynx and Esophageal epithelium | 0.79 | 0.12 | intron | SOX2-OT | M |
| 136 | chr20 | 55500006 | 55500149 | Oral, Larynx and Esophageal epithelium | 0.8 | 0.16 | Intergenic | TFAP2C | M |
| 137 | chr11 | 78673053 | 78673213 | Oral, Larynx and Esophageal epithelium | 0.81 | 0.19 | intron | TENM4 | M |
| 138 | chr17 | 80452508 | 80452915 | Oral, Larynx and Esophageal epithelium | 0.66 | 0.1 | Intergenic | FOXK2 | M |
| 139 | chr17 | 48049945 | 48049980 | Oral, Larynx and Esophageal epithelium | 0.73 | 0.19 | promoter-TSS | DLX4 | M |
| 140 | chr17 | 48050244 | 48050304 | Oral, Larynx and Esophageal epithelium | 0.72 | 0.2 | exon | DLX4 | M |
| 141 | chr9 | 96715977 | 96716101 | Oral, Larynx and Esophageal epithelium | 0.75 | 0.23 | intron | BARX1 | M |
| 142 | chr17 | 53341243 | 53341566 | Oral, Larynx and Esophageal epithelium | 0.65 | 0.13 | promoter-TSS, Interg [symbol] | HLF, HLF | M |
| 143 | chr16 | 3017432 | 3017558 | Oral, Larynx and Esophageal epithelium | 0.67 | 0.17 | intron, exon | KREMEN2, KREMEN2 | M |
| 144 | chr16 | 68676804 | 68676935 | Oral, Larynx and Esophageal epithelium | 0.62 | 0.13 | Intergenic | CDH3 | M |
| 145 | chr17 | 48050048 | 48050197 | Oral, Larynx and Esophageal epithelium | 0.63 | 0.15 | promoter-TSS | DLX4 | M |
| 146 | chr9 | 975762 | 975857 | Oral, Larynx and Esophageal epithelium | 0.72 | 0.25 | Intergenic | DMRT3 | M |
| 147 | chr13 | 95354825 | 95354866 | Oral, Larynx and Esophageal epithelium | 0.65 | 0.19 | Intergenic | SOX21 | M |
| 148 | chr21 | 28337857 | 28337912 | Oral, Larynx and Esophageal epithelium | 0.66 | 0.21 | exon | ADAMTS5 | M |
| 149 | chr9 | 96709470 | 96709768 | Oral, Larynx and Esophageal epithelium | 0.6 | 0.16 | Intergenic | BARX1 | M |
| 150 | chr10 | 102898947 | 102899157 | Oral, Larynx and Esophageal epithelium | 0.61 | 0.18 | Intergenic | TLX1 | M |
| 151 | chr6 | 126336351 | 126336655 | Gastric Epithelium | 0.05 | 0.97 | intron | TRMT11 | U |
| 152 | chr5 | 1396274463 | 139627765 | Gastric Epithelium | 0.03 | 0.95 | intron | PFDN1 | U |
| 153 | chr6 | 119154681 | 119155026 | Gastric Epithelium | 0.01 | 0.91 | intron | MCM9 | U |
| 154 | chr7 | 152166508 | 152166876 | Gastric Epithelium | 0.01 | 0.91 | Intergenic | LOC100128822 | U |
| 155 | chr2 | 232284718 | 232284780 | Gastric Epithelium | 0.06 | 0.95 | Intergenic | B3GNT7 | U |
| 156 | chr18 | 55321793 | 55321987 | Gastric Epithelium | 0.06 | 0.95 | intron | ATP8B1 | U |
| 157 | chr1 | 1508136163 | 150813721 | Gastric Epithelium | 0.05 | 0.93 | intron | ARNT | U |
| 158 | chr2 | 103095103 | 103095285 | Gastric Epithelium | 0.01 | 0.89 | intron | SLC9A4 | U |
| 159 | chr4 | 25304443 | 25304717 | Gastric Epithelium | 0.01 | 0.89 | Intergenic | ZCCHC4 | U |
| 160 | chr21 | 35738641 | 35739006 | Gastric Epithelium | 0.02 | 0.9 | intron | KCNE2 | U |
| 161 | chr3 | 30693303 | 30693494 | Gastric Epithelium | 0.06 | 0.93 | intron | TGFBR2 | U |
| 162 | chr21 | 35739053 | 35739403 | Gastric Epithelium | 0.04 | 0.91 | intron | KCNE2 | U |
| 163 | chr8 | 6595371 | 6595859 | Gastric Epithelium | 0.08 | 0.95 | intron | AGPAT5 | U |
| 164 | chr17 | 554292 | 554701 | Gastric Epithelium | 0.06 | 0.92 | intron | VPS53 | U |
| 165 | chr6 | 119150051 | 119150409 | Gastric Epithelium | 0.08 | 0.94 | exon | MCM9 | U |
| 166 | chr4 | 1364945 | 1365429 | Gastric Epithelium | 0.07 | 0.92 | intron | UVSSA | U |
| 167 | chr1 | 54805307 | 54805622 | Gastric Epithelium | 0.09 | 0.93 | intron | SSBP3 | U |
| 168 | chr13 | 22036153 | 22036385 | Gastric Epithelium | 0.1 | 0.93 | Intergenic | ZDHHC20 | U |
| 169 | chr1 | 32411721 | 32411803 | Gastric Epithelium | 0.17 | 0.96 | Intergenic | PTP4A2 | U |
| 170 | chr2 | 1128249101 | 112825170 | Gastric Epithelium | 0.16 | 0.94 | intron | TMEM87B | U |
| 171 | chr3 | 65168887 | 65168944 | Gastric Epithelium | 0.02 | 0.94 | Intergenic | MIR548A2 | U |
| 172 | chr12 | 77624848 | 77624911 | Gastric Epithelium | 0.01 | 0.93 | Intergenic | E2F7 | U |
| 173 | chr1 | 775703581 | 77570467 | Gastric Epithelium | 0.02 | 0.92 | intron | PIGK | U |
| 174 | chr1 | 41640685 | 41640931 | Gastric Epithelium | 0.01 | 0.91 | intron | SCMH1 | U |
| 175 | chr12 | 32651756 | 32651898 | Gastric Epithelium | 0.02 | 0.91 | Intergenic | FGD4 | U |
| 176 | chr3 | 137727159 | 137727360 | Gastric Epithelium | 0.02 | 0.91 | intron | CLDN18 | U |
| 177 | chr21 | 35736753 | 35736986 | Gastric Epithelium | 0.02 | 0.91 | intron | KCNE2 | U |
| 178 | chr21 | 35737943 | 35738215 | Gastric Epithelium | 0.01 | 0.9 | intron | KCNE2 | U |
| 179 | chr8 | 135939325 | 135939699 | Gastric Epithelium | 0.01 | 0.9 | Intergenic | MIR30D | U |
| 180 | chr20 | 58554277 | 58554745 | Gastric Epithelium | 0.02 | 0.91 | intron | CDH26 | U |
| 181 | chr20 | 51959785 | 51959856 | Gastric Epithelium | 0.02 | 0.9 | intron | TSHZ2 | U |
| 182 | chr11 | 77707568 | 77707699 | Gastric Epithelium | 0.03 | 0.91 | Intergenic | INTS4 | U |
| 183 | chr2 | 98376000 | 98376235 | Gastric Epithelium | 0.04 | 0.92 | exon | TMEM131 | U |
| 184 | chr13 | 74588468 | 74588895 | Gastric Epithelium | 0.04 | 0.92 | intron | KLF12 | U |
| 185 | chr5 | 127000250 | 127000320 | Gastric Epithelium | 0.01 | 0.88 | Intergenic | CTXN3 | U |
| 186 | chr4 | 184013404 | 184013610 | Gastric Epithelium | 0.07 | 0.94 | Intergenic | WWC2-AS2 | U |
| 187 | chr11 | 59303419 | 59303666 | Gastric Epithelium | 0.01 | 0.88 | Intergenic | OR4D9 | U |
| 188 | chr6 | 137024152 | 137024470 | Gastric Epithelium | 0.07 | 0.94 | intron | MAP3K5 | U |
| 189 | chr4 | 122607782 | 122608154 | Gastric Epithelium | 0.05 | 0.92 | intron | ANXA5 | U |
| 190 | chr11 | 47890596 | 47891033 | Gastric Epithelium | 0.04 | 0.91 | Intergenic | NUP160 | U |
| 191 | chr19 | 52683528 | 52684016 | Gastric Epithelium | 0.02 | 0.89 | Intergenic, Intergeni [symbol] | ZNF836, PPP2R1A | U |
| 192 | chr16 | 81295026 | 81295120 | Gastric Epithelium | 0.03 | 0.89 | intron | BCMO1 | U |
| 193 | chr1 | 38353963 | 38354186 | Gastric Epithelium | 0.06 | 0.92 | intron | INPP5B | U |
| 194 | chr12 | 80052815 | 80053053 | Gastric Epithelium | 0.09 | 0.95 | intron | PAWR | U |
| 195 | chr19 | 122692981 | 12269551 | Gastric Epithelium | 0.05 | 0.91 | Intergenic | ZNF625-ZNF20 | U |
| 196 | chr9 | 128467739 | 128468047 | Gastric Epithelium | 0.07 | 0.93 | intron | MAPKAP1 | U |
| 197 | chr1 | 235359359 | 235359698 | Gastric Epithelium | 0.07 | 0.93 | intron | ARID4B | U |
| 198 | chr6 | 130332560 | 130332959 | Gastric Epithelium | 0.07 | 0.93 | Intergenic | L3MBTL3 | U |
| 199 | chr1 | 246490876 | 246491294 | Gastric Epithelium | 0.07 | 0.93 | intron | SMYD3 | U |
| 200 | chr2 | 239252776 | 239253198 | Gastric Epithelium | 0.03 | 0.89 | intron | TRAF3IP1 | U |
| 201 | chr4 | 186492550 | 186492641 | Gastric Epithelium | 0.05 | 0.9 | Intergenic | PDLIM3 | U |
| 202 | chr2 | 52957376 | 52957515 | Gastric Epithelium | 0.09 | 0.94 | Intergenic | CHAC2 | U |
| 203 | chr7 | 98006036 | 98006197 | Gastric Epithelium | 0.02 | 0.87 | intron | BAIAP2L1 | U |
| 204 | chr13 | 34897662 | 34897830 | Gastric Epithelium | 0.03 | 0.88 | Intergenic | LINC00457 | U |
| 205 | chr3 | 194017474 | 194017652 | Gastric Epithelium | 0.07 | 0.92 | Intergenic | LOC100131551 | U |
| 206 | chr17 | 10704250 | 10704431 | Gastric Epithelium | 0.02 | 0.87 | intron | LINC00675 | U |
| 207 | chr10 | 490007 | 490215 | Gastric Epithelium | 0.07 | 0.92 | intron | DIP2C | U |
| 208 | chr2 | 128021537 | 128021766 | Gastric Epithelium | 0.05 | 0.9 | intron | ERCC3 | U |
| 209 | chr8 | 74278573 | 74278808 | Gastric Epithelium | 0.09 | 0.94 | Intergenic | STAU2-AS1 | U |
| 210 | chr4 | 25851481 | 25851741 | Gastric Epithelium | 0.04 | 0.89 | intron | SEL1L3 | U |
| 211 | chr16 | 30126072 | 30126338 | Gastric Epithelium | 0.04 | 0.89 | exon, intron | MAPK3, MAPK3 | U |
| 212 | chr4 | 25304099 | 25304397 | Gastric Epithelium | 0.05 | 0.91 | Intergenic | ZCCHC4 | U |
| 213 | chr6 | 41727035 | 41727454 | Gastric Epithelium | 0.02 | 0.87 | Intergenic | PGC | U |
| 214 | chr2 | 1583278583 | 158328298 | Gastric Epithelium | 0.04 | 0.89 | Intergenic | CYTIP | U |
| 215 | chr5 | 90287841 | 90288285 | Gastric Epithelium | 0.04 | 0.89 | intron | GPR98 | U |
| 216 | chr6 | 43630355 | 43630404 | Gastric Epithelium | 0.04 | 0.88 | intron | RSPH9 | U |
| 217 | chr3 | 8529090 | 8529169 | Gastric Epithelium | 0.06 | 0.9 | intron | LMCD1-AS1 | U |
| 218 | chr2 | 39017864 | 39018065 | Gastric Epithelium | 0.08 | 0.92 | Intergenic | GEMIN6 | U |
| 219 | chr15 | 42045333 | 42045534 | Gastric Epithelium | 0.06 | 0.9 | intron | MGA | U |
| 220 | chr2 | 11960587 | 11960862 | Gastric Epithelium | 0.07 | 0.91 | intron | LPIN1 | U |
| 221 | chr15 | 42149853 | 42150275 | Gastric Epithelium | 0.06 | 0.9 | exon, intron | SPT8N5, SPTBN5 | U |
| 222 | chr4 | 159964521 | 159964568 | Gastric Epithelium | 0.12 | 0.95 | Intergenic | C4orf45 | U |
| 223 | chr16 | 28984636 | 28984737 | Gastric Epithelium | 0.04 | 0.87 | Intergenic | SPNS1 | U |
| 224 | chr12 | 125410972 | 125411147 | Gastric Epithelium | 0.05 | 0.88 | Intergenic | MIR5188 | U |
| 225 | chr1 | 180988876 | 180989065 | Gastric Epithelium | 0.11 | 0.94 | intron | STX6 | U |
| 226 | chr14 | 93606446 | 93606669 | Gastric Epithelium | 0.02 | 0.85 | Intergenic | ITPK1 | U |
| 227 | chr19 | 38415210 | 38415464 | Gastric Epithelium | 0.07 | 0.9 | intron | SIPA1L3 | U |
| 228 | chr11 | 66120745 | 66121119 | Gastric Epithelium | 0.03 | 0.86 | Intergenic | B3GNT1 | U |
| 229 | chr3 | 29884926 | 29885392 | Gastric Epithelium | 0.06 | 0.89 | intron | RBMS3 | U |
| 230 | chr1 | 36354031 | 36354168 | Gastric Epithelium | 0.05 | 0.87 | exon | AGO1 | U |
| 231 | chr2 | 65413067 | 65413299 | Gastric Epithelium | 0.04 | 0.86 | Intergenic | ACTR2 | U |
| 232 | chr11 | 130515074 | 130515314 | Gastric Epithelium | 0.04 | 0.86 | Intergenic | C11orf44 | U |
| 233 | chr19 | 12416506 | 12416750 | Gastric Epithelium | 0.09 | 0.91 | Intergenic | ZNF44 | U |
| 234 | chr4 | 25304741 | 25305075 | Gastric Epithelium | 0.11 | 0.93 | Intergenic | ZCCHC4 | U |
| 235 | chr7 | 23380702 | 23381051 | Gastric Epithelium | 0.11 | 0.93 | intron | IGF2BP3 | U |
| 236 | chr11 | 16981380 | 16981822 | Gastric Epithelium | 0.02 | 0.84 | intron | PLEKHA7 | U |
| 237 | chr16 | 4253074 | 4253125 | Gastric Epithelium | 0.09 | 0.9 | exon, intron | SRL, SRL | U |
| 238 | chr1 | 160945988 | 160946061 | Gastric Epithelium | 0.11 | 0.92 | Intergenic | ITLN2 | U |
| 239 | chr4 | 85385908 | 85385981 | Gastric Epithelium | 0.08 | 0.89 | Intergenic | NKX6-1 | U |
| 240 | chr20 | 52682634 | 52682737 | Gastric Epithelium | 0.03 | 0.84 | intron | BCAS1 | U |
| 241 | chr17 | 380750741 | 38075221 | Gastric Epithelium | 0.1 | 0.91 | promoter-TSS | GSDMB | U |
| 242 | chr19 | 34933440 | 34933588 | Gastric Epithelium | 0.09 | 0.9 | intron | UBA2 | U |
| 243 | chr1 | 118189258 | 118189446 | Gastric Epithelium | 0.04 | 0.85 | Intergenic | FAM46C | U |
| 244 | chr3 | 1937569913 | 193757221 | Gastric Epithelium | 0.06 | 0.87 | Intergenic | LOC647323 | U |
| 245 | chr17 | 70409134 | 70409373 | Gastric Epithelium | 0.08 | 0.89 | intron | LINC00673 | U |
| 246 | chr12 | 122177926 | 122178189 | Gastric Epithelium | 0.1 | 0.91 | intron | TMEM120B | U |
| 247 | chr21 | 1713345 | 17133723 | Gastric Epithelium | 0.07 | 0.88 | intron | USP25 | U |
| 248 | chr1 | 617291013 | 61729405 | Gastric Epithelium | 0.12 | 0.93 | intron | NFIA | U |
| 249 | chr1 | 1586852 | 1587174 | Gastric Epithelium | 0.04 | 0.85 | intron | CDK11B | U |
| 250 | chr2 | 8427976 | 8428306 | Gastric Epithelium | 0.06 | 0.87 | intron | LINC00299 | U |
| 251 | chr1 | 67570737 | 67570839 | Gastric Epithelium | 0.09 | 0.89 | intron | C1orf141 | U |
| 252 | chr21 | 39899795 | 39899906 | Gastric Epithelium | 0.06 | 0.86 | intron | ERG | U |
| 253 | chr21 | 42504879 | 42505065 | Gastric Epithelium | 0.13 | 0.93 | Intergenic | LINC00323 | U |
| 254 | chr16 | 78883425 | 78883736 | Gastric Epithelium | 0.1 | 0.9 | intron | WWOK | U |
| 255 | chr16 | 75569829 | 75570175 | Gastric Epithelium | 0.07 | 0.87 | promoter-TSS, Interg [symbol] | CHST5, CHST5 | U |
| 256 | chr11 | 108055929 | 108056301 | Gastric Epithelium | 0.13 | 0.93 | intron | NPAT | U |
| 257 | chr3 | 33397874 | 33397945 | Gastric Epithelium | 0.14 | 0.93 | intron | FBXL2 | U |
| 258 | chr17 | 7904025 | 7904133 | Gastric Epithelium | 0.13 | 0.89 | Intergenic | GUCY2D | U |
| 259 | chr11 | 129742817 | 129742926 | Gastric Epithelium | 0.07 | 0.86 | exon | NFRKB | U |
| 260 | chr11 | 27617143 | 2761854 | Gastric Epithelium | 0.08 | 0.87 | intron | KONQ1 | U |
| 261 | chr18 | 47112271 | 47112453 | Gastric Epithelium | 0.08 | 0.87 | intron | LIPG | U |
| 262 | chr5 | 139642009 | 139642271 | Gastric Epithelium | 0.1 | 0.89 | intron | PFDN1 | U |
| 263 | chr1 | 110339894 | 110340165 | Gastric Epithelium | 0.1 | 0.89 | Intergenic | EPS8L3 | U |
| 264 | chr4 | 6958629 | 6958910 | Gastric Epithelium | 0.1 | 0.89 | intron | TBC1D14 | U |
| 265 | chr1 | 7738875 | 7739168 | Gastric Epithelium | 0.06 | 0.85 | intron | CAMTA1 | U |
| 266 | chr15 | 56737844 | 56738243 | Gastric Epithelium | 0.13 | 0.92 | TTS, intron | TEX9, MNS1 | U |
| 267 | chr20 | 62162500 | 62162591 | Gastric Epithelium | 0.03 | 0.81 | intron | PTK6 | U |
| 268 | chr6 | 41743174 | 41743288 | Gastric Epithelium | 0.13 | 0.91 | exon | FRS3 | U |
| 269 | chr6 | 47476304 | 47476438 | Gastric Epithelium | 0.07 | 0.85 | intron | CD2AP | U |
| 270 | chr6 | 345302313 | 34530402 | Gastric Epithelium | 0.12 | 0.9 | Intergenic | SPDEF | U |
| 271 | chr19 | 11995926 | 11996155 | Gastric Epithelium | 0.13 | 0.91 | Intergenic | ZNF69 | U |
| 272 | chr16 | 11359108 | 11359359 | Gastric Epithelium | 0.08 | 0.86 | Intergenic | TNP2 | U |
| 273 | chr3 | 619242011 | 61924583 | Gastric Epithelium | 0.14 | 0.92 | intron | PTPRG | U |
| 274 | chr15 | 38493152 | 38493607 | Gastric Epithelium | 0.11 | 0.89 | Intergenic | SPRED1 | U |
| 275 | chr19 | 1787588 | 1787677 | Gastric Epithelium | 0.04 | 0.81 | intron | ATP883 | U |
| 276 | chr15 | 99992318 | 99992424 | Gastric Epithelium | 0.14 | 0.91 | Intergenic | MEF2A | U |
| 277 | chr8 | 117703911 | 117704068 | Gastric Epithelium | 0.19 | 0.96 | intron | EIF3H | U |
| 278 | chr10 | 120931928 | 120932152 | Gastric Epithelium | 0.16 | 0.93 | intron | PRDX3 | U |
| 279 | chr19 | 105931543 | 10593276 | Gastric Epithelium | 0.15 | 0.91 | Intergenic | KEAP1 | U |
| 280 | chr3 | 194184924 | 194185088 | Gastric Epithelium | 0.17 | 0.93 | intron | ATP13A3 | U |
| 281 | chr8 | 39638417 | 39638589 | Gastric Epithelium | 0.08 | 0.84 | intron | ADAM2 | U |
| 282 | chr5 | 54813736 | 54813951 | Gastric Epithelium | 0.12 | 0.88 | intron | PPAP2A | U |
| 283 | chr3 | 196007281 | 196007517 | Gastric Epithelium | 0.13 | 0.86 | intron | PCYT1A | U |
| 284 | chr16 | 84599559 | 84599834 | Gastric Epithelium | 0.12 | 0.88 | exon | COTL1 | U |
| 285 | chr5 | 141560806 | 141561090 | Gastric Epithelium | 0.13 | 0.89 | Intergenic | NDFIP1 | U |
| 286 | chr22 | 49179647 | 49179852 | Gastric Epithelium | 0.05 | 0.8 | Intergenic | MIR4535 | U |
| 287 | chr5 | 149964103 | 149964516 | Gastric Epithelium | 0.13 | 0.85 | Intergenic | SYNPO | U |
| 288 | chr17 | 2710379 | 2710434 | Gastric Epithelium | 0.15 | 0.89 | intron | RAP1GAP2 | U |
| 289 | chr20 | 61005077 | 61005150 | Gastric Epithelium | 0.15 | 0.89 | Intergenic | RBBP8NL | U |
| 290 | chr1 | 163641818 | 163642065 | Gastric Epithelium | 0.18 | 0.92 | Intergenic | NUF2 | U |
| 291 | chr15 | 34654963 | 34655235 | Gastric Epithelium | 0.16 | 0.9 | exon, intron | LPCAT4, LPCAT4 | U |
| 292 | chr16 | 80737588 | 80737900 | Gastric Epithelium | 0.18 | 0.92 | intron | CDYL2 | U |
| 293 | chr1 | 232767194 | 232767531 | Gastric Epithelium | 0.12 | 0.86 | Intergenic | SIPA1L2 | U |
| 294 | chr17 | 46346042 | 46346172 | Gastric Epithelium | 0.09 | 0.82 | intron | SKAP1 | U |
| 295 | chr1 | 100443241 | 100443464 | Gastric Epithelium | 0.17 | 0.9 | intron | SLC35A3 | U |
| 296 | chr3 | 141945963 | 141946013 | Gastric Epithelium | 0.22 | 0.93 | Intergenic | GK5 | U |
| 297 | chr5 | 148991965 | 148992022 | Gastric Epithelium | 0.19 | 0.9 | intron | ARHGEF37 | U |
| 298 | chr3 | 47022705 | 47022847 | Gastric Epithelium | 0.11 | 0.82 | intron | NBEAL2 | U |
| 299 | chr5 | 7766437 | 7766579 | Gastric Epithelium | 0.17 | 0.88 | intron | ADCY2 | U |
| 300 | chr16 | 1445513 | 1445709 | Gastric Epithelium | 0.12 | 0.83 | intron | UNKL | U |
| 301 | chr5 | 35186960 | 35187169 | Gastric Epithelium | 0.18 | 0.89 | intron | PRLR | U |
| 302 | chr7 | 128693099 | 128693328 | Gastric Epithelium | 0.23 | 0.91 | intron | ENPO3 | U |
| 303 | chr6 | 131277389 | 131277448 | Gastric Epithelium | 0.24 | 0.94 | exon | EPB41L2 | U |
| 304 | chr1 | 80672272 | 80672333 | Gastric Epithelium | 0.21 | 0.91 | Intergenic | ELTD1 | U |
| 305 | chr12 | 122599860 | 122599964 | Gastric Epithelium | 0.24 | 0.94 | intron | MLXIP | U |
| 306 | chr2 | 28718991 | 28719286 | Gastric Epithelium | 0.18 | 0.88 | intron | PLB1 | U |
| 307 | chr6 | 39076099 | 39076529 | Gastric Epithelium | 0.14 | 0.84 | intron | SAYSD1 | U |
| 308 | chr16 | 11356838 | 11356943 | Gastric Epithelium | 0.18 | 0.87 | Intergenic | TNP2 | U |
| 309 | chr6 | 107647431 | 107647794 | Gastric Epithelium | 0.26 | 0.95 | intron | PDSS2 | U |
| 310 | chr17 | 1173324 | 1173401 | Gastric Epithelium | 0.18 | 0.86 | promoter-TSS | BALHA9 | U |
| 311 | chr11 | 107629594 | 107629752 | Gastric Epithelium | 0.14 | 0.82 | Intergenic | SLN | U |
| 312 | chr19 | 41677957 | 41678142 | Gastric Epithelium | 0.23 | 0.91 | Intergenic | CYP2S1 | U |
| 313 | chr6 | 148030997 | 148031401 | Gastric Epithelium | 0.22 | 0.9 | Intergenic | SAMD5 | U |
| 314 | chr7 | 102882090 | 102882162 | Gastric Epithelium | 0.23 | 0.9 | intron | DPY19L2P2 | U |
| 315 | chr7 | 953309 | 953429 | Gastric Epithelium | 0.12 | 0.79 | intron | ADAP1 | U |
| 316 | chr21 | 18801510 | 18801633 | Gastric Epithelium | 0.2 | 0.87 | Intergenic | C21orf37 | U |
| 317 | chr13 | 99827379 | 99827553 | Gastric Epithelium | 0.15 | 0.82 | Intergenic | UBAC2-AS1 | U |
| 318 | chr1 | 178476143 | 178476208 | Gastric Epithelium | 0.14 | 0.8 | Intergenic | FEX35 | U |
| 319 | chr7 | 97920858 | 97921050 | Gastric Epithelium | 0.25 | 0.91 | TTS, TTS | BAIAP2L1, BRI3 | U |
| 320 | chr12 | 112694142 | 112694609 | Gastric Epithelium | 0.26 | 0.92 | intron | HECTD4 | U |
| 321 | chr13 | 27822174 | 27822427 | Gastric Epithelium | 0.28 | 0.93 | Intergenic | RPL21 | U |
| 322 | chr1 | 7739328 | 7739594 | Gastric Epithelium | 0.16 | 0.81 | intron | CAMTA1 | U |
| 323 | chr10 | 1343073443 | 134307462 | Gastric Epithelium | 0.25 | 0.89 | Intergenic | NPP5A | U |
| 324 | chr8 | 85803401 | 8580388 | Gastric Epithelium | 0.16 | 0.79 | Intergenic | CLDN23 | U |
| 325 | chr3 | 13108236 | 13108359 | Gastric Epithelium | 0.21 | 0.84 | intron | QSEC1 | U |
| 326 | chr11 | 4197181 | 4197252 | Gastric Epithelium | 0.2 | 0.81 | Intergenic | LOC100506082 | U |
| 327 | chr2 | 441924891 | 44192747 | Gastric Epithelium | 0.3 | 0.89 | intron | LRPPRC | U |
| 328 | chr18 | 19694915 | 19695256 | Gastric Epithelium | 0.26 | 0.84 | Intergenic | GATA6 | U |
| 329 | chr3 | 182444733 | 182445118 | Gastric Epithelium | 0.27 | 0.83 | Intergenic | ATP11B | U |
| 330 | chr12 | 125359949 | 125360091 | Gastric Epithelium | 0.32 | 0.86 | Intergenic | SCARB1 | U |
| 331 | chr13 | 28625182 | 28625467 | Gastric Epithelium | 0.03 | 0.92 | intron | FLT3 | U |
| 332 | chr4 | 38397982 | 38398298 | Gastric Epithelium | 0.07 | 0.88 | Intergenic | KLF3 | U |
| 333 | chr7 | 1557915571 | 155791614 | Gastric Epithelium | 0.09 | 0.83 | Intergenic | SHH | U |
| 334 | chr3 | 127330153 | 12733108 | Gastric Epithelium | 0.18 | 0.91 | Intergenic | RAF1 | U |
| 335 | chr11 | 10847471 | 1084858 | Gastric Epithelium | 0.2 | 0.83 | exon | MUC2 | U |
| 336 | chr3 | 137717665 | 137717900 | Gastric Epithelium | 0.01 | 0.92 | exon | CLDN18 | U |
| 337 | chr9 | 71673940 | 71674378 | Gastric Epithelium | 0.04 | 0.95 | intron | FXN | U |
| 338 | chr2 | 103095409 | 103095901 | Gastric Epithelium | 0.02 | 0.91 | exon | SLC9A4 | U |
| 339 | chr15 | 59988949 | 59989041 | Gastric Epithelium | 0.07 | 0.91 | Intergenic | BNIP2 | U |
| 340 | chr14 | 50604935 | 50605125 | Gastric Epithelium | 0.13 | 0.96 | intron | SOS2 | U |
| 341 | chr13 | 28837971 | 28838117 | Gastric Epithelium | 0.03 | 0.96 | intron | PAN3 | U |
| 342 | chr22 | 41891370 | 41891750 | Gastric Epithelium | 0.02 | 0.92 | intron | ACO2 | U |
| 343 | chr11 | 57550804 | 57550988 | Gastric Epithelium | 0.03 | 0.89 | intron | CTNND1 | U |
| 344 | chr2 | 2415449013 | 241545393 | Gastric Epithelium | 0.01 | 0.87 | intron | GPR35 | U |
| 345 | chr1 | 1094990 | 1095143 | Gastric Epithelium | 0.03 | 0.88 | Intergenic | MIR200B | U |
| 346 | chr22 | 31616670 | 31616843 | Gastric Epithelium | 0.06 | 0.91 | intron | LIMK2 | U |
| 347 | chr17 | 57925572 | 57925756 | Gastric Epithelium | 0.02 | 0.87 | Intergenic | MIR21 | U |
| 348 | chr11 | 129742385 | 129742665 | Gastric Epithelium | 0.03 | 0.88 | intron | NFRKB | U |
| 349 | chr20 | 6760589 | 6760945 | Gastric Epithelium | 0.04 | 0.89 | exon, TTS | BMP2, BMP2 | U |
| 350 | chr1 | 1062975 | 1063187 | Gastric Epithelium | 0.02 | 0.86 | Intergenic | LOC254099 | U |
| 351 | chr14 | 69643149 | 69643543 | Gastric Epithelium | 0.07 | 0.91 | Intergenic | EXD2 | U |
| 352 | chr7 | 134116404 | 134116558 | Gastric Epithelium | 0.07 | 0.9 | Intergenic | AKR1B1 | U |
| 353 | chr9 | 97369629 | 97369825 | Gastric Epithelium | 0.08 | 0.91 | intron | FBP1 | U |
| 354 | chr6 | 41709978 | 41710195 | Gastric Epithelium | 0.08 | 0.91 | exon | PGC | U |
| 355 | chr6 | 157431621 | 157432058 | Gastric Epithelium | 0.09 | 0.92 | intron | ARID1B | U |
| 356 | chr14 | 56508705 | 56509187 | Gastric Epithelium | 0.04 | 0.87 | Intergenic | PELI2 | U |
| 357 | chr1 | 231104748 | 231104865 | Gastric Epithelium | 0.09 | 0.9 | intron | TTC13 | U |
| 358 | chr6 | 24752424 | 24752713 | Gastric Epithelium | 0.1 | 0.9 | Intergenic | GMNN | U |
| 359 | chr22 | 32805994 | 32806319 | Gastric Epithelium | 0.09 | 0.89 | intron | C22orf28 | U |
| 360 | chr20 | 62662346 | 62662467 | Gastric Epithelium | 0.08 | 0.87 | intron | PRPF6 | U |
| 361 | chr9 | 114579556 | 114579749 | Gastric Epithelium | 0.14 | 0.93 | Intergenic | C9orf84 | U |
| 362 | chr4 | 543579543 | 54358206 | Gastric Epithelium | 0.12 | 0.91 | intron | NX1 | U |
| 363 | chr9 | 114651409 | 114651885 | Gastric Epithelium | 0.14 | 0.92 | Intergenic | UGCG | U |
| 364 | chr1 | 1062668 | 1062808 | Gastric Epithelium | 0.12 | 0.88 | Intergenic | LOC254099 | U |
| 365 | chr9 | 94937344 | 94937635 | Gastric Epithelium | 0.18 | 0.92 | Intergenic | LINC00475 | U |
| 366 | chr2 | 65413988 | 65414139 | Gastric Epithelium | 0.17 | 0.89 | Intergenic | ACTR2 | U |
| 367 | chr20 | 33628551 | 33628745 | Gastric Epithelium | 0.15 | 0.87 | intron | TRPC4AP | U |
| 368 | chr6 | 2244189 | 2244471 | Gastric Epithelium | 0.21 | 0.92 | intron | GMDS | U |
| 369 | chr20 | 30843838 | 30844028 | Gastric Epithelium | 0.17 | 0.87 | Intergenic | KIF3B | U |
| 370 | chr16 | 88683395 | 88683851 | Gastric Epithelium | 0.18 | 0.88 | intron | ZC3H18 | U |
| 371 | chr19 | 41673732 | 41673927 | Gastric Epithelium | 0.15 | 0.82 | Intergenic | CYP2S1 | U |
| 372 | chr9 | 986570661 | 98657262 | Gastric Epithelium | 0.29 | 0.96 | intron | ERCC6L2 | U |
| 373 | chr20 | 33997810 | 33998065 | Gastric Epithelium | 0.16 | 0.83 | intron | UQCC | U |
| 374 | chr5 | 175832583 | 175832719 | Gastric Epithelium | 0.17 | 0.83 | intron | CLTB | U |
| 375 | chr9 | 100820273 | 100820676 | Gastric Epithelium | 0.25 | 0.89 | intron | NANS | U |
| 376 | chr22 | 50885408 | 50885506 | Gastric Epithelium | 0.27 | 0.86 | exor | SBF1 | U |
| 377 | chr17 | 38844775 | 38844988 | Gastric Epithelium | 0.29 | 0.87 | Intergenic | KRT24 | U |
| 378 | chr9 | 97385813 | 97386052 | Gastric Epithelium | 0.26 | 0.82 | intron | FBP1 | U |
| 379 | chr5 | 138729351 | 138729653 | Gastric Epithelium | 0.88 | 0.16 | exon | PROB1 | M |
| 380 | chr15 | 82432262 | 82432468 | Gastric Epithelium | 0.83 | 0.12 | intron | EFTUD1 | M |
| 381 | chr10 | 32665666 | 32665921 | Gastric Epithelium | 0.77 | 0.11 | intron | EPC1 | M |
| 382 | chrX | 105421549 | 105421612 | Gastric Epithelium | 0.79 | 0.23 | intron | MUM1L1 | M |
| 383 | chr3 | 181417368 | 181417614 | Gastric Epithelium | 0.71 | 0.15 | exon | SOX2-OT | M |
| 384 | chr19 | 33784296 | 33784610 | Gastric Epithelium | 0.67 | 0.12 | Intergenic | CEBPA | M |
| 385 | chr19 | 6057263 | 6057449 | Gastric Epithelium | 0.68 | 0.14 | intron | RFX2 | M |
| 386 | chr7 | 158261071 | 158261181 | Gastric Epithelium | 0.65 | 0.13 | intron | PTPRN2 | M |
| 387 | chr1 | 207494170 | 207494238 | Gastric Epithelium | 0.73 | 0.23 | promoter-TSS | CD55 | M |
| 388 | chr8 | 38644209 | 38644336 | Gastric Epithelium | 0.59 | 0.09 | promoter-TSS | TACC1 | M |
| 389 | chr8 | 144650650 | 144650805 | Gastric Epithelium | 0.69 | 0.2 | exon | MROH6 | M |
| 390 | chr12 | 103695910 | 103696073 | Gastric Epithelium | 0.64 | 0.15 | exon | C12orf42 | M |
| 391 | chr1 | 228402009 | 228402035 | Gastric Epithelium | 0.73 | 0.29 | promoter-TSS | C1orf145 | M |
| 392 | chr13 | 70682525 | 70682653 | Gastric Epithelium | 0.68 | 0.24 | promoter-TSS | KLHL1 | M |
| 393 | chr6 | 40722284 | 40722343 | Gastric Epithelium | 0.67 | 0.24 | Intergenic | LRFN2 | M |
| 394 | chr11 | 65184712 | 65184910 | Gastric Epithelium | 0.63 | 0.22 | Intergenic | NEAT1 | M |
| 395 | chrX | 108843476 | 108843505 | Gastric Epithelium | 0.62 | 0.24 | Intergenic | KCNE1L | M |
| 396 | chr17 | 37400316 | 37400485 | Gastric Epithelium | 0.55 | 0.18 | Intergenic | STAC2 | M |
| 397 | chr1 | 47999397 | 47999460 | Gastric Epithelium | 0.57 | 0.21 | Intergenic | FOXD2 | M |
| 398 | chr19 | 9832712 | 9832818 | Gastric Epithelium | 0.58 | 0.22 | Intergenic | ZNF812 | M |
| 399 | chr3 | 13908233 | 13908303 | Gastric Epithelium | 0.58 | 0.27 | intron | WNT7A | M |
| 400 | chr19 | 49112138 | 49112279 | Gastric Epithelium | 0.59 | 0.28 | intron | FAM83E | M |
| 401 | chr17 | 7967499 | 7967918 | Gastric Epithelium | 0.58 | 0.27 | Intergenic | ALOX128 | M |
| 402 | chr8 | 86351007 | 86351135 | Gastric Epithelium | 0.84 | 0.1 | promoter-TSS | CA3 | M |
| 403 | chr6 | 1624957 | 1625250 | Gastric Epithelium | 0.92 | 0.09 | intron | GMDS | M |
| 404 | chr13 | 95360462 | 95360865 | Gastric Epithelium | 0.89 | 0.1 | Intergenic | SOX21 | M |
| 405 | chr5 | 50674046 | 50674313 | Gastric Epithelium | 0.92 | 0.15 | exon | LOC642366 | M |
| 406 | chr6 | 1625273 | 1625609 | Gastric Epithelium | 0.83 | 0.06 | intron | GMDS | M |
| 407 | chr8 | 86350667 | 86350970 | Gastric Epithelium | 0.82 | 0.06 | promoter-TSS | CA3 | M |
| 408 | chr5 | 138729829 | 138730141 | Gastric Epithelium | 0.82 | 0.08 | exon | PROB1 | M |
| 409 | chr8 | 86350423 | 86350633 | Gastric Epithelium | 0.88 | 0.15 | promoter-TSS | CA3 | M |
| 410 | chr6 | 1625627 | 1625757 | Gastric Epithelium | 0.84 | 0.16 | intron | GMDS | M |
| 411 | chr14 | 21091267 | 21091423 | Gastric Epithelium | 0.85 | 0.2 | Intergenic | OR6S1 | M |
| 412 | chr5 | 50695414 | 50695610 | Gastric Epithelium | 0.74 | 0.09 | Intergenic | LOC642366 | M |
| 413 | chr15 | 96952287 | 96952441 | Gastric Epithelium | 0.77 | 0.15 | Intergenic | MIR1469 | M |
| 414 | chr7 | 155595558 | 155595590 | Gastric Epithelium | 0.7 | 0.09 | TTS | SHH | M |
| 415 | chr11 | 46317357 | 46317804 | Gastric Epithelium | 0.68 | 0.07 | intron | CREB3L1 | M |
| 416 | chr5 | 50262917 | 50263096 | Gastric Epithelium | 0.75 | 0.15 | Intergenic | PARP8 | M |
| 417 | chr2 | 233755749 | 233756039 | Gastric Epithelium | 0.76 | 0.16 | intron | NGEF | M |
| 418 | chr14 | 21091179 | 21091220 | Gastric Epithelium | 0.81 | 0.23 | Intergenic | OR6S1 | M |
| 419 | chr5 | 7395532 | 7395755 | Gastric Epithelium | 0.68 | 0.11 | promoter-TSS | ADCY2 | M |
| 420 | chr12 | 1639108 | 1639152 | Gastric Epithelium | 0.74 | 0.2 | Intergenic | LOC100292680 | M |
| 421 | chr7 | 154705815 | 154705890 | Gastric Epithelium | 0.65 | 0.12 | Intergenic | LOC100132707 | M |
| 422 | chr20 | 29550850 | 29550949 | Gastric Epithelium | 0.75 | 0.22 | Intergenic | FRG1B | M |
| 423 | chr3 | 128765012 | 128765057 | Gastric Epithelium | 0.71 | 0.22 | Intergenic | GP9 | M |
| 424 | chr19 | 1775351 | 1775487 | Gastric Epithelium | 0.65 | 0.17 | TTS | ONECUT3 | M |
| 425 | chr5 | 149461437 | 149461585 | Gastric Epithelium | 0.67 | 0.19 | intron | CSF1R | M |
| 426 | chr14 | 94226109 | 94226495 | Gastric Epithelium | 0.62 | 0.14 | intron | PRIMA1 | M |
| 427 | chr8 | 102038446 | 102038850 | Gastric Epithelium | 0.58 | 0.14 | Intergenic | FLI42969 | M |
| 428 | chr3 | 128764857 | 128764997 | Gastric Epithelium | 0.57 | 0.15 | Intergenic | GP9 | M |
| 429 | chr10 | 19338949 | 19339311 | Small Intestine Epithelium | 0.01 | 0.93 | Intergenic | ARL5B | U |
| 430 | chr10 | 126496740 | 126497034 | Small Intestine Epithelium | 0.05 | 0.95 | intron | FAM175B | U |
| 431 | chr11 | 65594327 | 65594630 | Small Intestine Epithelium | 0.02 | 0.91 | Intergenic | SNX32 | U |
| 432 | chr13 | 30110150 | 30110574 | Small Intestine Epithelium | 0.04 | 0.93 | intron | SLC7A1 | U |
| 433 | chr11 | 440653 | 440758 | Small Intestine Epithelium | 0.06 | 0.94 | intron | ANO9 | U |
| 434 | chr2 | 1365949071 | 136595048 | Small Intestine Epithelium | 0.06 | 0.94 | promoter-TSS | LCT | U |
| 435 | chr4 | 178322231 | 178322466 | Small Intestine Epithelium | 0.07 | 0.94 | Intergenic | AGA | U |
| 436 | chr11 | 272256 | 272628 | Small Intestine Epithelium | 0.02 | 0.88 | Intergenic | NLRP6 | U |
| 437 | chr1 | 227290003 | 227290462 | Small Intestine Epithelium | 0.07 | 0.92 | intron | CDC42BPA | U |
| 438 | chr11 | 440819 | 440894 | Small Intestine Epithelium | 0.05 | 0.9 | intron | ANO9 | U |
| 439 | chr11 | 283462 | 283608 | Small Intestine Epithelium | 0.04 | 0.89 | intron | NLRP6 | U |
| 440 | chr2 | 163772524 | 163772792 | Small Intestine Epithelium | 0.03 | 0.88 | Intergenic | KCNH7 | U |
| 441 | chr5 | 79658542 | 79658774 | Small Intestine Epithelium | 0.02 | 0.86 | Intergenic | CRSP8P | U |
| 442 | chr5 | 1368683 | 1368878 | Small Intestine Epithelium | 0.06 | 0.89 | Intergenic | CLPTM1L | U |
| 443 | chr6 | 42964029 | 42964188 | Small Intestine Epithelium | 0.14 | 0.93 | intron | PPP2R5D | U |
| 444 | chr2 | 39376566 | 39376760 | Small Intestine Epithelium | 0.15 | 0.94 | Intergenic | SOS1 | U |
| 445 | chr15 | 81668644 | 81669077 | Small Intestine Epithelium | 0.15 | 0.93 | Intergenic | TMC3 | U |
| 446 | chr16 | 2216470 | 2216843 | Small Intestine Epithelium | 0.17 | 0.94 | intron | TRAF7 | U |
| 447 | chr12 | 2506614 | 2506665 | Small Intestine Epithelium | 0.03 | 0.93 | intron | CACNA1C | U |
| 448 | chr20 | 60397537 | 60397571 | Small Intestine Epithelium | 0.02 | 0.91 | intron | CDH4 | U |
| 449 | chr2 | 174574144 | 174574409 | Small Intestine Epithelium | 0.03 | 0.92 | Intergenic | SP3 | U |
| 450 | chr15 | 76793291 | 76793366 | Small Intestine Epithelium | 0.07 | 0.95 | intron | SCAPER | U |
| 451 | chr1 | 200073859 | 200074011 | Small Intestine Epithelium | 0.03 | 0.91 | intron | NR5A2 | U |
| 452 | chr13 | 45339685 | 45339918 | Small Intestine Epithelium | 0.02 | 0.9 | Intergenic | LINC00330 | U |
| 453 | chr3 | 23576826 | 23577178 | Small Intestine Epithelium | 0.06 | 0.94 | intron | UBE2E2 | U |
| 454 | chr14 | 103002787 | 103002864 | Small Intestine Epithelium | 0.01 | 0.88 | Intergenic | MIR4309 | U |
| 455 | chr5 | 137933890 | 137933983 | Small Intestine Epithelium | 0.03 | 0.9 | Intergenic | HSPA9 | U |
| 456 | chr17 | 433425043 | 43342664 | Small Intestine Epithelium | 0.02 | 0.89 | intron | MAP3K14 | U |
| 457 | chr3 | 100331802 | 100331981 | Small Intestine Epithelium | 0.05 | 0.91 | intron | GPR128 | U |
| 458 | chr4 | 57133379 | 57133580 | Small Intestine Epithelium | 0.07 | 0.91 | intron | KIAA1211 | U |
| 459 | chr11 | 77304398 | 77304508 | Small Intestine Epithelium | 0.09 | 0.92 | intron | AQP11 | U |
| 460 | chr7 | 151585473 | 151585601 | Small Intestine Epithelium | 0.03 | 0.86 | Intergenic | PRKAG2-AS1 | U |
| 461 | chr16 | 46964009 | 46964202 | Small Intestine Epithelium | 0.08 | 0.91 | exon | GPT2 | U |
| 462 | chr14 | 90111701 | 90111939 | Small Intestine Epithelium | 0.12 | 0.95 | Intergenic | FOXN3-AS2 | U |
| 463 | chr5 | 77971393 | 77971651 | Small Intestine Epithelium | 0.08 | 0.91 | Intergenic | LHFPL2 | U |
| 464 | chr11 | 271883 | 272180 | Small Intestine Epithelium | 0.03 | 0.86 | Intergenic | NLRP6 | U |
| 465 | chr7 | 155922310 | 155922367 | Small Intestine Epithelium | 0.07 | 0.89 | Intergenic | LOC285889 | U |
| 466 | chr16 | 2221849 | 2222065 | Small Intestine Epithelium | 0.1 | 0.92 | intron | TRAF7 | U |
| 467 | chr1 | 148004493 | 148004723 | Small Intestine Epithelium | 0.05 | 0.87 | exon | NBPF14 | U |
| 468 | chr17 | 76733982 | 76734353 | Small Intestine Epithelium | 0.04 | 0.86 | intron | CYTH1 | U |
| 469 | chr4 | 82368581 | 82368971 | Small Intestine Epithelium | 0.09 | 0.91 | intron | RASGEF1B | U |
| 470 | chr11 | 3170718 | 3170822 | Small Intestine Epithelium | 0.08 | 0.89 | intron | OSBPL5 | U |
| 471 | chr19 | 46683676 | 46683995 | Small Intestine Epithelium | 0.07 | 0.88 | Intergenic | DKFZp434J0226 | U |
| 472 | chr12 | 124678953 | 124679007 | Small Intestine Epithelium | 0.12 | 0.92 | intron | ZNF664-FAM101A | U |
| 473 | chr5 | 175977376 | 175977478 | Small Intestine Epithelium | 0.03 | 0.83 | intron | CDHR2 | U |
| 474 | chr12 | 9695085 | 9695225 | Small Intestine Epithelium | 0.08 | 0.88 | Intergenic | KLRB1 | U |
| 475 | chr8 | 81019211 | 81019366 | Small Intestine Epithelium | 0.08 | 0.88 | intron | TPD52 | U |
| 476 | chr5 | 173969345 | 173969504 | Small Intestine Epithelium | 0.04 | 0.84 | Intergenic | MSX2 | U |
| 477 | chr16 | 2216894 | 2217169 | Small Intestine Epithelium | 0.02 | 0.82 | intron | TRAF7 | U |
| 478 | chr12 | 93223439 | 93223843 | Small Intestine Epithelium | 0.13 | 0.93 | intron | EEA1 | U |
| 479 | chr13 | 30454758 | 30455209 | Small Intestine Epithelium | 0.12 | 0.92 | intron | LINC00297 | U |
| 480 | chr19 | 39350308 | 39350342 | Small Intestine Epithelium | 0.04 | 0.83 | Intergenic | HNRNPL | U |
| 481 | chr5 | 133337095 | 133337179 | Small Intestine Epithelium | 0.12 | 0.91 | intron | VDAC1 | U |
| 482 | chr5 | 180417016 | 180417115 | Small Intestine Epithelium | 0.09 | 0.88 | intron | BTNL3 | U |
| 483 | chr7 | 44370390 | 44370498 | Small Intestine Epithelium | 0.11 | 0.9 | Intergenic | CAMK2B | U |
| 484 | chr17 | 13201687 | 13201865 | Small Intestine Epithelium | 0.09 | 0.88 | Intergenic | ELAC2 | U |
| 485 | chr1 | 78404057 | 78404256 | Small Intestine Epithelium | 0.14 | 0.93 | intron | NEXN | U |
| 486 | chr19 | 8097523 | 8097903 | Small Intestine Epithelium | 0.1 | 0.89 | Intergenic | CCL25 | U |
| 487 | chr8 | 18219427 | 18219813 | Small Intestine Epithelium | 0.09 | 0.88 | Intergenic | NAT2 | U |
| 488 | chr6 | 168188398 | 168188823 | Small Intestine Epithelium | 0.09 | 0.88 | intron | C6orf123 | U |
| 489 | chr3 | 196363243 | 196363440 | Small Intestine Epithelium | 0.04 | 0.82 | Intergenic | LRRC33 | U |
| 490 | chr1 | 7739607 | 7739847 | Small Intestine Epithelium | 0.13 | 0.91 | intron | CAMTA1 | U |
| 491 | chr19 | 4843090 | 4843346 | Small Intestine Epithelium | 0.14 | 0.92 | intron | PLIN3 | U |
| 492 | chr17 | 77959558 | 77959815 | Small Intestine Epithelium | 0.1 | 0.88 | intron | TBC1D16 | U |
| 493 | chr17 | 4945025 | 4945311 | Small Intestine Epithelium | 0.13 | 0.91 | Intergenic | SLC52A1 | U |
| 494 | chr12 | 115890506 | 115890829 | Small Intestine Epithelium | 0.11 | 0.89 | Intergenic | MIR620 | U |
| 495 | chr2 | 197765431 | 197765608 | Small Intestine Epithelium | 0.16 | 0.93 | intron | PGAP1 | U |
| 496 | chr4 | 24179596 | 24179855 | Small Intestine Epithelium | 0.15 | 0.92 | Intergenic | PPARGC1A | U |
| 497 | chr15 | 52390924 | 52391211 | Small Intestine Epithelium | 0.17 | 0.94 | Intergenic | BCL2L10 | U |
| 498 | chr16 | 50848512 | 50848836 | Small Intestine Epithelium | 0.05 | 0.82 | Intergenic | CYLD | U |
| 499 | chr1 | 199747283 | 199747370 | Small Intestine Epithelium | 0.08 | 0.84 | Intergenic | NR5A2 | U |
| 500 | chr9 | 135481768 | 135481879 | Small Intestine Epithelium | 0.13 | 0.86 | intron | DDX31 | U |
| 501 | chr19 | 17441650 | 17441933 | Small Intestine Epithelium | 0.13 | 0.89 | exon | ANO8 | U |
| 502 | chr6 | 42352982 | 42353335 | Small Intestine Epithelium | 0.12 | 0.88 | intron | TRERF1 | U |
| 503 | chr2 | 10163043 | 10163411 | Small Intestine Epithelium | 0.09 | 0.85 | Intergenic | KLF11 | U |
| 504 | chr2 | 39456237 | 39456704 | Small Intestine Epithelium | 0.08 | 0.84 | intron | CDKL4 | U |
| 505 | chr20 | 61281101 | 61281268 | Small Intestine Epithelium | 0.14 | 0.89 | intron | SLCO4A1 | U |
| 506 | chr16 | 58690638 | 58690915 | Small Intestine Epithelium | 0.12 | 0.87 | Intergenic | CNOT1 | U |
| 507 | chr1 | 270682 | 270970 | Small Intestine Epithelium | 0.13 | 0.85 | Intergenic | NLRP6 | U |
| 508 | chr1 | 45558202 | 45558523 | Small Intestine Epithelium | 0.15 | 0.9 | intron | ZSWIM5 | U |
| 509 | chr7 | 148160083 | 148160287 | Small Intestine Epithelium | 0.19 | 0.93 | Intergenic | C7orf33 | U |
| 510 | chr19 | 7505487 | 7505692 | Small Intestine Epithelium | 0.16 | 0.9 | intron | ARHGEF18 | U |
| 511 | chr11 | 271009 | 271488 | Small Intestine Epithelium | 0.12 | 0.86 | Intergenic | NLRP6 | U |
| 512 | chr14 | 100641770 | 100641938 | Small Intestine Epithelium | 0.14 | 0.87 | Intergenic | DEGS2 | U |
| 513 | chr19 | 17891999 | 17892167 | Small Intestine Epithelium | 0.07 | 0.79 | exon, intron | FCHO1, FCHO1 | U |
| 514 | chr11 | 286423 | 286784 | Small Intestine Epithelium | 0.21 | 0.93 | Intergenic | ATHL1 | U |
| 515 | chr8 | 126415624 | 126415993 | Small Intestine Epithelium | 0.17 | 0.89 | Intergenic | TRIB1 | U |
| 516 | chr6 | 433900051 | 43390319 | Small Intestine Epithelium | 0.16 | 0.87 | Intergenic | ABCC10 | U |
| 517 | chr1 | 15547962 | 15548286 | Small Intestine Epithelium | 0.17 | 0.88 | Intergenic | FHAD1 | U |
| 518 | chr15 | 34636879 | 34637206 | Small Intestine Epithelium | 0.21 | 0.91 | Intergenic, promoter | NOP10, C15orf55 | U |
| 519 | chr5 | 40417359 | 40417526 | Small Intestine Epithelium | 0.17 | 0.87 | Intergenic | PTGER4 | U |
| 520 | chr9 | 123528706 | 123528951 | Small Intestine Epithelium | 0.24 | 0.94 | intron | FBXW2 | U |
| 521 | chr19 | 4907943 | 4908266 | Small Intestine Epithelium | 0.24 | 0.93 | Intergenic | UHRF1 | U |
| 522 | chr17 | 27167910 | 27168299 | Small Intestine Epithelium | 0.26 | 0.95 | intron | FAM222B | U |
| 523 | chr6 | 105563790 | 105564168 | Small Intestine Epithelium | 0.15 | 0.83 | intron | BVES | U |
| 524 | chr10 | 116682964 | 116683134 | Small Intestine Epithelium | 0.28 | 0.95 | Intergenic | TRUB1 | U |
| 525 | chr7 | 97834644 | 97835048 | Small Intestine Epithelium | 0.28 | 0.95 | exon | LMTK2 | U |
| 526 | chr17 | 30135449 | 30135540 | Small Intestine Epithelium | 0.32 | 0.95 | Intergenic | COPRS | U |
| 527 | chr12 | 6654337 | 6654781 | Small Intestine Epithelium | 0.31 | 0.92 | intron | IFFO1 | U |
| 528 | chr7 | 55162627 | 55162868 | Small Intestine Epithelium | 0.05 | 0.87 | intron | EGFR | U |
| 529 | chr1 | 3210411 | 3210462 | Small Intestine Epithelium | 0.09 | 0.85 | intron | PRDM16 | U |
| 530 | chr7 | 2884997 | 2885040 | Small Intestine Epithelium | 0.04 | 0.95 | Intergenic | GNA12 | U |
| 531 | chr9 | 79238335 | 79238460 | Small Intestine Epithelium | 0.06 | 0.92 | intron | PRUNE2 | U |
| 532 | chr7 | 100877583 | 100877927 | Small Intestine Epithelium | 0.06 | 0.92 | intron | CLDN15 | U |
| 533 | chr17 | 9123039 | 9123167 | Small Intestine Epithelium | 0.03 | 0.88 | intron | NTN1 | U |
| 534 | chr20 | 40727554 | 40727871 | Small Intestine Epithelium | 0.06 | 0.87 | intron | PTPRT | U |
| 535 | chr22 | 35759383 | 35759642 | Small Intestine Epithelium | 0.13 | 0.94 | Intergenic | HMOX1 | U |
| 536 | chr6 | 4263418 | 4263700 | Small Intestine Epithelium | 0.13 | 0.92 | Intergenic | ECI2 | U |
| 537 | chr6 | 34208627 | 34208812 | Small Intestine Epithelium | 0.05 | 0.94 | intron | HMGA1 | U |
| 538 | chr7 | 100883380 | 100883692 | Small Intestine Epithelium | 0.04 | 0.93 | intron | FIS1 | U |
| 539 | chr6 | 11753073 | 11753216 | Small Intestine Epithelium | 0.02 | 0.9 | intron | ADTRP | U |
| 540 | chr2 | 235894334 | 23589482 | Small Intestine Epithelium | 0.07 | 0.93 | intron | SH3BP4 | U |
| 541 | chr9 | 36083406 | 36083628 | Small Intestine Epithelium | 0.08 | 0.92 | exon | RECK | U |
| 542 | chr15 | 72081498 | 72081912 | Small Intestine Epithelium | 0.05 | 0.87 | Intergenic | NR2E3 | U |
| 543 | chr6 | 16178665 | 16178896 | Small Intestine Epithelium | 0.07 | 0.88 | Intergenic | MIR4639 | U |
| 544 | chr13 | 114887133 | 114887370 | Small Intestine Epithelium | 0.1 | 0.91 | intron | RASA3 | U |
| 545 | chr1 | 115184761 | 115184864 | Small Intestine Epithelium | 0.14 | 0.93 | intron | DENND2C | U |
| 546 | chr20 | 31074767 | 31074870 | Small Intestine Epithelium | 0.09 | 0.87 | intron | C20orf112 | U |
| 547 | chr16 | 69630344 | 69630482 | Small Intestine Epithelium | 0.13 | 0.91 | intron | NFAT5 | U |
| 548 | chr15 | 80279940 | 80280171 | Small Intestine Epithelium | 0.06 | 0.84 | Intergenic | BCL2A1 | U |
| 549 | chr22 | 37451029 | 37451265 | Small Intestine Epithelium | 0.14 | 0.9 | intron | KCTD17 | U |
| 550 | chr20 | 11964637 | 11964694 | Small Intestine Epithelium | 0.13 | 0.86 | Intergenic | BTBD3 | U |
| 551 | chr22 | 25080123 | 25080621 | Small Intestine Epithelium | 0.14 | 0.87 | Intergenic | POM121L10P | U |
| 552 | chr7 | 151585286 | 151585413 | Small Intestine Epithelium | 0.03 | 0.74 | Intergenic | PRKAG2-AS1 | U |
| 553 | chr6 | 262568921 | 26257077 | Small Intestine Epithelium | 0.21 | 0.9 | Intergenic | HIST1H2BH | U |
| 554 | chr9 | 36304087 | 35304363 | Small Intestine Epithelium | 0.33 | 0.94 | Intergenic | GNE | U |
| 555 | chr6 | 40996092 | 40996274 | Small Intestine Epithelium | 0.83 | 0.1 | exon | UNC5CL | M |
| 556 | chr1 | 109806335 | 109806380 | Small Intestine Epithelium | 0.73 | 0.13 | exon | CELSR2 | M |
| 557 | chr12 | 13687748 | 13687993 | Small Intestine Epithelium | 0.69 | 0.14 | Intergenic | C12orf36 | M |
| 558 | chr1 | 2430535461 | 243053658 | Small Intestine Epithelium | 0.63 | 0.11 | Intergenic | LOC731275 | M |
| 559 | chr15 | 24722927 | 24722963 | Small Intestine Epithelium | 0.78 | 0.29 | Intergenic | PWRN1 | M |
| 560 | chr19 | 54496256 | 54496354 | Small Intestine Epithelium | 0.69 | 0.21 | exon | CACNG6 | M |
| 561 | chr20 | 2832800 | 2833054 | Small Intestine Epithelium | 0.62 | 0.15 | intron | VPS16 | M |
| 562 | chr12 | 128866366 | 128866525 | Small Intestine Epithelium | 0.65 | 0.2 | intron | TMEM132C | M |
| 563 | chr15 | 24722995 | 24723146 | Small Intestine Epithelium | 0.63 | 0.19 | Intergenic | PWRN1 | M |
| 564 | chr19 | 54496412 | 54496449 | Small Intestine Epithelium | 0.64 | 0.26 | exon | CACNG6 | M |
| 565 | chr20 | 3052397 | 3052413 | Small Intestine Epithelium | 0.79 | 0.21 | exon | OXT | M |
| 566 | chr14 | 21131479 | 21131656 | Small Intestine Epithelium | 0.92 | 0.04 | Intergenic | ANG | M |
| 567 | chr1 | 47904946 | 47905252 | Small Intestine Epithelium | 0.95 | 0.19 | exon | FOXD2 | M |
| 568 | chr14 | 38069639 | 38069729 | Small Intestine Epithelium | 0.83 | 0.08 | Intergenic | FOXA1 | M |
| 569 | chr14 | 38053893 | 38054073 | Small Intestine Epithelium | 0.87 | 0.13 | Intergenic | FOXA1 | M |
| 570 | chr1 | 47904747 | 47904944 | Small Intestine Epithelium | 0.81 | 0.11 | exon | FOXD2 | M |
| 571 | chr9 | 23820835 | 23820911 | Small Intestine Epithelium | 0.79 | 0.11 | intron | ELAVL2 | M |
| 572 | chr20 | 21000837 | 21000920 | Small Intestine Epithelium | 0.81 | 0.13 | Intergenic | PLK1S1 | M |
| 573 | chr14 | 21121138 | 21121275 | Small Intestine Epithelium | 0.76 | 0.1 | Intergenic | OR6S1 | M |
| 574 | chr12 | 133481557 | 133481642 | Small Intestine Epithelium | 0.7 | 0.1 | Intergenic | CHFR | M |
| 575 | chr4 | 188916566 | 188916607 | Small Intestine Epithelium | 0.77 | 0.2 | promoter-TSS | ZFP42 | M |
| 576 | chr2 | 947108 | 947164 | Small Intestine Epithelium | 0.72 | 0.16 | intron | SNTG2 | M |
| 577 | chr1 | 181451403 | 181451508 | Small Intestine Epithelium | 0.65 | 0.11 | Intergenic | CACNA1E | M |
| 578 | chr19 | 29284450 | 29284840 | Small Intestine Epithelium | 0.61 | 0.08 | Intergenic | LOC148145 | M |
| 579 | chr1 | 248021326 | 248021496 | Small Intestine Epithelium | 0.58 | 0.18 | intron | TRIM58 | M |
| 580 | chr15 | 40993737 | 40994201 | Colon Epithelium | 0.02 | 0.94 | exon, intron | RAD51 | U |
| 581 | chr1 | 32781801 | 32781879 | Colon Epithelium | 0.01 | 0.92 | intron | HDAC1 | U |
| 582 | chr6 | 149588777 | 149588812 | Colon Epithelium | 0.02 | 0.92 | Intergenic | TAB2 | U |
| 583 | chr2 | 101641800 | 101641845 | Colon Epithelium | 0.02 | 0.92 | intron | TBC1D8 | U |
| 584 | chr8 | 22101450 | 22101685 | Colon Epithelium | 0.02 | 0.91 | TTS | MIR320A | U |
| 585 | chr12 | 105319208 | 105319364 | Colon Epithelium | 0.06 | 0.95 | intron | SLC41A2 | U |
| 586 | chr1 | 47905855 | 47906212 | Colon Epithelium | 0.01 | 0.89 | exon | FOXD2 | U |
| 587 | chr1 | 167870100 | 167870516 | Colon Epithelium | 0.04 | 0.92 | intron | ADCY10 | U |
| 588 | chr2 | 208037779 | 208038078 | Colon Epithelium | 0.03 | 0.9 | Intergenic | KLF7 | U |
| 589 | chr10 | 105133978 | 105134443 | Colon Epithelium | 0.03 | 0.9 | intron | TAF5 | U |
| 590 | chr17 | 18878792 | 18879282 | Colon Epithelium | 0.07 | 0.93 | intron | FAM83G | U |
| 591 | chr15 | 32993304 | 32993382 | Colon Epithelium | 0.04 | 0.9 | Intergenic | GREM1 | U |
| 592 | chr5 | 80476007 | 80476311 | Colon Epithelium | 0.04 | 0.9 | intron | RASGRF2 | U |
| 593 | chr4 | 9148544 | 9148886 | Colon Epithelium | 0.08 | 0.94 | Intergenic | USP17L10 | U |
| 594 | chr13 | 111093702 | 111093905 | Colon Epithelium | 0.06 | 0.89 | intron | COL4A2 | U |
| 595 | chr5 | 75774174 | 75774414 | Colon Epithelium | 0.11 | 0.94 | intron | IQGAP2 | U |
| 596 | chr12 | 132423352 | 132423537 | Colon Epithelium | 0.24 | 0.95 | intron | PUS1 | U |
| 597 | chr4 | 187629328 | 187629491 | Colon Epithelium | 0.01 | 0.93 | exon | FAT1 | U |
| 598 | chr12 | 92716429 | 92716535 | Colon Epithelium | 0.03 | 0.94 | Intergenic | CLLU1 | U |
| 599 | chr15 | 23037878 | 23037984 | Colon Epithelium | 0.03 | 0.94 | Intergenic | NIPA2 | U |
| 600 | chr7 | 104898593 | 104898641 | Colon Epithelium | 0.03 | 0.93 | intron | SRPK2 | U |
| 601 | chr1 | 32781649 | 32781746 | Colon Epithelium | 0.03 | 0.92 | intron | HDAC1 | U |
| 602 | chr12 | 10803321 | 10803465 | Colon Epithelium | 0.03 | 0.92 | intron | STYK1 | U |
| 603 | chr3 | 73097647 | 73097785 | Colon Epithelium | 0.03 | 0.91 | intron | PPP4R2 | U |
| 604 | chr4 | 1145817843 | 114581990 | Colon Epithelium | 0.06 | 0.94 | intron | CAMK2D | U |
| 605 | chr15 | 1022846163 | 102284756 | Colon Epithelium | 0.03 | 0.9 | Intergenic | TARSL2 | U |
| 606 | chr13 | 66804770 | 66804865 | Colon Epithelium | 0.03 | 0.89 | Intergenic | PCDH9-AS2 | U |
| 607 | chr10 | 6295071 | 6295248 | Colon Epithelium | 0.05 | 0.91 | Intergenic | LOC399715 | U |
| 608 | chr1 | 48167839 | 48168244 | Colon Epithelium | 0.03 | 0.89 | Intergenic | FOXD2 | U |
| 609 | chr13 | 67133641 | 67133729 | Colon Epithelium | 0.06 | 0.91 | intron | PCDH9 | U |
| 610 | chr12 | 77637780 | 77637886 | Colon Epithelium | 0.05 | 0.9 | Intergenic | E2F7 | U |
| 611 | chr15 | 102283250 | 102283505 | Colon Epithelium | 0.03 | 0.88 | Intergenic | TARSL2 | U |
| 612 | chr6 | 149588877 | 149589069 | Colon Epithelium | 0.02 | 0.86 | Intergenic | TAB2 | U |
| 613 | chr2 | 7426795 | 7427018 | Colon Epithelium | 0.04 | 0.88 | Intergenic | LOC100506274 | U |
| 614 | chr15 | 100349643 | 100349873 | Colon Epithelium | 0.04 | 0.88 | Intergenic | DNM1P46 | U |
| 615 | chr8 | 1012317383 | 101232089 | Colon Epithelium | 0.04 | 0.88 | intron | SPAG1 | U |
| 616 | chr16 | 14970553 | 14970957 | Colon Epithelium | 0.05 | 0.89 | exon, intron | NOMO1, NOMO1 | U |
| 617 | chr1 | 47907972 | 47908445 | Colon Epithelium | 0.04 | 0.88 | Intergenic | FOXD2 | U |
| 618 | chr8 | 95645196 | 95645311 | Colon Epithelium | 0.03 | 0.86 | Intergenic | LOC100288748 | U |
| 619 | chr8 | 70448201 | 70448396 | Colon Epithelium | 0.07 | 0.9 | intron | SULF1 | U |
| 620 | chr5 | 1260165883 | 126016863 | Colon Epithelium | 0.05 | 0.88 | Intergenic | C5orf48 | U |
| 621 | chr3 | 32785074 | 32785396 | Colon Epithelium | 0.11 | 0.93 | intron | CNOT10 | U |
| 622 | chr11 | 77389954 | 77390301 | Colon Epithelium | 0.11 | 0.94 | intron | RSF1 | U |
| 623 | chr13 | 102331535 | 102331598 | Colon Epithelium | 0.08 | 0.9 | intron | ITGBLI | U |
| 624 | chr17 | 77006672 | 77006816 | Colon Epithelium | 0.08 | 0.9 | promoter-TSS, Interg [symbol] | CANT1, CANT1 | U |
| 625 | chr8 | 17168987 | 17169164 | Colon Epithelium | 0.08 | 0.9 | exon, intron | MTMR7, MTMR7 | U |
| 626 | chr1 | 226074373 | 226074588 | Colon Epithelium | 0.11 | 0.92 | exon | LEFTY1 | U |
| 627 | chr1 | 17841376 | 17841597 | Colon Epithelium | 0.07 | 0.89 | Intergenic | ARHGEF10L | U |
| 628 | chr21 | 39491396 | 39491798 | Colon Epithelium | 0.09 | 0.91 | intron | DSCR4 | U |
| 629 | chr6 | 88204364 | 88204835 | Colon Epithelium | 0.11 | 0.92 | intron | SLC35A1 | U |
| 630 | chr4 | 165692647 | 165692781 | Colon Epithelium | 0.05 | 0.86 | intron | LOC100505989 | U |
| 631 | chr12 | 131750166 | 131750335 | Colon Epithelium | 0.06 | 0.87 | Intergenic | LOC116437 | U |
| 632 | chr4 | 20637093 | 20637295 | Colon Epithelium | 0.09 | 0.9 | Intergenic | PACRGL | U |
| 633 | chr13 | 74228143 | 74228636 | Colon Epithelium | 0.06 | 0.87 | Intergenic | KLF12 | U |
| 634 | chr3 | 54357008 | 54357101 | Colon Epithelium | 0.07 | 0.87 | intron | CACNA2D3 | U |
| 635 | chr8 | 69769182 | 69769301 | Colon Epithelium | 0.12 | 0.92 | Intergenic | LOC100505718 | U |
| 636 | chr7 | 2086704 | 2086897 | Colon Epithelium | 0.12 | 0.92 | intron | MAD1L1 | U |
| 637 | chr19 | 42213576 | 42213814 | Colon Epithelium | 0.02 | 0.82 | intron, exon | CEACAM5, CEACAM5 | U |
| 638 | chr2 | 240940330 | 240940570 | Colon Epithelium | 0.04 | 0.84 | intron | NDUFA10 | U |
| 639 | chr22 | 44430886 | 44431227 | Colon Epithelium | 0.06 | 0.86 | intron | PARVB | U |
| 640 | chr2 | 204437085 | 204437260 | Colon Epithelium | 0.13 | 0.92 | Intergenic | RAPH1 | U |
| 641 | chr5 | 17324319 | 17324573 | Colon Epithelium | 0.07 | 0.86 | Intergenic | LOC401177 | U |
| 642 | chr2 | 1644300 | 1644764 | Colon Epithelium | 0.09 | 0.87 | intron | PXDN | U |
| 643 | chr15 | 75473667 | 75473948 | Colon Epithelium | 0.14 | 0.91 | Intergenic | C15orf39 | U |
| 644 | chr5 | 158749703 | 158749961 | Colon Epithelium | 0.15 | 0.91 | intron | TULP4 | U |
| 645 | chr6 | 153448780 | 153449113 | Colon Epithelium | 0.08 | 0.84 | intron | RGS17 | U |
| 646 | chr21 | 35362161 | 35362507 | Colon Epithelium | 0.04 | 0.79 | Intergenic | LINC00649 | U |
| 647 | chr2 | 101641230 | 101641660 | Colon Epithelium | 0.14 | 0.89 | intron | TBC1D8 | U |
| 648 | chr3 | 125474843 | 125475095 | Colon Epithelium | 0.17 | 0.91 | Intergenic | MIR548I1 | U |
| 649 | chr3 | 117070041 | 117070439 | Colon Epithelium | 0.18 | 0.91 | Intergenic | LSAMP-AS3 | U |
| 650 | chr6 | 1084535403 | 108454026 | Colon Epithelium | 0.18 | 0.91 | Intergenic | NR2E1 | U |
| 651 | chr16 | 79462842 | 79462977 | Colon Epithelium | 0.19 | 0.91 | Intergenic | MAF | U |
| 652 | chr2 | 69419515 | 69419679 | Colon Epithelium | 0.21 | 0.92 | intron | ANTXR1 | U |
| 653 | chr3 | 122070197 | 122070471 | Colon Epithelium | 0.21 | 0.91 | Intergenic | CSTA | U |
| 654 | chr1 | 224986378 | 224986519 | Colon Epithelium | 0.22 | 0.91 | Intergenic | DNAH14 | U |
| 655 | chr16 | 71461301 | 71461767 | Colon Epithelium | 0.14 | 0.83 | Intergenic | ZNF23 | U |
| 656 | chr6 | 109517041 | 109517347 | Colon Epithelium | 0.28 | 0.9 | Intergenic | CEP57L1 | U |
| 657 | chr7 | 97904665 | 97904988 | Colon Epithelium | 0.31 | 0.92 | Intergenic | BRI3 | U |
| 658 | chr10 | 88636293 | 88636508 | Colon Epithelium | 0.13 | 0.93 | intron | BMPR1A | U |
| 659 | chr1 | 108224264 | 108224525 | Colon Epithelium | 0.13 | 0.91 | intron | VAV3 | U |
| 660 | chr1 | 184567735 | 184568230 | Colon Epithelium | 0.13 | 0.91 | intron | C1orf21 | U |
| 661 | chr10 | 114252502 | 114252719 | Colon Epithelium | 0.03 | 0.96 | intron | VTI1A | U |
| 662 | chr4 | 48679336 | 48679572 | Colon Epithelium | 0.04 | 0.95 | intron | FRYL | U |
| 663 | chr6 | 4909889 | 4910096 | Colon Epithelium | 0.03 | 0.93 | intron | CDYL | U |
| 664 | chr16 | 81453443 | 81453728 | Colon Epithelium | 0.04 | 0.94 | Intergenic | CMIP | U |
| 665 | chr2 | 74323528 | 74323722 | Colon Epithelium | 0.05 | 0.93 | intron | TET3 | U |
| 666 | chr1 | 168057707 | 168058113 | Colon Epithelium | 0.11 | 0.93 | intron | GPR161 | U |
| 667 | chr3 | 195992869 | 195993170 | Colon Epithelium | 0.12 | 0.95 | intron | PCYT1A | U |
| 668 | chr8 | 141594714 | 141595054 | Colon Epithelium | 0.17 | 0.94 | intron | AGO2 | U |
| 669 | chr14 | 62106209 | 62106229 | Colon Epithelium | 0.05 | 0.96 | intron | FLI22447 | U |
| 670 | chr5 | 78264407 | 78264577 | Colon Epithelium | 0.03 | 0.93 | intron | ARSB | U |
| 671 | chr3 | 123667213 | 123667567 | Colon Epithelium | 0.05 | 0.95 | intron | CCDC14 | U |
| 672 | chr3 | 195990693 | 195990795 | Colon Epithelium | 0.06 | 0.95 | intron | PCYT1A | U |
| 673 | chr2 | 242735211 | 242735409 | Colon Epithelium | 0.04 | 0.93 | intron | GAL3ST2 | U |
| 674 | chr18 | 77459409 | 77459848 | Colon Epithelium | 0.05 | 0.94 | intron | CTDP1 | U |
| 675 | chr16 | 18884841 | 18885332 | Colon Epithelium | 0.04 | 0.93 | intron | SMG1 | U |
| 676 | chr16 | 66781322 | 66781542 | Colon Epithelium | 0.03 | 0.91 | intron | DYNC1LI2 | U |
| 677 | chr15 | 933644341 | 93364776 | Colon Epithelium | 0.03 | 0.91 | Intergenic | ASB9P1 | U |
| 678 | chr10 | 861764103 | 86176816 | Colon Epithelium | 0.05 | 0.93 | intron | CCSER2 | U |
| 679 | chr3 | 1578667613 | 157866908 | Colon Epithelium | 0.09 | 0.94 | intron | RSRC1 | U |
| 680 | chr12 | 132423840 | 132424024 | Colon Epithelium | 0.03 | 0.88 | intron | PUS1 | U |
| 681 | chr12 | 89772149 | 89772392 | Colon Epithelium | 0.09 | 0.94 | Intergenic | DUSP6 | U |
| 682 | chr3 | 33689049 | 33689343 | Colon Epithelium | 0.09 | 0.94 | intron | CLASP2 | U |
| 683 | chr3 | 72618758 | 72619029 | Colon Epithelium | 0.13 | 0.94 | Intergenic | RYBP | U |
| 684 | chr6 | 35109390 | 35109499 | Colon Epithelium | 0.1 | 0.93 | promoter-TSS | TCP11 | U |
| 685 | chr7 | 107483770 | 107483936 | Colon Epithelium | 0.09 | 0.92 | Intergenic | SLC26A3 | U |
| 686 | chr2 | 240940021 | 240940299 | Colon Epithelium | 0.09 | 0.92 | intron | NDUFA10 | U |
| 687 | chr11 | 14564373 | 14564657 | Colon Epithelium | 0.11 | 0.94 | intron | PSMA1 | U |
| 688 | chr14 | 74114572 | 74114806 | Colon Epithelium | 0.05 | 0.87 | intron | DNAL1 | U |
| 689 | chr9 | 35248546 | 35248925 | Colon Epithelium | 0.05 | 0.87 | intron | UNC13B | U |
| 690 | chr7 | 65938591 | 65938940 | Colon Epithelium | 0.11 | 0.92 | Intergenic | LINC00174 | U |
| 691 | chr2 | 17830574 | 17830762 | Colon Epithelium | 0.13 | 0.93 | intron | VSNL1 | U |
| 692 | chr20 | 13203947 | 13204216 | Colon Epithelium | 0.14 | 0.93 | intron | ISM1 | U |
| 693 | chr15 | 28365155 | 28365446 | Colon Epithelium | 0.12 | 0.91 | intron | HERC2 | U |
| 694 | chr17 | 27056518 | 27056950 | Colon Epithelium | 0.13 | 0.92 | intron | NEK8 | U |
| 695 | chr7 | 65937750 | 65937991 | Colon Epithelium | 0.17 | 0.94 | Intergenic | LINC00174 | U |
| 696 | chr21 | 33058281 | 33058572 | Colon Epithelium | 0.18 | 0.94 | intron | SCAF4 | U |
| 697 | chr9 | 115603152 | 115603322 | Colon Epithelium | 0.16 | 0.91 | intron | SNX30 | U |
| 698 | chr6 | 135676756 | 135677196 | Colon Epithelium | 0.22 | 0.95 | intron | AHI1 | U |
| 699 | chr14 | 100591192 | 100591341 | Colon Epithelium | 0.19 | 0.91 | intron | EVL | U |
| 700 | chr19 | 56638704 | 56638958 | Colon Epithelium | 0.25 | 0.93 | Intergenic | ZNF787 | U |
| 701 | chr6 | 156909918 | 156910244 | Colon Epithelium | 0.26 | 0.94 | Intergenic | ARID18 | U |
| 702 | chr19 | 14005726 | 14006214 | Colon Epithelium | 0.22 | 0.89 | intron | C19orf57 | U |
| 703 | chr7 | 2102632 | 2103070 | Colon Epithelium | 0.28 | 0.92 | intron | MAD1L1 | U |
| 704 | chr10 | 5786545 | 5786789 | Colon Epithelium | 0.29 | 0.92 | intron | FAM2088 | U |
| 705 | chr2 | 1584538001 | 158453970 | Colon Epithelium | 0.96 | 0.17 | intron | ACVR1C | M |
| 706 | chr3 | 128787334 | 128787628 | Colon Epithelium | 0.88 | 0.09 | Intergenic | GP9 | M |
| 707 | chr1 | 47915410 | 47915504 | Colon Epithelium | 0.88 | 0.1 | Intergenic | FOXD2 | M |
| 708 | chr1 | 53651398 | 53651555 | Colon Epithelium | 0.85 | 0.08 | Intergenic | CPT2 | M |
| 709 | chr4 | 74864368 | 74864615 | Colon Epithelium | 0.92 | 0.15 | promoter-TSS | CXCL5 | M |
| 710 | chr7 | 100659999 | 100660242 | Colon Epithelium | 0.89 | 0.14 | intron | MUC12 | M |
| 711 | chr10 | 27530422 | 27530535 | Colon Epithelium | 0.88 | 0.21 | promoter-TSS | ACBD5 | M |
| 712 | chr9 | 133809106 | 133809362 | Colon Epithelium | 0.79 | 0.16 | intron | FIBCD1 | M |
| 713 | chr17 | 19881550 | 19881704 | Colon Epithelium | 0.68 | 0.06 | promoter-TSS | AKAP10 | M |
| 714 | chr2 | 201829061 | 201829187 | Colon Epithelium | 0.72 | 0.13 | promoter-TSS | ORC2 | M |
| 715 | chr11 | 56981037 | 56981360 | Colon Epithelium | 0.82 | 0.23 | Intergenic | APLNR | M |
| 716 | chr2 | 158453973 | 158454244 | Colon Epithelium | 0.95 | 0.05 | promoter-TSS | ACVR1C | M |
| 717 | chr4 | 74864044 | 74864329 | Colon Epithelium | 0.96 | 0.07 | intron | CXCL5 | M |
| 718 | chr17 | 70215501 | 70215736 | Colon Epithelium | 0.96 | 0.13 | Intergenic | SOX9 | M |
| 719 | chr21 | 43181441 | 43181698 | Colon Epithelium | 0.9 | 0.1 | intron | RIPK4 | M |
| 720 | chr6 | 26233551 | 26233662 | Colon Epithelium | 0.94 | 0.15 | TTS | HIST1H1D | M |
| 721 | chr14 | 102172344 | 102172558 | Colon Epithelium | 0.89 | 0.1 | Intergenic | LINC00239 | M |
| 722 | chr1 | 61509219 | 61509304 | Colon Epithelium | 0.9 | 0.12 | Intergenic | NFIA | M |
| 723 | chr3 | 120169978 | 120170250 | Colon Epithelium | 0.8 | 0.05 | promoter-TSS, intro [symbol] | FSTL1, FSTL1 | M |
| 724 | chr8 | 38645085 | 38645218 | Colon Epithelium | 0.76 | 0.02 | exon | TACC1 | M |
| 725 | chr11 | 9112509 | 9112684 | Colon Epithelium | 0.8 | 0.07 | promoter-TSS | MIR5691 | M |
| 726 | chr20 | 42876648 | 42876760 | Colon Epithelium | 0.72 | 0.05 | intron | GDAP1L1 | M |
| 727 | chr21 | 43181729 | 43182115 | Colon Epithelium | 0.69 | 0.05 | intron | RIPKA | M |
| 728 | chr4 | 11429310 | 11429674 | Colon Epithelium | 0.66 | 0.04 | intron | HS3ST1 | M |
| 729 | chr14 | 21341863 | 21342067 | Colon Epithelium | 0.65 | 0.04 | Intergenic | RNASE3 | M |
| 730 | chr1 | 232423115 | 232423446 | Colon Fibroblasts | 0.26 | 0.85 | Intergenic | SIPA1L2 | U |
| 731 | chr19 | 49961241 | 49961348 | Colon Fibroblasts | 0.33 | 0.84 | intron | ALDH16A1 | U |
| 732 | chr15 | 38716228 | 38716438 | Colon Fibroblasts | 0.36 | 0.87 | Intergenic | FAM98B | U |
| 733 | chr1 | 221065480 | 221065537 | Colon Fibroblasts | 0.67 | 0.18 | Intergenic | HLX | M |
| 734 | chr17 | 32624822 | 32625237 | Colon Fibroblasts | 0.63 | 0.18 | Intergenic | CCL11 | M |
| 735 | chr17 | 46679079 | 46679274 | Colon Fibroblasts | 0.57 | 0.13 | intron | HOXB-AS3 | M |
| 736 | chr4 | 13536606 | 13536659 | Colon Fibroblasts | 0.56 | 0.17 | Intergenic | LOC285547 | M |
| 737 | chr1 | 233751029 | 233751089 | Colon Fibroblasts | 0.58 | 0.19 | intron | KCNK1 | M |
| 738 | chr3 | 134094044 | 134094236 | Colon Fibroblasts | 0.54 | 0.16 | promoter-TSS | AMOTL2 | M |
| 739 | chr14 | 86352363 | 86352431 | Colon Fibroblasts | 0.59 | 0.5 | Intergenic | FLRT2 | M |
| 740 | chr9 | 98514351 | 98514536 | Colon Fibroblasts | 0.64 | 0.22 | Intergenic | ERCC6L2 | M |
| 741 | chr9 | 98514556 | 98514669 | Colon Fibroblasts | 0.66 | 0.28 | Intergenic | ERCC6L2 | M |
| 742 | chr17 | 60217867 | 60217995 | Gallbladder Epithelium | 0.01 | 0.93 | Intergenic | MED13 | U |
| 743 | chr3 | 149198710 | 149198941 | Gallbladder Epithelium | 0.01 | 0.93 | intron | TM4SF4 | U |
| 744 | chr6 | 111272867 | 111273198 | Gallbladder Epithelium | 0.01 | 0.93 | Intergenic | GTF3C6 | U |
| 745 | chr19 | 55738427 | 55738739 | Gallbladder Epithelium | 0.03 | 0.95 | exon | TMEM86B | U |
| 746 | chr1 | 167885483 | 167885593 | Gallbladder Epithelium | 0.05 | 0.96 | TTS | MPC2 | U |
| 747 | chr3 | 171469408 | 171469787 | Gallbladder Epithelium | 0.05 | 0.96 | intron | PLD1 | U |
| 748 | chr3 | 71157777 | 71157870 | Gallbladder Epithelium | 0.08 | 0.97 | intron | FOXP1 | U |
| 749 | chr12 | 121412626 | 121412837 | Gallbladder Epithelium | 0.04 | 0.93 | Intergenic | HNF1A-AS1 | U |
| 750 | chr17 | 60217549 | 60217821 | Gallbladder Epithelium | 0.03 | 0.91 | Intergenic | MED13 | U |
| 751 | chr2 | 171783089 | 171783264 | Gallbladder Epithelium | 0.06 | 0.93 | Intergenic | GORASP2 | U |
| 752 | chr3 | 171463636 | 171463793 | Gallbladder Epithelium | 0.08 | 0.95 | intron | PLD1 | U |
| 753 | chr19 | 55738780 | 55739169 | Gallbladder Epithelium | 0.01 | 0.88 | exon, intron | TMEM86B | U |
| 754 | chr3 | 141737928 | 141738402 | Gallbladder Epithelium | 0.07 | 0.94 | intron | TFDP2 | U |
| 755 | chr11 | 1243400 | 1243605 | Gallbladder Epithelium | 0.03 | 0.89 | promoter-TSS | MUC5B | U |
| 756 | chr13 | 41833664 | 41833902 | Gallbladder Epithelium | 0.11 | 0.95 | intron | MTRF1 | U |
| 757 | chr19 | 55742007 | 55742487 | Gallbladder Epithelium | 0.07 | 0.89 | exon | PPP6R1 | U |
| 758 | chr19 | 16475134 | 16475347 | Gallbladder Epithelium | 0.14 | 0.93 | intron | EPS15L1 | U |
| 759 | chr16 | 72996787 | 72996887 | Gallbladder Epithelium | 0.01 | 0.94 | intron | ZFHX3 | U |
| 760 | chr3 | 171463829 | 171464225 | Gallbladder Epithelium | 0.02 | 0.95 | intron | PLD1 | U |
| 761 | chr5 | 149238943 | 149239195 | Gallbladder Epithelium | 0.02 | 0.93 | intron | UST | U |
| 762 | chr2 | 232263444 | 232263922 | Gallbladder Epithelium | 0.03 | 0.94 | exon | B3GNT7 | U |
| 763 | chr10 | 111724743 | 111724869 | Gallbladder Epithelium | 0.03 | 0.93 | intron | LOC100505933 | U |
| 764 | chr1 | 26188334 | 26188494 | Gallbladder Epithelium | 0.02 | 0.92 | exon | PAQR7 | U |
| 765 | chr18 | 4002742 | 4002925 | Gallbladder Epithelium | 0.01 | 0.91 | intron | DLGAP1 | U |
| 766 | chr3 | 171463730 | 171463794 | Gallbladder Epithelium | 0.08 | 0.97 | intron | PLD1 | U |
| 767 | chr10 | 108487813 | 108487937 | Gallbladder Epithelium | 0.02 | 0.91 | intron | SORCS1 | U |
| 768 | chr18 | 60670121 | 60670254 | Gallbladder Epithelium | 0.02 | 0.91 | Intergenic | PHLPP1 | U |
| 769 | chr4 | 91455381 | 91455570 | Gallbladder Epithelium | 0.03 | 0.92 | intron | CCSER1 | U |
| 770 | chr10 | 4161365 | 4161581 | Gallbladder Epithelium | 0.05 | 0.94 | Intergenic | KLF6 | U |
| 771 | chr15 | 96990472 | 96990904 | Gallbladder Epithelium | 0.02 | 0.91 | Intergenic | MIR1469 | U |
| 772 | chr11 | 1249946 | 1250054 | Gallbladder Epithelium | 0 | 0.88 | intron | MUC5B | U |
| 773 | chr7 | 156286975 | 156287090 | Gallbladder Epithelium | 0.03 | 0.91 | Intergenic | LINC00244 | U |
| 774 | chr12 | 93502354 | 93502725 | Gallbladder Epithelium | 0.01 | 0.89 | intron | LOC643339 | U |
| 775 | chr19 | 1293440 | 1293583 | Gallbladder Epithelium | 0.03 | 0.9 | intron | EFNA2 | U |
| 776 | chr2 | 365054 | 365353 | Gallbladder Epithelium | 0.04 | 0.91 | Intergenic | FAM150B | U |
| 777 | chr18 | 60672273 | 60672600 | Gallbladder Epithelium | 0.02 | 0.89 | Intergenic | PHLPP1 | U |
| 778 | chr19 | 40472611 | 40473010 | Gallbladder Epithelium | 0.02 | 0.89 | Intergenic | PSMC4 | U |
| 779 | chr13 | 24447224 | 24447392 | Gallbladder Epithelium | 0.03 | 0.89 | intron | MIPEP | U |
| 780 | chr17 | 16304390 | 16304570 | Gallbladder Epithelium | 0.03 | 0.89 | Intergenic | TRPV2 | U |
| 781 | chr10 | 12452740 | 12452958 | Gallbladder Epithelium | 0.05 | 0.91 | intron | CAMK1D | U |
| 782 | chr2 | 54918167 | 54918417 | Gallbladder Epithelium | 0.05 | 0.91 | Intergenic | EML6 | U |
| 783 | chr20 | 56510607 | 56510857 | Gallbladder Epithelium | 0.02 | 0.88 | Intergenic | MIR4532 | U |
| 784 | chr11 | 120407149 | 120407564 | Gallbladder Epithelium | 0.04 | 0.9 | Intergenic | GRIK4 | U |
| 785 | chr1 | 19704327 | 19704536 | Gallbladder Epithelium | 0.07 | 0.92 | intron | CAPZB | U |
| 786 | chr3 | 101820487 | 101820732 | Gallbladder Epithelium | 0.08 | 0.93 | Intergenic | LOC152225 | U |
| 787 | chr15 | 59567074 | 59567402 | Gallbladder Epithelium | 0.05 | 0.9 | intron | MYO1E | U |
| 788 | chr17 | 73524013 | 73524358 | Gallbladder Epithelium | 0.05 | 0.9 | intron | LLGL2 | U |
| 789 | chr6 | 158482805 | 158483162 | Gallbladder Epithelium | 0.05 | 0.9 | intron | SYNJ2 | U |
| 790 | chr8 | 28491963 | 28492355 | Gallbladder Epithelium | 0.07 | 0.92 | Intergenic | EXTL3 | U |
| 791 | chr18 | 60667371 | 60667796 | Gallbladder Epithelium | 0.08 | 0.93 | Intergenic | PHLPP1 | U |
| 792 | chr8 | 29986696 | 29986949 | Gallbladder Epithelium | 0.06 | 0.9 | intron | LEPROTL1 | U |
| 793 | chr16 | 48449938 | 48450248 | Gallbladder Epithelium | 0.05 | 0.89 | Intergenic | SIAH1 | U |
| 794 | chr11 | 1247043 | 1247202 | Gallbladder Epithelium | 0.04 | 0.87 | intron | MUC5B | U |
| 795 | chr4 | 100907155 | 100907416 | Gallbladder Epithelium | 0.05 | 0.88 | Intergenic | LOC256880 | U |
| 796 | chr13 | 107388914 | 107389195 | Gallbladder Epithelium | 0.05 | 0.88 | Intergenic | LINC00443 | U |
| 797 | chr12 | 121413009 | 121413450 | Gallbladder Epithelium | 0.09 | 0.92 | Intergenic | HNF1A-AS1 | U |
| 798 | chr2 | 235857897 | 235857967 | Gallbladder Epithelium | 0.12 | 0.94 | Intergenic | SH38P4 | U |
| 799 | chr21 | 44880700 | 44880922 | Gallbladder Epithelium | 0.07 | 0.89 | Intergenic | LINC00319 | U |
| 800 | chr17 | 360880543 | 36088321 | Gallbladder Epithelium | 0.09 | 0.91 | intron | HNF1B | U |
| 801 | chr8 | 29987038 | 29987389 | Gallbladder Epithelium | 0.05 | 0.87 | intron | LEPROTL1 | U |
| 802 | chr16 | 81819407 | 81819798 | Gallbladder Epithelium | 0.09 | 0.91 | intron, exon | PLCG2, PLCG2 | U |
| 803 | chr17 | 79914295 | 79914394 | Gallbladder Epithelium | 0.13 | 0.91 | intron | NOTUM | U |
| 804 | chr11 | 39868461 | 39868570 | Gallbladder Epithelium | 0.11 | 0.92 | Intergenic | LRRC4C | U |
| 805 | chr12 | 100969290 | 100969416 | Gallbladder Epithelium | 0.14 | 0.95 | intron | GAS2L3 | U |
| 806 | chr5 | 111559671 | 111559810 | Gallbladder Epithelium | 0.13 | 0.94 | intron | EPB41L4A | U |
| 807 | chr11 | 39868259 | 39868438 | Gallbladder Epithelium | 0.11 | 0.92 | Intergenic | LRRCAC | U |
| 808 | chr3 | 195071885 | 195072093 | Gallbladder Epithelium | 0.12 | 0.92 | intron | ACAP2 | U |
| 809 | chr15 | 85400424 | 85400643 | Gallbladder Epithelium | 0.09 | 0.89 | exon | ALPK3 | U |
| 810 | chr19 | 55717579 | 55717841 | Gallbladder Epithelium | 0.06 | 0.86 | intron | PTPRH | U |
| 811 | chr9 | 116673851 | 116674325 | Gallbladder Epithelium | 0.11 | 0.91 | intron | ZNF618 | U |
| 812 | chr11 | 60527423 | 60527466 | Gallbladder Epithelium | 0.09 | 0.88 | intron | MS4A15 | U |
| 813 | chr15 | 70929583 | 70929648 | Gallbladder Epithelium | 0.11 | 0.89 | Intergenic | UACA | U |
| 814 | chr12 | 50955346 | 50955659 | Gallbladder Epithelium | 0.14 | 0.93 | intron | DIP2B | U |
| 815 | chr1 | 16444223 | 16444600 | Gallbladder Epithelium | 0.13 | 0.92 | Intergenic | EPHA2 | U |
| 816 | chr11 | 64790716 | 64790825 | Gallbladder Epithelium | 0.11 | 0.89 | intron | ARL2-SNX15 | U |
| 817 | chr16 | 57638222 | 57638522 | Gallbladder Epithelium | 0.16 | 0.92 | Intergenic | GPR56 | U |
| 818 | chr21 | 44838717 | 44838851 | Gallbladder Epithelium | 0.11 | 0.86 | intron | SIK1 | U |
| 819 | chr18 | 3176288 | 3176650 | Gallbladder Epithelium | 0.15 | 0.9 | intron | MYOM1 | U |
| 820 | chr11 | 65607111 | 65607368 | Gallbladder Epithelium | 0.21 | 0.95 | intron | SNX32 | U |
| 821 | chr5 | 131961615 | 131961840 | Gallbladder Epithelium | 0.19 | 0.92 | intron | RAD50 | U |
| 822 | chr11 | 1862243 | 1862442 | Gallbladder Epithelium | 0.19 | 0.91 | exon | TNNI2 | U |
| 823 | chr3 | 118961606 | 118961918 | Gallbladder Epithelium | 0.17 | 0.89 | Intergenic | B4GALT4 | U |
| 824 | chr2 | 3205853 | 3206004 | Gallbladder Epithelium | 0.24 | 0.95 | intron | TSSC1 | U |
| 825 | chr19 | 2172333 | 2172590 | Gallbladder Epithelium | 0.2 | 0.91 | intron | DOT1L | U |
| 826 | chr17 | 16187347 | 16187583 | Gallbladder Epithelium | 0.25 | 0.95 | intron | PIGL | U |
| 827 | chr4 | 111004479 | 111004907 | Gallbladder Epithelium | 0.27 | 0.96 | intron | ELOVL6 | U |
| 828 | chr7 | 30824632 | 30825029 | Gallbladder Epithelium | 0.34 | 0.96 | intron | INMT-FAM188B | U |
| 829 | chr4 | 1306280 | 1306521 | Gallbladder Epithelium | 0.33 | 0.94 | intron | MAEA | U |
| 830 | chr2 | 223540221 | 223540662 | Gallbladder Epithelium | 0.15 | 0.92 | intron | MOGAT1 | U |
| 831 | chr20 | 53260018 | 53260192 | Gallbladder Epithelium | 0.16 | 0.91 | intron | DOK5 | U |
| 832 | chr18 | 3214677 | 3215154 | Gallbladder Epithelium | 0.01 | 0.95 | intron | MYOM1 | U |
| 833 | chr14 | 51491780 | 51492061 | Gallbladder Epithelium | 0.01 | 0.93 | intron | TRIM9 | U |
| 834 | chr11 | 1249809 | 1249896 | Gallbladder Epithelium | 0.03 | 0.94 | exon | MUC5B | U |
| 835 | chr21 | 44838854 | 44839324 | Gallbladder Epithelium | 0.04 | 0.94 | exon, intron | SIK1 | U |
| 836 | chr6 | 43752334 | 43752522 | Gallbladder Epithelium | 0.04 | 0.93 | exon | VEGFA | U |
| 837 | chr14 | 64107269 | 64107372 | Gallbladder Epithelium | 0.07 | 0.94 | intron | WDR89 | U |
| 838 | chr8 | 90768568 | 90768800 | Gallbladder Epithelium | 0.07 | 0.94 | Intergenic | RIPK2 | U |
| 839 | chr8 | 90768318 | 90768562 | Gallbladder Epithelium | 0.09 | 0.95 | Intergenic | RIPK2 | U |
| 840 | chr4 | 57082657 | 57083116 | Gallbladder Epithelium | 0.03 | 0.93 | intron | KIAA1211 | U |
| 841 | chr2 | 60642332 | 60642793 | Gallbladder Epithelium | 0.02 | 0.92 | Intergenic | MIR4432 | U |
| 842 | chr10 | 6781345 | 6781605 | Gallbladder Epithelium | 0.04 | 0.93 | Intergenic | LINC00707 | U |
| 843 | chr20 | 36008159 | 36008256 | Gallbladder Epithelium | 0.04 | 0.92 | intron | SRC | U |
| 844 | chr9 | 92976862 | 92976981 | Gallbladder Epithelium | 0 | 0.88 | Intergenic | LOC286370 | U |
| 845 | chr14 | 23748661 | 23749018 | Gallbladder Epithelium | 0.04 | 0.92 | intron | HOMEZ | U |
| 846 | chr14 | 64106921 | 64107174 | Gallbladder Epithelium | 0.05 | 0.92 | intron | WDR89 | U |
| 847 | chr1 | 220012556 | 220012880 | Gallbladder Epithelium | 0.05 | 0.92 | Intergenic | RNU5F-1 | U |
| 848 | chr5 | 500073 | 500481 | Gallbladder Epithelium | 0.04 | 0.91 | intron | SLC9A3 | U |
| 849 | chr11 | 64784378 | 64784793 | Gallbladder Epithelium | 0.06 | 0.92 | intron | ARL2-SNX15 | U |
| 850 | chr22 | 37971997 | 37972416 | Gallbladder Epithelium | 0.03 | 0.89 | intron | LGALS2 | U |
| 851 | chr19 | 55740650 | 55740846 | Gallbladder Epithelium | 0.09 | 0.94 | TTS, promoter-TSS | PPP6R1, TMEM868 | U |
| 852 | chr8 | 117667019 | 117667358 | Gallbladder Epithelium | 0.04 | 0.89 | intron | EIF3H | U |
| 853 | chr5 | 1161093 | 1161312 | Gallbladder Epithelium | 0.09 | 0.93 | Intergenic | SLC6A19 | U |
| 854 | chr7 | 1586104 | 1586158 | Gallbladder Epithelium | 0.05 | 0.87 | exon | TMEM184A | U |
| 855 | chr5 | 600978 | 601209 | Gallbladder Epithelium | 0.07 | 0.89 | Intergenic | CEP72 | U |
| 856 | chr6 | 18338103 | 18338416 | Gallbladder Epithelium | 0.03 | 0.85 | Intergenic | RNF1448 | U |
| 857 | chr19 | 53965476 | 53965785 | Gallbladder Epithelium | 0.12 | 0.93 | Intergenic | ZNF813 | U |
| 858 | chr3 | 193586951 | 193587241 | Gallbladder Epithelium | 0.13 | 0.91 | Intergenic | DPPA2P3 | U |
| 859 | chr17 | 77919294 | 77919595 | Gallbladder Epithelium | 0.16 | 0.92 | intron | TBC1D16 | U |
| 860 | chr12 | 95561915 | 95562388 | Gallbladder Epithelium | 0.17 | 0.93 | intron | FGD6 | U |
| 861 | chr11 | 1273472 | 1273921 | Gallbladder Epithelium | 0.15 | 0.9 | exon | MUC5B | U |
| 862 | chr22 | 40578030 | 40578244 | Gallbladder Epithelium | 0.25 | 0.93 | intron | TNRC6B | U |
| 863 | chr6 | 34870056 | 34870450 | Gallbladder Epithelium | 0.26 | 0.93 | intron | ANKS1A | U |
| 864 | chr9 | 97661527 | 97561987 | Gallbladder Epithelium | 0.27 | 0.94 | intron | C9orf3 | U |
| 865 | chr7 | 2067755 | 2068235 | Gallbladder Epithelium | 0.31 | 0.96 | intron | MAD1L1 | U |
| 866 | chr5 | 78881963 | 78882210 | Gallbladder Epithelium | 0.33 | 0.93 | Intergenic | PAPD4 | U |
| 867 | chr7 | 895051 | 895511 | Gallbladder Epithelium | 0.36 | 0.95 | intron | SUN1 | U |
| 868 | chr7 | 1013981941 | 101398294 | Gallbladder Epithelium | 0.73 | 0.14 | Intergenic | CUX1 | M |
| 869 | chr12 | 75874414 | 75874745 | Gallbladder Epithelium | 0.64 | 0.11 | promoter-TSS | GLIPR1 | M |
| 870 | chr12 | 111708144 | 111708282 | Gallbladder Epithelium | 0.67 | 0.18 | intron | CUX2 | M |
| 871 | chr14 | 104390340 | 104390644 | Gallbladder Epithelium | 0.5 | 0.13 | Intergenic | C14orf2 | M |
| 872 | chr14 | 106060773 | 106060939 | Gallbladder Epithelium | 0.9 | 0.55 | Intergenic | TMEM121 | M |
| 873 | chr4 | 46994535 | 46994749 | Gallbladder Epithelium | 0.52 | 0.17 | intron | GABRA4 | M |
| 874 | chr10 | 17672985 | 17673386 | Gallbladder Epithelium | 0.89 | 0.56 | intron | STAM | M |
| 875 | chr15 | 30537881 | 30537958 | Gallbladder Epithelium | 0.84 | 0.7 | Intergenic | DKFZP434L187 | M |
| 876 | chr9 | 65862749 | 65863117 | Gallbladder Epithelium | 0.87 | 0.74 | Intergenic | SPATA31AS | M |
| 877 | chr12 | 100869606 | 100869803 | Liver Hepatocytes | 0.02 | 0.93 | intron | NR1H4 | U |
| 878 | chr1 | 9614272 | 9614520 | Liver Hepatocytes | 0.04 | 0.95 | intron | SLC25A33 | U |
| 879 | chr15 | 42940421 | 42940515 | Liver Hepatocytes | 0.04 | 0.94 | intron | STARD9 | U |
| 880 | chr2 | 231385134 | 231385377 | Liver Hepatocytes | 0.04 | 0.93 | intron | SP100 | U |
| 881 | chr16 | 78590461 | 78590725 | Liver Hepatocytes | 0.06 | 0.95 | intron | WWOX | U |
| 882 | chr4 | 110434478 | 110434727 | Liver Hepatocytes | 0.08 | 0.96 | intron | SEC248 | U |
| 883 | chr4 | 31059101 | 3106020 | Liver Hepatocytes | 0.06 | 0.94 | intron | HTT | U |
| 884 | chr15 | 91194697 | 91194833 | Liver Hepatocytes | 0.06 | 0.94 | Intergenic | BLM | U |
| 885 | chr2 | 230936371 | 230936463 | Liver Hepatocytes | 0.06 | 0.93 | Intergenic | SLC16A14 | U |
| 886 | chr10 | 99062257 | 99062593 | Liver Hepatocytes | 0.07 | 0.93 | Intergenic | ARHGAP19 | U |
| 887 | chr17 | 1648769 | 1649109 | Liver Hepatocytes | 0.06 | 0.92 | intron | SERPINF2 | U |
| 888 | chr17 | 79984007 | 79984371 | Liver Hepatocytes | 0.07 | 0.93 | intron | LRRC45 | U |
| 889 | chr9 | 133474347 | 133474506 | Liver Hepatocytes | 0.08 | 0.94 | intron | FUBP3 | U |
| 890 | chr16 | 58625432 | 58625523 | Liver Hepatocytes | 0.11 | 0.96 | intron | CNOT1 | U |
| 891 | chr19 | 45449520 | 45450010 | Liver Hepatocytes | 0.05 | 0.9 | TTS, intron | APOC4, APOC4-APOC [symbol] | U |
| 892 | chr6 | 37114490 | 37114947 | Liver Hepatocytes | 0.1 | 0.94 | Intergenic | PIM1 | U |
| 893 | chr3 | 52245330 | 52245716 | Liver Hepatocytes | 0.12 | 0.95 | exon | ALAS1 | U |
| 894 | chr17 | 80440933 | 80441176 | Liver Hepatocytes | 0.12 | 0.93 | exon | NARF | U |
| 895 | chr16 | 67805212 | 67805663 | Liver Hepatocytes | 0.14 | 0.95 | intron | RANBP10 | U |
| 896 | chr15 | 40959187 | 40959312 | Liver Hepatocytes | 0.15 | 0.95 | Intergenic | LOC100505648 | U |
| 897 | chr4 | 74271468 | 74271601 | Liver Hepatocytes | 0.03 | 0.94 | intron | ALB | U |
| 898 | chr6 | 142606522 | 142606678 | Liver Hepatocytes | 0.05 | 0.95 | Intergenic | GPR126 | U |
| 899 | chr11 | 116705312 | 116705514 | Liver Hepatocytes | 0.04 | 0.94 | Intergenic | APOA1 | U |
| 900 | chr19 | 45792169 | 45792444 | Liver Hepatocytes | 0.05 | 0.94 | intron | MARK4 | U |
| 901 | chr5 | 36403138 | 36403266 | Liver Hepatocytes | 0.04 | 0.92 | Intergenic | RANBP31 | U |
| 902 | chr9 | 128347842 | 128348213 | Liver Hepatocytes | 0.07 | 0.95 | intron | MAPKAP1 | U |
| 903 | chr18 | 56112759 | 56113188 | Liver Hepatocytes | 0.05 | 0.93 | Intergenic | MIR122 | U |
| 904 | chr11 | 132221034 | 132221099 | Liver Hepatocytes | 0.06 | 0.93 | Intergenic | NTM | U |
| 905 | chr1 | 207263326 | 207263501 | Liver Hepatocytes | 0.05 | 0.92 | intron | C4BPB | U |
| 906 | chr12 | 53571394 | 53571569 | Liver Hepatocytes | 0.04 | 0.91 | intron | CSAD | U |
| 907 | chr2 | 121239392 | 121239693 | Liver Hepatocytes | 0.05 | 0.92 | Intergenic | LOC84931 | U |
| 908 | chr1 | 173883833 | 173884207 | Liver Hepatocytes | 0.06 | 0.93 | exon | SERPINC1 | U |
| 909 | chr2 | 119980538 | 119980922 | Liver Hepatocytes | 0.06 | 0.93 | promoter-TSS | STEAP3 | U |
| 910 | chr12 | 53564117 | 53564574 | Liver Hepatocytes | 0.00 | 0.93 | exon, intron | CSAD, CSAD | U |
| 911 | chr10 | 54534928 | 54535120 | Liver Hepatocytes | 0.05 | 0.91 | Intergenic | MBL2 | U |
| 912 | chr6 | 163617164 | 163617399 | Liver Hepatocytes | 0.06 | 0.92 | intron | PACRG | U |
| 913 | chr13 | 34183496 | 34183773 | Liver Hepatocytes | 0.07 | 0.93 | intron | STARD13 | U |
| 914 | chr19 | 27908201 | 2791240 | Liver Hepatocytes | 0.06 | 0.92 | intron | THOP1 | U |
| 915 | chr11 | 116680030 | 116680133 | Liver Hepatocytes | 0.13 | 0.95 | Intergenic | APOA4 | U |
| 916 | chr10 | 91168996 | 91169173 | Liver Hepatocytes | 0.07 | 0.92 | Intergenic | IFITS | U |
| 917 | chr5 | 32119151 | 32119334 | Liver Hepatocytes | 0.07 | 0.92 | Intergenic | GOLPH3 | U |
| 918 | chr11 | 116697148 | 116697339 | Liver Hepatocytes | 0.06 | 0.91 | Intergenic | APOA4 | U |
| 919 | chr1 | 243619235 | 243619436 | Liver Hepatocytes | 0.06 | 0.91 | intron | SDCCAG8 | U |
| 920 | chr1 | 93401410 | 93401622 | Liver Hepatocytes | 0.07 | 0.92 | intron | FAM69A | U |
| 921 | chr17 | 38700428 | 38700643 | Liver Hepatocytes | 0.07 | 0.92 | Intergenic | CCR7 | U |
| 922 | chr7 | 100163609 | 100163830 | Liver Hepatocytes | 0.06 | 0.91 | exon | AGFG2 | U |
| 923 | chr13 | 460152501 | 46015477 | Liver Hepatocytes | 0.05 | 0.9 | Intergenic | SLC25A30 | U |
| 924 | chr19 | 33767237 | 33767466 | Liver Hepatocytes | 0.07 | 0.92 | Intergenic | CEBPA | U |
| 925 | chr18 | 21641760 | 21641992 | Liver Hepatocytes | 0.06 | 0.91 | intron | TTC39C | U |
| 926 | chr8 | 13083273 | 13083574 | Liver Hepatocytes | 0.1 | 0.95 | intron | DLC1 | U |
| 927 | chr21 | 34677555 | 34677877 | Liver Hepatocytes | 0.07 | 0.92 | Intergenic | IFNAR1 | U |
| 928 | chr4 | 39435732 | 39436055 | Liver Hepatocytes | 0.03 | 0.88 | exon | KLB | U |
| 929 | chr17 | 17485333 | 17485733 | Liver Hepatocytes | 0.04 | 0.89 | exon, intron | PEMT, PEMT | U |
| 930 | chr22 | 46528295 | 46528709 | Liver Hepatocytes | 0.06 | 0.91 | Intergenic | PPARA | U |
| 931 | chr1 | 161207275 | 161207712 | Liver Hepatocytes | 0.08 | 0.93 | intron | NR1I3 | U |
| 932 | chr2 | 110069888 | 110070386 | Liver Hepatocytes | 0.05 | 0.9 | intron | SH3RF3 | U |
| 933 | chr6 | 49493139 | 49493240 | Liver Hepatocytes | 0.07 | 0.91 | intron | GLYATL3 | U |
| 934 | chr11 | 354147 | 354264 | Liver Hepatocytes | 0.04 | 0.88 | Intergenic | B4GALNT4 | U |
| 935 | chr4 | 39561899 | 39562084 | Liver Hepatocytes | 0.1 | 0.94 | intron | SMIM14 | U |
| 936 | chr1 | 11106576 | 11106783 | Liver Hepatocytes | 0.06 | 0.9 | exon | MASP2 | U |
| 937 | chr1 | 12585207 | 12585432 | Liver Hepatocytes | 0.06 | 0.9 | Intergenic | SNORA59B | U |
| 938 | chr16 | 72089070 | 72089441 | Liver Hepatocytes | 0.07 | 0.91 | intron | HP | U |
| 939 | chr3 | 50244816 | 50245293 | Liver Hepatocytes | 0.08 | 0.92 | intron | SLC38A3 | U |
| 940 | chr18 | 47360963 | 47361134 | Liver Hepatocytes | 0.08 | 0.91 | intron | MYO5B | U |
| 941 | chr19 | 58864286 | 58864529 | Liver Hepatocytes | 0.05 | 0.88 | exon | A18G | U |
| 942 | chr10 | 134158895 | 134159201 | Liver Hepatocytes | 0.08 | 0.91 | intron | LRRC27 | U |
| 943 | chr19 | 33990040 | 33990380 | Liver Hepatocytes | 0.08 | 0.91 | intron | PEPD | U |
| 944 | chr1 | 12582917 | 12583313 | Liver Hepatocytes | 0.11 | 0.94 | Intergenic | SNORA59B | U |
| 945 | chr19 | 8487337 | 8487567 | Liver Hepatocytes | 0.13 | 0.95 | intron | MARCH2 | U |
| 946 | chr4 | 185272821 | 185273279 | Liver Hepatocytes | 0.11 | 0.93 | intron | LOC728175 | U |
| 947 | chr11 | 77879061 | 77879556 | Liver Hepatocytes | 0.09 | 0.91 | Intergenic | KCTD21 | U |
| 948 | chr15 | 31450558 | 31450613 | Liver Hepatocytes | 0.13 | 0.94 | intron | TRPM1 | U |
| 949 | chr19 | 13303265 | 13303395 | Liver Hepatocytes | 0.09 | 0.9 | Intergenic | IER2 | U |
| 950 | chr3 | 148942102 | 148942284 | Liver Hepatocytes | 0.11 | 0.92 | Intergenic | CP | U |
| 951 | chr15 | 40674143 | 40674362 | Liver Hepatocytes | 0.13 | 0.94 | promoter-TSS | KNSTRN | U |
| 952 | chr16 | 83971779 | 83972003 | Liver Hepatocytes | 0.07 | 0.88 | Intergenic | OSGIN1 | U |
| 953 | chr19 | 49332720 | 49332964 | Liver Hepatocytes | 0.12 | 0.93 | intron | HSD17B14 | U |
| 954 | chr16 | 72096449 | 72096839 | Liver Hepatocytes | 0.06 | 0.87 | promoter-TSS | HPR | U |
| 955 | chr3 | 725247313 | 72525183 | Liver Hepatocytes | 0.09 | 0.9 | Intergenic | RYBP | U |
| 956 | chr4 | 1747210 | 1747291 | Liver Hepatocytes | 0.1 | 0.9 | TTS | TACC3 | U |
| 957 | chr1 | 8019114 | 8019208 | Liver Hepatocytes | 0.11 | 0.91 | Intergenic | PARK7 | U |
| 958 | chr7 | 71149382 | 71149485 | Liver Hepatocytes | 0.11 | 0.91 | intron | WBSCR17 | U |
| 959 | chr15 | 91425594 | 91425800 | Liver Hepatocytes | 0.08 | 0.88 | exon | FURIN | U |
| 960 | chr12 | 1096392601 | 109639506 | Liver Hepatocytes | 0.15 | 0.95 | exon | ACAC8 | U |
| 961 | chr14 | 1035737623 | 103574056 | Liver Hepatocytes | 0.14 | 0.94 | exon, intron | EXOC3L4, EXOC3L4 | U |
| 962 | chr4 | 1746776 | 1747101 | Liver Hepatocytes | 0.1 | 0.9 | TTS | TACC3 | U |
| 963 | chr3 | 1863335633 | 186333911 | Liver Hepatocytes | 0.13 | 0.9 | intron | AHSG | U |
| 964 | chr16 | 58751782 | 58752166 | Liver Hepatocytes | 0.13 | 0.93 | intron | GOT2 | U |
| 965 | chr8 | 22033325 | 22033533 | Liver Hepatocytes | 0.12 | 0.91 | intron | BMP1 | U |
| 966 | chr4 | 6923492 | 6923718 | Liver Hepatocytes | 0.14 | 0.93 | intron | TBC1D14 | U |
| 967 | chr3 | 126237039 | 126237489 | Liver Hepatocytes | 0.13 | 0.89 | promoter-TSS | UROC1 | U |
| 968 | chr11 | 57364364 | 57364499 | Liver Hepatocytes | 0.09 | 0.87 | promoter-TSS | SERPING1 | U |
| 969 | chr6 | 135444057 | 135444239 | Liver Hepatocytes | 0.08 | 0.86 | Intergenic | MYB | U |
| 970 | chr20 | 62254767 | 62255014 | Liver Hepatocytes | 0.14 | 0.92 | intron | GMEB2 | U |
| 971 | chr11 | 610913 | 611184 | Liver Hepatocytes | 0.14 | 0.92 | intron, exon | PHRF1, PHRF1 | U |
| 972 | chr1 | 1700329 | 1700815 | Liver Hepatocytes | 0.17 | 0.95 | intron | NADK | U |
| 973 | chr19 | 45438564 | 45438754 | Liver Hepatocytes | 0.14 | 0.91 | Intergenic | APOC4 | U |
| 974 | chr19 | 4003380 | 4003560 | Liver Hepatocytes | 0.14 | 0.9 | Intergenic | PIAS4 | U |
| 975 | chr2 | 128539850 | 128540067 | Liver Hepatocytes | 0.18 | 0.94 | intron | WDR33 | U |
| 976 | chr12 | 112014821 | 112015139 | Liver Hepatocytes | 0.19 | 0.95 | intron | ATXN2 | U |
| 977 | chr17 | 39843528 | 39843890 | Liver Hepatocytes | 0.12 | 0.88 | Intergenic | EIF1 | U |
| 978 | chr19 | 5871274 | 5871660 | Liver Hepatocytes | 0.13 | 0.89 | promoter-TSS, Interg [symbol] | FUT5, FUT5 | U |
| 979 | chr12 | 122313379 | 122313647 | Liver Hepatocytes | 0.18 | 0.9 | intron | HPD | U |
| 980 | chr8 | 21858621 | 21858815 | Liver Hepatocytes | 0.35 | 0.95 | intron | XPO7 | U |
| 981 | chr6 | 134297765 | 134297908 | Liver Hepatocytes | 0.05 | 0.96 | intron | TBPL1 | U |
| 982 | chr6 | 160500588 | 160501051 | Liver Hepatocytes | 0.04 | 0.95 | intron | IGF2R | U |
| 983 | chr19 | 11347513 | 11347633 | Liver Hepatocytes | 0.04 | 0.94 | exon, intron | DOCK6 | U |
| 984 | chr22 | 50644655 | 50644958 | Liver Hepatocytes | 0.06 | 0.93 | exon, intron | SELO, SELO | U |
| 985 | chr3 | 528125201 | 52812612 | Liver Hepatocytes | 0.05 | 0.89 | promoter-TSS | ITIH1 | U |
| 986 | chr1 | 65376254 | 65376644 | Liver Hepatocytes | 0.1 | 0.93 | intron | JAK1 | U |
| 987 | chr22 | 18214291 | 18214567 | Liver Hepatocytes | 0.06 | 0.92 | TTS | BCL2L13 | U |
| 988 | chr14 | 73628524 | 73628843 | Liver Hepatocytes | 0.11 | 0.96 | intron | PSEN1 | U |
| 989 | chr22 | 21128772 | 21129237 | Liver Hepatocytes | 0.05 | 0.94 | intron | SERPIND1 | U |
| 990 | chr6 | 25930165 | 25930293 | Liver Hepatocytes | 0.09 | 0.96 | intron | SLC17A2 | U |
| 991 | chr9 | 108180324 | 108180552 | Liver Hepatocytes | 0.05 | 0.92 | Intergenic | FSD1L | U |
| 992 | chr20 | 5164526 | 5164755 | Liver Hepatocytes | 0.05 | 0.91 | intron | CDS2 | U |
| 993 | chr9 | 17436967 | 17437175 | Liver Hepatocytes | 0.08 | 0.93 | intron | CNTLN | U |
| 994 | chr22 | 36694636 | 36695011 | Liver Hepatocytes | 0.07 | 0.92 | intron | MYH9 | U |
| 995 | chr22 | 18244342 | 18244496 | Liver Hepatocytes | 0.1 | 0.94 | intron | BID | U |
| 996 | chr22 | 40389141 | 40389279 | Liver Hepatocytes | 0.05 | 0.88 | Intergenic | FAM83F | U |
| 997 | chr20 | 329660741 | 32966265 | Liver Hepatocytes | 0.11 | 0.94 | intron | ITCH | U |
| 998 | chr6 | 11057852 | 11058182 | Liver Hepatocytes | 0.09 | 0.92 | intron | ELOVL2-AS1 | U |
| 999 | chr14 | 73570848 | 3571295 | Liver Hepatocytes | 0.07 | 0.9 | intron | RBM25 | U |
| 1000 | chr22 | 21124715 | 21124992 | Liver Hepatocytes | 0.09 | 0.91 | intron | PI4KA | U |
| 1001 | chr22 | 41742512 | 41742638 | Liver Hepatocytes | 0.15 | 0.92 | intron | ZC3H78 | U |
| 1002 | chr19 | 191649891 | 19165282 | Liver Hepatocytes | 0.14 | 0.91 | exon, intron | ARMC6, ARMC6 | U |
| 1003 | chr3 | 1972812631 | 197281406 | Liver Hepatocytes | 0.91 | 0.08 | intron | BDH1 | M |
| 1004 | chr8 | 141607110 | 141607587 | Liver Hepatocytes | 0.86 | 0.05 | intron | AGO2 | M |
| 1005 | chr5 | 143206485 | 143206826 | Liver Hepatocytes | 0.84 | 0.04 | intron | HIVEP2 | M |
| 1006 | chr1 | 230560233 | 230560712 | Liver Hepatocytes | 0.83 | 0.07 | intron | PGBD5 | M |
| 1007 | chr4 | 73998063 | 7400062 | Liver Hepatocytes | 0.88 | 0.14 | intron | SORCS2 | M |
| 1008 | chr2 | 233585441 | 23358852 | Liver Hepatocytes | 0.84 | 0.1 | Intergenic | KLHL29 | M |
| 1009 | chr2 | 44058696 | 44058786 | Liver Hepatocytes | 0.81 | 0.09 | intron | ABCG5 | M |
| 1010 | chr16 | 5167435 | 5167789 | Liver Hepatocytes | 0.72 | 0.03 | Intergenic | FAM86A | M |
| 1011 | chr10 | 1038808581 | 103881174 | Liver Hepatocytes | 0.73 | 0.07 | exon, promoter-TSS | LDB1, LDB1 | M |
| 1012 | chr12 | 1032729551 | 103273198 | Liver Hepatocytes | 0.69 | 0.04 | intron | PAH | M |
| 1013 | chr3 | 107084101 | 10708578 | Liver Hepatocytes | 0.81 | 0.18 | Intergenic | LINC00606 | M |
| 1014 | chr12 | 109729450 | 109729728 | Liver Hepatocytes | 0.64 | 0.02 | intron | FOXN4 | M |
| 1015 | chr18 | 550998981 | 55100290 | Liver Hepatocytes | 0.66 | 0.08 | Intergenic | ONECUT2 | M |
| 1016 | chr7 | 1006112973 | 100611720 | Liver Hepatocytes | 0.64 | 0.07 | Intergenic | MUC12 | M |
| 1017 | chr13 | 466274271 | 46627507 | Liver Hepatocytes | 0.62 | 0.06 | promoter-TSS | ZC3H13 | M |
| 1018 | chr17 | 56591006 | 56591496 | Liver Hepatocytes | 0.59 | 0.07 | intron | MTMR4 | M |
| 1019 | chr16 | 87943033 | 87943236 | Liver Hepatocytes | 0.8 | 0.02 | intron | CA5A | M |
| 1020 | chr3 | 55515250 | 55515736 | Liver Hepatocytes | 0.81 | 0.03 | promoter-TSS | WNT5A | M |
| 1021 | chr7 | 878481433 | 87848452 | Liver Hepatocytes | 0.8 | 0.03 | intron | SRI | M |
| 1022 | chr4 | 10020842 | 10020997 | Liver Hepatocytes | 0.76 | 0.04 | intron | SLC2A9 | M |
| 1023 | chr19 | 36389546 | 36389967 | Liver Hepatocytes | 0.71 | 0.02 | exon, intron | NFKBID, NFKBID | M |
| 1024 | chr13 | 113765195 | 113765320 | Liver Hepatocytes | 0.85 | 0.06 | intron | F7 | M |
| 1025 | chr14 | 59656966 | 59657244 | Liver Hepatocytes | 0.8 | 0.08 | intron | DAAM1 | M |
| 1026 | chr19 | 15580657 | 15580958 | Liver Hepatocytes | 0.75 | 0.05 | intron | PGLYRP2 | M |
| 1027 | chr4 | 10020419 | 10020794 | Liver Hepatocytes | 0.58 | 0.01 | exon | SLC2A9 | M |
| 1028 | chr14 | 81997731 | 81998179 | Pancreatic Acinar cells | 0.02 | 0.93 | intron | SEL1L | U |
| 1029 | chr11 | 117183396 | 117183511 | Pancreatic Acinar cells | 0.04 | 0.95 | intron | BACE1 | U |
| 1030 | chr4 | 31797721 | 3180231 | Pancreatic Acinar cells | 0.03 | 0.93 | intron | HTT | U |
| 1031 | chr17 | 71025197 | 71025671 | Pancreatic Acinar cells | 0.05 | 0.95 | intron | SLC39A11 | U |
| 1032 | chr7 | 97858311 | 97858590 | Pancreatic Acinar cells | 0.04 | 0.93 | intron | TECPR1 | U |
| 1033 | chr8 | 37891295 | 37891559 | Pancreatic Acinar cells | 0.06 | 0.95 | intron | EIF4EBP1 | U |
| 1034 | chr1 | 2301939993 | 230194357 | Pancreatic Acinar cells | 0.02 | 0.9 | Intergenic | GALNT2 | U |
| 1035 | chr16 | 630414 | 630878 | Pancreatic Acinar cells | 0.06 | 0.94 | intron | PIGQ | U |
| 1036 | chr7 | 2415447 | 2415667 | Pancreatic Acinar cells | 0.05 | 0.92 | intron | EIF38 | U |
| 1037 | chr7 | 97842283 | 97842419 | Pancreatic Acinar cells | 0.03 | 0.89 | TTS | BHLHA15 | U |
| 1038 | chr6 | 134540439 | 134540669 | Pancreatic Acinar cells | 0.08 | 0.94 | intron | SGK1 | U |
| 1039 | chr12 | 120741847 | 120742015 | Pancreatic Acinar cells | 0.04 | 0.89 | intron | SIRT4 | U |
| 1040 | chr15 | 90610401 | 90610702 | Pancreatic Acinar cells | 0.09 | 0.93 | intron | ZNF710 | U |
| 1041 | chr16 | 25181855 | 25182322 | Pancreatic Acinar cells | 0.11 | 0.95 | intron | LCMT1 | U |
| 1042 | chr7 | 97844610 | 97844822 | Pancreatic Acinar cells | 0.01 | 0.92 | TTS | TECPR1 | U |
| 1043 | chr12 | 1208932181 | 120893558 | Pancreatic Acinar cells | 0.02 | 0.93 | intron | GATC | U |
| 1044 | chr7 | 129910980 | 129911336 | Pancreatic Acinar cells | 0.03 | 0.94 | intron | CPA2 | U |
| 1045 | chr4 | 186605879 | 186605996 | Pancreatic Acinar cells | 0.03 | 0.93 | exon | SORBS2 | U |
| 1046 | chr1 | 22331421 | 22331618 | Pancreatic Acinar cells | 0.02 | 0.92 | intron | CELA3A | U |
| 1047 | chr2 | 182774084 | 182774369 | Pancreatic Acinar cells | 0.03 | 0.93 | intron | SSFA2 | U |
| 1048 | chr1 | 223300363 | 22330359 | Pancreatic Acinar cells | 0.02 | 0.92 | intron | CELA3A | U |
| 1049 | chr16 | 679639051 | 67964349 | Pancreatic Acinar cells | 0.03 | 0.93 | TTS, TTS | CTRL, PSKH1 | U |
| 1050 | chr1 | 15767029 | 15767514 | Pancreatic Acinar cells | 0.03 | 0.93 | intron | CTRC | U |
| 1051 | chr9 | 135940264 | 135940641 | Pancreatic Acinar cells | 0.03 | 0.92 | exon | CEL | U |
| 1052 | chr19 | 39692865 | 39692936 | Pancreatic Acinar cells | 0.03 | 0.91 | TTS | NCCRP1 | U |
| 1053 | chr12 | 8370881 | 8371049 | Pancreatic Acinar cells | 0.03 | 0.91 | Intergenic | FAM90A1 | U |
| 1054 | chr17 | 76178604 | 76178888 | Pancreatic Acinar cells | 0.05 | 0.93 | intron | TK1 | U |
| 1055 | chr6 | 170577808 | 170578184 | Pancreatic Acinar cells | 0.03 | 0.91 | Intergenic | LOC154449 | U |
| 1056 | chr18 | 77448085 | 77448179 | Pancreatic Acinar cells | 0.02 | 0.89 | intron | CTDP1 | U |
| 1057 | chr12 | 8371595 | 8371733 | Pancreatic Acinar cells | 0.02 | 0.89 | Intergenic | FAM9041 | U |
| 1058 | chr7 | 129614765 | 129614974 | Pancreatic Acinar cells | 0.03 | 0.9 | Intergenic | UBE2H | U |
| 1059 | chr11 | 65148746 | 65148988 | Pancreatic Acinar cells | 0.04 | 0.91 | intron | SLC25A45 | U |
| 1060 | chr1 | 42505787 | 42506136 | Pancreatic Acinar cells | 0.03 | 0.9 | Intergenic | HIVEP3 | U |
| 1061 | chr2 | 241266440 | 241266587 | Pancreatic Acinar cells | 0.04 | 0.9 | Intergenic | GPC1 | U |
| 1062 | chr13 | 113295841 | 113296010 | Pancreatic Acinar cells | 0.03 | 0.89 | Intergenic | C13orf35 | U |
| 1063 | chr9 | 135948843 | 135949021 | Pancreatic Acinar cells | 0.02 | 0.88 | Intergenic | CELP | U |
| 1064 | chr10 | 134224276 | 134224514 | Pancreatic Acinar cells | 0.06 | 0.92 | intron | PWWP2B | U |
| 1065 | chr10 | 118309614 | 118309859 | Pancreatic Acinar cells | 0.03 | 0.89 | intron | PNLIP | U |
| 1066 | chr2 | 135198029 | 135198417 | Pancreatic Acinar cells | 0.08 | 0.94 | intron | MGAT5 | U |
| 1067 | chr2 | 242847380 | 242847794 | Pancreatic Acinar cells | 0.06 | 0.92 | Intergenic | CXXC11 | U |
| 1068 | chr1 | 22331987 | 22332079 | Pancreatic Acinar cells | 0.03 | 0.88 | exon | CELA3A | U |
| 1069 | chr5 | 172408850 | 172409140 | Pancreatic Acinar cells | 0.02 | 0.87 | Intergenic | ATP6V0E1 | U |
| 1070 | chr6 | 35766021 | 35766339 | Pancreatic Acinar cells | 0.01 | 0.86 | Intergenic | CLPS | U |
| 1071 | chr12 | 120764208 | 120764549 | Pancreatic Acinar cells | 0.02 | 0.87 | intron | PLA2G1B | U |
| 1072 | chr16 | 4763799 | 4764173 | Pancreatic Acinar cells | 0.04 | 0.89 | intron | ANKS3 | U |
| 1073 | chr11 | 76076294 | 76076715 | Pancreatic Acinar cells | 0.08 | 0.93 | intron | PRKRIR | U |
| 1074 | chr1 | 26133259 | 26133406 | Pancreatic Acinar cells | 0.1 | 0.94 | intron | SEPN1 | U |
| 1075 | chr1 | 42243440 | 42243601 | Pancreatic Acinar cells | 0.09 | 0.93 | intron | HIVEP3 | U |
| 1076 | chr17 | 3808720 | 3808913 | Pancreatic Acinar cells | 0.04 | 0.88 | intron | P2RX1 | U |
| 1077 | chr2 | 97267907 | 97268130 | Pancreatic Acinar cells | 0.07 | 0.91 | exon | KANSL3 | U |
| 1078 | chr17 | 79814901 | 79815185 | Pancreatic Acinar cells | 0.08 | 0.92 | intron | P4HB | U |
| 1079 | chr12 | 120761832 | 120762191 | Pancreatic Acinar cells | 0.03 | 0.87 | intron | PLA2G1B | U |
| 1080 | chr2 | 46144305 | 46144713 | Pancreatic Acinar cells | 0.1. | 0.94 | intron | PRKCE | U |
| 1081 | chr1 | 230290496 | 230290954 | Pancreatic Acinar cells | 0.07 | 0.91 | intron | GALNT2 | U |
| 1082 | chr10 | 15273069 | 15273528 | Pancreatic Acinar cells | 0.07 | 0.91 | intron | FAM171A1 | U |
| 1083 | chr9 | 140415142 | 140415254 | Pancreatic Acinar cells | 0.07 | 0.9 | intron | PNPLA7 | U |
| 1084 | chr2 | 241638157 | 241638274 | Pancreatic Acinar cells | 0.06 | 0.89 | TTS | AQP12A | U |
| 1085 | chr1 | 185152942 | 185153271 | Pancreatic Acinar cells | 0.06 | 0.89 | intron | SWT1 | U |
| 1086 | chr9 | 134199248 | 134199675 | Pancreatic Acinar cells | 0.04 | 0.87 | Intergenic | PPAPDC3 | U |
| 1087 | chr11 | 62539791 | 62539982 | Pancreatic Acinar cells | 0.04 | 0.86 | intron | TAF6L | U |
| 1088 | chr4 | 1094258 | 1094499 | Pancreatic Acinar cells | 0.1 | 0.92 | intron | RNF212 | U |
| 1089 | chr12 | 126676605 | 126676921 | Pancreatic Acinar cells | 0.02 | 0.84 | Intergenic | LOC400084 | U |
| 1090 | chr16 | 19626697 | 19627017 | Pancreatic Acinar cells | 0.1 | 0.92 | intron | C16orf62 | U |
| 1091 | chr2 | 241632818 | 241633153 | Pancreatic Acinar cells | 0.06 | 0.88 | intron | AQP12A | U |
| 1092 | chr16 | 25229769 | 25230149 | Pancreatic Acinar cells | 0.03 | 0.85 | intron | AQP8 | U |
| 1093 | chr3 | 171789927 | 171790338 | Pancreatic Acinar cells | 0.09 | 0.91 | intron | FNDC3B | U |
| 1094 | chr12 | 120892262 | 120892369 | Pancreatic Acinar cells | 0.11 | 0.92 | intron | GATC | U |
| 1095 | chr14 | 101007293 | 101007792 | Pancreatic Acinar cells | 0.08 | 0.89 | intron | BEGAIN | U |
| 1096 | chr9 | 125705958 | 125706227 | Pancreatic Acinar cells | 0.12 | 0.92 | intron | RABGAP1 | U |
| 1097 | chr3 | 148567923 | 148568291 | Pancreatic Acinar cells | 0.05 | 0.85 | intron | CPB1 | U |
| 1098 | chr11 | 77283866 | 77284088 | Pancreatic Acinar cells | 0.14 | 0.93 | Intergenic | AQP11 | U |
| 1099 | chr19 | 10950193 | 10950550 | Pancreatic Acinar cells | 0.12 | 0.91 | Intergenic | TMED1 | U |
| 1100 | chr14 | 101006856 | 101007144 | Pancreatic Acinar cells | 0.11 | 0.89 | intron | BEGAIN | U |
| 1101 | chr19 | 4936033 | 4936335 | Pancreatic Acinar cells | 0.13 | 0.91 | intron | UHRF1 | U |
| 1102 | chr22 | 43275974 | 43276301 | Pancreatic Acinar cells | 0.13 | 0.91 | intron | PACSIN2 | U |
| 1103 | chr10 | 80806029 | 80806412 | Pancreatic Acinar cells | 0.14 | 0.92 | intron | ZMIZ1-AS1 | U |
| 1104 | chr16 | 87130700 | 87130875 | Pancreatic Acinar cells | 0.15 | 0.92 | Intergenic | C16orf95 | U |
| 1105 | chr5 | 177020076 | 177020544 | Pancreatic Acinar cells | 0.13 | 0.87 | intron | TMED9 | U |
| 1106 | chr3 | 148576081 | 148576341 | Pancreatic Acinar cells | 0.16 | 0.92 | intron | CPB1 | U |
| 1107 | chr12 | 120893581 | 120893926 | Pancreatic Acinar cells | 0.18 | 0.94 | intron | GATC | U |
| 1108 | chr1 | 28846374 | 28846793 | Pancreatic Acinar cells | 0.19 | 0.94 | intron | RCC1 | U |
| 1109 | chr17 | 71264563 | 71264808 | Pancreatic Acinar cells | 0.2 | 0.92 | Intergenic | CPSF4L | U |
| 1110 | chr16 | 88012199 | 88012511 | Pancreatic Acinar cells | 0.23 | 0.93 | intron | BANP | U |
| 1111 | chr15 | 90771745 | 90771965 | Pancreatic Acinar cells | 0.23 | 0.92 | exon | SEMA4B | U |
| 1112 | chr11 | 5704702 | 5704863 | Pancreatic Acinar cells | 0.3 | 0.95 | intron | TRIM5 | U |
| 1113 | chr7 | 116225201 | 116225369 | Pancreatic Acinar cells | 0.03 | 0.94 | Intergenic | CAV1 | U |
| 1114 | chr8 | 49668664 | 49668854 | Pancreatic Acinar cells | 0.02 | 0.92 | Intergenic | EFCAB1 | U |
| 1115 | chr7 | 100320415 | 100320683 | Pancreatic Acinar cells | 0.03 | 0.89 | intron | EPO | U |
| 1116 | chr10 | 120426551 | 120426615 | Pancreatic Acinar cells | 0.06 | 0.89 | Intergenic | PRLHR | U |
| 1117 | chr13 | 1011848243 | 101184990 | Pancreatic Acinar cells | 0.03 | 0.96 | exon | GGACT | U |
| 1118 | chr22 | 26958816 | 26958892 | Pancreatic Acinar cells | 0.02 | 0.94 | intron | TPST2 | U |
| 1119 | chr17 | 80395185 | 80395450 | Pancreatic Acinar cells | 0.02 | 0.93 | exon, intron | HEXDC | U |
| 1120 | chr3 | 148555831 | 148556261 | Pancreatic Acinar cells | 0.03 | 0.93 | intron | CPB1 | U |
| 1121 | chr16 | 75263335 | 75263738 | Pancreatic Acinar cells | 0.06 | 0.95 | exon | BCAR1 | U |
| 1122 | chr16 | 25228659 | 25228751 | Pancreatic Acinar cells | 0.02 | 0.9 | exon | AQP8 | U |
| 1123 | chr9 | 131857131 | 131857496 | Pancreatic Acinar cells | 0.04 | 0.91 | TTS, intron | CRAT | U |
| 1124 | chr11 | 868452 | 868668 | Pancreatic Acinar cells | 0.04 | 0.9 | TTS, exon | CHID1, TSPAN4 | U |
| 1125 | chr22 | 22041093 | 22041568 | Pancreatic Acinar cells | 0.12 | 0.95 | exon | PPIL2 | U |
| 1126 | chr2 | 86282085 | 86282481 | Pancreatic Acinar cells | 0.13 | 0.95 | intron | POLR1A | U |
| 1127 | chr20 | 47601901 | 47602272 | Pancreatic Acinar cells | 0.17 | 0.95 | intron | ARFGEF2 | U |
| 1128 | chr20 | 43938811 | 43939225 | Pancreatic Acinar cells | 0.04 | 0.94 | intron | RBPJL | U |
| 1129 | chr19 | 39691013 | 39691058 | Pancreatic Acinar cells | 0.02 | 0.91 | exon | NCCRP1 | U |
| 1130 | chr2 | 241631375 | 241631499 | Pancreatic Acinar cells | 0.03 | 0.92 | exon | AQP12A | U |
| 1131 | chr15 | 42211291 | 42211586 | Pancreatic Acinar cells | 0.05 | 0.94 | exon, intron | EHD4, EHD4 | U |
| 1132 | chr9 | 1403517361 | 140351908 | Pancreatic Acinar cells | 0.05 | 0.93 | intron | NSMF | U |
| 1133 | chr20 | 43938184 | 43938419 | Pancreatic Acinar cells | 0.03 | 0.91 | intron | RBPJL | U |
| 1134 | chr12 | 51749472 | 51749712 | Pancreatic Acinar cells | 0.06 | 0.92 | exon | GALNT6 | U |
| 1135 | chr22 | 24179883 | 24180181 | Pancreatic Acinar cells | 0.05 | 0.91 | exon, intron | DERL3, DERL3 | U |
| 1136 | chr11 | 65147920 | 65147974 | Pancreatic Acinar cells | 0.05 | 0.9 | intron | SLC25A45 | U |
| 1137 | chr22 | 44671168 | 44671297 | Pancreatic Acinar cells | 0.06 | 0.91 | intron | KIAA1644 | U |
| 1138 | chr7 | 129501469 | 129501600 | Pancreatic Acinar cells | 0.09 | 0.94 | intron | UBE2H | U |
| 1139 | chr9 | 35295715 | 35295918 | Pancreatic Acinar cells | 0.07 | 0.92 | intron | UNC13B | U |
| 1140 | chr16 | 20335338 | 20335551 | Pancreatic Acinar cells | 0.02 | 0.87 | exon | GP2 | U |
| 1141 | chr20 | 43948863 | 43949159 | Pancreatic Acinar cells | 0.04 | 0.89 | Intergenic | MATN4 | U |
| 1142 | chr19 | 500599193 | 50060293 | Pancreatic Acinar cells | 0.03 | 0.88 | intron, exon, intron | NOSIP, NOSIP, NOSIP | U |
| 1143 | chr16 | 75262836 | 75263298 | Pancreatic Acinar cells | 0.05 | 0.9 | TTS, exon | BCAR1, BCAR1 | U |
| 1144 | chr16 | 85351181 | 85351440 | Pancreatic Acinar cells | 0.09 | 0.93 | Intergenic | MIR5093 | U |
| 1145 | chr19 | 6026434 | 6026791 | Pancreatic Acinar cells | 0.09 | 0.93 | intron | RFX2 | U |
| 1146 | chr19 | 39691205 | 39691581 | Pancreatic Acinar cells | 0.02 | 0.86 | exon | NCCRP1 | U |
| 1147 | chr22 | 22041111 | 22041569 | Pancreatic Acinar cells | 0.11 | 0.95 | exon | PPIL2 | U |
| 1148 | chr7 | 97602665 | 97602853 | Pancreatic Acinar cells | 0.05 | 0.88 | Intergenic | MGC72080 | U |
| 1149 | chr19 | 7535541 | 7535800 | Pancreatic Acinar cells | 0.13 | 0.93 | intron, exon | ARHGEF18, ARHGEF1 [symbol] | U |
| 1150 | chr19 | 51589287 | 51589641 | Pancreatic Acinar cells | 0.06 | 0.89 | Intergenic | KLK14 | U |
| 1151 | chr20 | 30904803 | 30905203 | Pancreatic Acinar cells | 0.16 | 0.96 | intron | KIF38 | U |
| 1152 | chr19 | 19576160 | 19576557 | Pancreatic Acinar cells | 0.13 | 0.92 | exon | GATAD2A | U |
| 1153 | chr6 | 7310866 | 7311139 | Pancreatic Acinar cells | 0.14 | 0.92 | intron | SSR1 | U |
| 1154 | chr16 | 28914746 | 28915197 | Pancreatic Acinar cells | 0.09 | 0.87 | TTS | RABEP2 | U |
| 1155 | chr3 | 1840157381 | 184016106 | Pancreatic Acinar cells | 0.19 | 0.91 | Intergenic | PSMD2 | U |
| 1156 | chr1 | 22352744 | 22352894 | Pancreatic Acinar cells | 0.81 | 0.06 | intron | LINC00339 | M |
| 1157 | chr4 | 3486324 | 3486623 | Pancreatic Acinar cells | 0.81 | 0.11 | intron | DOK7 | M |
| 1158 | chr3 | 1333930453 | 133393165 | Pancreatic Acinar cells | 0.79 | 0.14 | Intergenic | TOPBP1 | M |
| 1159 | chr5 | 139283262 | 139283410 | Pancreatic Acinar cells | 0.71 | 0.07 | intron | NRG2 | M |
| 1160 | chr7 | 107786526 | 107786982 | Pancreatic Acinar cells | 0.58 | 0.05 | Intergenic | LAMB4 | M |
| 1161 | chr18 | 20140157 | 20140339 | Pancreatic Acinar cells | 0.56 | 0.05 | Intergenic | CTAGE1 | M |
| 1162 | chr12 | 25055441 | 25055771 | Pancreatic Acinar cells | 0.9 | 0.08 | promoter-TSS | BCAT1 | M |
| 1163 | chr13 | 28491265 | 28491662 | Pancreatic Acinar cells | 0.88 | 0.06 | Intergenic | PDX1 | M |
| 1164 | chr7 | 139168804 | 139169080 | Pancreatic Acinar cells | 0.94 | 0.13 | promoter-TSS | KLRG2 | M |
| 1165 | chr7 | 157361420 | 157361854 | Pancreatic Acinar cells | 0.84 | 0.03 | exon | PTPRN2 | M |
| 1166 | chr10 | 52178282 | 52178405 | Pancreatic Acinar cells | 0.85 | 0.05 | intron | SGMS1 | M |
| 1167 | chr12 | 65218052 | 65218171 | Pancreatic Acinar cells | 0.82 | 0.05 | promoter-TSS | TBC1D30 | M |
| 1168 | chr15 | 53089906 | 53090193 | Pancreatic Acinar cells | 0.85 | 0.08 | Intergenic | ONECUT1 | M |
| 1169 | chr14 | 74208161 | 74208539 | Pancreatic Acinar cells | 0.79 | 0.04 | intron | ELMSAN1 | M |
| 1170 | chr12 | 1177979153 | 117798353 | Pancreatic Acinar cells | 0.78 | 0.06 | intron | NOS1 | M |
| 1171 | chr4 | 1165716 | 1165975 | Pancreatic Acinar cells | 0.78 | 0.07 | intron | SPON2 | M |
| 1172 | chr7 | 127176750 | 127177145 | Pancreatic Acinar cells | 0.79 | 0.09 | Intergenic | GCC1 | M |
| 1173 | chr17 | 61553811 | 61554180 | Pancreatic Acinar cells | 0.72 | 0.04 | promoter-TSS | ACE | M |
| 1174 | chr11 | 123946941 | 123947372 | Pancreatic Acinar cells | 0.73 | 0.02 | Intergenic | OR10G7 | M |
| 1175 | chr11 | 1410140 | 1410191 | Pancreatic Acinar cells | 0.86 | 0.19 | promoter-TSS | BRSK2 | M |
| 1176 | chr8 | 11536821 | 11537026 | Pancreatic Acinar cells | 0.77 | 0.1 | Intergenic | GATA4 | M |
| 1177 | chr20 | 43945377 | 43945435 | Pancreatic Acinar cells | 0.85 | 0.2 | exon | RBPJL | M |
| 1178 | chr8 | 11537046 | 11537196 | Pancreatic Acinar cells | 0.71 | 0.08 | Intergenic | GATA4 | M |
| 1179 | chr22 | 38221073 | 38221383 | Pancreatic Acinar cells | 0.66 | 0.04 | exon | GALR3 | M |
| 1180 | chr16 | 67208453 | 67208631 | Pancreatic Acinar cells | 0.61 | 0.04 | exon | NOL3 | M |
| 1181 | chr9 | 136894752 | 136894939 | Pancreatic Alpha cells | 0.01 | 0.93 | TTS | BRD3 | U |
| 1182 | chr12 | 123058908 | 123059162 | Pancreatic Alpha cells | 0.03 | 0.94 | intron | KNTC1 | U |
| 1183 | chr4 | 3305594 | 3305918 | Pancreatic Alpha cells | 0.02 | 0.89 | Intergenic | RGS12 | U |
| 1184 | chr11 | 8258933 | 8259173 | Pancreatic Alpha cells | 0.05 | 0.91 | intron | LMO1 | U |
| 1185 | chr9 | 122767613 | 122767941 | Pancreatic Alpha cells | 0.02 | 0.88 | Intergenic | MIR147A | U |
| 1186 | chr18 | 5399141 | 5399588 | Pancreatic Alpha cells | 0.03 | 0.88 | intron | EPB41L3 | U |
| 1187 | chr5 | 57310246 | 57310709 | Pancreatic Alpha cells | 0.06 | 0.89 | Intergenic | PLK2 | U |
| 1188 | chr2 | 163006618 | 163007095 | Pancreatic Alpha cells | 0.04 | 0.87 | intron | GCG | U |
| 1189 | chr19 | 38695130 | 38695460 | Pancreatic Alpha cells | 0.11 | 0.92 | intron | SIPA1L3 | U |
| 1190 | chr14 | 93655063 | 93655455 | Pancreatic Alpha cells | 0.1 | 0.92 | Intergenic | TMEM251 | U |
| 1191 | chr4 | 128912121 | 128912567 | Pancreatic Alpha cells | 0.12 | 0.94 | intron | C4orf29 | U |
| 1192 | chr6 | 33672216 | 33672385 | Pancreatic Alpha cells | 0.06 | 0.86 | intron | MNF1 | U |
| 1193 | chr6 | 157907038 | 157907401 | Pancreatic Alpha cells | 0.12 | 0.92 | intron | ZDHHC14 | U |
| 1194 | chr11 | 33666715 | 33667028 | Pancreatic Alpha cells | 0.11 | 0.9 | intron | KIAA1549L | U |
| 1195 | chr13 | 24244799 | 24245022 | Pancreatic Alpha cells | 0.15 | 0.9 | intron | TNFRSF19 | U |
| 1196 | chr6 | 159183176 | 159183405 | Pancreatic Alpha cells | 0.13 | 0.88 | intron | SYTL3 | U |
| 1197 | chr7 | 1152687 | 1152806 | Pancreatic Alpha cells | 0.21 | 0.94 | intron | C7orf50 | U |
| 1198 | chr8 | 140863882 | 140864141 | Pancreatic Alpha cells | 0.28 | 0.95 | intron | TRAPPC9 | U |
| 1199 | chr17 | 65148228 | 65148582 | Pancreatic Alpha cells | 0.04 | 0.93 | intron | HELZ | U |
| 1200 | chr8 | 19270044 | 19270130 | Pancreatic Alpha cells | 0.03 | 0.91 | intron | CSGALNACT1 | U |
| 1201 | chr18 | 5398260 | 5398658 | Pancreatic Alpha cells | 0.02 | 0.9 | intron | EPB41L3 | U |
| 1202 | chr7 | 41528144 | 41528284 | Pancreatic Alpha cells | 0.03 | 0.89 | Intergenic | INHBA-AS1 | U |
| 1203 | chr18 | 5398664 | 5399022 | Pancreatic Alpha cells | 0.08 | 0.94 | intron | EPB41L3 | U |
| 1204 | chr2 | 236588582 | 236588647 | Pancreatic Alpha cells | 0.01 | 0.86 | intron | AGAP1 | U |
| 1205 | chr14 | 93490477 | 93490558 | Pancreatic Alpha cells | 0.08 | 0.93 | intron | ITPK1 | U |
| 1206 | chr21 | 37580197 | 37580399 | Pancreatic Alpha cells | 0.04 | 0.89 | intron | DOPEY2 | U |
| 1207 | chr7 | 3964943 | 3965209 | Pancreatic Alpha cells | 0.02 | 0.87 | intron | SDK1 | U |
| 1208 | chr2 | 191749899 | 191750262 | Pancreatic Alpha cells | 0.03 | 0.88 | intron | GLS | U |
| 1209 | chr10 | 127219667 | 127219682 | Pancreatic Alpha cells | 0.06 | 0.9 | Intergenic | LOC100169752 | U |
| 1210 | chr3 | 32381347 | 32381434 | Pancreatic Alpha cells | 0.05 | 0.89 | intron | CMTM8 | U |
| 1211 | chr10 | 1021209 | 1021351 | Pancreatic Alpha cells | 0.05 | 0.88 | Intergenic | GTPBP4 | U |
| 1212 | chr11 | 67871149 | 67871329 | Pancreatic Alpha cells | 0.08 | 0.91 | intron | CHKA | U |
| 1213 | chr4 | 141065012 | 141065244 | Pancreatic Alpha cells | 0.11 | 0.94 | intron | MAML3 | U |
| 1214 | chr6 | 170175943 | 170176162 | Pancreatic Alpha cells | 0.09 | 0.91 | exon | C6orf70 | U |
| 1215 | chr3 | 170059223 | 170059480 | Pancreatic Alpha cells | 0.04 | 0.86 | Intergenic | SKIL | U |
| 1216 | chr13 | 60435635 | 60435892 | Pancreatic Alpha cells | 0.06 | 0.88 | intron | DIAPH3 | U |
| 1217 | chr17 | 79222427 | 79222822 | Pancreatic Alpha cells | 0.07 | 0.88 | intron | SLC38A10 | U |
| 1218 | chr1 | 39952315 | 39952539 | Pancreatic Alpha cells | 0.11 | 0.9 | exon | MACF1 | U |
| 1219 | chr19 | 53049737 | 53049983 | Pancreatic Alpha cells | 0.13 | 0.92 | intron | ZNF808 | U |
| 1220 | chr2 | 49161981 | 49162312 | Pancreatic Alpha cells | 0.07 | 0.86 | Intergenic | LHCGR | U |
| 1221 | chr12 | 107866102 | 107866486 | Pancreatic Alpha cells | 0.1 | 0.89 | intron | BTBD11 | U |
| 1222 | chr4 | 3004786 | 3005003 | Pancreatic Alpha cells | 0.14 | 0.92 | intron | GRK4 | U |
| 1223 | chr6 | 153441728 | 153442021 | Pancreatic Alpha cells | 0.11 | 0.89 | intron | RGS17 | U |
| 1224 | chr8 | 2803474 | 2803845 | Pancreatic Alpha cells | 0.07 | 0.85 | intron | CSMD1 | U |
| 1225 | chr7 | 79840316 | 79840385 | Pancreatic Alpha cells | 0.13 | 0.9 | exon | GNAI1 | U |
| 1226 | chr3 | 177085908 | 177086174 | Pancreatic Alpha cells | 0.12 | 0.89 | Intergenic | LINC00578 | U |
| 1227 | chr15 | 57665395 | 57665796 | Pancreatic Alpha cells | 0.07 | 0.84 | Intergenic | CGNL1 | U |
| 1228 | chr2 | 163062923 | 163063357 | Pancreatic Alpha cells | 0.14 | 0.91 | intron | FAP | U |
| 1229 | chr10 | 75601807 | 75601893 | Pancreatic Alpha cells | 0.12 | 0.88 | intron | CAMK2G | U |
| 1230 | chr18 | 53212032 | 53212209 | Pancreatic Alpha cells | 0.14 | 0.9 | intron | TCF4 | U |
| 1231 | chr13 | 114111683 | 114111908 | Pancreatic Alpha cells | 0.12 | 0.88 | exon | DCUN1D2 | U |
| 1232 | chr21 | 17026618 | 17026965 | Pancreatic Alpha cells | 0.14 | 0.9 | Intergenic | USP25 | U |
| 1233 | chr8 | 1413986233 | 141398837 | Pancreatic Alpha cells | 0.14 | 0.89 | Intergenic | MIR4465 | U |
| 1234 | chr11 | 15662272 | 15662565 | Pancreatic Alpha cells | 0.07 | 0.82 | Intergenic | INSC | U |
| 1235 | chr7 | 50666848 | 50666929 | Pancreatic Alpha cells | 0.18 | 0.92 | intron | GRB10 | U |
| 1236 | chr12 | 107859460 | 107859678 | Pancreatic Alpha cells | 0.1 | 0.84 | intron | BTBD11 | U |
| 1237 | chr6 | 136920291 | 136920652 | Pancreatic Alpha cells | 0.13 | 0.87 | intron | MAP3K5 | U |
| 1238 | chr17 | 3745633 | 3745853 | Pancreatic Alpha cells | 0.22 | 0.95 | intron | C17orf85 | U |
| 1239 | chr2 | 101892145 | 101892366 | Pancreatic Alpha cells | 0.22 | 0.95 | exon | RNF149 | U |
| 1240 | chr1 | 246828709 | 246829097 | Pancreatic Alpha cells | 0.18 | 0.91 | intron | CNST | U |
| 1241 | chr8 | 93584045 | 93584109 | Pancreatic Alpha cells | 0.18 | 0.9 | Intergenic | FLJ46284 | U |
| 1242 | chr13 | 96827497 | 96827722 | Pancreatic Alpha cells | 0.19 | 0.91 | intron | HS6ST3 | U |
| 1243 | chr2 | 36985565 | 36985846 | Pancreatic Alpha cells | 0.12 | 0.84 | intron | VIT | U |
| 1244 | chr8 | 96051029 | 96051338 | Pancreatic Alpha cells | 0.21 | 0.93 | intron | NDUFAF6 | U |
| 1245 | chr5 | 164754286 | 164754657 | Pancreatic Alpha cells | 0.15 | 0.87 | Intergenic | MAT2B | U |
| 1246 | chrX | 56820581 | 56820750 | Pancreatic Alpha cells | 0.16 | 0.87 | intron | LOC550643 | U |
| 1247 | chr3 | 79999196 | 79999429 | Pancreatic Alpha cells | 0.12 | 0.83 | Intergenic | ROBO1 | U |
| 1248 | chr15 | 36621859 | 36622108 | Pancreatic Alpha cells | 0.15 | 0.86 | Intergenic | C15orf41 | U |
| 1249 | chr15 | 91509125 | 91509503 | Pancreatic Alpha cells | 0.2 | 0.91 | TTS, promoter-TSS | PRC1, LOC100507118 | U |
| 1250 | chr1 | 61411507 | 51411976 | Pancreatic Alpha cells | 0.17 | 0.88 | Intergenic | NFIA | U |
| 1251 | chr11 | 61368781 | 61368942 | Pancreatic Alpha cells | 0.15 | 0.85 | Intergenic | RPLP0P2 | U |
| 1252 | chr3 | 31857960 | 31858297 | Pancreatic Alpha cells | 0.17 | 0.87 | intron | OSBPL10 | U |
| 1253 | chr7 | 153394633 | 153394986 | Pancreatic Alpha cells | 0.15 | 0.84 | Intergenic | DPP6 | U |
| 1254 | chr21 | 45380092 | 45380197 | Pancreatic Alpha cells | 0.25 | 0.93 | intron | AGPAT3 | U |
| 1255 | chr11 | 33576001 | 33576108 | Pancreatic Alpha cells | 0.23 | 0.91 | intron | KIAA1549L | U |
| 1256 | chr18 | 45667935 | 45668049 | Pancreatic Alpha cells | 0.23 | 0.91 | Intergenic | ZBTB7C | U |
| 1257 | chr10 | 1000868481 | 100087183 | Pancreatic Alpha cells | 0.14 | 0.82 | Intergenic | LOXL4 | U |
| 1258 | chr1 | 201671557 | 201671897 | Pancreatic Alpha cells | 0.2 | 0.88 | intron | NAV1 | U |
| 1259 | chr10 | 75598299 | 75598697 | Pancreatic Alpha cells | 0.23 | 0.88 | intron | CAMK2G | U |
| 1260 | chr10 | 99427111 | 99427259 | Pancreatic Alpha cells | 0.25 | 0.92 | intron | PI4K2A | U |
| 1261 | chr7 | 55250136 | 55250413 | Pancreatic Alpha cells | 0.23 | 0.9 | intron | EGFR-AS1 | U |
| 1262 | chr10 | 421964 | 422153 | Pancreatic Alpha cells | 0.23 | 0.89 | intron | DIP2C | U |
| 1263 | chr6 | 148307348 | 148307563 | Pancreatic Alpha cells | 0.22 | 0.88 | Intergenic | SASH1 | U |
| 1264 | chr11 | 6835841 | 68358748 | Pancreatic Alpha cells | 0.23 | 0.89 | intron | PPP6R3 | U |
| 1265 | chr17 | 945834 | 946237 | Pancreatic Alpha cells | 0.26 | 0.92 | intron | ABR | U |
| 1266 | chr3 | 100536916 | 100537151 | Pancreatic Alpha cells | 0.24 | 0.89 | intron | ABI3BP | U |
| 1267 | chr9 | 140718792 | 140719046 | Pancreatic Alpha cells | 0.23 | 0.88 | intron | EHMT1 | U |
| 1268 | chr16 | 66577370 | 66577702 | Pancreatic Alpha cells | 0.2 | 0.85 | intron | TK2 | U |
| 1269 | chr4 | 40176314 | 40176379 | Pancreatic Alpha cells | 0.22 | 0.86 | Intergenic | RHOH | U |
| 1270 | chr10 | 27024210 | 27024361 | Pancreatic Alpha cells | 0.27 | 0.9 | exon, intron | PDSS1, PDSS1 | U |
| 1271 | chr3 | 8687845 | 8688230 | Pancreatic Alpha cells | 0.28 | 0.9 | intron | SSUH2 | U |
| 1272 | chr5 | 76171518 | 76171951 | Pancreatic Alpha cells | 0.19 | 0.81 | intron | S100Z | U |
| 1273 | chr6 | 159100930 | 159101081 | Pancreatic Alpha cells | 0.22 | 0.83 | intron | SYTL3 | U |
| 1274 | chr6 | 168668214 | 168668548 | Pancreatic Alpha cells | 0.27 | 0.88 | Intergenic | DACT2 | U |
| 1275 | chr12 | 109959317 | 109959565 | Pancreatic Alpha cells | 0.31 | 0.91 | exon, intron | UBE3B, UBE38 | U |
| 1276 | chr17 | 28538035 | 28538194 | Pancreatic Alpha cells | 0.3 | 0.89 | intron | SLC6A4 | U |
| 1277 | chr17 | 5756865 | 5757052 | Pancreatic Alpha cells | 0.25 | 0.83 | intron | LOC339166 | U |
| 1278 | chr1 | 94595612 | 94596059 | Pancreatic Alpha cells | 0.3 | 0.88 | Intergenic | ABCA4 | U |
| 1279 | chr2 | 195176961 | 195177002 | Pancreatic Alpha cells | 0.29 | 0.86 | Intergenic | SLC39A10 | U |
| 1280 | chr1 | 22439457 | 22439736 | Pancreatic Alpha cells | 0.36 | 0.92 | Intergenic | WNT4 | U |
| 1281 | chr11 | 33534024 | 33534354 | Pancreatic Alpha cells | 0.36 | 0.9 | Intergenic | KIAA1549L | U |
| 1282 | chr8 | 9448608 | 9449010 | Pancreatic Alpha cells | 0.31 | 0.85 | intron | TNKS | U |
| 1283 | chr18 | 74659093 | 74659517 | Pancreatic Alpha cells | 0.17 | 0.94 | intron | ZNF236 | U |
| 1284 | chr16 | 3795172 | 3795662 | Pancreatic Alpha cells | 0.32 | 0.93 | exon, intron | CREBBP | U |
| 1285 | chr10 | 128092762 | 128092925 | Pancreatic Alpha cells | 0.09 | 0.86 | Intergenic | ADAM12 | U |
| 1286 | chr3 | 59793504 | 59793615 | Pancreatic Alpha cells | 0.25 | 0.94 | intron | FHIT | U |
| 1287 | chr18 | 74541752 | 74541984 | Pancreatic Alpha cells | 0.32 | 0.95 | intron | ZNF236 | U |
| 1288 | chr22 | 41269489 | 41269560 | Pancreatic Alpha cells | 0.01 | 0.94 | intron | XPNPEP3 | U |
| 1289 | chr14 | 34144321 | 34144555 | Pancreatic Alpha cells | 0.15 | 0.93 | intron | NPAS3 | U |
| 1290 | chr20 | 31950133 | 31950344 | Pancreatic Alpha cells | 0.1 | 0.86 | intron | CDK5RAP1 | U |
| 1291 | chr13 | 113173833 | 113174184 | Pancreatic Alpha cells | 0.28 | 0.95 | intron | TUBGCP3 | U |
| 1292 | chr3 | 12940907 | 12941211 | Pancreatic Alpha cells | 0.35 | 0.93 | exon | IQSEC1 | U |
| 1293 | chr16 | 84553123 | 84553184 | Pancreatic Alpha cells | 0.06 | 0.91 | Intergenic | KIAA1609 | U |
| 1294 | chr20 | 24570628 | 24570737 | Pancreatic Alpha cells | 0.01 | 0.84 | intron | SYNDIG1 | U |
| 1295 | chr16 | 714186 | 714422 | Pancreatic Alpha cells | 0.16 | 0.93 | intron | WDR90 | U |
| 1296 | chr5 | 35231999 | 35232165 | Pancreatic Alpha cells | 0.13 | 0.88 | Intergenic | PRLR | U |
| 1297 | chr20 | 23637374 | 23637541 | Pancreatic Alpha cells | 0.15 | 0.87 | Intergenic | CST3 | U |
| 1298 | chr16 | 713945 | 714183 | Pancreatic Alpha cells | 0.08 | 0.79 | intron | WDR90 | U |
| 1299 | chr22 | 36375406 | 36375671 | Pancreatic Alpha cells | 0.17 | 0.88 | intron | R8FOX2 | U |
| 1300 | chr17 | 2539854 | 2540015 | Pancreatic Alpha cells | 0.22 | 0.9 | intron | PAFAH181 | U |
| 1301 | chr22 | 29678381 | 29678791 | Pancreatic Alpha cells | 0.23 | 0.89 | intron | EWSR1 | U |
| 1302 | chr22 | 38489645 | 38489992 | Pancreatic Alpha cells | 0.25 | 0.9 | intron | BAIAP2L2 | U |
| 1303 | chr22 | 303696493 | 30369746 | Pancreatic Alpha cells | 0.29 | 0.93 | intron | MTMR3 | U |
| 1304 | chr6 | 168709994 | 168710230 | Pancreatic Alpha cells | 0.29 | 0.92 | intron | DACT2 | U |
| 1305 | chr4 | 401616593 | 40162119 | Pancreatic Alpha cells | 0.3 | 0.93 | Intergenic | RHOH | U |
| 1306 | chr9 | 91940837 | 91941263 | Pancreatic Alpha cells | 0.26 | 0.88 | intron | SECISBP2 | U |
| 1307 | chr2 | 240362418 | 240362637 | Pancreatic Alpha cells | 0.93 | 0.17 | Intergenic | HDAC4 | M |
| 1308 | chr13 | 28492917 | 28492983 | Pancreatic Alpha cells | 0.88 | 0.13 | Intergenic | PDX1 | M |
| 1309 | chr13 | 28492638 | 28492765 | Pancreatic Alpha cells | 0.92 | 0.19 | Intergenic | PDX1 | M |
| 1310 | chr16 | 77823862 | 77824022 | Pancreatic Alpha cells | 0.86 | 0.16 | intron | VAT1L | M |
| 1311 | chr12 | 523461001 | 52346582 | Pancreatic Alpha cells | 0.75 | 0.07 | promoter-TSS | ACVR1B | M |
| 1312 | chr17 | 72348064 | 72348180 | Pancreatic Alpha cells | 0.78 | 0.11 | intron, exon | KIF19, KIF19 | M |
| 1313 | chr2 | 219910701 | 219910965 | Pancreatic Alpha cells | 0.76 | 0.1 | Intergenic | CCDC108 | M |
| 1314 | chr5 | 3278065 | 3278317 | Pancreatic Alpha cells | 0.77 | 0.17 | Intergenic | LOC285577 | M |
| 1315 | chr17 | 43044150 | 43044320 | Pancreatic Alpha cells | 0.6 | 0.12 | intron | C1QL1 | M |
| 1316 | chr10 | 26502618 | 26503037 | Pancreatic Alpha cells | 0.93 | 0.14 | Intergenic | GAD2 | M |
| 1317 | chr10 | 26501089 | 26501149 | Pancreatic Alpha cells | 0.96 | 0.14 | exon | MYO3A | M |
| 1318 | chr10 | 26500832 | 26501059 | Pancreatic Alpha cells | 0.94 | 0.15 | exon | MYO3A | M |
| 1319 | chr10 | 26500635 | 26500794 | Pancreatic Alpha cells | 0.9. | 0.13 | intron | MYO3A | M |
| 1320 | chr11 | 31846812 | 31846850 | Pancreatic Alpha cells | 0.9 | 0.19 | intron | DKFZp686K1684 | M |
| 1321 | chr | 134585146 | 134585371 | Pancreatic Alpha cells | 0.76 | 0.06 | Intergenic | ST3GAL1 | M |
| 1322 | chr19 | 41025447 | 41025747 | Pancreatic Alpha cells | 0.79 | 0.09 | exon | SPTBN4 | M |
| 1323 | chr7 | 157482024 | 157482301 | Pancreatic Alpha cells | 0.81 | 0.12 | intron | PTPRN2 | M |
| 1324 | chr7 | 157482641 | 157483120 | Pancreatic Alpha cells | 0.7 | 0.06 | intron | PTPRN2 | M |
| 1325 | chr16 | 77823437 | 77823725 | Pancreatic Alpha cells | 0.74 | 0.12 | intron | VAT1L | M |
| 1326 | chr19 | 6022436 | 6022549 | Pancreatic Alpha cells | 0.69 | 0.11 | intron | RFX2 | M |
| 1327 | chr19 | 38877908 | 38878227 | Pancreatic Alpha cells | 0.68 | 0.1 | intron | GGN | M |
| 1328 | chr3 | 1268546751 | 126854768 | Pancreatic Alpha cells | 0.66 | 0.09 | Intergenic | PLXNA1 | M |
| 1329 | chr10 | 99080071 | 99080335 | Pancreatic Alpha cells | 0.59 | 0.07 | exon | FRAT1 | M |
| 1330 | chr19 | 387188073 | 38718984 | Pancreatic Alpha cells | 0.63 | 0.13 | intron | DPF1 | M |
| 1331 | chr19 | 38877540 | 38877629 | Pancreatic Alpha cells | 0.61 | 0.17 | exon | GGN | M |
| 1332 | chr1 | 110175031 | 11017565 | Pancreatic Beta cells | 0.02 | 0.94 | intron | C1orf127 | U |
| 1333 | chr19 | 33035544 | 33035584 | Pancreatic Beta cells | 0.01 | 0.92 | Intergenic | PDCD5 | U |
| 1334 | chr17 | 45757584 | 45757963 | Pancreatic Beta cells | 0.02 | 0.93 | exon, intron | KPNB1 | U |
| 1335 | chr16 | 710495261 | 71049601 | Pancreatic Beta cells | 0 | 0.89 | intron | HYDIN | U |
| 1336 | chr5 | 45128099 | 45128339 | Pancreatic Beta cells | 0.04 | 0.92 | Intergenic | MRPS30 | U |
| 1337 | chr7 | 157822975 | 157823021 | Pancreatic Beta cells | 0.08 | 0.94 | intron | PTPRN2 | U |
| 1338 | chr12 | 21533849 | 21534202 | Pancreatic Beta cells | 0.02 | 0.88 | intron | SLCO1A2 | U |
| 1339 | chr7 | 111371216 | 111371582 | Pancreatic Beta cells | 0.06 | 0.91 | intron | DOCK4 | U |
| 1340 | chr19 | 4614761 | 4614944 | Pancreatic Beta cells | 0.07 | 0.91 | Intergenic | TNFAIP8L1 | U |
| 1341 | chr5 | 438160701 | 43316450 | Pancreatic Beta cells | 0.06 | 0.9 | Intergenic | HMGCS1 | U |
| 1342 | chr22 | 445512591 | 44551433 | Pancreatic Beta cells | 0.03 | 0.87 | intron | PARVB | U |
| 1343 | chr12 | 105694549 | 105694871 | Pancreatic Beta cells | 0.02 | 0.86 | Intergenic | C12orf75 | U |
| 1344 | chr10 | 94293775 | 94293990 | Pancreatic Beta cells | 0.1 | 0.92 | intron | IDE | U |
| 1345 | chr2 | 225897978 | 225898119 | Pancreatic Beta cells | 0.13 | 0.93 | intron | DOCK10 | U |
| 1346 | chr15 | 28473191 | 28473512 | Pancreatic Beta cells | 0.19 | 0.97 | exon, intron | HERC2 | U |
| 1347 | chr16 | 84091831 | 84092107 | Pancreatic Beta cells | 0.16 | 0.94 | intron | MBTPS1 | U |
| 1348 | chr11 | 46711310 | 46711664 | Pancreatic Beta cells | 0.22 | 0.94 | intron | ARHGAP2 | U |
| 1349 | chr22 | 47460066 | 47460436 | Pancreatic Beta cells | 0.22 | 0.93 | intron | TBC1D22A | U |
| 1350 | chr17 | 33443734 | 33444045 | Pancreatic Beta cells | 0.24 | 0.95 | exon, intron | RAD51D | U |
| 1351 | chr3 | 115762709 | 115762787 | Pancreatic Beta cells | 0.28 | 0.95 | intron | LSAMP | U |
| 1352 | chr2 | 239293858 | 293966 | Pancreatic Beta cells | 0.03 | 0.95 | intron | TRAF3IP1 | U |
| 1353 | chr8 | 131216273 | 131216600 | Pancreatic Beta cells | 0.02 | 0.94 | intron | ASAP1 | U |
| 1354 | chr1 | 10573884 | 10574070 | Pancreatic Beta cells | 0.01 | 0.91 | intron | PEX14 | U |
| 1355 | chr5 | 6639629 | 6639828 | Pancreatic Beta cells | 0.02 | 0.92 | intron | SRD5A1 | U |
| 1356 | chr4 | 1526193533 | 152619788 | Pancreatic Beta cells | 0.03 | 0.93 | intron | PET112 | U |
| 1357 | chr7 | 152472533 | 152472635 | Pancreatic Beta cells | 0.02 | 0.91 | intron | ACTR3B | U |
| 1358 | chr5 | 1377127613 | 137712926 | Pancreatic Beta cells | 0.02 | 0.91 | intron | KDM3B | U |
| 1359 | chr10 | 307424391 | 30742607 | Pancreatic Beta cells | 0.03 | 0.92 | intron | MAP3K8 | U |
| 1360 | chr8 | 123843945 | 123844168 | Pancreatic Beta cells | 0.05 | 0.93 | intron | ZHX2 | U |
| 1361 | chr2 | 1447151103 | 144715490 | Pancreatic Beta cells | 0.02 | 0.9 | intron | GTDC1 | U |
| 1362 | chr4 | 188074215 | 188074325 | Pancreatic Beta cells | 0.02 | 0.89 | Intergenic | LOC339975 | U |
| 1363 | chr1 | 11303087 | 11303223 | Pancreatic Beta cells | 0.04 | 0.91 | intron | MTOR | U |
| 1364 | chr13 | 52405059 | 52405168 | Pancreatic Beta cells | 0.03 | 0.89 | intron | LINC00282 | U |
| 1365 | chr2 | 34244021 | 3424584 | Pancreatic Beta cells | 0.03 | 0.89 | intron | TRAPPC12 | U |
| 1366 | chr3 | 172640814 | 172641119 | Pancreatic Beta cells | 0.03 | 0.89 | intron | SPATA16 | U |
| 1367 | chr6 | 81314161 | 81314268 | Pancreatic Beta cells | 0.06 | 0.91 | Intergenic | BCKDHB | U |
| 1368 | chr13 | 56573620 | 56573768 | Pancreatic Beta cells | 0.03 | 0.88 | Intergenic | MIR5007 | U |
| 1369 | chr2 | 233422665 | 233422859 | Pancreatic Beta cells | 0.05 | 0.9 | intron | EIF4E2 | U |
| 1370 | chr15 | 59577839 | 59578065 | Pancreatic Beta cells | 0.05 | 0.9 | intron | MYO1E | U |
| 1371 | chr1 | 238543890 | 238544336 | Pancreatic Beta cells | 0.03 | 0.88 | Intergenic | LOC339535 | U |
| 1372 | chr2 | 221134662 | 221134943 | Pancreatic Beta cells | 0.03 | 0.87 | Intergenic | MIR4268 | U |
| 1373 | chr4 | 184808460 | 184808821 | Pancreatic Beta cells | 0.05 | 0.89 | Intergenic | STOX2 | U |
| 1374 | chr11 | 2174558 | 2174640 | Pancreatic Beta cells | 0.06 | 0.89 | intron | INS-IGF2 | U |
| 1375 | chr5 | 1762609941 | 176261118 | Pancreatic Beta cells | 0.05 | 0.88 | intron | UNC5A | U |
| 1376 | chr8 | 99353984 | 99354240 | Pancreatic Beta cells | 0.06 | 0.89 | Intergenic | NIPAL2 | U |
| 1377 | chr1 | 11007326 | 11007615 | Pancreatic Beta cells | 0.06 | 0.89 | intron | C1orf127 | U |
| 1378 | chr15 | 33203375 | 33203671 | Pancreatic Beta cells | 0.1 | 0.93 | intron | FMN1 | U |
| 1379 | chr5 | 39002706 | 39002764 | Pancreatic Beta cells | 0.14 | 0.96 | exon | RICTOR | U |
| 1380 | chr16 | 71798505 | 71798635 | Pancreatic Beta cells | 0.12 | 0.94 | intron | AP1G1 | U |
| 1381 | chr3 | 72775909 | 72776073 | Pancreatic Beta cells | 0.04 | 0.86 | Intergenic | SHQ1 | U |
| 1382 | chr9 | 116745198 | 116745432 | Pancreatic Beta cells | 0.08 | 0.9 | intron | ZNF618 | U |
| 1383 | chr5 | 118554340 | 118554434 | Pancreatic Beta cells | 0.13 | 0.94 | intron | DMXL1 | U |
| 1384 | chr9 | 135887415 | 135887513 | Pancreatic Beta cells | 0.03 | 0.84 | Intergenic | GTF3C5 | U |
| 1385 | chr8 | 48809687 | 48809982 | Pancreatic Beta cells | 0.11 | 0.92 | exon | PRKDC | U |
| 1386 | chr2 | 99487624 | 99487975 | Pancreatic Beta cells | 0.07 | 0.88 | intron | KIAA1211L | U |
| 1387 | chr1 | 2016745801 | 201674721 | Pancreatic Beta cells | 0.09 | 0.89 | intron | NAV1 | U |
| 1388 | chr11 | 834063901 | 83406584 | Pancreatic Beta cells | 0.09 | 0.89 | intron | DLG2 | U |
| 1389 | chr2 | 2367575941 | 236757902 | Pancreatic Beta cells | 0.11 | 0.91 | intron | AGAP1 | U |
| 1390 | chr3 | 122144391 | 122144746 | Pancreatic Beta cells | 0.12 | 0.92 | exon | KPNA1 | U |
| 1391 | chr1 | 16030996 | 16031353 | Pancreatic Beta cells | 0.07 | 0.87 | intron | PLEKHM2 | U |
| 1392 | chr6 | 154919079 | 154919449 | Pancreatic Beta cells | 0.06 | 0.86 | Intergenic | CNKSR3 | U |
| 1393 | chr8 | 1421584211 | 142158610 | Pancreatic Beta cells | 0.11 | 0.9 | intron | DENND3 | U |
| 1394 | chr10 | 70010968 | 70011291 | Pancreatic Beta cells | 0.05 | 0.84 | Intergenic | ATOH7 | U |
| 1395 | chr16 | 5153423 | 5153815 | Pancreatic Beta cells | 0.06 | 0.85 | Intergenic | FAM86A | U |
| 1396 | chr19 | 43995336 | 43995731 | Pancreatic Beta cells | 0.12 | 0.91 | intron | PHLDB3 | U |
| 1397 | chr3 | 197212554 | 197212982 | Pancreatic Beta cells | 0.11 | 0.9 | Intergenic | BDH1 | U |
| 1398 | chr10 | 133058775 | 133058862 | Pancreatic Beta cells | 0.12 | 0.9 | intron | TCERG1L | U |
| 1399 | chr13 | 94650116 | 94650372 | Pancreatic Beta cells | 0.12 | 0.9 | intron | GPC6 | U |
| 1400 | chr7 | 70038370 | 70038661 | Pancreatic Beta cells | 0.11 | 0.89 | intron | AUTS2 | U |
| 1401 | chr14 | 101186014 | 101186336 | Pancreatic Beta cells | 0.04 | 0.82 | Intergenic | DLK1 | U |
| 1402 | chr10 | 35593985 | 35594172 | Pancreatic Beta cells | 0.13 | 0.9 | intron | CCNY | U |
| 1403 | chr10 | 94293767 | 94293991 | Pancreatic Beta cells | 0.15 | 0.92 | intron | IDE | U |
| 1404 | chr11 | 17482160 | 17482576 | Pancreatic Beta cells | 0.09 | 0.86 | exon, intron | ABCC8, ABCC8 | U |
| 1405 | chr18 | 545185613 | 54518665 | Pancreatic Beta cells | 0.14 | 0.9 | intron | WDR7 | U |
| 1406 | chr1 | 236198381 | 23619958 | Pancreatic Beta cells | 0.19 | 0.95 | Intergenic | HNRNPR | U |
| 1407 | chr1 | 236432042 | 236432165 | Pancreatic Beta cells | 0.13 | 0.89 | intron | ERO1LB | U |
| 1408 | chr2 | 66554646 | 66554819 | Pancreatic Beta cells | 0.12 | 0.88 | Intergenic | MIR4778 | U |
| 1409 | chr21 | 47735995 | 47736173 | Pancreatic Beta cells | 0.16 | 0.91 | intron | C21orf58 | U |
| 1410 | chr9 | 1346500033 | 134650240 | Pancreatic Beta cells | 0.07 | 0.82 | Intergenic | RAPGEF1 | U |
| 1411 | chr4 | 165846801 | 16584939 | Pancreatic Beta cells | 0.16 | 0.91 | intron | LDB2 | U |
| 1412 | chr17 | 67530192 | 67530481 | Pancreatic Beta cells | 0.15 | 0.9 | intron | MAP2K6 | U |
| 1413 | chr21 | 48078860 | 48079192 | Pancreatic Beta cells | 0.19 | 0.94 | exon | PRMT2 | U |
| 1414 | chr8 | 144555154 | 144555307 | Pancreatic Beta cells | 0.11 | 0.85 | intron | ZC3H3 | U |
| 1415 | chr3 | 14511595 | 14511792 | Pancreatic Beta cells | 0.09 | 0.83 | intron | SLC6A6 | U |
| 1416 | chr17 | 43091359 | 43091586 | Pancreatic Beta cells | 0.15 | 0.89 | Intergenic | C1QL1 | U |
| 1417 | chr20 | 57398590 | 57398840 | Pancreatic Beta cells | 0.11 | 0.85 | intron | GNAS-AS1 | U |
| 1418 | chr3 | 197431446 | 197431620 | Pancreatic Beta cells | 0.21 | 0.93 | exon | KIAA0226 | U |
| 1419 | chr8 | 74351022 | 74351241 | Pancreatic Beta cells | 0.17 | 0.9 | exon | STAU2-AS1 | U |
| 1420 | chr12 | 80402312 | 80402559 | Pancreatic Beta cells | 0.19 | 0.92 | Intergenic | PPP1R12A | U |
| 1421 | chr17 | 3737463 | 3737841 | Pancreatic Beta cells | 0.18 | 0.9 | intron | C17orf85 | U |
| 1422 | chr8 | 140900839 | 140901244 | Pancreatic Beta cells | 0.13 | 0.85 | intron | TRAPPC9 | U |
| 1423 | chr2 | 3431774 | 3432180 | Pancreatic Beta cells | 0.18 | 0.9 | intron | TRAPPC12 | U |
| 1424 | chr16 | 70619229 | 70619378 | Pancreatic Beta cells | 0.23 | 0.93 | intron | IL34 | U |
| 1425 | chr1 | 38058749 | 38058959 | Pancreatic Beta cells | 0.21 | 0.91 | intron | GNL2 | U |
| 1426 | chr8 | 144545917 | 144546130 | Pancreatic Beta cells | 0.19 | 0.89 | intron | ZC3H3 | U |
| 1427 | chr7 | 1293330233 | 129333347 | Pancreatic Beta cells | 0.24 | 0.94 | intron | NRF1 | U |
| 1428 | chr18 | 29493069 | 29493412 | Pancreatic Beta cells | 0.21 | 0.91 | exon, intron | TRAPPC8, TRAPPC8 | U |
| 1429 | chr1 | 111011211 | 111011645 | Pancreatic Beta cells | 0.13 | 0.83 | Intergenic | CYMP | U |
| 1430 | chr15 | 52008281 | 52008537 | Pancreatic Beta cells | 0.25 | 0.94 | intron | SCG3 | U |
| 1431 | chr10 | 121146663 | 121146920 | Pancreatic Beta cells | 0.23 | 0.92 | intron | GRK5 | U |
| 1432 | chr14 | 93400750 | 93401052 | Pancreatic Beta cells | 0.11 | 0.8 | intron | CHGA | U |
| 1433 | chr8 | 144578492 | 144578586 | Pancreatic Beta cells | 0.17 | 0.85 | intron | ZC3H3 | U |
| 1434 | chr18 | 72341539 | 72341718 | Pancreatic Beta cells | 0.23 | 0.91 | Intergenic | ZNF407 | U |
| 1435 | chr1 | 20826430 | 20826817 | Pancreatic Beta cells | 0.2 | 0.88 | exon | MUL1 | U |
| 1436 | chr1 | 110154279 | 110154578 | Pancreatic Beta cells | 0.25 | 0.92 | intron | GNAT2 | U |
| 1437 | chr14 | 103120423 | 103120620 | Pancreatic Beta cells | 0.3 | 0.94 | intron | RCOR1 | U |
| 1438 | chr3 | 118945649 | 118945808 | Pancreatic Beta cells | 0.33 | 0.94 | exon | B4GALT4 | U |
| 1439 | chr11 | 68181416 | 68181802 | Pancreatic Beta cells | 0.34 | 0.95 | intron | LRP5 | U |
| 1440 | chr7 | 156933820 | 156934217 | Pancreatic Beta cells | 0.32 | 0.93 | intron | UBE3C | U |
| 1441 | chr8 | 144546287 | 144546546 | Pancreatic Beta cells | 0.03 | 0.95 | intron | ZC3H3 | U |
| 1442 | chr22 | 32628870 | 32629026 | Pancreatic Beta cells | 0.02 | 0.9 | intron | SLC5A4 | U |
| 1443 | chr11 | 2176043 | 2176302 | Pancreatic Beta cells | 0.01 | 0.89 | intron | INS-IGF2 | U |
| 1444 | chr10 | 121550377 | 121550767 | Pancreatic Beta cells | 0.04 | 0.92 | intron | INPP5F | U |
| 1445 | chr18 | 56002609 | 56002896 | Pancreatic Beta cells | 0.1 | 0.9 | intron | NEDD4L | U |
| 1446 | chr10 | 135206703 | 135207007 | Pancreatic Beta cells | 0.02 | 0.94 | promoter-TSS | MTG1 | U |
| 1447 | chr6 | 11769090 | 11769210 | Pancreatic Beta cells | 0.05 | 0.93 | intron | ADTRP | U |
| 1448 | chr19 | 33953366 | 33953525 | Pancreatic Beta cells | 0.02 | 0.9 | intron | PEPD | U |
| 1449 | chr3 | 196100180 | 196100348 | Pancreatic Beta cells | 0.07 | 0.94 | intron | UBXN7 | U |
| 1450 | chr6 | 735859 | 736030 | Pancreatic Beta cells | 0.04 | 0.89 | Intergenic | EXOC2 | U |
| 1451 | chr22 | 30719173 | 30719481 | Pancreatic Beta cells | 0.05 | 0.9 | intron | TBC1D10A | U |
| 1452 | chr16 | 30958131 | 30958558 | Pancreatic Beta cells | 0.05 | 0.9 | exon | FBXL19 | U |
| 1453 | chr9 | 88873435 | 88873641 | Pancreatic Beta cells | 0.11 | 0.93 | intron | C9orf153 | U |
| 1454 | chr20 | 47604576 | 47604800 | Pancreatic Beta cells | 0.1 | 0.91 | intron | ARFGEF2 | U |
| 1455 | chr11 | 2176386 | 2176569 | Pancreatic Beta cells | 0.02 | 0.81 | intron | INS-IGF2 | U |
| 1456 | chr16 | 89202972 | 89203202 | Pancreatic Beta cells | 0.13 | 0.91 | promoter-TSS, exon, | ACSF3, ACSF3, ACSF3 | U |
| 1457 | chr9 | 101531696 | 101532118 | Pancreatic Beta cells | 0.16 | 0.92 | intron | ANKS6 | U |
| 1458 | chr15 | 994313401 | 99431443 | Pancreatic Beta cells | 0.21 | 0.94 | intron | IGF1R | U |
| 1459 | chr16 | 24794958 | 24795392 | Pancreatic Beta cells | 0.25 | 0.94 | intron | TNRC6A | U |
| 1460 | chr12 | 123826263 | 123826655 | Pancreatic Beta cells | 0.35 | 0.94 | intron | SBNO1 | U |
| 1461 | chr12 | 133196447 | 133196601 | Pancreatic Beta cells | 0.91 | 0.15 | intron | P2RX2 | M |
| 1462 | chr20 | 62105601 | 62105759 | Pancreatic Beta cells | 0.81 | 0.13 | Intergenic | KCNQ2 | M |
| 1463 | chr8 | 144502355 | 144502675 | Pancreatic Beta cells | 0.85 | 0.2 | Intergenic | MAFA | M |
| 1464 | chr8 | 136225451 | 136225753 | Pancreatic Beta cells | 0.86 | 0.22 | Intergenic | LOC286094 | M |
| 1465 | chr2 | 67877948 | 67878150 | Pancreatic Beta cells | 0.73 | 0.07 | Intergenic | ETAA1 | M |
| 1466 | chr11 | 33398566 | 33398747 | Pancreatic Beta cells | 0.78 | 0.18 | Intergenic | HIPK3 | M |
| 1467 | chr9 | 137981018 | 137981123 | Pancreatic Beta cells | 0.81 | 0.23 | intron | OLFM1 | M |
| 1468 | chr12 | 133196638 | 133196803 | Pancreatic Beta cells | 0.92 | 0.34 | intron | P2RX2 | M |
| 1469 | chr14 | 105266518 | 105266597 | Pancreatic Beta cells | 0.66 | 0.09 | promoter-TSS | ZBTB42 | M |
| 1470 | chr20 | 62105422 | 62105531 | Pancreatic Beta cells | 0.75 | 0.2 | Intergenic | KCNQ2 | M |
| 1471 | chr5 | 158476829 | 158477015 | Pancreatic Beta cells | 0.7 | 0.16 | intron | EBF1 | M |
| 1472 | chr2 | 219847327 | 219847685 | Pancreatic Beta cells | 0.91 | 0.11 | intron | FEV | M |
| 1473 | chr2 | 219847690 | 219848028 | Pancreatic Beta cells | 0.94 | 0.17 | intron | FEV | M |
| 1474 | chr2 | 1858523 | 1858835 | Pancreatic Beta cells | 0.84 | 0.1 | intron | MYT1L | M |
| 1475 | chr22 | 314805333 | 31480702 | Pancreatic Beta cells | 0.78 | 0.08 | promoter-TSS | SMTN | M |
| 1476 | chr1 | 2780356 | 2780689 | Pancreatic Beta cells | 0.88 | 0.21 | Intergenic | TTC34 | M |
| 1477 | chr15 | 53078206 | 53078705 | Pancreatic Beta cells | 0.77 | 0.13 | intron | ONECUT1 | M |
| 1478 | chr20 | 17183457 | 17183730 | Pancreatic Beta cells | 0.74 | 0.11 | Intergenic | PCSK2 | M |
| 1479 | chr12 | 71834853 | 71835077 | Pancreatic Beta cells | 0.66 | 0.08 | intron | LGR5 | M |
| 1480 | chr9 | 133320781 | 133321091 | Pancreatic Beta cells | 0.65 | 0.07 | intron | ASS1 | M |
| 1481 | chr20 | 61638977 | 61639325 | Pancreatic Beta cells | 0.69 | 0.11 | promoter-TSS | BHLHE23 | M |
| 1482 | chr20 | 568033223 | 56803388 | Pancreatic Beta cells | 0.66 | 0.13 | Intergenic | C20orf85 | M |
| 1483 | chr18 | 24130764 | 24131040 | Pancreatic Beta cells | 0.61 | 0.08 | promoter-TSS, intro [symbol] | KCTD1, KCTD1 | M |
| 1484 | chr1 | 226069476 | 226069831 | Pancreatic Beta cells | 0.55 | 0.03 | intron | TMEM63A | M |
| 1485 | chr19 | 17717375 | 17717593 | Pancreatic Beta cells | 0.57 | 0.07 | intron | UNC13A | M |
| 1486 | chr7 | 101575497 | 101575708 | Pancreatic Delta cells | 0 | 0.92 | intron | CUX1 | U |
| 1487 | chr17 | 55693892 | 55694221 | Pancreatic Delta cells | 0.05 | 0.94 | intron | MSI2 | U |
| 1488 | chr16 | 85546140 | 85546413 | Pancreatic Delta cells | 0.02 | 0.9 | Intergenic | GSE1 | U |
| 1489 | chr9 | 130226701 | 130226897 | Pancreatic Delta cells | 0.06 | 0.94 | intron | LRSAM1 | U |
| 1490 | chr13 | 49762704 | 49763099 | Pancreatic Delta cells | 0.06 | 0.91 | exon, intron | FNDC3A | U |
| 1491 | chr3 | 39497339 | 39497425 | Pancreatic Delta cells | 0.09 | 0.92 | Intergenic | MOBP | U |
| 1492 | chr6 | 37693027 | 37693154 | Pancreatic Delta cells | 0.07 | 0.9 | Intergenic | MDGA1 | U |
| 1493 | chr1 | 6019318 | 6019394 | Pancreatic Delta cells | 0.12 | 0.93 | intron | NPHP4 | U |
| 1494 | chr7 | 129945291 | 129945513 | Pancreatic Delta cells | 0.02 | 0.83 | intron | CPA4 | U |
| 1495 | chr17 | 33217450 | 33217683 | Pancreatic Delta cells | 0.04 | 0.85 | Intergenic | CCT6B | U |
| 1496 | chr5 | 170039130 | 170039386 | Pancreatic Delta cells | 0.08 | 0.88 | intron | KCNIP1 | U |
| 1497 | chr3 | 172058903 | 172059232 | Pancreatic Delta cells | 0.13 | 0.91 | intron | FNDC3B | U |
| 1498 | chr1 | 184078999 | 184079424 | Pancreatic Delta cells | 0.13 | 0.91 | Intergenic | TSEN15 | U |
| 1499 | chr9 | 129143335 | 129143780 | Pancreatic Delta cells | 0.11 | 0.89 | intron | MVB12B | U |
| 1500 | chr16 | 9663477 | 9663527 | Pancreatic Delta cells | 0.14 | 0.91 | Intergenic | MIR548X | U |
| 1501 | chr11 | 78039188 | 78039579 | Pancreatic Delta cells | 0.16 | 0.92 | intron | GAB2 | U |
| 1502 | chr13 | 43316442 | 43316643 | Pancreatic Delta cells | 0.18 | 0.91 | Intergenic | FAM216B | U |
| 1503 | chr4 | 152903957 | 152904377 | Pancreatic Delta cells | 0.13 | 0.86 | Intergenic | PET112 | U |
| 1504 | chr7 | 101575751 | 101576236 | Pancreatic Delta cells | 0.26 | 0.94 | intron | CUX1 | U |
| 1505 | chr2 | 39474855 | 39475300 | Pancreatic Delta cells | 0.24 | 0.91 | Intergenic | CDKL4 | U |
| 1506 | chr7 | 151850900 | 151851398 | Pancreatic Delta cells | 0.25 | 0.92 | exon | MLL3 | U |
| 1507 | chr7 | 69911307 | 69911583 | Pancreatic Delta cells | 0.28 | 0.94 | intron | AUTS2 | U |
| 1508 | chr5 | 54045100 | 54045465 | Pancreatic Delta cells | 0.25 | 0.9 | Intergenic | SNX18 | U |
| 1509 | chr3 | 187592073 | 187592343 | Pancreatic Delta cells | 0.05 | 0.91 | Intergenic | BCL6 | U |
| 1510 | chr1 | 107951331 | 107951610 | Pancreatic Delta cells | 0.05 | 0.89 | intron | NTNG1 | U |
| 1511 | chr1 | 29379317 | 29379780 | Pancreatic Delta cells | 0.06 | 0.89 | intron | EPB41 | U |
| 1512 | chr16 | 966029 | 966166 | Pancreatic Delta cells | 0.04 | 0.86 | intron | LMF1 | U |
| 1513 | chr18 | 2950356 | 2950609 | Pancreatic Delta cells | 0.13 | 0.92 | intron | LPIN2 | U |
| 1514 | chr16 | 17551988 | 17552088 | Pancreatic Delta cells | 0.02 | 0.83 | intron | XYLT1 | U |
| 1515 | chr11 | 63912203 | 63912368 | Pancreatic Delta cells | 0.09 | 0.89 | intron | MACROD1 | U |
| 1516 | chr10 | 33401284 | 33401567 | Pancreatic Delta cells | 0.07 | 0.87 | Intergenic | ITGB1 | U |
| 1517 | chr7 | 129945615 | 129945685 | Pancreatic Delta cells | 0.13 | 0.91 | intron | CPA4 | U |
| 1518 | chr4 | 187535391 | 187535469 | Pancreatic Delta cells | 0.08 | 0.86 | exon | FAT1 | U |
| 1519 | chr10 | 21239090 | 21239277 | Pancreatic Delta cells | 0.07 | 0.85 | intron | NEBL | U |
| 1520 | chr1 | 41841569 | 41841909 | Pancreatic Delta cells | 0.09 | 0.87 | Intergenic | EDN2 | U |
| 1521 | chr11 | 63835331 | 63835490 | Pancreatic Delta cells | 0.04 | 0.81 | intron | MACROD1 | U |
| 1522 | chr16 | 17493407 | 17493569 | Pancreatic Delta cells | 0.13 | 0.89 | intron | XYLT1 | U |
| 1523 | chr7 | 12645693 | 12645872 | Pancreatic Delta cells | 0.09 | 0.85 | intron | SCIN | U |
| 1524 | chr22 | 48478698 | 48478899 | Pancreatic Delta cells | 0.12 | 0.88 | Intergenic | MIR3201 | U |
| 1525 | chr16 | 69941097 | 69941324 | Pancreatic Delta cells | 0.11 | 0.87 | intron | WWP2 | U |
| 1526 | chr6 | 168560246 | 168560479 | Pancreatic Delta cells | 0.15 | 0.91 | Intergenic | FRMD1 | U |
| 1527 | chr1 | 38707894 | 38708273 | Pancreatic Delta cells | 0.1 | 0.86 | Intergenic | LOC339442 | U |
| 1528 | chr2 | 42565737 | 42565966 | Pancreatic Delta cells | 0.15 | 0.9 | Intergenic | COX7A2L | U |
| 1529 | chr16 | 87967699 | 87967816 | Pancreatic Delta cells | 0.11 | 0.85 | intron | CA5A | U |
| 1530 | chr2 | 9419562 | 9419748 | Pancreatic Delta cells | 0.13 | 0.87 | intron | ASAP2 | U |
| 1531 | chr26 | 86556120 | 86556455 | Pancreatic Delta cells | 0.16 | 0.9 | Intergenic | AGBL1 | U |
| 1532 | chr10 | 77717495 | 77717845 | Pancreatic Delta cells | 0.13 | 0.86 | intron | C10orf11 | U |
| 1533 | chr6 | 148789420 | 148789781 | Pancreatic Delta cells | 0.11 | 0.83 | intron | SASH1 | U |
| 1534 | chr18 | 34140963 | 34141439 | Pancreatic Delta cells | 0.14 | 0.87 | intron | FHOD3 | U |
| 1535 | chr3 | 187385076 | 187385216 | Pancreatic Delta cells | 0.12 | 0.83 | Intergenic | SST | U |
| 1536 | chr7 | 31869005 | 31869364 | Pancreatic Delta cells | 0.13 | 0.83 | intron | PDE1C | U |
| 1537 | chr10 | 131667822 | 131667900 | Pancreatic Delta cells | 0.17 | 0.86 | intron | EBF3 | U |
| 1538 | chr4 | 8034277 | 8034475 | Pancreatic Delta cells | 0.15 | 0.84 | exon | ABLIM2 | U |
| 1539 | chr4 | 169589443 | 169589857 | Pancreatic Delta cells | 0.21 | 0.9 | intron | PALLD | U |
| 1540 | chr16 | 75368216 | 75368300 | Pancreatic Delta cells | 0.2 | 0.88 | intron | CFDP1 | U |
| 1541 | chr4 | 102230945 | 102231107 | Pancreatic Delta cells | 0.2 | 0.88 | intron | PPP3CA | U |
| 1542 | chr7 | 155475836 | 155476284 | Pancreatic Delta cells | 0.23 | 0.91 | intron | RBM33 | U |
| 1543 | chr8 | 10149407 | 10149581 | Pancreatic Delta cells | 0.21 | 0.88 | intron | MSRA | U |
| 1544 | chr3 | 1511425393 | 151142620 | Pancreatic Delta cells | 0.23 | 0.89 | intron | MED12L | U |
| 1545 | chr12 | 118852674 | 118852833 | Pancreatic Delta cells | 0.25 | 0.91 | exon | SUDS3 | U |
| 1546 | chr15 | 61383738 | 61383947 | Pancreatic Delta cells | 0.22 | 0.87 | intron | RORA | U |
| 1547 | chr17 | 71315786 | 71316035 | Pancreatic Delta cells | 0.26 | 0.91 | Intergenic | CDC42EP4 | U |
| 1548 | chr6 | 158137642 | 158138002 | Pancreatic Delta cells | 0.2 | 0.85 | Intergenic | SNX9 | U |
| 1549 | chr6 | 41643405 | 41643574 | Pancreatic Delta cells | 0.18 | 0.82 | Intergenic | MDFI | U |
| 1550 | chr2 | 129168742 | 129169054 | Pancreatic Delta cells | 0.28 | 0.91 | Intergenic | HS6ST1 | U |
| 1551 | chr12 | 127371160 | 127371487 | Pancreatic Delta cells | 0.17 | 0.8 | Intergenic | LOC440117 | U |
| 1552 | chr3 | 54250346 | 54250790 | Pancreatic Delta cells | 0.21 | 0.83 | intron | CACNA2D3 | U |
| 1553 | chr15 | 70636344 | 70636535 | Pancreatic Delta cells | 0.29 | 0.9 | Intergenic | TLE3 | U |
| 1554 | chr11 | 117572066 | 117572324 | Pancreatic Delta cells | 0.27 | 0.88 | intron | DSCAML1 | U |
| 1555 | chr4 | 41786674 | 41787000 | Pancreatic Delta cells | 0.26 | 0.87 | Intergenic | PHOX2B | U |
| 1556 | chr16 | 2527294 | 2527627 | Pancreatic Delta cells | 0.3 | 0.9 | intron | TBC1D24 | U |
| 1557 | chr12 | 3048985 | 3049407 | Pancreatic Delta cells | 0.31 | 0.91 | exon | TULP3 | U |
| 1558 | chr1 | 203980720 | 203980834 | Pancreatic Delta cells | 0.21 | 0.8 | Intergenic | LINC00303 | U |
| 1559 | chr11 | 1174213473 | 117421479 | Pancreatic Delta cells | 0.25 | 0.84 | intron | DSCAML1 | U |
| 1560 | chr5 | 127246456 | 127246874 | Pancreatic Delta cells | 0.23 | 0.82 | Intergenic | RSPO3 | U |
| 1561 | chr7 | 6156468 | 6156952 | Pancreatic Delta cells | 0.3 | 0.89 | intron | USP42 | U |
| 1562 | chr3 | 13018910 | 13019406 | Pancreatic Delta cells | 0.24 | 0.83 | intron | IQSEC1 | U |
| 1563 | chr19 | 4729206 | 4729316 | Pancreatic Delta cells | 0.25 | 0.83 | Intergenic | DPP9 | U |
| 1564 | chr8 | 53214548 | 53214717 | Pancreatic Delta cells | 0.24 | 0.82 | intron | ST18 | U |
| 1565 | chr2 | 2422312113 | 242231529 | Pancreatic Delta cells | 0.31 | 0.89 | intron | HDLBP | U |
| 1566 | chr5 | 16844110 | 16844483 | Pancreatic Delta cells | 0.31 | 0.89 | intron | MYO10 | U |
| 1567 | chr15 | 61912008 | 61912385 | Pancreatic Delta cells | 0.22 | 0.8 | Intergenic | VPS13C | U |
| 1568 | chr17 | 8470034 | 8470527 | Pancreatic Delta cells | 0.35 | 0.93 | intron | MYH10 | U |
| 1569 | chr7 | 104887719 | 104887874 | Pancreatic Delta cells | 0.31 | 0.88 | intron | SRPK2 | U |
| 1570 | chr8 | 3556138 | 3556352 | Pancreatic Delta cells | 0.24 | 0.81 | intron | CSMD1 | U |
| 1571 | chr7 | 33827647 | 33827954 | Pancreatic Delta cells | 0.29 | 0.86 | Intergenic | BMPER | U |
| 1572 | chr10 | 72975603 | 72975916 | Pancreatic Delta cells | 0.25 | 0.82 | intron | UNC5B | U |
| 1573 | chr2 | 129592222 | 129592588 | Pancreatic Delta cells | 0.24 | 0.81 | Intergenic | HS6ST1 | U |
| 1574 | chr1 | 33887399 | 33887516 | Pancreatic Delta cells | 0.31 | 0.87 | Intergenic | PHC2 | U |
| 1575 | chr2 | 108362136 | 108362528 | Pancreatic Delta cells | 0.29 | 0.85 | Intergenic | OC729121 | U |
| 1576 | chr5 | 158696274 | 158696740 | Pancreatic Delta cells | 0.37 | 0.93 | intron | UBLCP1 | U |
| 1577 | chr1 | 224810551 | 224811050 | Pancreatic Delta cells | 0.31 | 0.87 | intron | CNIH3 | U |
| 1578 | chr10 | 13553787 | 13553990 | Pancreatic Delta cells | 0.34 | 0.89 | Intergenic | BEND7 | U |
| 1579 | chr1 | 2081445493 | 208144892 | Pancreatic Delta cells | 0.35 | 0.9 | Intergenic | CD34 | U |
| 1580 | chr9 | 15453796 | 15454134 | Pancreatic Delta cells | 0.35 | 0.89 | intron | SNAPC3 | U |
| 1581 | chr16 | 272580071 | 27258260 | Pancreatic Delta cells | 0.33 | 0.86 | intron | NSMCE1 | U |
| 1582 | chr12 | 463529663 | 46353303 | Pancreatic Delta cells | 0.35 | 0.88 | intron | SCAF11 | U |
| 1583 | chr7 | 99616252 | 99616659 | Pancreatic Delta cells | 0.35 | 0.88 | intron | ZKSCAN1 | U |
| 1584 | chr15 | 94958699 | 94959197 | Pancreatic Delta cells | 0.31 | 0.84 | intron | MCTP2 | U |
| 1585 | chr16 | 88895451 | 88895554 | Pancreatic Delta cells | 0.3 | 0.82 | intron | GALNS | U |
| 1586 | chr2 | 2196875593 | 219687848 | Pancreatic Delta cells | 0.34 | 0.86 | exon | PRKAG3 | U |
| 1587 | chr10 | 16566692 | 16567000 | Pancreatic Delta cells | 0.35 | 0.87 | Intergenic | C1QL3 | U |
| 1588 | chr10 | 21246174 | 21246623 | Pancreatic Delta cells | 0.37 | 0.89 | intron | NEBL | U |
| 1589 | chr11 | 723741201 | 72374212 | Pancreatic Delta cells | 0.32 | 0.83 | intron | PDE2A | U |
| 1590 | chr2 | 89339816 | 89340006 | Pancreatic Delta cells | 0.28 | 0.79 | Intergenic | MIR4436A | U |
| 1591 | chr3 | 72949112 | 72949403 | Pancreatic Delta cells | 0.35 | 0.86 | intron | GXYLT2 | U |
| 1592 | chr8 | 88901809 | 88902151 | Pancreatic Delta cells | 0.33 | 0.84 | Intergenic | DCAF4L2 | U |
| 1593 | chr13 | 1135843483 | 113584427 | Pancreatic Delta cells | 0.37 | 0.86 | Intergenic | MCF2L-AS1 | U |
| 1594 | chr11 | 13197303 | 13197521 | Pancreatic Delta cells | 0.35 | 0.84 | Intergenic | ARNTL | U |
| 1595 | chr9 | 133740366 | 133740764 | Pancreatic Delta cells | 0.19 | 0.88 | intron | ABL1 | U |
| 1596 | chr12 | 121439119 | 121439260 | Pancreatic Delta cells | 0.29 | 0.85 | exon | HNF1A | U |
| 1597 | chr1 | 168260481 | 168260698 | Pancreatic Delta cells | 0.07 | 0.95 | exon | TBX19 | U |
| 1598 | chr20 | 20412544 | 20412857 | Pancreatic Delta cells | 0.16 | 0.9 | intron | RALGAPA2 | U |
| 1599 | chr1 | 230393372 | 230393593 | Pancreatic Delta cells | 0.07 | 0.93 | intron | GALNT2 | U |
| 1600 | chr9 | 83639823 | 83640085 | Pancreatic Delta cells | 0.04 | 0.85 | Intergenic | TLE1 | U |
| 1601 | chr20 | 20417198 | 20417391 | Pancreatic Delta cells | 0.08 | 0.88 | intron | RALGAPA2 | U |
| 1602 | chr1 | 6329539 | 6329695 | Pancreatic Delta cells | 0.1 | 0.84 | intron | ACOT7 | U |
| 1603 | chr12 | 130953864 | 130954237 | Pancreatic Delta cells | 0.1 | 0.84 | intron | RIMBP2 | U |
| 1604 | chr4 | 6974639 | 6974856 | Pancreatic Delta cells | 0.13 | 0.86 | intron | TBC1D14 | U |
| 1605 | chr6 | 3143797 | 3143899 | Pancreatic Delta cells | 0.17 | 0.89 | intron | BPHL | U |
| 1606 | chr5 | 10986780 | 10986974 | Pancreatic Delta cells | 0.09 | 0.79 | intron | CTNND2 | U |
| 1607 | chr11 | 72022054 | 72022343 | Pancreatic Delta cells | 0.21 | 0.89 | intron | CLPB | U |
| 1608 | chr14 | 76641864 | 76642294 | Pancreatic Delta cells | 0.24 | 0.92 | intron | GPATCH2L | U |
| 1609 | chr14 | 42359802 | 42359905 | Pancreatic Delta cells | 0.25 | 0.91 | intron | LRFN5 | U |
| 1610 | chr20 | 41198544 | 41198903 | Pancreatic Delta cells | 0.28 | 0.87 | intron | PTPRT | U |
| 1611 | chr14 | 25700895 | 25701112 | Pancreatic Delta cells | 0.31 | 0.88 | Intergenic | STXBP6 | U |
| 1612 | chr8 | 11300158 | 11300372 | Pancreatic Delta cells | 0.36 | 0.9 | intron | FAM167A | U |
| 1613 | chr9 | 97152452 | 97152730 | Pancreatic Delta cells | 0.35 | 0.83 | intron | HIATL1 | U |
| 1614 | chr17 | 74905997 | 74906231 | Pancreatic Delta cells | 0.86 | 0.05 | intron | MGAT5B | M |
| 1615 | chr5 | 138289132 | 138289385 | Pancreatic Delta cells | 0.87 | 0.06 | intron | SIL1 | M |
| 1616 | chr16 | 51188740 | 51188814 | Pancreatic Delta cells | 0.86 | 0.22 | Intergenic | SALL1 | M |
| 1617 | chr10 | 21581747 | 21582140 | Pancreatic Delta cells | 0.66 | 0.06 | Intergenic | NEBL-AS1 | M |
| 1618 | chr6 | 170602017 | 170602485 | Pancreatic Delta cell: | 0.73 | 0.13 | Intergenic | DLL1 | M |
| 1619 | chr9 | 14321662 | 14322059 | Pancreatic Delta cells | 0.72 | 0.13 | intron | NFIB | M |
| 1620 | chr2 | 2185180281 | 218518255 | Pancreatic Delta cells | 0.74 | 0.2 | intron | DIRC3 | M |
| 1621 | chr17 | 61600872 | 61601019 | Pancreatic Delta cells | 0.68 | 0.15 | promoter-TSS, intron | KCNH6, KCNH6 | M |
| 1622 | chr5 | 50760907 | 50761202 | Pancreatic Delta cells | 0.73 | 0.19 | Intergenic | LOC642366 | M |
| 1623 | chr11 | 72353008 | 72353158 | Pancreatic Delta cells | 0.63 | 0.11 | intron | PDE2A | M |
| 1624 | chr5 | 162992362 | 162992634 | Pancreatic Delta cells | 0.65 | 0.19 | Intergenic | MAT2B | M |
| 1625 | chr17 | 29297437 | 29297654 | Pancreatic Delta cells | 0.55 | 0.06 | promoter-TSS | RNF135 | M |
| 1626 | chr22 | 25815475 | 25815847 | Pancreatic Delta cells | 0.86 | 0.12 | Intergenic | CRYBB2P1 | M |
| 1627 | chr10 | 94828878 | 94829010 | Pancreatic Delta cells | 0.9 | 0.17 | TTS | CYP26C1 | M |
| 1628 | chr5 | 176038455 | 176038608 | Pancreatic Delta cells | 0.76 | 0.04 | Intergenic | GPRIN1 | M |
| 1629 | chr10 | 94825641 | 94825718 | Pancreatic Delta cells | 0.78 | 0.08 | intron | CYP26C3 | M |
| 1630 | chr10 | 94828683 | 94828872 | Pancreatic Delta cells | 0.77 | 0.09 | TTS | CYP26C1 | M |
| 1631 | chr17 | 29721727 | 29721957 | Pancreatic Delta cells | 0.78 | 0.1 | intron | RAB11FIP4 | M |
| 1632 | chr11 | 31848747 | 31848829 | Pancreatic Delta cells | 0.83 | 0.14 | intron | DKFZp686K1684 | M |
| 1633 | chr7 | 156804561 | 156804851 | Pancreatic Delta cells | 0.72 | 0.11 | intron | LOC645249 | M |
| 1634 | chr19 | 11532740 | 11532885 | Pancreatic Delta cells | 0.78 | 0.19 | intron, exon | CCDC151, CCDC151 | M |
| 1635 | chr16 | 51190085 | 51190396 | Pancreatic Delta cells | 0.67 | 0.08 | Intergenic | SALL1 | M |
| 1636 | chr6 | 34110323 | 34110618 | Pancreatic Delta cells | 0.65 | 0.1 | intron | GRM4 | M |
| 1637 | chr20 | 21488274 | 21488427 | Pancreatic Delta cells | 0.61 | 0.1 | Intergenic | NKX2-2 | M |
| 1638 | chr11 | 113346279 | 113346492 | Pancreatic Delta cells | 0.53 | 0.09 | exon, promoter-TSS | DRD2, DRD2 | M |
| 1639 | chr5 | 133081567 | 133081764 | Pancreatic Ductal cells | 0.04 | 0.91 | Intergenic | FSTL4 | U |
| 1640 | chr7 | 157290520 | 157290591 | Pancreatic Ductal cells | 0.07 | 0.93 | Intergenic | MIR153-2 | U |
| 1641 | chr21 | 37749203 | 37749408 | Pancreatic Ductal cells | 0.04 | 0.9 | TTS | MORC3 | U |
| 1642 | chr7 | 156781826 | 156781901 | Pancreatic Ductal cells | 0.05 | 0.9 | Intergenic | MNX1 | U |
| 1643 | chr4 | 72091592 | 72091932 | Pancreatic Ductal cells | 0.04 | 0.89 | intron | SLC4A4 | U |
| 1644 | chr2 | 97169667 | 97170012 | Pancreatic Ductal cells | 0.04 | 0.88 | intron | NEURL3 | U |
| 1645 | chr13 | 52359350 | 52359736 | Pancreatic Ductal cells | 0.07 | 0.9 | intron | DHRS12 | U |
| 1646 | chr4 | 72074004 | 72074142 | Pancreatic Ductal cells | 0.12 | 0.95 | intron | SLC4A4 | U |
| 1647 | chr16 | 85230631 | 85230804 | Pancreatic Ductal cells | 0.05 | 0.87 | Intergenic | LOC400548 | U |
| 1648 | chr21 | 41039727 | 41040109 | Pancreatic Ductal cells | 0.11 | 0.92 | Intergenic | B3GALT5 | U |
| 1649 | chr10 | 114877816 | 114878048 | Pancreatic Ductal cells | 0.12 | 0.92 | intron | TCF7L2 | U |
| 1650 | chr4 | 72065389 | 72065647 | Pancreatic Ductal cells | 0.13 | 0.92 | intron | SLC4A4 | U |
| 1651 | chr17 | 33419036 | 33419439 | Pancreatic Ductal cells | 0.08 | 0.87 | intron | RADS1L3-RFFL | U |
| 1652 | chr4 | 72081451 | 72081905 | Pancreatic Ductal cells | 0.13 | 0.91 | intron | SLC4A4 | U |
| 1653 | chr11 | 128609785 | 128609919 | Pancreatic Ductal cells | 0.05 | 0.83 | intron | FLI1 | U |
| 1654 | chr8 | 97017363 | 97017718 | Pancreatic Ductal cells | 0.11 | 0.87 | Intergenic | LOC100500773 | U |
| 1655 | chr2 | 8478761 | 8479008 | Pancreatic Ductal cells | 0.14 | 0.89 | Intergenic | LINC00299 | U |
| 1656 | chr1 | 596362101 | 59636650 | Pancreatic Ductal cells | 0.13 | 0.88 | Intergenic | HSD52 | U |
| 1657 | chr1 | 110202186 | 110202252 | Pancreatic Ductal cells | 0.12 | 0.86 | intron | GSTM4 | U |
| 1658 | chr4 | 72090796 | 72091063 | Pancreatic Ductal cells | 0.21 | 0.94 | intron | SLC4A4 | U |
| 1659 | chr10 | 134471465 | 134471585 | Pancreatic Ductal cells | 0.02 | 0.92 | intron | INPP5A | U |
| 1660 | chr3 | 570256731 | 57025761 | Pancreatic Ductal cells | 0.02 | 0.87 | intron | ARHGEF3 | U |
| 1661 | chr2 | 99149523 | 99149931 | Pancreatic Ductal cells | 0.05 | 0.9 | intron | INPP4A | U |
| 1662 | chr5 | 66107801 | 66108252 | Pancreatic Ductal cells | 0.04 | 0.89 | intron | MAST4 | U |
| 1663 | chr1 | 179264758 | 179265022 | Pancreatic Ductal cells | 0.06 | 0.9 | intron | SOAT1 | U |
| 1664 | chr16 | 4039211 | 4039416 | Pancreatic Ductal cells | 0.07 | 0.9 | intron | ADCY9 | U |
| 1665 | chr3 | 29471784 | 29471850 | Pancreatic Ductal cells | 0.08 | 0.9 | intron | RBMS3 | U |
| 1666 | chr7 | 47633278 | 47633455 | Pancreatic Ductal cells | 0.08 | 0.9 | Intergenic | TNS3 | U |
| 1667 | chr4 | 106834079 | 106834276 | Pancreatic Ductal cells | 0.08 | 0.9 | intron | NPNT | U |
| 1668 | chr2 | 106553512 | 106553931 | Pancreatic Ductal cells | 0.05 | 0.87 | Intergenic | C2orf40 | U |
| 1669 | chr4 | 72062018 | 72062500 | Pancreatic Ductal cells | 0.04 | 0.86 | intron | SLC4A4 | U |
| 1670 | chr16 | 3505114 | 3505177 | Pancreatic Ductal cells | 0.08 | 0.89 | intron | NAA60 | U |
| 1671 | chr12 | 121603114 | 121603241 | Pancreatic Ductal cells | 0.05 | 0.86 | intron | P2RX7 | U |
| 1672 | chr11 | 2751716 | 2752023 | Pancreatic Ductal cells | 0.05 | 0.86 | intron | KCNQ1 | U |
| 1673 | chr4 | 24102403 | 24102767 | Pancreatic Ductal cells | 0.06 | 0.87 | Intergenic | PPARGC1A | U |
| 1674 | chr2 | 99409519 | 99409597 | Pancreatic Ductal cells | 0.07 | 0.87 | TTS, Intergenic | KIAA1211L, MGAT4A | U |
| 1675 | chr2 | 102727793 | 102727894 | Pancreatic Ductal cells | 0.08 | 0.88 | Intergenic | IL1R1 | U |
| 1676 | chr13 | 52359408 | 52359737 | Pancreatic Ductal cells | 0.07 | 0.87 | intron | DHRS12 | U |
| 1677 | chr17 | 41800032 | 41800495 | Pancreatic Ductal cells | 0.02 | 0.82 | Intergenic | SOST | U |
| 1678 | chr2 | 171086612 | 171086882 | Pancreatic Ductal cells | 0.06 | 0.85 | intron | MYO3B | U |
| 1679 | chr10 | 117842780 | 117842934 | Pancreatic Ductal cells | 0.04 | 0.82 | intron | GFRA1 | U |
| 1680 | chr10 | 13772059 | 13772243 | Pancreatic Ductal cells | 0.03 | 0.81 | intron | FRMD4A | U |
| 1681 | chr4 | 187225006 | 187225234 | Pancreatic Ductal cells | 0.06 | 0.84 | intron | LOC285441 | U |
| 1682 | chr6 | 15861691 | 158617141 | Pancreatic Ductal cells | 0.13 | 0.91 | exon | GTF2H5 | U |
| 1683 | chr19 | 5603471 | 5603707 | Pancreatic Ductal cells | 0.11 | 0.89 | intron | SAFB2 | U |
| 1684 | chr12 | 110788669 | 110788963 | Pancreatic Ductal cells | 0.11 | 0.89 | TTS | ATP2A2 | U |
| 1685 | chr8 | 40026598 | 40026940 | Pancreatic Ductal cells | 0.09 | 0.87 | Intergenic | C8orf4 | U |
| 1686 | chr2 | 242565207 | 242565596 | Pancreatic Ductal cells | 0.13 | 0.91 | intron | THAP4 | U |
| 1687 | chr4 | 1362928 | 1363237 | Pancreatic Ductal cells | 0.12 | 0.89 | intron | UVSSA | U |
| 1688 | chr15 | 93874000 | 93874072 | Pancreatic Ductal cells | 0.14 | 0.9 | Intergenic | RGMA | U |
| 1689 | chr4 | 1780269 | 1780355 | Pancreatic Ductal cells | 0.08 | 0.84 | Intergenic | FGFR3 | U |
| 1690 | chr21 | 46744900 | 46745000 | Pancreatic Ductal cells | 0.06 | 0.82 | Intergenic | LOC642852 | U |
| 1691 | chr16 | 15984709 | 15984844 | Pancreatic Ductal cells | 0.12 | 0.88 | Intergenic | FOPNL | U |
| 1692 | chr4 | 1840046871 | 184004870 | Pancreatic Ductal cells | 0.15 | 0.9 | Intergenic | WWC2-AS2 | U |
| 1693 | chr10 | 134471997 | 134472211 | Pancreatic Ductal cells | 0.16 | 0.91 | intron | INPP5A | U |
| 1694 | chr4 | 72135052 | 72135293 | Pancreatic Ductal cells | 0.09 | 0.84 | intron | SLC4A4 | U |
| 1695 | chr10 | 30458261 | 30458756 | Pancreatic Ductal cells | 0.11 | 0.86 | Intergenic | KIAA1462 | U |
| 1696 | chr7 | 156781726 | 156781798 | Pancreatic Ductal cells | 0.04 | 0.78 | Intergenic | MNX1 | U |
| 1697 | chr4 | 72171381 | 72171508 | Pancreatic Ductal cells | 0.15 | 0.89 | intron | SLC4A4 | U |
| 1698 | chr14 | 105454616 | 105454780 | Pancreatic Ductal cells | 0.13 | 0.87 | intron | C14orf79 | U |
| 1699 | chr8 | 1237316521 | 123731880 | Pancreatic Ductal cells | 0.17 | 0.9 | Intergenic | ZHX2 | U |
| 1700 | chr2 | 129829412 | 129829688 | Pancreatic Ductal cells | 0.13 | 0.86 | Intergenic | HS6ST1 | U |
| 1701 | chr5 | 76136006 | 76136302 | Pancreatic Ductal cells | 0.09 | 0.82 | Intergenic | S100Z | U |
| 1702 | chr6 | 158615276 | 158615598 | Pancreatic Ductal cells | 0.09 | 0.82 | exon | GTF2H5 | U |
| 1703 | chr3 | 128909292 | 128909617 | Pancreatic Ductal cells | 0.18 | 0.91 | Intergenic | CNBP | U |
| 1704 | chr15 | 93830808 | 93831210 | Pancreatic Ductal cells | 0.16 | 0.89 | Intergenic | RGMA | U |
| 1705 | chr4 | 141146610 | 141146985 | Pancreatic Ductal cells | 0.19 | 0.91 | Intergenic | SCOC | U |
| 1706 | chr10 | 134471323 | 134471443 | Pancreatic Ductal cells | 0.13 | 0.84 | intron | INPP5A | U |
| 1707 | chr2 | 106985196 | 106985344 | Pancreatic Ductal cells | 0.16 | 0.87 | Intergenic | PLGLA | U |
| 1708 | chr2 | 150946052 | 150946328 | Pancreatic Ductal cells | 0.19 | 0.9 | Intergenic | RND3 | U |
| 1709 | chr4 | 77922281 | 7792512 | Pancreatic Ductal cells | 0.19 | 0.9 | intron | AFAP1 | U |
| 1710 | chr1 | 179265091 | 179265384 | Pancreatic Ductal cells | 0.18 | 0.89 | intron | SOAT1 | U |
| 1711 | chr18 | 44636607 | 44637031 | Pancreatic Ductal cells | 0.19 | 0.9 | intron | HDHD2 | U |
| 1712 | chr7 | 47632797 | 47633186 | Pancreatic Ductal cells | 0.11 | 0.81 | Intergenic | TNS3 | U |
| 1713 | chr15 | 36262769 | 36263172 | Pancreatic Ductal cells | 0.18 | 0.88 | Intergenic | MIR4510 | U |
| 1714 | chr1 | 203118091 | 203118226 | Pancreatic Ductal cells | 0.23 | 0.89 | intron | ADORA1 | U |
| 1715 | chr4 | 183210489 | 183210633 | Pancreatic Ductal cells | 0.19 | 0.88 | Intergenic | TENM3 | U |
| 1716 | chr4 | 721555383 | 72155868 | Pancreatic Ductal cells | 0.19 | 0.88 | intron | SLC4A4 | U |
| 1717 | chr4 | 72083022 | 72083235 | Pancreatic Ductal cells | 0.19 | 0.87 | intron | SLC4A4 | U |
| 1718 | chr8 | 29128535 | 29128781 | Pancreatic Ductal cells | 0.16 | 0.84 | Intergenic | KIF138 | U |
| 1719 | chr11 | 94916612 | 94916999 | Pancreatic Ductal cells | 0.24 | 0.92 | intron | SESN3 | U |
| 1720 | chr16 | 40383991 | 4038783 | Pancreatic Ductal cells | 0.2 | 0.87 | intron | ADCY9 | U |
| 1721 | chr10 | 126205456 | 126205501 | Pancreatic Ductal cells | 0.24 | 0.9 | intron | LHPP | U |
| 1722 | chr2 | 10496564 | 10496712 | Pancreatic Ductal cells | 0.22 | 0.88 | intron | HPCAL1 | U |
| 1723 | chr1 | 15187234 | 15187449 | Pancreatic Ductal cells | 0.18 | 0.84 | intron | KAZN | U |
| 1724 | chr16 | 56960148 | 56960377 | Pancreatic Ductal cells | 0.26 | 0.92 | Intergenic | HERPUD1 | U |
| 1725 | chr4 | 72135834 | 72136097 | Pancreatic Ductal cells | 0.26 | 0.92 | intron | SLC4A4 | U |
| 1726 | chr3 | 75378262 | 75378547 | Pancreatic Ductal cells | 0.21 | 0.87 | Intergenic | FAM86DP | U |
| 1727 | chr16 | 15984209 | 15984495 | Pancreatic Ductal cells | 0.19 | 0.84 | Intergenic | FOPNL | U |
| 1728 | chr8 | 25215773 | 25215892 | Pancreatic Ductal cells | 0.23 | 0.87 | intron | DOCK5 | U |
| 1729 | chr19 | 46181809 | 46182044 | Pancreatic Ductal cells | 0.24 | 0.88 | intron | GIPR | U |
| 1730 | chr4 | 72189693 | 72189957 | Pancreatic Ductal cells | 0.28 | 0.92 | intron | SLC4A4 | U |
| 1731 | chr1 | 2954308 | 2954394 | Pancreatic Ductal cells | 0.19 | 0.82 | Intergenic | ACTRT2 | U |
| 1732 | chr15 | 27818541 | 27818831 | Pancreatic Ductal cells | 0.24 | 0.87 | Intergenic | OCA2 | U |
| 1733 | chr7 | 912408773 | 91241031 | Pancreatic Ductal cells | 0.21 | 0.83 | Intergenic | MTERF | U |
| 1734 | chr5 | 37394810 | 37395283 | Pancreatic Ductal cells | 0.27 | 0.89 | intron | WDR70 | U |
| 1735 | chr20 | 56577840 | 56577972 | Pancreatic Ductal cells | 0.26 | 0.86 | Intergenic | MIR4532 | U |
| 1736 | chr21 | 40983093 | 40983371 | Pancreatic Ductal cells | 0.25 | 0.85 | intron | C21orf88 | U |
| 1737 | chr2 | 104956173 | 10496039 | Pancreatic Ductal cells | 0.31 | 0.9 | intron | HPCAL1 | U |
| 1738 | chr1 | 30153356 | 30153552 | Pancreatic Ductal cells | 0.32 | 0.9 | Intergenic | PTPRU | U |
| 1739 | chr7 | 68796860 | 68797241 | Pancreatic Ductal cells | 0.3 | 0.87 | Intergenic | AUTS2 | U |
| 1740 | chr14 | 100695022 | 100695326 | Pancreatic Ductal cells | 0.33 | 0.88 | Intergenic | YY1 | U |
| 1741 | chr1 | 41325000 | 41325363 | Pancreatic Ductal cells | 0.33 | 0.86 | Intergenic | CITED4 | U |
| 1742 | chr7 | 26492211 | 26492636 | Pancreatic Ductal cells | 0.38 | 0.9 | intron | LOC441204 | U |
| 1743 | chr4 | 20354428 | 20354667 | Pancreatic Ductal cells | 0.06 | 0.88 | intron | SLIT2 | U |
| 1744 | chr2 | 85477590 | 85477670 | Pancreatic Ductal cells | 0.12 | 0.9 | intron | TCF7L1 | U |
| 1745 | chr1 | 3196489 | 3196578 | Pancreatic Ductal cells | 0.04 | 0.81 | intron | PROM16 | U |
| 1746 | chr17 | 40528582 | 40528819 | Pancreatic Ductal cells | 0.15 | 0.9 | intron | STAT3 | U |
| 1747 | chr1 | 158169496 | 158169624 | Pancreatic Ductal cells | 0.29 | 0.91 | Intergenic | CD1D | U |
| 1748 | chr16 | 72958470 | 72958530 | Pancreatic Ductal cells | 0.03 | 0.92 | intron | ZFHX3 | U |
| 1749 | chr1 | 46949367 | 46949429 | Pancreatic Ductal cells | 0.04 | 0.85 | Intergenic | DMBX1 | U |
| 1750 | chr1 | 46949440 | 46949594 | Pancreatic Ductal cells | 0.19 | 0.92 | Intergenic | DMBX1 | U |
| 1751 | chr22 | 35966643 | 35967003 | Pancreatic Ductal cells | 0.18 | 0.88 | Intergenic | RASD2 | U |
| 1752 | chr1 | 180223424 | 180223479 | Pancreatic Ductal cells | 0.02 | 0.86 | intron | LHX4 | U |
| 1753 | chr6 | 14183709 | 14183951 | Pancreatic Ductal cells | 0.07 | 0.88 | Intergenic | CD83 | U |
| 1754 | chr14 | 100198943 | 100198981 | Pancreatic Ductal cells | 0.13 | 0.9 | Intergenic | CYP46A1 | U |
| 1755 | chr15 | 61012461 | 61012715 | Pancreatic Ductal cells | 0.17 | 0.92 | intron | RORA | U |
| 1756 | chr20 | 21291421 | 21291528 | Pancreatic Ductal cells | 0.19 | 0.92 | intron | XRN2 | U |
| 1757 | chr14 | 77481139 | 77481302 | Pancreatic Ductal cells | 0.18 | 0.91 | Intergenic | IRF2BPL | U |
| 1758 | chr9 | 40537857 | 40538036 | Pancreatic Ductal cells | 0.04 | 0.77 | Intergenic | SPATA31A3 | U |
| 1759 | chr9 | 86999839 | 87000244 | Pancreatic Ductal cells | 0.15 | 0.86 | Intergenic | SLC28A3 | U |
| 1760 | chr21 | 41040361 | 41040781 | Pancreatic Ductal cells | 0.17 | 0.87 | Intergenic | B3GALTS | U |
| 1761 | chr9 | 89131109 | 89131576 | Pancreatic Ductal cells | 0.15 | 0.85 | Intergenic | ZCCHC6 | U |
| 1762 | chr20 | 25189013 | 25189449 | Pancreatic Ductal cells | 0.22 | 0.9 | intron | ENTPD6 | U |
| 1763 | chr6 | 17929475 | 17929725 | Pancreatic Ductal cells | 0.2 | 0.87 | intron | KIF134 | U |
| 1764 | chr20 | 30957274 | 30957769 | Pancreatic Ductal cells | 0.27 | 0.88 | intron | ASXL1 | U |
| 1765 | chr14 | 65021983 | 65022099 | Pancreatic Ductal cells | 0.33 | 0.91 | intron | PPP1R36 | U |
| 1766 | chr7 | 48305992 | 48306449 | Pancreatic Ductal cells | 0.32 | 0.9 | intron | B4GALT5 | U |
| 1767 | chr7 | 139656224 | 139656474 | Pancreatic Ductal cells | 0.32 | 0.85 | intron | BXAS1 | U |
| 1768 | chr7 | 39125198 | 39125562 | Pancreatic Ductal cells | 0.86 | 0.16 | intron | POU6F2 | M |
| 1769 | chr13 | 28553792 | 28553833 | Pancreatic Ductal cells | 0.94 | 0.25 | intron | PRHOXNB | M |
| 1770 | chr13 | 285538421 | 28554244 | Pancreatic Ductal cells | 0.77 | 0.09 | intron | PRHOXNB | M |
| 1771 | chr19 | 48232782 | 48233027 | Pancreatic Ductal cells | 0.76 | 0.1 | intron | EHD2 | M |
| 1772 | chr10 | 73982876 | 73982966 | Pancreatic Ductal cells | 0.74 | 0.13 | intron | ANAPC16 | M |
| 1773 | chr6 | 91319986 | 91320098 | Pancreatic Ductal cells | 0.71 | 0.17 | Intergenic | MAP3K7 | M |
| 1774 | chr8 | 142215723 | 142215838 | Pancreatic Ductal cells | 0.65 | 0.11 | Intergenic | SLC45A4 | M |
| 1775 | chr2 | 235044324 | 235044527 | Pancreatic Ductal cells | 0.59 | 0.05 | Intergenic | SPP2 | M |
| 1776 | chr2 | 110519027 | 110519135 | Pancreatic Ductal cells | 0.69 | 0.2 | Intergenic | RGPD5 | M |
| 1777 | chr2 | 199174486 | 199174717 | Pancreatic Ductal cells | 0.55 | 0.06 | Intergenic | PLCL1 | M |
| 1778 | chr1 | 116961613 | 116961745 | Pancreatic Ductal cells | 0.56 | 0.09 | promoter-TSS | ATP1A1OS | M |
| 1779 | chr10 | 102107626 | 102107781 | Pancreatic Ductal cells | 0.55 | 0.1 | intron | SCD | M |
| 1780 | chr1 | 29805277 | 29805370 | Pancreatic Ductal cells | 0.91 | 0.18 | Intergenic | PTPRU | M |
| 1781 | chr11 | 94883896 | 94884066 | Pancreatic Ductal cells | 0.79 | 0.13 | Intergenic | ENDOD1 | M |
| 1782 | chr12 | 106978811 | 106979230 | Pancreatic Ductal cells | 0.7 | 0.1 | intron | RFX4 | M |
| 1783 | chr14 | 59103700 | 59103963 | Pancreatic Ductal cells | 0.75 | 0.17 | promoter-TSS | DACT1 | M |
| 1784 | chr5 | 115297291 | 115297621 | Pancreatic Ductal cells | 0.64 | 0.07 | promoter-TSS | AOPEP | M |
| 1785 | chr5 | 115297174 | 115297280 | Pancreatic Ductal cells | 0.66 | 0.1 | promoter-TSS | AQPEP | M |
| 1786 | chr5 | 115298920 | 115299089 | Pancreatic Ductal cells | 0.7 | 0.15 | exon | AQPEP | M |
| 1787 | chr6 | 26172931 | 26173215 | Pancreatic Ductal cells | 0.62 | 0.08 | TTS, Intergenic | HIST1H2BD, HIST1H2 [symbol] | M |
| 1788 | chr2 | 112789506 | 112789693 | Pancreatic Ductal cells | 0.64 | 0.12 | Intergenic | TMEM878 | M |
| 1789 | chr11 | 94884119 | 94884443 | Pancreatic Ductal cells | 0.56 | 0.05 | Intergenic | ENDOD1 | M |
| 1790 | chr13 | 28554355 | 28554449 | Pancreatic Ductal cells | 0.54 | 0.09 | intron | PRHOXNB | M |
| 1791 | chr21 | 46143588 | 46143656 | Pancreatic Ductal cells | 0.54 | 0.12 | Intergenic | TSPEAR | M |
| 1792 | chr21 | 46130516 | 46130757 | Pancreatic Ductal cells | 0.54 | 0.13 | intron | TSPEAR | M |
| 1793 | chr4 | 183272479 | 183272543 | Endometrium Epithelium | 0.1 | 0.9 | intron | TENM3 | U |
| 1794 | chr1 | 88737996 | 88738097 | Endometrium Epithelium | 0.1 | 0.9 | Intergenic | PKN2 | U |
| 1795 | chr11 | 61264069 | 61264257 | Endometrium Epithelium | 0.08 | 0.88 | Intergenic | MIR4488 | U |
| 1796 | chr10 | 43819264 | 43819432 | Endometrium Epithelium | 0.14 | 0.91 | Intergenic | FXYD4 | U |
| 1797 | chr8 | 8094386 | 8094714 | Endometrium Epithelium | 0.12 | 0.88 | intron | FAM8683P | U |
| 1798 | chr1 | 151940571 | 15194102 | Endometrium Epithelium | 0.16 | 0.91 | intron | KAZN | U |
| 1799 | chr13 | 1065973731 | 106597474 | Endometrium Epithelium | 0.18 | 0.93 | Intergenic | LINC00343 | U |
| 1800 | chr19 | 1340629 | 1340759 | Endometrium Epithelium | 0.1 | 0.85 | Intergenic | MUM1 | U |
| 1801 | chr11 | 71506971 | 71507101 | Endometrium Epithelium | 0.13 | 0.87 | TTS, exon | ALG1L9P, FAM86C1 | U |
| 1802 | chr15 | 75839798 | 75840092 | Endometrium Epithelium | 0.17 | 0.9 | intron | PTPN9 | U |
| 1803 | chr21 | 434957931 | 43495870 | Endometrium Epithelium | 0.18 | 0.9 | intron | UMODL1 | U |
| 1804 | chr3 | 319837233 | 31984006 | Endometrium Epithelium | 0.18 | 0.9 | intron | OSBPL10 | U |
| 1805 | chr2 | 349782571 | 34978307 | Endometrium Epithelium | 0.2 | 0.91 | Intergenic | MYADML | U |
| 1806 | chr14 | 105280371 | 105280545 | Endometrium Epithelium | 0.07 | 0.78 | Intergenic | LINC00638 | U |
| 1807 | chr5 | 172371226 | 172371425 | Endometrium Epithelium | 0.17 | 0.88 | intron | ERGIC1 | U |
| 1808 | chr5 | 125589059 | 125589358 | Endometrium Epithelium | 0.19 | 0.9 | Intergenic | HDDC2 | U |
| 1809 | chr2 | 188371809 | 188372138 | Endometrium Epithelium | 0.19 | 0.9 | intron | TFPI | U |
| 1810 | chr9 | 1320485161 | 132048588 | Endometrium Epithelium | 0.23 | 0.93 | Intergenic | C9orf106 | U |
| 1811 | chr16 | 1194503 | 1194648 | Endometrium Epithelium | 0.16 | 0.86 | Intergenic | CACNA1H | U |
| 1812 | chr16 | 803569 | 803729 | Endometrium Epithelium | 0.11 | 0.81 | Intergenic | MSLN | U |
| 1813 | chr15 | 380171681 | 38017344 | Endometrium Epithelium | 0.16 | 0.86 | Intergenic | TMCO5A | U |
| 1814 | chr19 | 10314970 | 10315256 | Endometrium Epithelium | 0.17 | 0.87 | Intergenic | DNMT1 | U |
| 1815 | chr21 | 37752927 | 37752973 | Endometrium Epithelium | 0.25 | 0.94 | Intergenic | CHAF1B | U |
| 1816 | chr16 | 83914357 | 83914480 | Endometrium Epithelium | 0.17 | 0.86 | Intergenic | MLYCD | U |
| 1817 | chr19 | 56758878 | 56759186 | Endometrium Epithelium | 0.19 | 0.88 | Intergenic | ZSCAN5A | U |
| 1818 | chr19 | 136924481 | 13692513 | Endometrium Epithelium | 0.19 | 0.87 | Intergenic | CACNA1A | U |
| 1819 | chr17 | 803486281 | 80348805 | Endometrium Epithelium | 0.25 | 0.93 | exon | OGFOD3 | U |
| 1820 | chr1 | 16446059 | 16446276 | Endometrium Epithelium | 0.14 | 0.82 | Intergenic | EPHA2 | U |
| 1821 | chr17 | 27408345 | 27408672 | Endometrium Epithelium | 0.23 | 0.91 | intron | MYO18A | U |
| 1822 | chr6 | 45643631 | 45643774 | Endometrium Epithelium | 0.19 | 0.86 | Intergenic | RUNX2 | U |
| 1823 | chr1 | 2141909863 | 214191109 | Endometrium Epithelium | 0.23 | 0.89 | intron | PROX1 | U |
| 1824 | chr11 | 109709660 | 109709824 | Endometrium Epithelium | 0.18 | 0.84 | Intergenic | ZC3H12C | U |
| 1825 | chr6 | 34432216 | 34432388 | Endometrium Epithelium | 0.2 | 0.86 | Intergenic | PACSIN1 | U |
| 1826 | chr7 | 261760431 | 26176234 | Endometrium Epithelium | 0.22 | 0.88 | Intergenic | NFE2L3 | U |
| 1827 | chr2 | 116301176 | 116301488 | Endometrium Epithelium | 0.19 | 0.85 | intron | DPP10 | U |
| 1828 | chr2 | 61740650 | 61740740 | Endometrium Epithelium | 0.26 | 0.91 | intron | XPO1 | U |
| 1829 | chr4 | 1832727011 | 183272841 | Endometrium Epithelium | 0.15 | 0.8 | intron | TENM3 | U |
| 1830 | chr8 | 125977953 | 125978122 | Endometrium Epithelium | 0.13 | 0.78 | Intergenic | ZNF572 | U |
| 1831 | chr11 | 36501472 | 36501671 | Endometrium Epithelium | 0.16 | 0.81 | Intergenic | TRAF6 | U |
| 1832 | chr11 | 3435238 | 3435496 | Endometrium Epithelium | 0.23 | 0.88 | Intergenic | OR7E12P | U |
| 1833 | chr7 | 1763593 | 1763701 | Endometrium Epithelium | 0.16 | 0.8 | intron | ELFN1 | U |
| 1834 | chr4 | 182996382 | 182996573 | Endometrium Epithelium | 0.24 | 0.88 | Intergenic | MGC45800 | U |
| 1835 | chr4 | 181648322 | 181648635 | Endometrium Epithelium | 0.18 | 0.82 | Intergenic | LINC00290 | U |
| 1836 | chr8 | 28183689 | 28184008 | Endometrium Epithelium | 0.23 | 0.87 | intron | PNOC | U |
| 1837 | chr10 | 87796575 | 87796909 | Endometrium Epithelium | 0.19 | 0.83 | intron | GRID1 | U |
| 1838 | chr5 | 793325603 | 79332751 | Endometrium Epithelium | 0.2 | 0.83 | intron | THBS4 | U |
| 1839 | chr22 | 45903659 | 45903852 | Endometrium Epithelium | 0.22 | 0.85 | intron | FBLN1 | U |
| 1840 | chr4 | 82161341 | 8216352 | Endometrium Epithelium | 0.26 | 0.89 | exon | SH3TC1 | U |
| 1841 | chr6 | 1510760333 | 151076269 | Endometrium Epithelium | 0.24 | 0.87 | intron | PLEKHG1 | U |
| 1842 | chr1 | 222960114 | 222960445 | Endometrium Epithelium | 0.2 | 0.83 | Intergenic | DISP1 | U |
| 1843 | chr9 | 1381113253 | 138111391 | Endometrium Epithelium | 0.18 | 0.8 | Intergenic | LOC401557 | U |
| 1844 | chr18 | 8588101 | 858922 | Endometrium Epithelium | 0.21 | 0.83 | Intergenic | ADCYAP1 | U |
| 1845 | chr6 | 159279614 | 159279760 | Endometrium Epithelium | 0.22 | 0.84 | promoter-TSS, Interg [symbol] | OSTCP1, OSTCP1 | U |
| 1846 | chr7 | 6974962 | 6975158 | Endometrium Epithelium | 0.24 | 0.86 | Intergenic | CCZ1B | U |
| 1847 | chr17 | 17492886 | 17493190 | Endometrium Epithelium | 0.24 | 0.85 | intron | PEMT | U |
| 1848 | chr11 | 40413021 | 40413462 | Endometrium Epithelium | 0.23 | 0.84 | intron | LRRC4C | U |
| 1849 | chr3 | 2847616 | 2847687 | Endometrium Epithelium | 0.23 | 0.83 | intron | CNTN4 | U |
| 1850 | chr12 | 97092440 | 97092685 | Endometrium Epithelium | 0.23 | 0.82 | Intergenic | NEDD1 | U |
| 1851 | chr12 | 78605315 | 78605603 | Endometrium Epithelium | 0.27 | 0.86 | exon | NAV3 | U |
| 1852 | chr10 | 114972951 | 114973394 | Endometrium Epithelium | 0.26 | 0.85 | Intergenic | TCF7L2 | U |
| 1853 | chr10 | 125063726 | 125064172 | Endometrium Epithelium | 0.21 | 0.8 | Intergenic | BUB3 | U |
| 1854 | chr14 | 996611183 | 99661175 | Endometrium Epithelium | 0.28 | 0.86 | intron | BCL11B | U |
| 1855 | chr11 | 1264353711 | 126435449 | Endometrium Epithelium | 0.27 | 0.85 | intron | KIRREL3 | U |
| 1856 | chr20 | 57392983 | 57393278 | Endometrium Epithelium | 0.27 | 0.85 | promoter-TSS | MIR296 | U |
| 1857 | chr2 | 18429524 | 18429969 | Endometrium Epithelium | 0.31 | 0.89 | Intergenic | RDH14 | U |
| 1858 | chr5 | 178928923 | 178929074 | Endometrium Epithelium | 0.24 | 0.79 | Intergenic | RUFY1 | U |
| 1859 | chr9 | 128745913 | 128746123 | Endometrium Epithelium | 0.24 | 0.78 | Intergenic | PBX3 | U |
| 1860 | chr7 | 1568827223 | 156883060 | Endometrium Epithelium | 0.26 | 0.8 | Intergenic | UBE3C | U |
| 1861 | chr18 | 764344433 | 75434499 | Endometrium Epithelium | 0.31 | 0.84 | Intergenic | SALL3 | U |
| 1862 | chr1 | 22915453 | 22915513 | Endometrium Epithelium | 0.28 | 0.81 | intron, exon | EPHA8, EPHA8 | U |
| 1863 | chr20 | 1753923 | 1754095 | Endometrium Epithelium | 0.3 | 0.81 | intron, TTS | LOC100289473, LOC1 [symbol] | U |
| 1864 | chr7 | 151379729 | 151379984 | Endometrium Epithelium | 0.36 | 0.82 | intron | PRKAG2 | U |
| 1865 | chr6 | 152133802 | 152134204 | Endometrium Epithelium | 0.02 | 0.83 | intron | ESR1 | U |
| 1866 | chr6 | 152132806 | 152133188 | Endometrium Epithelium | 0.01 | 0.81 | intron | ESR1 | U |
| 1867 | chr6 | 152001630 | 152002105 | Endometrium Epithelium | 0.19 | 0.92 | Intergenic | ESR1 | U |
| 1868 | chr3 | 191661320 | 191661582 | Endometrium Epithelium | 0.24 | 0.91 | Intergenic | FGF12 | U |
| 1869 | chr16 | 83758968 | 83759181 | Endometrium Epithelium | 0.22 | 0.83 | intron | CDH13 | U |
| 1870 | chr2 | 69013996 | 69014333 | Endometrium Epithelium | 0.27 | 0.85 | intron | ARHGAP25 | U |
| 1871 | chr16 | 87716530 | 87716660 | Endometrium Epithelium | 0.2 | 0.77 | intron | JPH3 | U |
| 1872 | chrX | 44642544 | 44642681 | Endometrium Epithelium | 0.34 | 0.82 | Intergenic | DUSP21 | U |
| 1873 | chr1 | 233085132 | 233085445 | Endometrium Epithelium | 0.09 | 0.91 | promoter-TSS, Interg [symbol] | NTPCR, NTPCR | U |
| 1874 | chr16 | 89770185 | 89770271 | Endometrium Epithelium | 0.1 | 0.88 | Intergenic | SPATA2L | U |
| 1875 | chr11 | 133704360 | 133704489 | Endometrium Epithelium | 0.12 | 0.88 | Intergenic | SPATA19 | U |
| 1876 | chr7 | 42237271 | 42237445 | Endometrium Epithelium | 0.14 | 0.9 | intron | GLI3 | U |
| 1877 | chr4 | 95461312 | 95461430 | Endometrium Epithelium | 0.2 | 0.94 | intron | PDLIM5 | U |
| 1878 | chr12 | 60384612 | 60384730 | Endometrium Epithelium | 0.15 | 0.89 | Intergenic | SLC16A7 | U |
| 1879 | chr13 | 114812334 | 114812657 | Endometrium Epithelium | 0.12 | 0.84 | intron | RASA3 | U |
| 1880 | chr12 | 94235572 | 94235768 | Endometrium Epithelium | 0.23 | 0.94 | intron | CRADD | U |
| 1881 | chr5 | 171427293 | 171427624 | Endometrium Epithelium | 0.21 | 0.91 | intron | FBXW11 | U |
| 1882 | chr9 | 133366689 | 133366753 | Endometrium Epithelium | 0.21 | 0.88 | intron | ASS1 | U |
| 1883 | chr22 | 33711176 | 33711425 | Endometrium Epithelium | 0.21 | 0.87 | intron | LARGE | U |
| 1884 | chr9 | 71192444 | 71192751 | Endometrium Epithelium | 0.15 | 0.81 | Intergenic | TMEM252 | U |
| 1885 | chr10 | 134795905 | 134796062 | Endometrium Epithelium | 0.2 | 0.84 | Intergenic | LOC399829 | U |
| 1886 | chr9 | 115630973 | 115631205 | Endometrium Epithelium | 0.27 | 0.88 | exon | SNX30 | U |
| 1887 | chr6 | 13880933 | 13881207 | Endometrium Epithelium | 0.3 | 0.9 | Intergenic | RNF182 | U |
| 1888 | chr22 | 42108873 | 42109109 | Endometrium Epithelium | 0.28 | 0.87 | intron | MEI1 | U |
| 1889 | chr19 | 1334184 | 1334262 | Endometrium Epithelium | 0.24 | 0.82 | Intergenic | MUM1 | U |
| 1890 | chr10 | 134610571 | 134610862 | Endometrium Epithelium | 0.28 | 0.86 | Intergenic | NKX6-2 | U |
| 1891 | chr9 | 27490795 | 27491117 | Endometrium Epithelium | 0.28 | 0.83 | intron | MOB3B | U |
| 1892 | chr20 | 41976096 | 41976492 | Endometrium Epithelium | 0.24 | 0.78 | Intergenic | SRSF6 | U |
| 1893 | chr1 | 208132328 | 208132348 | Endometrium Epithelium | 0.81 | 0.25 | Intergenic | CD34 | M |
| 1894 | chr2 | 110372837 | 110373003 | Endometrium Epithelium | 0.72 | 0.17 | exon | SOWAHC | M |
| 1895 | chr1 | 196866430 | 196866530 | Endometrium Epithelium | 0.72 | 0.21 | intron | CFHR4 | M |
| 1896 | chrX | 17392781 | 17392927 | Endometrium Epithelium | 0.68 | 0.18 | promoter-TSS | NHS | M |
| 1897 | chr3 | 186490115 | 186490280 | Endometrium Epithelium | 0.63 | 0.13 | Intergenic | EIF4A2 | M |
| 1898 | chrX | 99663193 | 99663331 | Endometrium Epithelium | 0.72 | 0.24 | exon | PCDH19 | M |
| 1899 | chr3 | 157260711 | 157260870 | Endometrium Epithelium | 0.58 | 0.12 | promoter-TSS | C3orf55 | M |
| 1900 | chr10 | 62761559 | 62761642 | Endometrium Epithelium | 0.72 | 0.27 | promoter-TSS | RHOBTB1 | M |
| 1901 | chr3 | 71802355 | 71802467 | Endometrium Epithelium | 0.6 | 0.18 | promoter-TSS | GPR27 | M |
| 1902 | chrX | 117958654 | 117958794 | Endometrium Epithelium | 0.74 | 0.32 | intron | ZCCHC12 | M |
| 1903 | chr19 | 49112138 | 49112279 | Endometrium Epithelium | 0.63 | 0.28 | intron | FAM83 [symbol] | M |
| 1904 | chr8 | 16801894 | 16801959 | Endometrium Epithelium | 0.61 | 0.27 | Intergenic | FGF20 | M |
| 1905 | chr7 | 94023465 | 94023568 | Endometrium Epithelium | 0.54 | 0.22 | promoter-TSS | COL1A2 | M |
| 1906 | chr16 | 51168402 | 51168685 | Endometrium Epithelium | 0.86 | 0.14 | Intergenic | SALL1 | M |
| 1907 | chr16 | 51168132 | 51168400 | Endometrium Epithelium | 0.82 | 0.13 | Intergenic | SALL1 | M |
| 1908 | chr4 | 106066999 | 106067274 | Endometrium Epithelium | 0.69 | 0.05 | promoter-TSS, intro [symbol] | TET2, TET2 | M |
| 1909 | chr5 | 138923135 | 138923219 | Endometrium Epithelium | 0.73 | 0.1 | Intergenic | UBE2D2 | M |
| 1910 | chr12 | 1306478901 | 130648088 | Endometrium Epithelium | 0.74 | 0.13 | exon | FZD10 | M |
| 1911 | chr20 | 9489269 | 9489565 | Endometrium Epithelium | 0.77 | 0.16 | Intergenic | LAMP5 | M |
| 1912 | chr14 | 105512062 | 105512417 | Endometrium Epithelium | 0.63 | 0.03 | Intergenic | GPR132 | M |
| 1913 | chr20 | 9488976 | 9489231 | Endometrium Epithelium | 0.68 | 0.09 | Intergenic | LAMP5 | M |
| 1914 | chr10 | 8097552 | 8097796 | Endometrium Epithelium | 0.64 | 0.08 | exon | GATA3 | M |
| 1915 | chr2 | 54798129 | 54798348 | Endometrium Epithelium | 0.63 | 0.1 | intron | SPTBN1 | M |
| 1916 | chr10 | 1024731183 | 102473300 | Endometrium Epithelium | 0.56 | 0.15 | Intergenic | PAX2 | M |
| 1917 | chrX | 99663395 | 99663546 | Endometrium Epithelium | 0.6 | 0.24 | exon | PCDH19 | M |
| 1918 | chr1 | 172579244 | 172579386 | Fallopian Epithelium | 0.02 | 0.91 | exon | SUCO | U |
| 1919 | chr17 | 63004755 | 63004919 | Fallopian Epithelium | 0.05 | 0.94 | Intergenic, TTS | AMZ2P1, GNA13 | U |
| 1920 | chr4 | 22604364 | 22604525 | Fallopian Epithelium | 0.04 | 0.92 | Intergenic | GPR125 | U |
| 1921 | chr17 | 12902144 | 12902625 | Fallopian Epithelium | 0.06 | 0.94 | intron | ELAC2 | U |
| 1922 | chr6 | 167457159 | 167457484 | Fallopian Epithelium | 0.03 | 0.9 | Intergenic | FGFR1OP | U |
| 1923 | chr1 | 111967898 | 111968105 | Fallopian Epithelium | 0.03 | 0.89 | intron | OVGP1 | U |
| 1924 | chr8 | 17350396 | 17350622 | Fallopian Epithelium | 0.02 | 0.88 | Intergenic | SLC7A2 | U |
| 1925 | chr10 | 88403481 | 88403562 | Fallopian Epithelium | 0.01 | 0.86 | Intergenic | OPN4 | U |
| 1926 | chr4 | 22603266 | 22603729 | Fallopian Epithelium | 0.09 | 0.93 | Intergenic | GPR125 | U |
| 1927 | chr8 | 145249327 | 145249613 | Fallopian Epithelium | 0.08 | 0.91 | intron | MROH1 | U |
| 1928 | chr21 | 16915668 | 16915942 | Fallopian Epithelium | 0.04 | 0.85 | Intergenic | USP25 | U |
| 1929 | chr1 | 111985459 | 111985650 | Fallopian Epithelium | 0.12 | 0.92 | intron | WDR77 | U |
| 1930 | chr2 | 148404745 | 148405073 | Fallopian Epithelium | 0.06 | 0.85 | Intergenic | ACVR2A | U |
| 1931 | chr3 | 178101164 | 178101550 | Fallopian Epithelium | 0.08 | 0.87 | Intergenic | KCNMB2-IT1 | U |
| 1932 | chr13 | 20513194 | 20513415 | Fallopian Epithelium | 0.12 | 0.9 | Intergenic | ZMYM2 | U |
| 1933 | chr8 | 64032053 | 64032428 | Fallopian Epithelium | 0.13 | 0.91 | Intergenic | TTPA | U |
| 1934 | chr3 | 9312551 | 9312788 | Fallopian Epithelium | 0.11 | 0.87 | Intergenic | SRGAP3 | U |
| 1935 | chr16 | 83997324 | 83997562 | Fallopian Epithelium | 0.1 | 0.86 | intron | OSGIN1 | U |
| 1936 | chr7 | 123510738 | 123510841 | Fallopian Epithelium | 0.15 | 0.9 | intron | HYAL4 | U |
| 1937 | chr2 | 173721702 | 173722198 | Fallopian Epithelium | 0.25 | 0.93 | intron | RAPGEF4 | U |
| 1938 | chr2 | 101548181 | 101548341 | Fallopian Epithelium | 0.05 | 0.94 | intron | NPAS2 | U |
| 1939 | chr3 | 195237882 | 195238137 | Fallopian Epithelium | 0.04 | 0.93 | Intergenic | MIR5692C1 | U |
| 1940 | chr10 | 27488102 | 27488189 | Fallopian Epithelium | 0.05 | 0.92 | intron | ACBD5 | U |
| 1941 | chr2 | 5640117 | 5640288 | Fallopian Epithelium | 0.01 | 0.87 | Intergenic | SOX11 | U |
| 1942 | chr6 | 155328330 | 155328620 | Fallopian Epithelium | 0.04 | 0.89 | Intergenic | TIAM2 | U |
| 1943 | chr5 | 61694414 | 61694897 | Fallopian Epithelium | 0.04 | 0.89 | exon | DIMT1 | U |
| 1944 | chr17 | 60790869 | 60790952 | Fallopian Epithelium | 0.04 | 0.88 | intron | MARCH10 | U |
| 1945 | chr3 | 185745309 | 185745404 | Fallopian Epithelium | 0.08 | 0.92 | Intergenic | LOC344887 | U |
| 1946 | chr9 | 135486165 | 135486346 | Fallopian Epithelium | 0.09 | 0.92 | intron | DDX31 | U |
| 1947 | chr11 | 71923939 | 71924198 | Fallopian Epithelium | 0.02 | 0.85 | Intergenic | FOLR2 | U |
| 1948 | chr4 | 57633113 | 57633291 | Fallopian Epithelium | 0.07 | 0.89 | Intergenic | SPINK2 | U |
| 1949 | chr4 | 145268668 | 145268888 | Fallopian Epithelium | 0.01 | 0.83 | Intergenic | GYPA | U |
| 1950 | chr1 | 244476799 | 244477251 | Fallopian Epithelium | 0.07 | 0.89 | Intergenic | C1orf100 | U |
| 1951 | chr12 | 110801079 | 110801295 | Fallopian Epithelium | 0.1 | 0.91 | Intergenic | ANAPC7 | U |
| 1952 | chr2 | 1545713 | 1545942 | Fallopian Epithelium | 0.03 | 0.83 | intron | TPO | U |
| 1953 | chr7 | 29350848 | 29351118 | Fallopian Epithelium | 0.08 | 0.88 | intron | CHN2 | U |
| 1954 | chr5 | 176810230 | 176810566 | Fallopian Epithelium | 0.05 | 0.85 | Intergenic | SLC34A1 | U |
| 1955 | chr18 | 19717464 | 19717894 | Fallopian Epithelium | 0.08 | 0.88 | Intergenic | GATA6 | U |
| 1956 | chr11 | 97778616 | 97779053 | Fallopian Epithelium | 0.07 | 0.87 | Intergenic | JRKL-AS1 | U |
| 1957 | chr11 | 69013717 | 69013783 | Fallopian Epithelium | 0.06 | 0.85 | Intergenic | MYEOV | U |
| 1958 | chr8 | 24133807 | 24133996 | Fallopian Epithelium | 0.1 | 0.89 | Intergenic | ADAM28 | U |
| 1959 | chr10 | 14320514 | 14320703 | Fallopian Epithelium | 0.01 | 0.8 | intron | FRMD4A | U |
| 1960 | chr5 | 60822108 | 60822341 | Fallopian Epithelium | 0.13 | 0.92 | intron | ZSWIM6 | U |
| 1961 | chr1 | 94165060 | 94165443 | Fallopian Epithelium | 0.1 | 0.89 | intron | BCAR3 | U |
| 1962 | chr10 | 3709640 | 3709769 | Fallopian Epithelium | 0.1 | 0.88 | Intergenic | KLF6 | U |
| 1963 | chr17 | 75113353 | 75113518 | Fallopian Epithelium | 0.07 | 0.85 | intron | SEC14L1 | U |
| 1964 | chr2 | 236909064 | 236909368 | Fallopian Epithelium | 0.14 | 0.92 | intron | AGAP1 | U |
| 1965 | chr17 | 74807275 | 74807636 | Fallopian Epithelium | 0.08 | 0.86 | Intergenic | MGAT5B | U |
| 1966 | chr3 | 5450781 | 5450949 | Fallopian Epithelium | 0.08 | 0.85 | Intergenic | MIR4790 | U |
| 1967 | chr3 | 11289659 | 11289853 | Fallopian Epithelium | 0.12 | 0.89 | intron | HRH1 | U |
| 1968 | chr11 | 11092363 | 11092685 | Fallopian Epithelium | 0.09 | 0.86 | Intergenic | LOC729013 | U |
| 1969 | chr17 | 53549234 | 53549559 | Fallopian Epithelium | 0.11 | 0.88 | Intergenic | MMD | U |
| 1970 | chr19 | 29512635 | 29512788 | Fallopian Epithelium | 0.09 | 0.85 | Intergenic | LOC100505835 | U |
| 1971 | chr2 | 129666820 | 129667077 | Fallopian Epithelium | 0.07 | 0.83 | Intergenic | HS6ST1 | U |
| 1972 | chr5 | 173113621 | 173114000 | Fallopian Epithelium | 0.13 | 0.89 | Intergenic | BOD1 | U |
| 1973 | chr12 | 83788743 | 83789144 | Fallopian Epithelium | 0.09 | 0.85 | Intergenic | TMTC2 | U |
| 1974 | chr16 | 87511831 | 87512238 | Fallopian Epithelium | 0.16 | 0.92 | intron | ZCCHC14 | U |
| 1975 | chr1 | 111962901 | 111963329 | Fallopian Epithelium | 0.1 | 0.86 | intron | OVGP1 | U |
| 1976 | chr4 | 170641059 | 170641488 | Fallopian Epithelium | 0.1 | 0.86 | exon | CLCN3 | U |
| 1977 | chr1 | 111986202 | 111986679 | Fallopian Epithelium | 0.1 | 0.86 | intron | WDR77 | U |
| 1978 | chr8 | 25184019 | 25184117 | Fallopian Epithelium | 0.12 | 0.87 | intron | DOCK5 | U |
| 1979 | chr8 | 30008237 | 30008488 | Fallopian Epithelium | 0.07 | 0.82 | intron | MIR54802 | U |
| 1980 | chr5 | 53401718 | 53402149 | Fallopian Epithelium | 0.12 | 0.87 | intron | GCLC | U |
| 1981 | chr15 | 90586693 | 90587017 | Fallopian Epithelium | 0.15 | 0.89 | intron | ZNF710 | U |
| 1982 | chr6 | 162254595 | 162254688 | Fallopian Epithelium | 0.12 | 0.85 | intron | PARK2 | U |
| 1983 | chr2 | 15948155 | 15948337 | Fallopian Epithelium | 0.13 | 0.86 | Intergenic | MYCN | U |
| 1984 | chr11 | 100080833 | 100081069 | Fallopian Epithelium | 0.13 | 0.85 | intron | CNTN5 | U |
| 1985 | chr9 | 1255665833 | 125566829 | Fallopian Epithelium | 0.2 | 0.92 | Intergenic | OR1K1 | U |
| 1986 | chr21 | 43940842 | 43941201 | Fallopian Epithelium | 0.12 | 0.84 | intron | SLC37A1 | U |
| 1987 | chr18 | 76546040 | 76546267 | Fallopian Epithelium | 0.16 | 0.87 | Intergenic | SALL3 | U |
| 1988 | chr11 | 12233727 | 12234011 | Fallopian Epithelium | 0.2 | 0.91 | intron | MICAL2 | U |
| 1989 | chr1 | 22819009 | 22819482 | Fallopian Epithelium | 0.18 | 0.89 | intron | ZBTB40 | U |
| 1990 | chr3 | 11215119 | 11215615 | Fallopian Epithelium | 0.17 | 0.88 | intron | HRH1 | U |
| 1991 | chr5 | 15937562 | 15937626 | Fallopian Epithelium | 0.21 | 0.91 | exon | FBXL7 | U |
| 1992 | chr4 | 146298122 | 146298221 | Fallopian Epithelium | 0.13 | 0.83 | Intergenic | SMAD1 | U |
| 1993 | chr1 | 230916064 | 230916192 | Fallopian Epithelium | 0.17 | 0.87 | intron | CAPN9 | U |
| 1994 | chr3 | 1366902623 | 136690399 | Fallopian Epithelium | 0.24 | 0.94 | intron | IL20RB | U |
| 1995 | chr14 | 93342482 | 93342779 | Fallopian Epithelium | 0.12 | 0.82 | Intergenic | CHGA | U |
| 1996 | chr2 | 221081171 | 221081471 | Fallopian Epithelium | 0.19 | 0.89 | Intergenic | MIR4268 | U |
| 1997 | chr20 | 60537308 | 60537616 | Fallopian Epithelium | 0.13 | 0.82 | Intergenic | MIR1257 | U |
| 1998 | chr4 | 8476417 | 8476566 | Fallopian Epithelium | 0.16 | 0.84 | intron | TRMT44 | U |
| 1999 | chr8 | 37167163 | 37167406 | Fallopian Epithelium | 0.18 | 0.86 | Intergenic | ZNF703 | U |
| 2000 | chr2 | 113623217 | 113623649 | Fallopian Epithelium | 0.18 | 0.86 | Intergenic | IL1B | U |
| 2001 | chr14 | 95339286 | 95339521 | Fallopian Epithelium | 0.21 | 0.88 | Intergenic | GSC | U |
| 2002 | chr7 | 1429993201 | 142999770 | Fallopian Epithelium | 0.22 | 0.89 | intron | CASP2 | U |
| 2003 | chr1 | 6938724 | 6938836 | Fallopian Epithelium | 0.28 | 0.94 | intron | CAMTA1 | U |
| 2004 | chr3 | 72058519 | 72058673 | Fallopian Epithelium | 0.25 | 0.91 | Intergenic | LOC201617 | U |
| 2005 | chr17 | 62663832 | 62664044 | Fallopian Epithelium | 0.24 | 0.9 | Intergenic | SMURF2 | U |
| 2006 | chr4 | 79878229 | 79878503 | Fallopian Epithelium | 0.17 | 0.83 | Intergenic | LOC100505875 | U |
| 2007 | chr9 | 138356237 | 138356676 | Fallopian Epithelium | 0.27 | 0.92 | exon | LOC100506599 | U |
| 2008 | chr7 | 66397994 | 66398237 | Fallopian Epithelium | 0.25 | 0.89 | intron | TMEM248 | U |
| 2009 | chr8 | 77932187 | 77932525 | Fallopian Epithelium | 0.25 | 0.89 | Intergenic | PEX2 | U |
| 2010 | chr18 | 42862917 | 42863362 | Fallopian Epithelium | 0.27 | 0.91 | intron | SLC14A2 | U |
| 2011 | chr2 | 219787077 | 219787509 | Fallopian Epithelium | 0.19 | 0.82 | Intergenic | CDK5R2 | U |
| 2012 | chr5 | 112799248 | 112799700 | Fallopian Epithelium | 0.21 | 0.84 | intron | MCC | U |
| 2013 | chr5 | 65538308 | 65538600 | Fallopian Epithelium | 0.26 | 0.88 | Intergenic | SREKI | U |
| 2014 | chr21 | 35515274 | 35515581 | Fallopian Epithelium | 0.3 | 0.92 | TTS | MRPS6 | U |
| 2015 | chr2 | 173448055 | 173448390 | Fallopian Epithelium | 0.32 | 0.94 | intron | PDK1 | U |
| 2016 | chr13 | 37788409 | 37788774 | Fallopian Epithelium | 0.26 | 0.88 | Intergenic | CSNK1A1L | U |
| 2017 | chr4 | 17533070 | 17533270 | Fallopian Epithelium | 0.25 | 0.86 | Intergenic | CLRN2 | U |
| 2018 | chr3 | 130635214 | 130635456 | Fallopian Epithelium | 0.33 | 0.94 | intron | ATP2C1 | U |
| 2019 | chr17 | 66671291 | 66671602 | Fallopian Epithelium | 0.29 | 0.9 | Intergenic | FAM204 | U |
| 2020 | chr1 | 41973448 | 41973852 | Fallopian Epithelium | 0.31 | 0.91 | exon | HIVEP3 | U |
| 2021 | chr12 | 92588638 | 92588846 | Fallopian Epithelium | 0.35 | 0.92 | Intergenic | BTG1 | U |
| 2022 | chr12 | 8828813 | 8829136 | Fallopian Epithelium | 0.3 | 0.85 | Intergenic | MFAP5 | U |
| 2023 | chr10 | 1234487941 | 123449223 | Fallopian Epithelium | 0.08 | 0.8 | Intergenic | FGFR2 | U |
| 2024 | chr2 | 1932785453 | 193278786 | Fallopian Epithelium | 0.24 | 0.86 | Intergenic | TMEFF2 | U |
| 2025 | chr21 | 45483246 | 45483618 | Fallopian Epithelium | 0.04 | 0.94 | exon, intron | TRAPPC10 | U |
| 2026 | chr14 | 46854120 | 46854410 | Fallopian Epithelium | 0.08 | 0.9 | Intergenic | RPL10L | U |
| 2027 | chr14 | 51894318 | 51894732 | Fallopian Epithelium | 0.18 | 0.9 | Intergenic | LINC00640 | U |
| 2028 | chr5 | 15937192 | 15937404 | Fallopian Epithelium | 0.27 | 0.94 | lexor | FBXL7 | U |
| 2029 | chr2 | 206890514 | 206890842 | Fallopian Epithelium | 0.32 | 0.94 | intron | NOBOD | U |
| 2030 | chr14 | 66423698 | 66423803 | Fallopian Epithelium | 0.04 | 0.89 | Intergenic | LINC00238 | U |
| 2031 | chr14 | 75363159 | 75363611 | Fallopian Epithelium | 0.06 | 0.91 | intron | DLST | U |
| 2032 | chr12 | 51844686 | 51844830 | Fallopian Epithelium | 0.03 | 0.87 | exon | SLC4A8 | U |
| 2033 | chr9 | 78935216 | 78935535 | Fallopian Epithelium | 0.05 | 0.87 | intron | PCSK5 | U |
| 2034 | chr10 | 134593141 | 134593533 | Fallopian Epithelium | 0.12 | 0.94 | intron | INPP5A | U |
| 2035 | chr9 | 86409444 | 86409869 | Fallopian Epithelium | 0.08 | 0.89 | intron | GKAP1 | U |
| 2036 | chr14 | 532002001 | 53200644 | Fallopian Epithelium | 0.12 | 0.92 | intron | STYX | U |
| 2037 | chr7 | 155871852 | 155871961 | Fallopian Epithelium | 0.12 | 0.91 | Intergenic | SHH | U |
| 2038 | chr6 | 550533 | 550713 | Fallopian Epithelium | 0.08 | 0.83 | intron | EXOC2 | U |
| 2039 | chr6 | 25262929 | 25263312 | Fallopian Epithelium | 0.17 | 0.92 | Intergenic | LRRC16A | U |
| 2040 | chr11 | 71888432 | 71888781 | Fallopian Epithelium | 0.18 | 0.86 | Intergenic | FOLR1 | U |
| 2041 | chr20 | 23666367 | 23666597 | Fallopian Epithelium | 0.08 | 0.74 | exon, intron | CST4, CST4 | U |
| 2042 | chr7 | 121090 | 121201 | Fallopian Epithelium | 0.32 | 0.84 | Intergenic | FAM20C | U |
| 2043 | chr10 | 95361578 | 95361781 | Fallopian Epithelium | 0.82 | 0.09 | promoter-TSS | RBP4 | M |
| 2044 | chr2 | 120188912 | 120189024 | Fallopian Epithelium | 0.84 | 0.13 | promoter-TSS | TMEM37 | M |
| 2045 | chr11 | 115227865 | 115228020 | Fallopian Epithelium | 0.8 | 0.18 | intron | CADM1 | M |
| 2046 | chr11 | 41480355 | 41480636 | Fallopian Epithelium | 0.78 | 0.17 | intron | LRRC4C | M |
| 2047 | chr5 | 67535502 | 67535751 | Fallopian Epithelium | 0.76 | 0.16 | intron | PIK3R1 | M |
| 2048 | chr5 | 59190362 | 59190426 | Fallopian Epithelium | 0.83 | 0.24 | promoter-TSS | PDE4D | M |
| 2049 | chr5 | 64398711 | 64398764 | Fallopian Epithelium | 0.66 | 0.1 | Intergenic | CWC27 | M |
| 2050 | chr18 | 30137691 | 3013862 | Fallopian Epithelium | 0.73 | 0.2 | Intergenic | LPIN2 | M |
| 2051 | chr6 | 960243131 | 96024529 | Fallopian Epithelium | 0.69 | 0.16 | promoter-TSS | MANEA | M |
| 2052 | chr16 | 3015411 | 3015500 | Fallopian Epithelium | 0.65 | 0.16 | intron, exon | KREMEN2, KREMEN2 | M |
| 2053 | chr5 | 87066677 | 87066817 | Fallopian Epithelium | 0.69 | 0.21 | Intergenic | CCNH | M |
| 2054 | chr12 | 125399869 | 125400014 | Fallopian Epithelium | 0.59 | 0.12 | promoter-TSS | UBC | M |
| 2055 | chr11 | 46696375 | 46696645 | Fallopian Epithelium | 0.66 | 0.19 | exon | ATG13 | M |
| 2056 | chr5 | 47276031 | 47276329 | Fallopian Epithelium | 0.64 | 0.18 | intron | TNFRSF21 | M |
| 2057 | chr1 | 45279151 | 45279278 | Fallopian Epithelium | 0.58 | 0.16 | intron | BTBD19 | M |
| 2058 | chrX | 86773263 | 86773514 | Fallopian Epithelium | 0.71 | 0.29 | intron | KLHL4 | M |
| 2059 | chr4 | 83482420 | 83482509 | Fallopian Epithelium | 0.62 | 0.23 | intron | TMEM150C | M |
| 2060 | chr21 | 46898103 | 46898359 | Fallopian Epithelium | 0.55 | 0.16 | intron | COL18A1 | M |
| 2061 | chrX | 24483799 | 24484000 | Fallopian Epithelium | 0.54 | 0.22 | intron | PDK3 | M |
| 2062 | chr17 | 16284988 | 16285336 | Fallopian Epithelium | 0.69 | 0.05 | exon, intron | UBB, UBB | M |
| 2063 | chr16 | 10274415 | 10274633 | Fallopian Epithelium | 0.76 | 0.14 | intron | GRIN2A | M |
| 2064 | chr5 | 59187838 | 59188013 | Fallopian Epithelium | 0.78 | 0.17 | intron | PDE4D | M |
| 2065 | chr17 | 48619146 | 48619218 | Fallopian Epithelium | 0.61 | 0.08 | intron | EPN3 | M |
| 2066 | chr3 | 151985697 | 151985919 | Fallopian Epithelium | 0.62 | 0.16 | promoter-TSS | MBNL1 | M |
| 2067 | chr14 | 105189951 | 105190016 | Fallopian Epithelium | 0.59 | 0.17 | promoter-TSS | ADSSL1 | M |
| 2068 | chr19 | 391803443 | 39180416 | Kidney Epithelium | 0.09 | 0.96 | intron | ACTN4 | U |
| 2069 | chr3 | 125062531 | 125062912 | Kidney Epithelium | 0.07 | 0.94 | intron | ZNF148 | U |
| 2070 | chr7 | 12583963 | 12584062 | Kidney Epithelium | 0.08 | 0.88 | Intergenic | SCIN | U |
| 2071 | chr2 | 39015988 | 39016238 | Kidney Epithelium | 0.15 | 0.95 | Intergenic | GEMIN6 | U |
| 2072 | chr7 | 87640622 | 87640841 | Kidney Epithelium | 0.15 | 0.93 | intron | ADAM22 | U |
| 2073 | chr19 | 80649073 | 8065002 | Kidney Epithelium | 0.14 | 0.9 | intron | ELAVL1 | U |
| 2074 | chr2 | 203529169 | 203529527 | Kidney Epithelium | 0.16 | 0.92 | intron | FAM1178 | U |
| 2075 | chr1 | 70661377 | 70661570 | Kidney Epithelium | 0.21 | 0.96 | intron | LRRC40 | U |
| 2076 | chr4 | 286423783 | 28642647 | Kidney Epithelium | 0.15 | 0.9 | Intergenic | MIR4275 | U |
| 2077 | chr6 | 241052 | 241153 | Kidney Epithelium | 0.21 | 0.92 | Intergenic | DUSP22 | U |
| 2078 | chr5 | 112953981 | 112954100 | Kidney Epithelium | 0.22 | 0.93 | Intergenic | YTHDC2 | U |
| 2079 | chr10 | 972671 | 972944 | Kidney Epithelium | 0.23 | 0.92 | intron | LARP4B | U |
| 2080 | chr10 | 99251294 | 99251663 | Kidney Epithelium | 0.3 | 0.93 | intron | MMS19 | U |
| 2081 | chr21 | 35212230 | 35212414 | Kidney Epithelium | 0.06 | 0.91 | TTS, intron | ITSN1, ITSN1 | U |
| 2082 | chr2 | 99302337 | 99302637 | Kidney Epithelium | 0.09 | 0.91 | intron | MGAT4A | U |
| 2083 | chr5 | 40996004 | 40996475 | Kidney Epithelium | 0.1 | 0.89 | Intergenic | MROH2B | U |
| 2084 | chr15 | 61181729 | 61181822 | Kidney Epithelium | 0.08 | 0.86 | intron | RORA | U |
| 2085 | chr1 | 96985133 | 96985236 | Kidney Epithelium | 0.17 | 0.93 | Intergenic | PTBP2 | U |
| 2086 | chr6 | 170664874 | 170565152 | Kidney Epithelium | 0.13 | 0.89 | intron | LOC154449 | U |
| 2087 | chr8 | 116559924 | 116560157 | Kidney Epithelium | 0.16 | 0.9 | intron | TRPS1 | U |
| 2088 | chr20 | 3371067 | 3371304 | Kidney Epithelium | 0.17 | 0.91 | intron | C20orf194 | U |
| 2089 | chr7 | 68500931 | 68500967 | Kidney Epithelium | 0.12 | 0.85 | Intergenic | AUTS2 | U |
| 2090 | chr6 | 153471717 | 153471870 | Kidney Epithelium | 0.1 | 0.83 | Intergenic | RGS17 | U |
| 2091 | chr11 | 11626479 | 11626712 | Kidney Epithelium | 0.15 | 0.88 | intron | GALNT18 | U |
| 2092 | chr4 | 379846141 | 37984861 | Kidney Epithelium | 0.16 | 0.89 | intron | TBC1D1 | U |
| 2093 | chr3 | 153086894 | 153087092 | Kidney Epithelium | 0.16 | 0.88 | Intergenic | C3orf79 | U |
| 2094 | chr13 | 23423085 | 23423309 | Kidney Epithelium | 0.07 | 0.79 | Intergenic | BASP1P1 | U |
| 2095 | chr3 | 432610183 | 43261380 | Kidney Epithelium | 0.18 | 0.9 | Intergenic | SNRK | U |
| 2096 | chr12 | 124388479 | 124388930 | Kidney Epithelium | 0.12 | 0.84 | intron | DNAH10 | U |
| 2097 | chr2 | 236883965 | 236884437 | Kidney Epithelium | 0.19 | 0.91 | intron | AGAP1 | U |
| 2098 | chr7 | 151151464 | 151151679 | Kidney Epithelium | 0.19 | 0.9 | Intergenic | CRYGN | U |
| 2099 | chr3 | 56769039 | 56769267 | Kidney Epithelium | 0.14 | 0.85 | intron | ARHGEF3 | U |
| 2100 | chr3 | 1927783553 | 192778486 | Kidney Epithelium | 0.2 | 0.9 | Intergenic | MB21D2 | U |
| 2101 | chr2 | 240722873 | 240723010 | Kidney Epithelium | 0.17 | 0.87 | TTS | LOC150935 | U |
| 2102 | chr1 | 5902819 | 5902963 | Kidney Epithelium | 0.13 | 0.82 | Intergenic | MIR4689 | U |
| 2103 | chr2 | 1278957001 | 127895954 | Kidney Epithelium | 0.22 | 0.91 | Intergenic | BIN1 | U |
| 2104 | chr5 | 180015927 | 180016082 | Kidney Epithelium | 0.2 | 0.88 | Intergenic | SCGB3A1 | U |
| 2105 | chr6 | 153471499 | 153471660 | Kidney Epithelium | 0.13 | 0.81 | Intergenic | RGS17 | U |
| 2106 | chr19 | 38443593 | 38443789 | Kidney Epithelium | 0.23 | 0.91 | intron | SIPA1L3 | U |
| 2107 | chr19 | 18595135 | 18595420 | Kidney Epithelium | 0.22 | 0.9 | intron | ELL | U |
| 2108 | chr13 | 76871766 | 76871871 | Kidney Epithelium | 0.24 | 0.91 | Intergenic | C13orf45 | U |
| 2109 | chr15 | 99943993 | 99944174 | Kidney Epithelium | 0.23 | 0.87 | Intergenic | HSP90B2P | U |
| 2110 | chr13 | 23422878 | 23422953 | Kidney Epithelium | 0.09 | 0.75 | Intergenic | BASP1P1 | U |
| 2111 | chr17 | 1210620 | 1210755 | Kidney Epithelium | 0.21 | 0.87 | Intergenic | TUSC5 | U |
| 2112 | chr17 | 1299134 | 1299234 | Kidney Epithelium | 0.26 | 0.91 | intron | YWHAE | U |
| 2113 | chr10 | 1514522 | 1514697 | Kidney Epithelium | 0.22 | 0.87 | intron | ADARB2 | U |
| 2114 | chr7 | 1506840713 | 150684260 | Kidney Epithelium | 0.23 | 0.88 | Intergenic | NOS3 | U |
| 2115 | chr10 | 132891205 | 132891551 | Kidney Epithelium | 0.25 | 0.9 | exon | TCERG1L | U |
| 2116 | chr11 | 64733146 | 64733345 | Kidney Epithelium | 0.2 | 0.84 | Intergenic | C11orf85 | U |
| 2117 | chr15 | 69370689 | 69371017 | Kidney Epithelium | 0.27 | 0.91 | intron | MIR548H4 | U |
| 2118 | chr12 | 127756296 | 127756380 | Kidney Epithelium | 0.27 | 0.9 | Intergenic | LOC440117 | U |
| 2119 | chr12 | 131507099 | 131507260 | Kidney Epithelium | 0.24 | 0.87 | intron | GPR133 | U |
| 2120 | chr19 | 39529370 | 39529595 | Kidney Epithelium | 0.27 | 0.9 | Intergenic | FBXO27 | U |
| 2121 | chr4 | 129506564 | 129506833 | Kidney Epithelium | 0.3 | 0.93 | Intergenic | PHF17 | U |
| 2122 | chr13 | 33764942 | 33765270 | Kidney Epithelium | 0.27 | 0.9 | intron | STARD13 | U |
| 2123 | chr3 | 167925108 | 167925496 | Kidney Epithelium | 0.27 | 0.9 | Intergenic | EGFEM1P | U |
| 2124 | chr17 | 1200827 | 1201001 | Kidney Epithelium | 0.24 | 0.86 | intron | TUSC5 | U |
| 2125 | chr5 | 79794683 | 79794920 | Kidney Epithelium | 0.23 | 0.85 | intron | FAM151B | U |
| 2126 | chr5 | 2237991 | 2238213 | Kidney Epithelium | 0.24 | 0.85 | Intergenic | IRX4 | U |
| 2127 | chr16 | 86523650 | 86523906 | Kidney Epithelium | 0.18 | 0.79 | intron | FENDRR | U |
| 2128 | chr2 | 227191218 | 227191551 | Kidney Epithelium | 0.31 | 0.92 | Intergenic | LOC646736 | U |
| 2129 | chr3 | 11111968 | 11112104 | Kidney Epithelium | 0.28 | 0.88 | Intergenic | SLC6A1-AS1 | U |
| 2130 | chr10 | 80538472 | 80538790 | Kidney Epithelium | 0.26 | 0.86 | Intergenic | ZMIZ1-AS1 | U |
| 2131 | chr11 | 27970403 | 27970759 | Kidney Epithelium | 0.27 | 0.87 | Intergenic | MIR610 | U |
| 2132 | chr17 | 32956139 | 32956404 | Kidney Epithelium | 0.25 | 0.84 | exon, intron | TMEM132E, TMEM13 | U |
| 2133 | chr10 | 13763955 | 13764295 | Kidney Epithelium | 0.26 | 0.85 | intron | FRMD4A | U |
| 2134 | chr3 | 155268258 | 155268686 | Kidney Epithelium | 0.34 | 0.93 | intron | PLCH1 | U |
| 2135 | chr14 | 95215739 | 95215812 | Kidney Epithelium | 0.28 | 0.86 | Intergenic | GSC | U |
| 2136 | chr15 | 49183985 | 49184348 | Kidney Epithelium | 0.35 | 0.93 | intron | SHC4 | U |
| 2137 | chr18 | 11993675 | 11993982 | Kidney Epithelium | 0.33 | 0.86 | intron | IMPA2 | U |
| 2138 | chr16 | 71872180 | 71872562 | Kidney Epithelium | 0.32 | 0.88 | Intergenic | ATXN1L | U |
| 2139 | chr2 | 1316758813 | 131676090 | Kidney Epithelium | 0.3 | 0.85 | intron | ARHGEF4 | U |
| 2140 | chr9 | 1347199223 | 134720096 | Kidney Epithelium | 0.34 | 0.87 | Intergenic | RAPGEF1 | U |
| 2141 | chr4 | 1551616 | 1551924 | Kidney Epithelium | 0.37 | 0.9 | Intergenic | FAM53A | U |
| 2142 | chr16 | 22937329 | 22937400 | Kidney Epithelium | 0.14 | 0.85 | Intergenic | HS3ST2 | U |
| 2143 | chr8 | 68323403 | 68323481 | Kidney Epithelium | 0.18 | 0.89 | Intergenic | ARFGEF1 | U |
| 2144 | chr21 | 47049353 | 47049460 | Kidney Epithelium | 0.32 | 0.88 | Intergenic | SLC19A1 | U |
| 2145 | chr18 | 42290985 | 42291089 | Kidney Epithelium | 0.06 | 0.94 | intron | SETBP1 | U |
| 2146 | chr16 | 12609458 | 12609723 | Kidney Epithelium | 0.08 | 0.91 | intron | SNX29 | U |
| 2147 | chr6 | 96084977 | 96085303 | Kidney Epithelium | 0.13 | 0.93 | Intergenic | MANEA | U |
| 2148 | chr18 | 76151081 | 76151263 | Kidney Epithelium | 0.2 | 0.94 | Intergenic | SALL3 | U |
| 2149 | chr20 | 26118583 | 26118677 | Kidney Epithelium | 0.12 | 0.85 | Intergenic | NCOR1P1 | U |
| 2150 | chr16 | 74659275 | 74659531 | Kidney Epithelium | 0.23 | 0.93 | intron | RFWD3 | U |
| 2151 | chr6 | 149868192 | 149868428 | Kidney Epithelium | 0.24 | 0.94 | Intergenic | PPIL4 | U |
| 2152 | chr10 | 119543627 | 119543965 | Kidney Epithelium | 0.24 | 0.91 | Intergenic | EMX2OS | U |
| 2153 | chr17 | 80100626 | 80100869 | Kidney Epithelium | 0.27 | 0.93 | intron | CCDC57 | U |
| 2154 | chr11 | 35515942 | 35516176 | Kidney Epithelium | 0.29 | 0.95 | intron | PAMR1 | U |
| 2155 | chr5 | 55330568 | 55330869 | Kidney Epithelium | 0.29 | 0.94 | Intergenic | IL6ST | U |
| 2156 | chr6 | 15525028 | 15525517 | Kidney Epithelium | 0.3 | 0.95 | intron | DTNBP1 | U |
| 2157 | chr1 | 117715692 | 117715875 | Kidney Epithelium | 0.11 | 0.93 | intron | VTCN1 | U |
| 2158 | chr9 | 855579513 | 85558014 | Kidney Epithelium | 0.11 | 0.88 | Intergenic | RASEF | U |
| 2159 | chr13 | 49397756 | 49397983 | Kidney Epithelium | 0.15 | 0.92 | Intergenic | CYSLTR2 | U |
| 2160 | chr14 | 62056738 | 62056968 | Kidney Epithelium | 0.09 | 0.86 | intron | FLI22447 | U |
| 2161 | chr13 | 25026065 | 25026411 | Kidney Epithelium | 0.17 | 0.94 | intron | PARP4 | U |
| 2162 | chr5 | 16681956 | 16682099 | Kidney Epithelium | 0.13 | 0.89 | exon | MYO10 | U |
| 2163 | chr16 | 12084268 | 12084506 | Kidney Epithelium | 0.16 | 0.92 | intron | SNX29 | U |
| 2164 | chr11 | 939169 | 939468 | Kidney Epithelium | 0.17 | 0.93 | intron | AP2A2 | U |
| 2165 | chr7 | 151781437 | 151781869 | Kidney Epithelium | 0.18 | 0.93 | intron | GALNT11 | U |
| 2166 | chr7 | 47605153 | 47605261 | Kidney Epithelium | 0.16 | 0.9 | intron | TNS3 | U |
| 2167 | chr8 | 1132808 | 1132948 | Kidney Epithelium | 0.14 | 0.88 | Intergenic | LOC286083 | U |
| 2168 | chr1 | 6750284 | 6750650 | Kidney Epithelium | 0.17 | 0.91 | intron | DNAJC11 | U |
| 2169 | chr17 | 36967440 | 36967851 | Kidney Epithelium | 0.2 | 0.94 | intron | CWC25 | U |
| 2170 | chr12 | 4554786 | 4554972 | Kidney Epithelium | 0.16 | 0.89 | promoter-TSS | FGF6 | U |
| 2171 | chr7 | 8175827 | 8176181 | Kidney Epithelium | 0.18 | 0.91 | intron | ICA1 | U |
| 2172 | chr16 | 81765201 | 81765593 | Kidney Epithelium | 0.22 | 0.94 | Intergenic | PLCG2 | U |
| 2173 | chr9 | 92053603 | 92053682 | Kidney Epithelium | 0.21 | 0.92 | intron | SEMA4D | U |
| 2174 | chr22 | 33952731 | 33952885 | Kidney Epithelium | 0.18 | 0.88 | intron | LARGE | U |
| 2175 | chr7 | 156883572 | 156883759 | Kidney Epithelium | 0.2 | 0.9 | Intergenic | UBE3C | U |
| 2176 | chr5 | 71714704 | 71714919 | Kidney Epithelium | 0.22 | 0.92 | Intergenic | ZNF366 | U |
| 2177 | chr4 | 187564589 | 187564847 | Kidney Epithelium | 0.21 | 0.91 | intron | FAT1 | U |
| 2178 | chr9 | 97412072 | 97412253 | Kidney Epithelium | 0.23 | 0.92 | Intergenic | FBP1 | U |
| 2179 | chr1 | 46131210 | 46131670 | Kidney Epithelium | 0.22 | 0.91 | intron | GPBP1L1 | U |
| 2180 | chr19 | 31213711 | 31214034 | Kidney Epithelium | 0.17 | 0.85 | Intergenic | ZNF536 | U |
| 2181 | chr7 | 157427089 | 157427365 | Kidney Epithelium | 0.19 | 0.86 | intron | PTPRN2 | U |
| 2182 | chr22 | 45613514 | 45613840 | Kidney Epithelium | 0.24 | 0.91 | intron | KIAA0930 | U |
| 2183 | chr7 | 157280199 | 157280369 | Kidney Epithelium | 0.19 | 0.85 | Intergenic | MIR153-2 | U |
| 2184 | chr12 | 57211212 | 57211488 | Kidney Epithelium | 0.26 | 0.91 | Intergenic | HSD1786 | U |
| 2185 | chr4 | 1534879 | 1535047 | Kidney Epithelium | 0.26 | 0.9 | Intergenic | CRIPAK | U |
| 2186 | chr14 | 101492031 | 101492265 | Kidney Epithelium | 0.27 | 0.91 | promoter-TSS | MIR323A | U |
| 2187 | chr12 | 131572350 | 131572700 | Kidney Epithelium | 0.23 | 0.87 | intron | GPR133 | U |
| 2188 | chr2 | 148776876 | 148776957 | Kidney Epithelium | 0.24 | 0.85 | intron | ORC4 | U |
| 2189 | chr7 | 120477404 | 120477662 | Kidney Epithelium | 0.32 | 0.93 | intron | TSPAN12 | U |
| 2190 | chr19 | 33584939 | 33585374 | Kidney Epithelium | 0.33 | 0.94 | exon, intron | GPATCH1, GPATCH1 | U |
| 2191 | chr14 | 33564388 | 33564849 | Kidney Epithelium | 0.25 | 0.86 | intron | NPAS3 | U |
| 2192 | chr16 | 72038677 | 72039042 | Kidney Epithelium | 0.32 | 0.89 | Intergenic | DHODH | U |
| 2193 | chr8 | 143662736 | 143662925 | Kidney Epithelium | 0.29 | 0.85 | Intergenic | ARC | U |
| 2194 | chr7 | 5886722 | 5886892 | Kidney Epithelium | 0.35 | 0.87 | exon | ZNF815P | U |
| 2195 | chr5 | 72597296 | 72597412 | Kidney Epithelium | 0.83 | 0.15 | Intergenic | TMEM174 | M |
| 2196 | chr5 | 72597061 | 72597232 | Kidney Epithelium | 0.85 | 0.24 | Intergenic | TMEM174 | M |
| 2197 | chr11 | 3465188 | 3465549 | Kidney Epithelium | 0.71 | 0.1 | Intergenic | OR7E12P | M |
| 2198 | chr1 | 47912004 | 47912340 | Kidney Epithelium | 0.81 | 0.21 | Intergenic | FOXD2 | M |
| 2199 | chr7 | 27231866 | 27232178 | Kidney Epithelium | 0.68 | 0.15 | Intergenic | HOXA11-AS | M |
| 2200 | chr7 | 128520172 | 128520450 | Kidney Epithelium | 0.63 | 0.11 | intron | KCP | M |
| 2201 | chr5 | 72596986 | 72597052 | Kidney Epithelium | 0.68 | 0.18 | Intergenic | TMEM174 | M |
| 2202 | chrX | 10050924 | 10051089 | Kidney Epithelium | 0.7 | 0.21 | intron | WWC3 | M |
| 2203 | chr12 | 54371022 | 54371327 | Kidney Epithelium | 0.65 | 0.19 | TTS | HOXC11 | M |
| 2204 | chr13 | 27077217 | 27077322 | Kidney Epithelium | 0.72 | 0.27 | Intergenic | WASF3 | M |
| 2205 | chr16 | 89119471 | 89119573 | Kidney Epithelium | 0.67 | 0.23 | Intergenic | ACSF3 | M |
| 2206 | chr6 | 134215938 | 134216150 | Kidney Epithelium | 0.61 | 0.17 | exon | TCF21 | M |
| 2207 | chr16 | 89070761 | 89070871 | Kidney Epithelium | 0.63 | 0.2 | Intergenic | CBFA2T3 | M |
| 2208 | chr11 | 9340682 | 9340906 | Kidney Epithelium | 0.59 | 0.2 | Intergenic | TMEM418 | M |
| 2209 | chr20 | 61926633 | 61926785 | Kidney Epithelium | 0.58 | 0.25 | intron | COL20A1 | M |
| 2210 | chr5 | 72677395 | 72677750 | Kidney Epithelium | 0.85 | 0.12 | Intergenic | FOXD1 | M |
| 2211 | chr1 | 47911646 | 47911941 | Kidney Epithelium | 0.79 | 0.16 | Intergenic | FOXD2 | M |
| 2212 | chr12 | 54500128 | 54500244 | Kidney Epithelium | 0.74 | 0.12 | intron | FLJ12825 | M |
| 2213 | chr6 | 107956154 | 107956224 | Kidney Epithelium | 0.71 | 0.19 | exon | SOBP | M |
| 2214 | chr7 | 128808991 | 128809458 | Kidney Epithelium | 0.6 | 0.08 | exon | TSPAN33 | M |
| 2215 | chr7 | 95026106 | 95026249 | Kidney Epithelium | 0.73 | 0.22 | promoter-TSS | PON3 | M |
| 2216 | chr6 | 134214794 | 134215201 | Kidney Epithelium | 0.75 | 0.24 | exon | TCF21 | M |
| 2217 | chr1 | 47911295 | 47911512 | Kidney Epithelium | 0.57 | 0.08 | Intergenic | FOXD2 | M |
| 2218 | chr1 | 47911102 | 47911260 | Kidney Epithelium | 0.69 | 0.22 | Intergenic | FOXD2 | M |
| 2219 | chr2 | 237080546 | 237080908 | Kidney Epithelium | 0.59 | 0.15 | Intergenic | GBX2 | M |
| 2220 | chr3 | 189704095 | 189704171 | Bladder Epithelium | 0.05 | 0.92 | intron | LEPREL1 | U |
| 2221 | chr7 | 97408637 | 97408740 | Bladder Epithelium | 0.11 | 0.94 | Intergenic | TAC1 | U |
| 2222 | chr1 | 34004606 | 34004728 | Bladder Epithelium | 0.08 | 0.9 | intron | CSMD2 | U |
| 2223 | chr10 | 111585736 | 111585935 | Bladder Epithelium | 0.13 | 0.92 | Intergenic | XPNPEP1 | U |
| 2224 | chr2 | 152635949 | 152636402 | Bladder Epithelium | 0.14 | 0.93 | Intergenic | NEB | U |
| 2225 | chr2 | 113715851 | 113716004 | Bladder Epithelium | 0.13 | 0.9 | Intergenic | IL36G | U |
| 2226 | chr10 | 1339932211 | 133993303 | Bladder Epithelium | 0.15 | 0.91 | intron | JAKMIP3 | U |
| 2227 | chr16 | 32889552 | 32889613 | Bladder Epithelium | 0.16 | 0.91 | intron | SLC6A10P | U |
| 2228 | chr8 | 62146817 | 62146949 | Bladder Epithelium | 0.08 | 0.83 | Intergenic | CLVS1 | U |
| 2229 | chr2 | 48736358 | 48736768 | Bladder Epithelium | 0.14 | 0.89 | intron | PPP1R21 | U |
| 2230 | chr14 | 81856494 | 81856862 | Bladder Epithelium | 0.2 | 0.93 | intron | STON2 | U |
| 2231 | chr3 | 70922903 | 70923139 | Bladder Epithelium | 0.16 | 0.88 | Intergenic | MIR1284 | U |
| 2232 | chr19 | 56725662 | 56725847 | Bladder Epithelium | 0.17 | 0.87 | Intergenic | ZSCAN5A | U |
| 2233 | chr4 | 2961841 | 2962322 | Bladder Epithelium | 0.31 | 0.92 | intron | NOP14 | U |
| 2234 | chr19 | 49305765 | 49305999 | Bladder Epithelium | 0.11 | 0.91 | intron | BCAT2 | U |
| 2235 | chr1 | 33609720 | 33609941 | Bladder Epithelium | 0.13 | 0.92 | Intergenic | TRIM62 | U |
| 2236 | chr7 | 34214882 | 34215193 | Bladder Epithelium | 0.11 | 0.89 | Intergenic | BMPER | U |
| 2237 | chr2 | 131085456 | 131085544 | Bladder Epithelium | 0.08 | 0.85 | Intergenic | CCDC115 | U |
| 2238 | chr16 | 33785709 | 33785771 | Bladder Epithelium | 0.14 | 0.9 | Intergenic | LINC00273 | U |
| 2239 | chr16 | 16033571 | 1603506 | Bladder Epithelium | 0.14 | 0.9 | intron | TMEM204 | U |
| 2240 | chr19 | 53463258 | 53463449 | Bladder Epithelium | 0.18 | 0.94 | intron | ZNF816 | U |
| 2241 | chr10 | 124054428 | 124054658 | Bladder Epithelium | 0.09 | 0.85 | intron | BTBD16 | U |
| 2242 | chr2 | 189648457 | 189648529 | Bladder Epithelium | 0.18 | 0.93 | intron | DIRC1 | U |
| 2243 | chr2 | 131085546 | 131085628 | Bladder Epithelium | 0.05 | 0.8 | Intergenic | CCDC115 | U |
| 2244 | chr13 | 20969691 | 20969953 | Bladder Epithelium | 0.12 | 0.87 | Intergenic | MIR4499 | U |
| 2245 | chr1 | 2032732301 | 203273497 | Bladder Epithelium | 0.17 | 0.92 | intron | LOC730227 | U |
| 2246 | chr4 | 121662379 | 121662872 | Bladder Epithelium | 0.15 | 0.9 | intron | PRDM5 | U |
| 2247 | chr10 | 3984706 | 3985205 | Bladder Epithelium | 0.12 | 0.87 | Intergenic | KLF6 | U |
| 2248 | chr17 | 77844945 | 77845047 | Bladder Epithelium | 0.18 | 0.92 | Intergenic | CBX4 | U |
| 2249 | chr9 | 135812999 | 135813249 | Bladder Epithelium | 0.17 | 0.91 | intron | TSC1 | U |
| 2250 | chr10 | 28956172 | 28956309 | Bladder Epithelium | 0.15 | 0.88 | Intergenic | BAMBI | U |
| 2251 | chr7 | 116048933 | 116049078 | Bladder Epithelium | 0.19 | 0.92 | Intergenic | CAV2 | U |
| 2252 | chr11 | 75405128 | 75405563 | Bladder Epithelium | 0.14 | 0.87 | Intergenic | MOGAT2 | U |
| 2253 | chr3 | 120097307 | 120097436 | Bladder Epithelium | 0.2 | 0.92 | Intergenic | MIR198 | U |
| 2254 | chr10 | 33311432 | 33311625 | Bladder Epithelium | 0.14 | 0.86 | Intergenic | ITGB1 | U |
| 2255 | chr3 | 128143761 | 128144040 | Bladder Epithelium | 0.17 | 0.89 | Intergenic | DNAJB8-AS1 | U |
| 2256 | chr18 | 7048033 | 7048313 | Bladder Epithelium | 0.1 | 0.82 | intron | LAMA1 | U |
| 2257 | chr20 | 50247316 | 50247452 | Bladder Epithelium | 0.22 | 0.93 | intron | ATP9A | U |
| 2258 | chr2 | 55180750 | 55180954 | Bladder Epithelium | 0.23 | 0.94 | intron | EML6 | U |
| 2259 | chr13 | 43835051 | 43835441 | Bladder Epithelium | 0.13 | 0.84 | intron | ENOX1 | U |
| 2260 | chr11 | 107416771 | 107417198 | Bladder Epithelium | 0.16 | 0.87 | intron | ALKBH8 | U |
| 2261 | chr1 | 15232920 | 15233019 | Bladder Epithelium | 0.21 | 0.91 | intron | KAZN | U |
| 2262 | chr18 | 8552688 | 8552889 | Bladder Epithelium | 0.19 | 0.89 | Intergenic | RAB12 | U |
| 2263 | chr4 | 37528843 | 37529269 | Bladder Epithelium | 0.17 | 0.87 | intron | C4orf19 | U |
| 2264 | chr4 | 1297129621 | 129713394 | Bladder Epithelium | 0.2 | 0.9 | Intergenic | PHF17 | U |
| 2265 | chr18 | 8458878 | 8459062 | Bladder Epithelium | 0.1 | 0.79 | Intergenic | LOC100192426 | U |
| 2266 | chr1 | 154254086 | 154254277 | Bladder Epithelium | 0.22 | 0.91 | Intergenic | HAX1 | U |
| 2267 | chr1 | 6377471 | 6377733 | Bladder Epithelium | 0.16 | 0.85 | intron | ACOT7 | U |
| 2268 | chr7 | 27063444 | 27063749 | Bladder Epithelium | 0.2 | 0.89 | Intergenic | HOXA1 | U |
| 2269 | chr19 | 46005910 | 46006102 | Bladder Epithelium | 0.16 | 0.84 | TTS | PPM1N | U |
| 2270 | chr10 | 98602423 | 98602685 | Bladder Epithelium | 0.2 | 0.88 | intron | LCOR | U |
| 2271 | chr17 | 7828771 | 7829035 | Bladder Epithelium | 0.23 | 0.91 | intron | KCNAB3 | U |
| 2272 | chr7 | 102380675 | 102381115 | Bladder Epithelium | 0.23 | 0.91 | Intergenic | FAM185A | U |
| 2273 | chr10 | 30453416 | 30453576 | Bladder Epithelium | 0.18 | 0.84 | Intergenic | KIAA1462 | U |
| 2274 | chr2 | 11108531 | 11108714 | Bladder Epithelium | 0.18 | 0.84 | Intergenic | KCNF1 | U |
| 2275 | chr1 | 208227830 | 208228179 | Bladder Epithelium | 0.21 | 0.87 | intron | PLXNA2 | U |
| 2276 | chr2 | 1692526 | 1692911 | Bladder Epithelium | 0.25 | 0.9 | intron | PXDN | U |
| 2277 | chr15 | 67441115 | 67441518 | Bladder Epithelium | 0.25 | 0.9 | intron | SMAD3 | U |
| 2278 | chr11 | 131515832 | 131516239 | Bladder Epithelium | 0.2 | 0.85 | intron | NTM | U |
| 2279 | chr18 | 33741240 | 33741681 | Bladder Epithelium | 0.27 | 0.92 | intron | ELP2 | U |
| 2280 | chr10 | 124049993 | 124050067 | Bladder Epithelium | 0.15 | 0.79 | intron | BTBD16 | U |
| 2281 | chr15 | 79471899 | 79472016 | Bladder Epithelium | 0.21 | 0.85 | Intergenic | MIR184 | U |
| 2282 | chr5 | 95992213 | 95992496 | Bladder Epithelium | 0.24 | 0.88 | Intergenic | CAST | U |
| 2283 | chr6 | 1252667 | 1252846 | Bladder Epithelium | 0.27 | 0.9 | Intergenic | FOXQ1 | U |
| 2284 | chr8 | 133936781 | 133937077 | Bladder Epithelium | 0.23 | 0.86 | intron | TG | U |
| 2285 | chr8 | 134917504 | 134917801 | Bladder Epithelium | 0.22 | 0.85 | Intergenic | ST3GAL1 | U |
| 2286 | chr3 | 221574003 | 22157746 | Bladder Epithelium | 0.2 | 0.83 | Intergenic | ZNF385D | U |
| 2287 | chr2 | 101802746 | 101803172 | Bladder Epithelium | 0.25 | 0.88 | Intergenic | TBC1D8 | U |
| 2288 | chr19 | 46006156 | 46006295 | Bladder Epithelium | 0.16 | 0.78 | TTS | PPM1N | U |
| 2289 | chr2 | 44975430 | 44975638 | Bladder Epithelium | 0.32 | 0.93 | intron | CAMKMT | U |
| 2290 | chr18 | 71902900 | 71903228 | Bladder Epithelium | 0.25 | 0.86 | Intergenic | CYB5A | U |
| 2291 | chr8 | 126291702 | 126292152 | Bladder Epithelium | 0.25 | 0.86 | intron | NSMCE2 | U |
| 2292 | chr7 | 53479336 | 53479436 | Bladder Epithelium | 0.29 | 0.88 | Intergenic | POM121L12 | U |
| 2293 | chr8 | 128676466 | 128676733 | Bladder Epithelium | 0.31 | 0.9 | Intergenic | MYC | U |
| 2294 | chr15 | 58727874 | 58728190 | Bladder Epithelium | 0.34 | 0.93 | intron | LIPC | U |
| 2295 | chr1 | 118823577 | 118823826 | Bladder Epithelium | 0.32 | 0.9 | Intergenic | SPAG17 | U |
| 2296 | chr7 | 86668921 | 86669145 | Bladder Epithelium | 0.15 | 0.72 | intron | KIAA1324L | U |
| 2297 | chr14 | 103717739 | 103718125 | Bladder Epithelium | 0.36 | 0.93 | Intergenic | LINC00605 | U |
| 2298 | chr1 | 202026867 | 202027318 | Bladder Epithelium | 0.36 | 0.86 | Intergenic | ELF3 | U |
| 2299 | chr10 | 9271378 | 9271573 | Bladder Epithelium | 0.09 | 0.89 | Intergenic | GATA3 | U |
| 2300 | chr13 | 111691869 | 111692013 | Bladder Epithelium | 0.21 | 0.92 | Intergenic | ARHGEF7 | U |
| 2301 | chr1 | 240922366 | 240922535 | Bladder Epithelium | 0.15 | 0.87 | Intergenic | GREM2 | U |
| 2302 | chr7 | 140510166 | 140510603 | Bladder Epithelium | 0.19 | 0.91 | intron | BRAF | U |
| 2303 | chr2 | 124447715 | 124447893 | Bladder Epithelium | 0.11 | 0.8 | Intergenic | CNTNAP5 | U |
| 2304 | chr1 | 184970698 | 184970983 | Bladder Epithelium | 0.1 | 0.93 | Intergenic | FAM129A | U |
| 2305 | chr2 | 135276067 | 135276149 | Bladder Epithelium | 0.13 | 0.92 | intron | TMEM163 | U |
| 2306 | chr15 | 77448649 | 77448987 | Bladder Epithelium | 0.12 | 0.92 | intron | PEAK1 | U |
| 2307 | chr4 | 2961192 | 2961471 | Bladder Epithelium | 0.16 | 0.94 | intron | NOP14 | U |
| 2308 | chr12 | 10267729 | 10267793 | Bladder Epithelium | 0.1 | 0.87 | Intergenic | CLEC7A | U |
| 2309 | chr6 | 34778179 | 34778643 | Bladder Epithelium | 0.16 | 0.93 | intron | UHRF1BP1 | U |
| 2310 | chr15 | 101938761 | 101938872 | Bladder Epithelium | 0.17 | 0.94 | exon, intron | PCSK6 | U |
| 2311 | chr4 | 385688513 | 38569128 | Bladder Epithelium | 0.17 | 0.92 | Intergenic | KLF3 | U |
| 2312 | chr11 | 57500830 | 57501020 | Bladder Epithelium | 0.26 | 0.94 | intron | TMX2-CTNND1 | U |
| 2313 | chr7 | 155581063 | 155581411 | Bladder Epithelium | 0.32 | 0.91 | Intergenic | SHH | U |
| 2314 | chr15 | 81262936 | 81263036 | Bladder Epithelium | 0.09 | 0.91 | Intergenic | MESDC2 | U |
| 2315 | chr17 | 43208654 | 43208757 | Bladder Epithelium | 0.07 | 0.89 | intron | PLCD3 | U |
| 2316 | chr6 | 56894215 | 56894332 | Bladder Epithelium | 0.07 | 0.87 | Intergenic | KIAA1586 | U |
| 2317 | chr18 | 7173233 | 7173411 | Bladder Epithelium | 0.1 | 0.89 | Intergenic | LAMA1 | U |
| 2318 | chr10 | 70184305 | 70184465 | Bladder Epithelium | 0.15 | 0.93 | intron | DNA2 | U |
| 2319 | chr18 | 74246866 | 74247019 | Bladder Epithelium | 0.11 | 0.88 | intron | LOC284276 | U |
| 2320 | chr14 | 102493581 | 102493778 | Bladder Epithelium | 0.09 | 0.86 | intron | DYNC1H1 | U |
| 2321 | chr3 | 184566501 | 184566691 | Bladder Epithelium | 0.16 | 0.92 | intron | VP58 | U |
| 2322 | chr9 | 98119673 | 98119940 | Bladder Epithelium | 0.13 | 0.89 | Intergenic | FANCC | U |
| 2323 | chr14 | 50835876 | 50836194 | Bladder Epithelium | 0.13 | 0.89 | intron | CDKL1 | U |
| 2324 | chr9 | 85843600 | 85843716 | Bladder Epithelium | 0.13 | 0.88 | Intergenic | RASEF | U |
| 2325 | chr16 | 1576680 | 1576810 | Bladder Epithelium | 0.18 | 0.93 | intron, exon | IFT140, IFT140 | U |
| 2326 | chr9 | 98919710 | 98919766 | Bladder Epithelium | 0.16 | 0.9 | Intergenic | LOC158434 | U |
| 2327 | chr14 | 552063703 | 55206541 | Bladder Epithelium | 0.11 | 0.85 | intron | SAMD4A | U |
| 2328 | chr2 | 231604240 | 231604554 | Bladder Epithelium | 0.17 | 0.91 | intron | CAB39 | U |
| 2329 | chr9 | 92717057 | 92717425 | Bladder Epithelium | 0.16 | 0.9 | Intergenic | MIR4290 | U |
| 2330 | chr9 | 15513985 | 15514009 | Bladder Epithelium | 0.16 | 0.89 | Intergenic | PSIP1 | U |
| 2331 | chr14 | 102493027 | 102493519 | Bladder Epithelium | 0.17 | 0.89 | intron | DYNC1H1 | U |
| 2332 | chr2 | 10162285 | 10162472 | Bladder Epithelium | 0.21 | 0.92 | Intergenic | KLF11 | U |
| 2333 | chr5 | 148772552 | 148772628 | Bladder Epithelium | 0.21 | 0.91 | Intergenic | IL17B | U |
| 2334 | chr8 | 53755910 | 53756057 | Bladder Epithelium | 0.22 | 0.9 | Intergenic | NPBWR1 | U |
| 2335 | chr14 | 104047749 | 104048041 | Bladder Epithelium | 0.23 | 0.91 | intron | APOPT1 | U |
| 2336 | chr9 | 36274911 | 36275149 | Bladder Epithelium | 0.27 | 0.94 | intron | GNE | U |
| 2337 | chr3 | 11581015 | 11581215 | Bladder Epithelium | 0.27 | 0.92 | intron | ATG7 | U |
| 2338 | chr12 | 109936018 | 109936169 | Bladder Epithelium | 0.29 | 0.93 | exon | UBE3B | U |
| 2339 | chr16 | 12236884 | 12237154 | Bladder Epithelium | 0.31 | 0.94 | intron | SNX29 | U |
| 2340 | chr16 | 89674297 | 89674436 | Bladder Epithelium | 0.17 | 0.79 | Intergenic | DPEP1 | U |
| 2341 | chr6 | 106582669 | 106582732 | Bladder Epithelium | 0.32 | 0.91 | Intergenic | PRDM1 | U |
| 2342 | chr20 | 43358892 | 43359077 | Bladder Epithelium | 0.3 | 0.89 | Intergenic | WISP2 | U |
| 2343 | chr9 | 90892837 | 90893046 | Bladder Epithelium | 0.28 | 0.87 | Intergenic | SPIN1 | U |
| 2344 | chr20 | 19204280 | 19204438 | Bladder Epithelium | 0.36 | 0.91 | intron | SLC24A3 | U |
| 2345 | chr13 | 114762431 | 114762866 | Bladder Epithelium | 0.34 | 0.88 | intron | RASA3 | U |
| 2346 | chr12 | 54773440 | 54773703 | Bladder Epithelium | 0.79 | 0.03 | intron | ZNF385A | M |
| 2347 | chr7 | 3018797 | 3018918 | Bladder Epithelium | 0.81 | 0.14 | intron | CARD11 | M |
| 2348 | chr3 | 181437662 | 181437830 | Bladder Epithelium | 0.85 | 0.18 | intron | SOX2-OT | M |
| 2349 | chr1 | 2402103 | 2402337 | Bladder Epithelium | 0.82 | 0.21 | Intergenic | PLCH2 | M |
| 2350 | chr17 | 79075542 | 79075780 | Bladder Epithelium | 0.67 | 0.08 | intron | BAIAP2 | M |
| 2351 | chr10 | 105420501 | 105420692 | Bladder Epithelium | 0.73 | 0.09 | intron | SH3PXD2A | M |
| 2352 | chr20 | 34188724 | 34189055 | Bladder Epithelium | 0.87 | 0.09 | Intergenic | SPAG4 | M |
| 2353 | chr10 | 77155143 | 77155405 | Bladder Epithelium | 0.84 | 0.07 | Intergenic | ZNF503 | M |
| 2354 | chr1 | 29586283 | 29586758 | Bladder Epithelium | 0.8 | 0.03 | exon | PTPRU | M |
| 2355 | chr10 | 77155437 | 77155546 | Bladder Epithelium | 0.88 | 0.14 | Intergenic | ZNF503 | M |
| 2356 | chr3 | 181437928 | 181438329 | Bladder Epithelium | 0.85 | 0.11 | intron | SOX2-OT | M |
| 2357 | chr3 | 181445573 | 181445764 | Bladder Epithelium | 0.84 | 0.11 | intron | SOX2-OT | M |
| 2358 | chr17 | 46711051 | 46711447 | Bladder Epithelium | 0.78 | 0.06 | Intergenic | MIR196A1 | M |
| 2359 | chr19 | 36164093 | 36164514 | Bladder Epithelium | 0.73 | 0.05 | promoter-TSS | UPK1A-AS1 | M |
| 2360 | chr17 | 46710934 | 46711040 | Bladder Epithelium | 0.79 | 0.12 | promoter-TSS, Interg [symbol] | MIR196A1, MIR196A1 | M |
| 2361 | chr5 | 42949328 | 42949428 | Bladder Epithelium | 0.81 | 0.16 | Intergenic | LOC648987 | M |
| 2362 | chr5 | 429494523 | 42949800 | Bladder Epithelium | 0.7 | 0.09 | Intergenic | LOC648987 | M |
| 2363 | chr7 | 20832969 | 20833089 | Bladder Epithelium | 0.78 | 0.19 | Intergenic | SP8 | M |
| 2364 | chr7 | 20831202 | 20831374 | Bladder Epithelium | 0.75 | 0.16 | Intergenic | SP8 | M |
| 2365 | chr3 | 181445800 | 181445921 | Bladder Epithelium | 0.66 | 0.08 | intron | SOX2-OT | M |
| 2366 | chr17 | 46713821 | 46714156 | Bladder Epithelium | 0.59 | 0.03 | Intergenic | MIR196A1 | M |
| 2367 | chr17 | 46714169 | 46714313 | Bladder Epithelium | 0.61 | 0.07 | Intergenic | MIR196A1 | M |
| 2368 | chr16 | 89006582 | 89006727 | Bladder Epithelium | 0.56 | 0.07 | intron | CBFA2T3 | M |
| 2369 | chr5 | 50265721 | 50265867 | Bladder Epithelium | 0.58 | 0.12 | Intergenic | PARP8 | M |
| 2370 | chr19 | 863037 | 863158 | Bladder Epithelium | 0.59 | 0.17 | intron, exon | CFD, CFD | M |
| 2371 | chr5 | 58395983 | 58396401 | Prostate Epithelium | 0.08 | 0.93 | intron | PDE4D | U |
| 2372 | chr11 | 82843660 | 82843842 | Prostate Epithelium | 0.03 | 0.88 | Intergenic | PCF11 | U |
| 2373 | chr17 | 9348790 | 9348935 | Prostate Epithelium | 0.13 | 0.9 | intron | STX8 | U |
| 2374 | chr3 | 149001639 | 149001777 | Prostate Epithelium | 0.14 | 0.9 | Intergenic | TM4SF18 | U |
| 2375 | chr12 | 40171398 | 40171588 | Prostate Epithelium | 0.15 | 0.91 | intron | SLC2A13 | U |
| 2376 | chrX | 35518524 | 35518564 | Prostate Epithelium | 0.12 | 0.87 | Intergenic | MAGEB16 | U |
| 2377 | chr8 | 852993 | 853135 | Prostate Epithelium | 0.14 | 0.88 | intron | ERICH1-AS1 | U |
| 2378 | chr3 | 1936756343 | 193675816 | Prostate Epithelium | 0.14 | 0.88 | exon | LOC647323 | U |
| 2379 | chr6 | 720637 | 720835 | Prostate Epithelium | 0.16 | 0.9 | Intergenic | EXOC2 | U |
| 2380 | chr4 | 1003428541 | 100343192 | Prostate Epithelium | 0.2 | 0.93 | intron | ADH7 | U |
| 2381 | chr5 | 1712231471 | 171223507 | Prostate Epithelium | 0.17 | 0.89 | Intergenic | FBXW11 | U |
| 2382 | chr11 | 61868530 | 61868709 | Prostate Epithelium | 0.17 | 0.87 | Intergenic | INCENP | U |
| 2383 | chr15 | 88585662 | 88585850 | Prostate Epithelium | 0.15 | 0.85 | intron | NTRK3 | U |
| 2384 | chr11 | 82843881 | 82843952 | Prostate Epithelium | 0.25 | 0.94 | Intergenic | PCF11 | U |
| 2385 | chr9 | 16204126 | 16204159 | Prostate Epithelium | 0.25 | 0.92 | intron | C9orf92 | U |
| 2386 | chr19 | 51858650 | 51858909 | Prostate Epithelium | 0.21 | 0.85 | intron, promoter-TS [symbol] | ETFB | U |
| 2387 | chr2 | 112285718 | 112285860 | Prostate Epithelium | 0.26 | 0.88 | lIntergenic | LOCS41471 | U |
| 2388 | chr13 | 43922157 | 43922412 | Prostate Epithelium | 0.29 | 0.88 | intron | ENOX1 | U |
| 2389 | chr18 | 13812352 | 13812503 | Prostate Epithelium | 0.24 | 0.81 | Intergenic | MC5R | U |
| 2390 | chr4 | 567379401 | 56738149 | Prostate Epithelium | 0.05 | 0.87 | exon | EXOC1 | U |
| 2391 | chr8 | 52894910 | 52894972 | Prostate Epithelium | 0.09 | 0.9 | Intergenic | PCMTD1 | U |
| 2392 | chr15 | 30146107 | 30146255 | Prostate Epithelium | 0.07 | 0.88 | Intergenic | TJP1 | U |
| 2393 | chr7 | 157423150 | 157423212 | Prostate Epithelium | 0.08 | 0.86 | intron | PTPRN2 | U |
| 2394 | chr3 | 24086762 | 24087106 | Prostate Epithelium | 0.08 | 0.86 | Intergenic | LINC00691 | U |
| 2395 | chr12 | 31624662 | 31625071 | Prostate Epithelium | 0.07 | 0.85 | intron | DENND5B | U |
| 2396 | chr17 | 75679958 | 75680289 | Prostate Epithelium | 0.11 | 0.88 | Intergenic | LOC100507351 | U |
| 2397 | chr8 | 19622714 | 19622802 | Prostate Epithelium | 0.12 | 0.88 | Intergenic | INTS10 | U |
| 2398 | chr1 | 116153836 | 116154186 | Prostate Epithelium | 0.12 | 0.88 | Intergenic | VANGL1 | U |
| 2399 | chr1 | 61105704 | 61106011 | Prostate Epithelium | 0.15 | 0.9 | Intergenic | NFIA | U |
| 2400 | chr1 | 245662442 | 245662843 | Prostate Epithelium | 0.14 | 0.88 | intron | KIF268 | U |
| 2401 | chr15 | 100632520 | 100632750 | Prostate Epithelium | 0.16 | 0.89 | intron | ADAMTS17 | U |
| 2402 | chr21 | 43966798 | 43967117 | Prostate Epithelium | 0.18 | 0.91 | intron | SLC37A1 | U |
| 2403 | chr5 | 61105044 | 61105179 | Prostate Epithelium | 0.18 | 0.89 | Intergenic | C5orf64 | U |
| 2404 | chr16 | 12436822 | 12437045 | Prostate Epithelium | 0.14 | 0.84 | intron | SNX29 | U |
| 2405 | chr15 | 43079249 | 43079532 | Prostate Epithelium | 0.18 | 0.88 | intron | TTBK2 | U |
| 2406 | chr2 | 179830635 | 179830675 | Prostate Epithelium | 0.16 | 0.85 | intron | CCDC141 | U |
| 2407 | chr3 | 41974443 | 41974521 | Prostate Epithelium | 0.22 | 0.91 | intron | ULK4 | U |
| 2408 | chr7 | 84294370 | 84294617 | Prostate Epithelium | 0.18 | 0.87 | Intergenic | SEMA3D | U |
| 2409 | chr12 | 104894025 | 104894291 | Prostate Epithelium | 0.15 | 0.84 | intron | CHST11 | U |
| 2410 | chr15 | 91888665 | 91888766 | Prostate Epithelium | 0.19 | 0.86 | Intergenic | SV2B | U |
| 2411 | chr10 | 123781645 | 123781742 | Prostate Epithelium | 0.2 | 0.86 | intron | TACC2 | U |
| 2412 | chr1 | 180911672 | 180911819 | Prostate Epithelium | 0.22 | 0.88 | intron | KIAA1614 | U |
| 2413 | chr6 | 53824292 | 53824469 | Prostate Epithelium | 0.23 | 0.89 | Intergenic | MLIP-IT1 | U |
| 2414 | chr4 | 2632299 | 2632484 | Prostate Epithelium | 0.22 | 0.88 | intron | FAM193A | U |
| 2415 | chr8 | 130119953 | 130120159 | Prostate Epithelium | 0.22 | 0.87 | Intergenic | LOC728724 | U |
| 2416 | chrX | 106840564 | 106840785 | Prostate Epithelium | 0.17 | 0.82 | Intergenic | PRPS1 | U |
| 2417 | chr2 | 153562909 | 153563239 | Prostate Epithelium | 0.23 | 0.88 | intron | PRPF40A | U |
| 2418 | chr18 | 50966157 | 50966236 | Prostate Epithelium | 0.24 | 0.88 | intron | DCC | U |
| 2419 | chr11 | 111903013 | 11190581 | Prostate Epithelium | 0.2 | 0.84 | Intergenic | CSNK2A3 | U |
| 2420 | chr2 | 862738351 | 86274274 | Prostate Epithelium | 0.23 | 0.87 | intron | POLR1A | U |
| 2421 | chr6 | 73112707 | 73113170 | Prostate Epithelium | 0.22 | 0.86 | TTS | RIMS1 | U |
| 2422 | chr17 | 1338500 | 1338969 | Prostate Epithelium | 0.21 | 0.85 | intron | CRK | U |
| 2423 | chr15 | 53833154 | 53833205 | Prostate Epithelium | 0.25 | 0.88 | intron | WDR72 | U |
| 2424 | chr17 | 53940464 | 53940594 | Prostate Epithelium | 0.27 | 0.9 | Intergenic | PCTP | U |
| 2425 | chr10 | 12316772 | 12316908 | Prostate Epithelium | 0.25 | 0.88 | Intergenic | CAMK1D | U |
| 2426 | chr12 | 45526093 | 45526272 | Prostate Epithelium | 0.22 | 0.85 | Intergenic | RNY5 | U |
| 2427 | chr2 | 179303422 | 179303614 | Prostate Epithelium | 0.27 | 0.9 | intron | PRKRA | U |
| 2428 | chr22 | 48061604 | 48061858 | Prostate Epithelium | 0.18 | 0.81 | Intergenic | FLI46257 | U |
| 2429 | chr7 | 105845720 | 105846055 | Prostate Epithelium | 0.26 | 0.89 | Intergenic | NAMPT | U |
| 2430 | chr6 | 62750149 | 62750498 | Prostate Epithelium | 0.27 | 0.9 | intron | KHDRBS2 | U |
| 2431 | chr8 | 113513406 | 113513591 | Prostate Epithelium | 0.24 | 0.86 | intron | CSMD3 | U |
| 2432 | chr1 | 6977718 | 6977906 | Prostate Epithelium | 0.27 | 0.89 | intron | CAMTA1 | U |
| 2433 | chr1 | 244882534 | 244882840 | Prostate Epithelium | 0.24 | 0.86 | Intergenic | DESI2 | U |
| 2434 | chr21 | 31710901 | 31711343 | Prostate Epithelium | 0.22 | 0.84 | promoter-TSS, Interg [symbol] | KRTAP27-1, KRTAP27- [symbol] | U |
| 2435 | chr7 | 156194279 | 156194629 | Prostate Epithelium | 0.21 | 0.82 | Intergenic | LOC285889 | U |
| 2436 | chr10 | 45084800 | 45084855 | Prostate Epithelium | 0.31 | 0.91 | Intergenic | CXCL12 | U |
| 2437 | chr7 | 84317157 | 84317332 | Prostate Epithelium | 0.25 | 0.85 | Intergenic | SEMA3D | U |
| 2438 | chr14 | 86296858 | 86297151 | Prostate Epithelium | 0.25 | 0.85 | Intergenic | FLRT2 | U |
| 2439 | chr16 | 46964865 | 46965206 | Prostate Epithelium | 0.24 | 0.84 | exon, TTS | GPT2, GPT2 | U |
| 2440 | chr5 | 125574024 | 125574432 | Prostate Epithelium | 0.26 | 0.86 | Intergenic | GRAMD3 | U |
| 2441 | chr1 | 65091636 | 65092134 | Prostate Epithelium | 0.26 | 0.86 | intron | CACHD1 | U |
| 2442 | chr10 | 118060976 | 118061134 | Prostate Epithelium | 0.25 | 0.84 | Intergenic | CCDC172 | U |
| 2443 | chr5 | 32473153 | 32473353 | Prostate Epithelium | 0.29 | 0.88 | Intergenic | ZFB | U |
| 2444 | chr15 | 98646681 | 98646939 | Prostate Epithelium | 0.24 | 0.83 | Intergenic | ARRDC4 | U |
| 2445 | chr7 | 140001344 | 140001590 | Prostate Epithelium | 0.21 | 0.79 | Intergenic | SLC37A3 | U |
| 2446 | chr16 | 68439870 | 68440167 | Prostate Epithelium | 0.24 | 0.82 | intron | SMPD3 | U |
| 2447 | chr10 | 45012731 | 45012938 | Prostate Epithelium | 0.28 | 0.85 | Intergenic | CXCL12 | U |
| 2448 | chr1 | 15405269 | 15405648 | Prostate Epithelium | 0.29 | 0.86 | intron | KAZN | U |
| 2449 | chr7 | 15751920 | 15752419 | Prostate Epithelium | 0.29 | 0.86 | Intergenic | MEOX2 | U |
| 2450 | chr10 | 96379389 | 96379547 | Prostate Epithelium | 0.32 | 0.88 | Intergenic | CYP2C18 | U |
| 2451 | chr2 | 123109569 | 123109735 | Prostate Epithelium | 0.34 | 0.9 | Intergenic | TSN | U |
| 2452 | chr2 | 164456487 | 164456706 | Prostate Epithelium | 0.29 | 0.85 | Intergenic | FIGN | U |
| 2453 | chr7 | 15687776 | 15688035 | Prostate Epithelium | 0.29 | 0.84 | intron | MEOX2 | U |
| 2454 | chr3 | 1280491191 | 128049434 | Prostate Epithelium | 0.32 | 0.87 | intron | EEFSEC | U |
| 2455 | chr8 | 2823032 | 2823355 | Prostate Epithelium | 0.34 | 0.89 | intron | CSMD1 | U |
| 2456 | chr17 | 46267675 | 46267766 | Prostate Epithelium | 0.32 | 0.86 | intron | SKAP1 | U |
| 2457 | chr2 | 30566703 | 30566897 | Prostate Epithelium | 0.32 | 0.86 | Intergenic | LCLAT | U |
| 2458 | chr5 | 18701992 | 18702338 | Prostate Epithelium | 0.28 | 0.82 | Intergenic | CDH18 | U |
| 2459 | chr3 | 160409872 | 160410317 | Prostate Epithelium | 0.35 | 0.89 | Intergenic | ARL14 | U |
| 2460 | chr15 | 69270069 | 69270531 | Prostate Epithelium | 0.32 | 0.86 | intron | NOX5 | U |
| 2461 | chr8 | 139409602 | 139409782 | Prostate Epithelium | 0.34 | 0.87 | intron | FAM1358 | U |
| 2462 | chr6 | 2594303 | 259658 | Prostate Epithelium | 0.29 | 0.82 | Intergenic | DUSP22 | U |
| 2463 | chr9 | 141028240 | 141028487 | Prostate Epithelium | 0.36 | 0.89 | Intergenic | TUBBP5 | U |
| 2464 | chr2 | 79298718 | 79298990 | Prostate Epithelium | 0.35 | 0.88 | Intergenic | REG1B | U |
| 2465 | chr2 | 121296510 | 121296784 | Prostate Epithelium | 0.3 | 0.83 | Intergenic | LOC84931 | U |
| 2466 | chr14 | 101772273 | 101772700 | Prostate Epithelium | 0.31 | 0.84 | Intergenic | MEG9 | U |
| 2467 | chr5 | 147100992 | 147101087 | Prostate Epithelium | 0.35 | 0.87 | intron | JAKMIPZ | U |
| 2468 | chr8 | 40488928 | 40489286 | Prostate Epithelium | 0.34 | 0.86 | intron | ZMAT4 | U |
| 2469 | chr16 | 2879393 | 2879453 | Prostate Epithelium | 0.25 | 0.76 | Intergenic, promote [symbol] | ZG16B, ZG16B | U |
| 2470 | chr17 | 27313786 | 27314111 | Prostate Epithelium | 0.32 | 0.82 | intron | SEZ6 | U |
| 2471 | chr5 | 107758914 | 107759399 | Prostate Epithelium | 0.33 | 0.83 | Intergenic | FBXL17 | U |
| 2472 | chr2 | 177287863 | 177288100 | Prostate Epithelium | 0.35 | 0.83 | Intergenic | MTX2 | U |
| 2473 | chrX | 32439826 | 32440020 | Prostate Epithelium | 0.33 | 0.8 | intron | DMD | U |
| 2474 | chr4 | 8994124 | 8994245 | Prostate Epithelium | 0.38 | 0.81 | Intergenic | LOC650293 | U |
| 2475 | chr19 | 53802404 | 53802595 | Prostate Epithelium | 0.33 | 0.76 | Intergenic | BIRC8 | U |
| 2476 | chr8 | 78853164 | 78853392 | Prostate Epithelium | 0.35 | 0.77 | Intergenic | PKIA | U |
| 2477 | chr2 | 125165678 | 125165753 | Prostate Epithelium | 0.28 | 0.88 | intron | CNTNAP5 | U |
| 2478 | chr2 | 70456017 | 70456294 | Prostate Epithelium | 0.3 | 0.89 | intron | TIA1 | U |
| 2479 | chr5 | 134909476 | 134909839 | Prostate Epithelium | 0.26 | 0.84 | intron | CXCL14 | U |
| 2480 | chr8 | 49703308 | 49703539 | Prostate Epithelium | 0.31 | 0.87 | Intergenic | EFCAB1 | U |
| 2481 | chr7 | 293859 | 294353 | Prostate Epithelium | 0.06 | 0.88 | intron | FAM20C | U |
| 2482 | chr5 | 174920572 | 174921015 | Prostate Epithelium | 0.09 | 0.89 | intron | SEXN1 | U |
| 2483 | chr22 | 32563087 | 32563521 | Prostate Epithelium | 0.08 | 0.86 | Intergenic | C22orf42 | U |
| 2484 | chr4 | 3403136 | 3403532 | Prostate Epithelium | 0.19 | 0.94 | intron | RGS12 | U |
| 2485 | chr19 | 333553623 | 33355622 | Prostate Epithelium | 0.16 | 0.87 | exon, intron | SLC7A9 | U |
| 2486 | chr16 | 56951467 | 56951745 | Prostate Epithelium | 0.18 | 0.88 | Intergenic | HIERPUD1 | U |
| 2487 | chr16 | 49766911 | 49767105 | Prostate Epithelium | 0.09 | 0.88 | intron | ZNF423 | U |
| 2488 | chr21 | 45401010 | 45401133 | Prostate Epithelium | 0.09 | 0.86 | exon, intron | AGPAT3, AGPAT3 | U |
| 2489 | chr22 | 30443171 | 30443234 | Prostate Epithelium | 0.16 | 0.91 | Intergenic | HORMAD2 | U |
| 2490 | chr20 | 38807276 | 38807658 | Prostate Epithelium | 0.13 | 0.88 | Intergenic | MAFB | U |
| 2491 | chr7 | 293593 | 293813 | Prostate Epithelium | 0.23 | 0.86 | intron | FAM20C | U |
| 2492 | chr3 | 182656877 | 182657032 | Prostate Epithelium | 0.3 | 0.91 | Intergenic | DCUN1D1 | U |
| 2493 | chr22 | 39407845 | 39408217 | Prostate Epithelium | 0.3 | 0.91 | Intergenic | APOBEC3C | U |
| 2494 | chr10 | 16955540 | 16955937 | Prostate Epithelium | 0.3 | 0.87 | intron | CUBN | U |
| 2495 | chr4 | 3417482 | 3417774 | Prostate Epithelium | 0.33 | 0.85 | intron | RGS12 | U |
| 2496 | chr5 | 42757274 | 42757687 | Prostate Epithelium | 0.79 | 0.12 | intron | CCDC152 | M |
| 2497 | chr2 | 176995916 | 175996152 | Prostate Epithelium | 0.74 | 0.19 | intron, exon | HOXD8, HOXD8 | M |
| 2498 | chr12 | 54380589 | 54380879 | Prostate Epithelium | 0.72 | 0.19 | intron | HOXC10 | M |
| 2499 | chr13 | 67568304 | 67568519 | Prostate Epithelium | 0.63 | 0.16 | intron | PCDH9 | M |
| 2500 | chr20 | 50416258 | 50416422 | Prostate Epithelium | 0.68 | 0.25 | intron | SALL4 | M |
| 2501 | chr5 | 134913743 | 134914047 | Prostate Epithelium | 0.57 | 0.1 | intron | CXCL14 | M |
| 2502 | chr2 | 176987679 | 176988129 | Prostate Epithelium | 0.85 | 0.07 | exon | HOXD9 | M |
| 2503 | chr7 | 27264717 | 27264947 | Prostate Epithelium | 0.85 | 0.16 | Intergenic | EVX1 | M |
| 2504 | chr2 | 200327108 | 200327237 | Prostate Epithelium | 0.81 | 0.13 | intron | SATB2 | M |
| 2505 | chr14 | 37130146 | 37130511 | Prostate Epithelium | 0.81 | 0.14 | intron | PAX9 | M |
| 2506 | chr3 | 190529745 | 190529905 | Prostate Epithelium | 0.75 | 0.09 | Intergenic | GMNC | M |
| 2507 | chr9 | 98981790 | 98981856 | Prostate Epithelium | 0.83 | 0.19 | Intergenic | HSD17B3 | M |
| 2508 | chr2 | 176937949 | 176938224 | Prostate Epithelium | 0.66 | 0.05 | Intergenic | EVX2 | M |
| 2509 | chr2 | 200327240 | 200327295 | Prostate Epithelium | 0.81 | 0.21 | intron | SATB2 | M |
| 2510 | chr2 | 176964570 | 176964812 | Prostate Epithelium | 0.7 | 0.1 | exon | HOXD12 | M |
| 2511 | chr2 | 176931775 | 176932019 | Prostate Epithelium | 0.67 | 0.09 | Intergenic | EVX2 | M |
| 2512 | chr2 | 176986712 | 176986957 | Prostate Epithelium | 0.68 | 0.1 | promoter-TSS | HOXD9 | M |
| 2513 | chr14 | 37126308 | 37126583 | Prostate Epithelium | 0.67 | 0.1 | promoter-TSS | PAX9 | M |
| 2514 | chr2 | 176963442 | 176963767 | Prostate Epithelium | 0.67 | 0.1 | Intergenic, promote [symbol] | HOXD12, HOXD12 | M |
| 2515 | chr7 | 27196825 | 27196997 | Prostate Epithelium | 0.7 | 0.15 | promoter-TSS | HOXA7 | M |
| 2516 | chr9 | 98981863 | 98982148 | Prostate Epithelium | 0.64 | 0.11 | Intergenic | HSD17B3 | M |
| 2517 | chr7 | 8477434 | 8477782 | Prostate Epithelium | 0.69 | 0.16 | intron | NXPH1 | M |
| 2518 | chr5 | 1888022 | 1888108 | Prostate Epithelium | 0.68 | 0.17 | Intergenic | IRX4 | M |
| 2519 | chr17 | 80273966 | 80274192 | Prostate Epithelium | 0.68 | 0.2 | intron | CD7 | M |
| 2520 | chr4 | 111540786 | 111541016 | Prostate Epithelium | 0.65 | 0.19 | intron | PITX2 | M |
| 2521 | chr6 | 35058103 | 35058216 | Breast Basal Epithelium | 0.08 | 0.95 | exon | ANKS1A | U |
| 2522 | chr11 | 66639005 | 66639476 | Breast Basal Epithelium | 0.09 | 0.94 | exon, intron | PC | U |
| 2523 | chr16 | 81390362 | 81390581 | Breast Basal Epithelium | 0.1 | 0.94 | intron | GAN | U |
| 2524 | chr12 | 120656820 | 120656995 | Breast Basal Epithelium | 0.12 | 0.94 | intron | PXA | U |
| 2525 | chr19 | 16618102 | 16618214 | Breast Basal Epithelium | 0.12 | 0.93 | intron | C19orf44 | U |
| 2526 | chr15 | 58833989 | 58834171 | Breast Basal Epithelium | 0.14 | 0.94 | exon, intron | LIPC | U |
| 2527 | chr6 | 35057138 | 35057474 | Breast Basal Epithelium | 0.14 | 0.93 | exon | ANKS1A | U |
| 2528 | chr20 | 3171367 | 3171566 | Breast Basal Epithelium | 0.14 | 0.92 | exon, intron | DDRGK1 | U |
| 2529 | chr14 | 99936328 | 99936718 | Breast Basal Epithelium | 0.16 | 0.94 | intron | SETD3 | U |
| 2530 | chr16 | 22336742 | 22337089 | Breast Basal Epithelium | 0.18 | 0.95 | intron | POLR35 | U |
| 2531 | chr18 | 20551897 | 20552303 | Breast Basal Epithelium | 0.17 | 0.94 | intron | RBBP8 | U |
| 2532 | chr1 | 28289721 | 28290024 | Breast Basal Epithelium | 0.17 | 0.93 | intron | XKR8 | U |
| 2533 | chr13 | 24873567 | 24873865 | Breast Basal Epithelium | 0.2 | 0.94 | intron | SPATA13 | U |
| 2534 | chr9 | 134350774 | 134351152 | Breast Basal Epithelium | 0.21 | 0.94 | exon | PRAC2B | U |
| 2535 | chr7 | 990481141 | 99048351 | Breast Basal Epithelium | 0.23 | 0.94 | intron | CPSF4 | U |
| 2536 | chr9 | 139102868 | 139103122 | Breast Basal Epithelium | 0.31 | 0.93 | intron | QSOX2 | U |
| 2537 | chr1 | 234529405 | 234529509 | Breast Basal Epithelium | 0.09 | 0.94 | exon | TARBP1 | U |
| 2538 | chr1 | 154557601 | 154557782 | Breast Basal Epithelium | 0.08 | 0.93 | intron | ADAR | U |
| 2539 | chr4 | 10083001 | 10083099 | Breast Basal Epithelium | 0.06 | 0.9 | intron | WDR1 | U |
| 2540 | chr17 | 78339277 | 78339500 | Breast Basal Epithelium | 0.1 | 0.93 | intron | ANF213 | U |
| 2541 | chr2 | 10712116 | 10712382 | Breast Basal Epithelium | 0.08 | 0.91 | exon | NOL10 | U |
| 2542 | chr19 | 40907571 | 4091050 | Breast Basal Epithelium | 0.1 | 0.93 | intron | MAP2K2 | U |
| 2543 | chr1 | 115768600 | 115768904 | Breast Basal Epithelium | 0.05 | 0.88 | Intergenic | NGF | U |
| 2544 | chr8 | 103755444 | 103755750 | Breast Basal Epithelium | 0.09 | 0.92 | Intergenic | KLF10 | U |
| 2545 | chr5 | 150649233 | 150649655 | Breast Basal Epithelium | 0.08 | 0.91 | exon | GM2A | U |
| 2546 | chr14 | 100138645 | 100138816 | Breast Basal Epithelium | 0.07 | 0.89 | exon | HHIPL1 | U |
| 2547 | chr19 | 14040781 | 14041147 | Breast Basal Epithelium | 0.05 | 0.87 | intron, TTS | CC2D1A, PODNL1 | U |
| 2548 | chr6 | 35056412 | 35056499 | Breast Basal Epithelium | 0.12 | 0.93 | exon | ANKS1A | U |
| 2549 | chr2 | 65299908 | 65300026 | Breast Basal Epithelium | 0.08 | 0.89 | exon | CEP68 | U |
| 2550 | chr16 | 58292241 | 58292423 | Breast Basal Epithelium | 0.1 | 0.91 | intron, exon | CCDC113, CCDC113 | U |
| 2551 | chr10 | 134239245 | 134239434 | Breast Basal Epithelium | 0.1 | 0.91 | Intergenic | C10orf91 | U |
| 2552 | chr2 | 25355689 | 25355881 | Breast Basal Epithelium | 0.13 | 0.94 | exon | EFR38 | U |
| 2553 | chr17 | 64439761 | 64440042 | Breast Basal Epithelium | 0.06 | 0.87 | intron | PRKCA | U |
| 2554 | chr3 | 8817175 | 8817507 | Breast Basal Epithelium | 0.07 | 0.88 | Intergenic | OXTR | U |
| 2555 | chr2 | 11303769 | 11304163 | Breast Basal Epithelium | 0.1 | 0.91 | intron | PQLC3 | U |
| 2556 | chr18 | 34966967 | 34967016 | Breast Basal Epithelium | 0.11 | 0.91 | intron | CELF4 | U |
| 2557 | chr9 | 139959096 | 139959161 | Breast Basal Epithelium | 0.09 | 0.89 | exon | SAPCD2 | U |
| 2558 | chr17 | 78262251 | 78262378 | Breast Basal Epithelium | 0.09 | 0.89 | intron | RNF213 | U |
| 2559 | chr6 | 1687692091 | 168769379 | Breast Basal Epithelium | 0.07 | 0.87 | Intergenic | DACT2 | U |
| 2560 | chr11 | 12031670 | 12031966 | Breast Basal Epithelium | 0.08 | 0.88 | promoter-TSS | DKK3 | U |
| 2561 | chr1 | 24945158 | 24945547 | Breast Basal Epithelium | 0.06 | 0.86 | Intergenic | SRRM1 | U |
| 2562 | chr2 | 10543898 | 10544302 | Breast Basal Epithelium | 0.11 | 0.91 | intron | HPCAL1 | U |
| 2563 | chr6 | 106580209 | 106580282 | Breast Basal Epithelium | 0.11 | 0.9 | Intergenic | PRDM1 | U |
| 2564 | chr15 | 68636277 | 68636456 | Breast Basal Epithelium | 0.06 | 0.85 | intron | ITGA11 | U |
| 2565 | chr8 | 713960541 | 71396292 | Breast Basal Epithelium | 0.11 | 0.9 | Intergenic | NCOA2 | U |
| 2566 | chr2 | 23645918 | 23646162 | Breast Basal Epithelium | 0.14 | 0.93 | intron | KLHL29 | U |
| 2567 | chr1 | 19583402 | 19583681 | Breast Basal Epithelium | 0.1 | 0.89 | intron | MRTO4 | U |
| 2568 | chr2 | 235347621 | 235348007 | Breast Basal Epithelium | 0.12 | 0.91 | Intergenic | ARLAC | U |
| 2569 | chr21 | 18266959 | 18267054 | Breast Basal Epithelium | 0.12 | 0.9 | Intergenic | MIR12582 | U |
| 2570 | chr16 | 81701854 | 81701982 | Breast Basal Epithelium | 0.13 | 0.91 | TTS, intron | LOC100129617, CMIP [symbol] | U |
| 2571 | chr15 | 75430416 | 75430565 | Breast Basal Epithelium | 0.11 | 0.89 | Intergenic | C15orf39 | U |
| 2572 | chr14 | 102713035 | 102713253 | Breast Basal Epithelium | 0.14 | 0.92 | intron | MOK | U |
| 2573 | chr19 | 412823721 | 41282679 | Breast Basal Epithelium | 0.12 | 0.9 | intron | MIA-RAB4B | U |
| 2574 | chr3 | 101372548 | 101372907 | Breast Basal Epithelium | 0.16 | 0.94 | intron | ZBTB11 | U |
| 2575 | chr7 | 501558 | 501946 | Breast Basal Epithelium | 0.12 | 0.9 | Intergenic | PDGFA | U |
| 2576 | chr1 | 112354156 | 112354259 | Breast Basal Epithelium | 0.11 | 0.88 | intron | KCND3 | U |
| 2577 | chr16 | 68876141 | 68876294 | Breast Basal Epithelium | 0.13 | 0.9 | Intergenic | TANGO6 | U |
| 2578 | chr10 | 127680637 | 127680967 | Breast Basal Epithelium | 0.1 | 0.87 | intron | FANK1 | U |
| 2579 | chr20 | 58148658 | 58148995 | Breast Basal Epithelium | 0.08 | 0.85 | Intergenic | LOC100506384 | U |
| 2580 | chr17 | 62016913 | 62017289 | Breast Basal Epithelium | 0.08 | 0.85 | exon | SCN4A | U |
| 2581 | chr3 | 188679687 | 188680097 | Breast Basal Epithelium | 0.16 | 0.93 | Intergenic | TPRG1 | U |
| 2582 | chr2 | 37002030 | 37002197 | Breast Basal Epithelium | 0.12 | 0.88 | intron | VIT | U |
| 2583 | chr2 | 85212332 | 85212545 | Breast Basal Epithelium | 0.15 | 0.91 | intron | KCMF1 | U |
| 2584 | chr1 | 214549650 | 214549865 | Breast Basal Epithelium | 0.17 | 0.93 | exon | PTPN14 | U |
| 2585 | chr1 | 249109855 | 249110124 | Breast Basal Epithelium | 0.14 | 0.9 | intron | SH38P5L | U |
| 2586 | chr12 | 19794155 | 19794500 | Breast Basal Epithelium | 0.07 | 0.83 | Intergenic | AEBP2 | U |
| 2587 | chr17 | 63075041 | 63075401 | Breast Basal Epithelium | 0.11 | 0.87 | Intergenic | GNA13 | U |
| 2588 | chr13 | 110986666 | 110986865 | Breast Basal Epithelium | 0.12 | 0.87 | intron | COL4A2 | U |
| 2589 | chr18 | 10350798 | 10350998 | Breast Basal Epithelium | 0.11 | 0.86 | Intergenic | APCDD1 | U |
| 2590 | chr16 | 1715962 | 1716165 | Breast Basal Epithelium | 0.18 | 0.93 | intron, exon | CRAMP1L, CRAMPIL | U |
| 2591 | chr1 | 2292590423 | 229259265 | Breast Basal Epithelium | 0.14 | 0.89 | Intergenic | RAB4A | U |
| 2592 | chr16 | 25087469 | 25087707 | Breast Basal Epithelium | 0.16 | 0.9 | Intergenic | LCMT1 | U |
| 2593 | chr1 | 117278031 | 117278177 | Breast Basal Epithelium | 0.18 | 0.91 | Intergenic | CD2 | U |
| 2594 | chr19 | 2556720 | 2556918 | Breast Basal Epithelium | 0.16 | 0.89 | intron | GNG7 | U |
| 2595 | chr17 | 21111328 | 21111601 | Breast Basal Epithelium | 0.19 | 0.92 | intron | TMEM11 | U |
| 2596 | chr1 | 17897130 | 17897417 | Breast Basal Epithelium | 0.19 | 0.92 | intron | ARHGEF10L | U |
| 2597 | chr17 | 55365004 | 55365310 | Breast Basal Epithelium | 0.18 | 0.91 | intron | MSI2 | U |
| 2598 | chr2 | 219041675 | 219042030 | Breast Basal Epithelium | 0.23 | 0.93 | Intergenic | CXCR1 | U |
| 2599 | chr15 | 53920307 | 63920521 | Breast Basal Epithelium | 0.19 | 0.91 | intron | HERC1 | U |
| 2600 | chr19 | 56596817 | 56597040 | Breast Basal Epithelium | 0.17 | 0.89 | Intergenic | ZNF787 | U |
| 2601 | chr12 | 114275299 | 114275615 | Breast Basal Epithelium | 0.2 | 0.92 | intron | RBM19 | U |
| 2602 | chr16 | 4947620 | 4947983 | Breast Basal Epithelium | 0.17 | 0.89 | intron | PPL | U |
| 2603 | chr17 | 45992349 | 45992757 | Breast Basal Epithelium | 0.2 | 0.92 | intron | SP2 | U |
| 2604 | chr16 | 23573777 | 23574206 | Breast Basal Epithelium | 0.21 | 0.92 | intron, exon | UBFD1, UBFD1 | U |
| 2605 | chr17 | 78157897 | 78158060 | Breast Basal Epithelium | 0.21 | 0.91 | exon | CARD14 | U |
| 2606 | chr12 | 113822938 | 113823115 | Breast Basal Epithelium | 0.24 | 0.94 | exor | PLBD2 | U |
| 2607 | chr1 | 229370733 | 229370890 | Breast Basal Epithelium | 0.22 | 0.9 | Intergenic | RAB4A | U |
| 2608 | chr17 | 21106166 | 21106451 | Breast Basal Epithelium | 0.2 | 0.88 | intron | TMEM11 | U |
| 2609 | chr5 | 169576283 | 169576577 | Breast Basal Epithelium | 0.21 | 0.89 | Intergenic | FOXI1 | U |
| 2610 | chr12 | 12387113 | 12387379 | Breast Basal Epithelium | 0.29 | 0.95 | intron | LRP6 | U |
| 2611 | chr21 | 46397434 | 46397804 | Breast Basal Epithelium | 0.29 | 0.95 | TTS | FAM207A | U |
| 2612 | chr19 | 47491676 | 47492048 | Breast Basal Epithelium | 0.16 | 0.8 | intron | ARHGAP35 | U |
| 2613 | chr1 | 6008175 | 6008578 | Breast Basal Epithelium | 0.29 | 0.92 | intron | NPHP4 | U |
| 2614 | chr2 | 109076333 | 109076747 | Breast Basal Epithelium | 0.3 | 0.93 | intron | GCC2 | U |
| 2615 | chr15 | 64434782 | 64435204 | Breast Basal Epithelium | 0.28 | 0.9 | fexon | SNX1 | U |
| 2616 | chr16 | 798881 | 799060 | Breast Basal Epithelium | 0.32 | 0.93 | Intergenic | NARFL | U |
| 2617 | chr9 | 139103335 | 139103781 | Breast Basal Epithelium | 0.04 | 0.92 | intron | QSOX2 | U |
| 2618 | chr22 | 18277229 | 18277535 | Breast Basal Epithelium | 0.1 | 0.93 | intron | MICAL3 | U |
| 2619 | chr22 | 36692812 | 36693194 | Breast Basal Epithelium | 0.1 | 0.93 | intron | MYH9 | U |
| 2620 | chr20 | 39803942 | 39804431 | Breast Basal Epithelium | 0.1 | 0.93 | TTS, exon | PLCG1 | U |
| 2621 | chr19 | 14041071 | 14041305 | Breast Basal Epithelium | 0.12 | 0.94 | TTS | PODNL1 | U |
| 2622 | chr22 | 39822758 | 39823142 | Breast Basal Epithelium | 0.19 | 0.93 | intron | TAB1 | U |
| 2623 | chr5 | 176919342 | 176919703 | Breast Basal Epithelium | 0.22 | 0.95 | intron | PDLIM7 | U |
| 2624 | chr19 | 4944306 | 4944584 | Breast Basal Epithelium | 0.24 | 0.96 | intron | UHRF1 | U |
| 2625 | chr5 | 1808108 | 1808451 | Breast Basal Epithelium | 0.28 | 0.94 | intron | NDUFS6 | U |
| 2626 | chr13 | 113887317 | 113887803 | Breast Basal Epithelium | 0.07 | 0.94 | exon | CUL4A | U |
| 2627 | chr20 | 33925690 | 33925818 | Breast Basal Epithelium | 0.04 | 0.9 | intron | UQCC | U |
| 2628 | chr20 | 31015007 | 31015485 | Breast Basal Epithelium | 0.07 | 0.93 | intron | ASXL1 | U |
| 2629 | chr20 | 62314803 | 62315091 | Breast Basal Epithelium | 0.13 | 0.93 | intron | RTEL1-TNFRSF6B | U |
| 2630 | chr3 | 41287899 | 41288395 | Breast Basal Epithelium | 0.08 | 0.9 | TTS | ULK4 | U |
| 2631 | chr19 | 14041194 | 14041306 | Breast Basal Epithelium | 0.14 | 0.94 | TTS | PODNL1 | U |
| 2632 | chr9 | 72024669 | 72024813 | Breast Basal Epithelium | 0.08 | 0.88 | Intergenic | FAM189A2 | U |
| 2633 | chr11 | 3164799 | 3164941 | Breast Basal Epithelium | 0.11 | 0.9 | intron | OSBPL5 | U |
| 2634 | chr21 | 46398140 | 46398323 | Breast Basal Epithelium | 0.17 | 0.96 | Intergenic | LINC00163 | U |
| 2635 | chr21 | 46424553 | 46424669 | Breast Basal Epithelium | 0.13 | 0.91 | exon, promoter-TSS | LINC00162, LINC00161U | U |
| 2636 | chr7 | 531331 | 531628 | Breast Basal Epithelium | 0.12 | 0.9 | Intergenic | PDGFA | U |
| 2637 | chr19 | 4944196 | 4944585 | Breast Basal Epithelium | 0.18 | 0.95 | intron | UHRF1 | U |
| 2638 | chr21 | 46424069 | 46424480 | Breast Basal Epithelium | 0.12 | 0.88 | intron | LINC00162 | U |
| 2639 | chr19 | 39914132 | 39914303 | Breast Basal Epithelium | 0.16 | 0.91 | exon, intron | PLEKHG2, PLEKHG2 | U |
| 2640 | chr19 | 11537720 | 11537908 | Breast Basal Epithelium | 0.18 | 0.93 | exon, intron | CCDC151, CCDC151 | U |
| 2641 | chr2 | 2410678501 | 241068039 | Breast Basal Epithelium | 0.14 | 0.89 | intron | MYEOV2 | U |
| 2642 | chr5 | 139725 | 139937 | Breast Basal Epithelium | 0.13 | 0.86 | promoter-TSS | PLEKHG48 | U |
| 2643 | chr7 | 100403023 | 100403289 | Breast Basal Epithelium | 0.19 | 0.92 | exon | EPHB4 | U |
| 2644 | chr9 | 98206494 | 98206826 | Breast Basal Epithelium | 0.16 | 0.89 | exon | PTCH1 | U |
| 2645 | chr19 | 14041313 | 14041483 | Breast Basal Epithelium | 0.13 | 0.83 | TTS | PODNL1 | U |
| 2646 | chr10 | 135085004 | 135085220 | Breast Basal Epithelium | 0.21 | 0.91 | exon | ADAM8 | U |
| 2647 | chr22 | 31483907 | 31484125 | Breast Basal Epithelium | 0.25 | 0.94 | intron | SMTN | U |
| 2648 | chr8 | 1288674883 | 128867655 | Breast Basal Epithelium | 0.22 | 0.88 | Intergenic | PVT1 | U |
| 2649 | chr16 | 3170204 | 3170619 | Breast Basal Epithelium | 0.28 | 0.91 | exon, TTS | ZNF205, ZNF205 | U |
| 2650 | chr11 | 57069591 | 57070017 | Breast Basal Epithelium | 0.32 | 0.95 | intron | TNKS1BP1 | U |
| 2651 | chr22 | 40804348 | 40804641 | Breast Basal Epithelium | 0.31 | 0.88 | intron | SGSM3 | U |
| 2652 | chr22 | 22668568 | 22668874 | Breast Basal Epithelium | 0.87 | 0.07 | Intergenic | ZBTB40 | M |
| 2653 | chr10 | 123804329 | 123804438 | Breast Basal Epithelium | 0.89 | 0.14 | intron | TACC2 | M |
| 2654 | chr6 | 169652865 | 169653336 | Breast Basal Epithelium | 0.85 | 0.12 | intron | THBS2 | M |
| 2655 | chr17 | 70515212 | 70515555 | Breast Basal Epithelium | 0.91 | 0.2 | intron | LINC00673 | M |
| 2656 | chr12 | 54372756 | 54373041 | Breast Basal Epithelium | 0.78 | 0.13 | Intergenic | HOXC11 | M |
| 2657 | chr20 | 55646391 | 55646805 | Breast Basal Epithelium | 0.7 | 0.06 | Intergenic | BMP7 | M |
| 2658 | chr5 | 134824947 | 134825056 | Breast Basal Epithelium | 0.69 | 0.07 | Intergenic | TIFAB | M |
| 2659 | chr17 | 40933276 | 40933355 | Breast Basal Epithelium | 0.77 | 0.23 | exon, intron | WNK4, WNK4 | M |
| 2660 | chr12 | 112205077 | 112205245 | Breast Basal Epithelium | 0.91 | 0.04 | intron | ALDH2 | M |
| 2661 | chr1 | 9600250 | 9600444 | Breast Basal Epithelium | 0.85 | 0.05 | intron | SLC25A33 | M |
| 2662 | chr12 | 54090151 | 54090388 | Breast Basal Epithelium | 0.85 | 0.05 | Intergenic | ATP5G2 | M |
| 2663 | chr5 | 3590802 | 3591183 | Breast Basal Epithelium | 0.85 | 0.06 | Intergenic | IRX1 | M |
| 2664 | chr13 | 37004536 | 37004748 | Breast Basal Epithelium | 0.9 | 0.14 | Intergenic | CCNA1 | M |
| 2665 | chr4 | 113442655 | 113442919 | Breast Basal Epithelium | 0.87 | 0.12 | Intergenic | NEUROG2 | M |
| 2666 | chr5 | 1395253873 | 139525796 | Breast Basal Epithelium | 0.78 | 0.03 | Intergenic | IGIP | M |
| 2667 | chr5 | 35905903 | 3590784 | Breast Basal Epithelium | 0.84 | 0.1 | intergenic | IRX1 | M |
| 2668 | chr22 | 41810435 | 41810666 | Breast Basal Epithelium | 0.81 | 0.09 | Intergenic, Intergeni [symbol] | TEF, TOB2 | M |
| 2669 | chr13 | 37004787 | 37005108 | Breast Basal Epithelium | 0.8 | 0.08 | Intergenic | CCNA1 | M |
| 2670 | chr14 | 91883165 | 91883566 | Breast Basal Epithelium | 0.77 | 0.09 | intron | CCDC88C | M |
| 2671 | chr5 | 174120383 | 174120663 | Breast Basal Epithelium | 0.81 | 0.14 | Intergenic | MSX2 | M |
| 2672 | chr5 | 134370245 | 134370428 | Breast Basal Epithelium | 0.72 | 0.09 | promoter-TSS | PITX1 | M |
| 2673 | chr2 | 2417607781 | 241761040 | Breast Basal Epithelium | 0.73 | 0.1 | Intergenic | KIF1A | M |
| 2674 | chr17 | 1131684 | 1132005 | Breast Basal Epithelium | 0.61 | 0.05 | Intergenic | BHLHA9 | M |
| 2675 | chr2 | 119602770 | 119603073 | Breast Basal Epithelium | 0.64 | 0.1 | intron | EN1 | M |
| 2676 | chr16 | 84402414 | 84402587 | Breast Basal Epithelium | 0.58 | 0.09 | promoter-TSS, intro [symbol] | ATP2C2, ATP2C2 | M |
| 2677 | chr6 | 83921378 | 83921763 | Breast Luminal Epithelium | 0.02 | 0.91 | exon | ME1 | U |
| 2678 | chr10 | 61931723 | 61932133 | Breast Luminal Epithelium | 0.05 | 0.92 | intron | ANK3 | U |
| 2679 | chr8 | 8572296 | 8572474 | Breast Luminal Epithelium | 0.03 | 0.87 | Intergenic | CLDN23 | U |
| 2680 | chr2 | 2364241171 | 236424362 | Breast Luminal Epithelium | 0.04 | 0.88 | intron | AGAP1 | U |
| 2681 | chr1 | 15281037 | 15281104 | Breast Luminal Epithelium | 0.06 | 0.89 | intron | KAZN | U |
| 2682 | chr21 | 44850180 | 44850272 | Breast Luminal Epithelium | 0.09 | 0.88 | Intergenic | SIK1 | U |
| 2683 | chr17 | 1848936 | 1849265 | Breast Luminal Epithelium | 0.15 | 0.93 | intron | RTN4RL1 | U |
| 2684 | chr18 | 73395621 | 73395760 | Breast Luminal Epithelium | 0.12 | 0.89 | Intergenic | C18orf62 | U |
| 2685 | chr8 | 117231799 | 117232275 | Breast Luminal Epithelium | 0.14 | 0.89 | intron | LINC00536 | U |
| 2686 | chr12 | 5747733 | 5747897 | Breast Luminal Epithelium | 0.18 | 0.91 | intron | ANO2 | U |
| 2687 | chr9 | 139984622 | 139985009 | Breast Luminal Epithelium | 0.3 | 0.9 | intron | MAN1B1 | U |
| 2688 | chr3 | 193996432 | 193996676 | Breast Luminal Epithelium | 0.35 | 0.9 | Intergenic | LOC100131551 | U |
| 2689 | chr1 | 168067805 | 168068085 | Breast Luminal Epithelium | 0.01 | 0.89 | intron | GPR161 | U |
| 2690 | chr2 | 2406914801 | 240691613 | Breast Luminal Epithelium | 0.04 | 0.87 | intron | LOC150935 | U |
| 2691 | chr9 | 1391217101 | 139121865 | Breast Luminal Epithelium | 0.05 | 0.87 | intron | QSOX2 | U |
| 2692 | chr9 | 95596773 | 9560036 | Breast Luminal Epithelium | 0.05 | 0.87 | intron | PTPRD | U |
| 2693 | chr16 | 88017646 | 88017848 | Breast Luminal Epithelium | 0.06 | 0.86 | intron, exon | BANP, BANP | U |
| 2694 | chr19 | 283342 | 283701 | Breast Luminal Epithelium | 0.02 | 0.82 | intron | PPAP2C | U |
| 2695 | chr18 | 14798182 | 14798393 | Breast Luminal Epithelium | 0.06 | 0.85 | intron | ANKRD308 | U |
| 2696 | chr1 | 56392964 | 56393055 | Breast Luminal Epithelium | 0.13 | 0.91 | Intergenic | PPAP2B | U |
| 2697 | chr11 | 64993593 | 6499714 | Breast Luminal Epithelium | 0.07 | 0.85 | intron | ARFIP2 | U |
| 2698 | chr5 | 149880893 | 149881075 | Breast Luminal Epithelium | 0.12 | 0.88 | Intergenic | NDST1 | U |
| 2699 | chr17 | 64658256 | 64658540 | Breast Luminal Epithelium | 0.16 | 0.92 | intron | PRKCA | U |
| 2700 | chr13 | 100738533 | 100738798 | Breast Luminal Epithelium | 0.12 | 0.87 | Intergenic | PCCA | U |
| 2701 | chr6 | 42397428 | 42397763 | Breast Luminal Epithelium | 0.14 | 0.89 | intron | TRERF1 | U |
| 2702 | chr19 | 36607845 | 36608146 | Breast Luminal Epithelium | 0.07 | 0.8 | intron | TBCB | U |
| 2703 | chr1 | 41888473 | 41888534 | Breast Luminal Epithelium | 0.18 | 0.89 | Intergenic | EDN2 | U |
| 2704 | chr21 | 31587857 | 31588020 | Breast Luminal Epithelium | 0.13 | 0.84 | exon | CLDN8 | U |
| 2705 | chr6 | 143144273 | 143144490 | Breast Luminal Epithelium | 0.18 | 0.89 | intron | HIVEP2 | U |
| 2706 | chr11 | 1103180963 | 110318482 | Breast Luminal Epithelium | 0.2 | 0.91 | intron | FDX1 | U |
| 2707 | chr20 | 50278024 | 60278107 | Breast Luminal Epithelium | 0.14 | 0.84 | intron | CDH4 | U |
| 2708 | chr4 | 186165406 | 186165606 | Breast Luminal Epithelium | 0.16 | 0.86 | intron | SNX25 | U |
| 2709 | chr2 | 75824876 | 75825203 | Breast Luminal Epithelium | 0.22 | 0.92 | Intergenic | EVA1A | U |
| 2710 | chr2 | 237494458 | 237494786 | Breast Luminal Epithelium | 0.19 | 0.89 | Intergenic | CXCR7 | U |
| 2711 | chr1 | 42593479 | 42593638 | Breast Luminal Epithelium | 0.18 | 0.87 | Intergenic | GUCA2B | U |
| 2712 | chr15 | 48518739 | 48518922 | Breast Luminal Epithelium | 0.17 | 0.86 | intron | SLC12A1 | U |
| 2713 | chr9 | 132518514 | 132518900 | Breast Luminal Epithelium | 0.18 | 0.87 | Intergenic | PTGES | U |
| 2714 | chr21 | 40307327 | 40307556 | Breast Luminal Epithelium | 0.16 | 0.84 | Intergenic | ETS2 | U |
| 2715 | chr16 | 4690375 | 4590492 | Breast Luminal Epithelium | 0.1 | 0.77 | intron | MGRN1 | U |
| 2716 | chr11 | 71324397 | 71324560 | Breast Luminal Epithelium | 0.17 | 0.84 | Intergenic | KRTAP5-11 | U |
| 2717 | chr13 | 30492545 | 30492843 | Breast Luminal Epithelium | 0.24 | 0.91 | Intergenic | LINC00544 | U |
| 2718 | chr10 | 29566189 | 29566527 | Breast Luminal Epithelium | 0.19 | 0.86 | Intergenic | LYZL1 | U |
| 2719 | chr22 | 43273432 | 43273572 | Breast Luminal Epithelium | 0.23 | 0.89 | intron | PACSIN2 | U |
| 2720 | chr3 | 41835526 | 41836013 | Breast Luminal Epithelium | 0.18 | 0.84 | intron | ULK4 | U |
| 2721 | chr3 | 53837301 | 53837412 | Breast Luminal Epithelium | 0.25 | 0.9 | intron | CACNA1D | U |
| 2722 | chr1 | 110659458 | 110659634 | Breast Luminal Epithelium | 0.2 | 0.85 | Intergenic | UBL4B | U |
| 2723 | chr15 | 79483422 | 79483667 | Breast Luminal Epithelium | 0.22 | 0.87 | TTS | LOC729911 | U |
| 2724 | chr14 | 1005137543 | 100514036 | Breast Luminal Epithelium | 0.26 | 0.91 | Intergenic | EVL | U |
| 2725 | chr8 | 37127074 | 37127224 | Breast Luminal Epithelium | 0.24 | 0.87 | Intergenic | ZNF703 | U |
| 2726 | chr7 | 149372167 | 149372417 | Breast Luminal Epithelium | 0.19 | 0.82 | Intergenic | KRBA1 | U |
| 2727 | chr14 | 105495862 | 105496129 | Breast Luminal Epithelium | 0.22 | 0.85 | Intergenic | CDCA4 | U |
| 2728 | chr12 | 92685704 | 92686195 | Breast Luminal Epithelium | 0.26 | 0.89 | Intergenic | CLLU1 | U |
| 2729 | chr6 | 37727275 | 37727350 | Breast Luminal Epithelium | 0.24 | 0.86 | Intergenic | ZFAND3 | U |
| 2730 | chr11 | 65096709 | 65096872 | Breast Luminal Epithelium | 0.23 | 0.85 | Intergenic | DPF2 | U |
| 2731 | chr16 | 514377 | 514552 | Breast Luminal Epithelium | 0.2 | 0.8 | intron | RAB11FIP3 | U |
| 2732 | chr1 | 36993817 | 36993998 | Breast Luminal Epithelium | 0.26 | 0.86 | Intergenic | CSF3R | U |
| 2733 | chr18 | 55787062 | 55787428 | Breast Luminal Epithelium | 0.27 | 0.87 | intron | NEDD4L | U |
| 2734 | chr14 | 1056506403 | 105651010 | Breast Luminal Epithelium | 0.18 | 0.78 | Intergenic | NUDT14 | U |
| 2735 | chr6 | 33700074 | 33700413 | Breast Luminal Epithelium | 0.22 | 0.8 | intron | IPEK3 | U |
| 2736 | chr7 | 48827791 | 48828132 | Breast Luminal Epithelium | 0.29 | 0.87 | Intergenic | CDC14C | U |
| 2737 | chr15 | 73962832 | 73963178 | Breast Luminal Epithelium | 0.18 | 0.76 | Intergenic | CD276 | U |
| 2738 | chr2 | 47532143 | 47532560 | Breast Luminal Epithelium | 0.31 | 0.89 | Intergenic | EPCAM | U |
| 2739 | chr16 | 85753082 | 85753582 | Breast Luminal Epithelium | 0.29 | 0.87 | intron | C16orf74 | U |
| 2740 | chr6 | 33698746 | 33698979 | Breast Luminal Epithelium | 0.27 | 0.83 | intron | IP6K3 | U |
| 2741 | chr1 | 17958862 | 17958885 | Breast Luminal Epithelium | 0.34 | 0.89 | exon | ARHGEF10L | U |
| 2742 | chr11 | 6704333 | 6704356 | Breast Luminal Epithelium | 0.27 | 0.82 | intron | ADRBK1 | U |
| 2743 | chr6 | 34506082 | 34506318 | Breast Luminal Epithelium | 0.37 | 0.91 | exon | SPDEF | U |
| 2744 | chr1 | 231685353 | 231685834 | Breast Luminal Epithelium | 0.27 | 0.8 | intron | TSNAX-DISC1 | U |
| 2745 | chr8 | 11775427 | 11775639 | Breast Luminal Epithelium | 0.31 | 0.83 | Intergenic | CTSB | U |
| 2746 | chr7 | 45753641 | 45753810 | Breast Luminal Epithelium | 0.31 | 0.81 | exon | ADCY1 | U |
| 2747 | chr2 | 236787014 | 236787185 | Breast Luminal Epithelium | 0.31 | 0.81 | intron | AGAP1 | U |
| 2748 | chr15 | 29335159 | 29335363 | Breast Luminal Epithelium | 0.31 | 0.81 | intron | APBA2 | U |
| 2749 | chr12 | 15368653 | 15368873 | Breast Luminal Epithelium | 0.28 | 0.91 | intron | RERG | U |
| 2750 | chr19 | 10295669 | 10295839 | Breast Luminal Epithelium | 0.01 | 0.87 | intron | DNMT1 | U |
| 2751 | chr2 | 27433191 | 27433455 | Breast Luminal Epithelium | 0.09 | 0.92 | intron | SLC5A6 | U |
| 2752 | chr17 | 1523792 | 1523909 | Breast Luminal Epithelium | 0.1 | 0.89 | intron | SLC43A2 | U |
| 2753 | chr6 | 43748428 | 43748602 | Breast Luminal Epithelium | 0.11 | 0.9 | exon | VEGFA | U |
| 2754 | chr2 | 233986730 | 233986988 | Breast Luminal Epithelium | 0.04 | 0.81 | exon, intron | INPP5D | U |
| 2755 | chr1 | 204535920 | 204536232 | Breast Luminal Epithelium | 0.14 | 0.89 | Intergenic | MDM4 | U |
| 2756 | chr10 | 22047483 | 22047621 | Breast Luminal Epithelium | 0.19 | 0.93 | intron | DNAJC1 | U |
| 2757 | chr2 | 61471508 | 61471743 | Breast Luminal Epithelium | 0.2 | 0.94 | intron | USP34 | U |
| 2758 | chr19 | 40828736 | 40829046 | Breast Luminal Epithelium | 0.19 | 0.92 | intron | C19orf47 | U |
| 2759 | chr8 | 140755399 | 140755536 | Breast Luminal Epithelium | 0.16 | 0.88 | intron | TRAPPC9 | U |
| 2760 | chr21 | 46935507 | 46935981 | Breast Luminal Epithelium | 0.29 | 0.93 | exon | SLC19A1 | U |
| 2761 | chr14 | 105181998 | 105182490 | Breast Luminal Epithelium | 0.27 | 0.9 | intron | INF2 | U |
| 2762 | chr22 | 30190746 | 30191205 | Breast Luminal Epithelium | 0.31 | 0.94 | intron | ASCC2 | U |
| 2763 | chr7 | 6188781 | 6188836 | Breast Luminal Epithelium | 0.04 | 0.92 | intron | USP42 | U |
| 2764 | chr19 | 10295203 | 10295312 | Breast Luminal Epithelium | 0.02 | 0.89 | intron | DNMT1 | U |
| 2765 | chr19 | 1167117 | 1167262 | Breast Luminal Epithelium | 0.04 | 0.9 | intron | SBNO2 | U |
| 2766 | chr2 | 9776070 | 9776404 | Breast Luminal Epithelium | 0.04 | 0.88 | Intergenic | YWHAQ | U |
| 2767 | chr1 | 21573375 | 21573594 | Breast Luminal Epithelium | 0.06 | 0.89 | intron | ECE1 | U |
| 2768 | chr7 | 6188255 | 6188724 | Breast Luminal Epithelium | 0.07 | 0.9 | intron | USP42 | U |
| 2769 | chr17 | 30348093 | 30348317 | Breast Luminal Epithelium | 0.05 | 0.87 | promoter-TSS, exon | LRRC37B, LRRC37B | U |
| 2770 | chr4 | 57177980 | 57178217 | Breast Luminal Epithelium | 0.04 | 0.86 | intron | KIAA1211 | U |
| 2771 | chr10 | 104383917 | 104384312 | Breast Luminal Epithelium | 0.04 | 0.86 | intron | SUFU | U |
| 2772 | chr4 | 3217013 | 3217297 | Breast Luminal Epithelium | 0.08 | 0.87 | intron | HTT | U |
| 2773 | chr6 | 169641078 | 169641365 | Breast Luminal Epithelium | 0.08 | 0.87 | intron | THBS2 | U |
| 2774 | chr5 | 177525862 | 177525915 | Breast Luminal Epithelium | 0.09 | 0.87 | Intergenic | N4BP3 | U |
| 2775 | chr2 | 10600695 | 10600769 | Breast Luminal Epithelium | 0.08 | 0.84 | Intergenic | ODC1 | U |
| 2776 | chr11 | 75167903 | 75168178 | Breast Luminal Epithelium | 0.14 | 0.89 | intron | GDPD5 | U |
| 2777 | chr22 | 27859205 | 27859395 | Breast Luminal Epithelium | 0.09 | 0.83 | Intergenic | MN1 | U |
| 2778 | chr22 | 20014184 | 20014532 | Breast Luminal Epithelium | 0.15 | 0.86 | intron | TANGO2 | U |
| 2779 | chr11 | 3145253 | 3145385 | Breast Luminal Epithelium | 0.19 | 0.89 | intron | OSBPL5 | U |
| 2780 | chr22 | 46888626 | 46888921 | Breast Luminal Epithelium | 0.2 | 0.89 | intron | CELSR1 | U |
| 2781 | chr5 | 3630908 | 3631256 | Breast Luminal Epithelium | 0.17 | 0.86 | Intergenic | IRX1 | U |
| 2782 | chr8 | 1407703673 | 140770523 | Breast Luminal Epithelium | 0.19 | 0.87 | intron | TRAPPC9 | U |
| 2783 | chr14 | 35544037 | 35544208 | Breast Luminal Epithelium | 0.22 | 0.9 | intron | FAM177A1 | U |
| 2784 | chr11 | 70016959 | 70017320 | Breast Luminal Epithelium | 0.19 | 0.87 | exon | ANO1 | U |
| 2785 | chr16 | 15129301 | 15129420 | Breast Luminal Epithelium | 0.25 | 0.92 | intron, exon | PDXDC1, PDXDC1 | U |
| 2786 | chr10 | 12707807 | 12707930 | Breast Luminal Epithelium | 0.18 | 0.85 | intron | CAMK1D | U |
| 2787 | chr10 | 22047181 | 22047392 | Breast Luminal Epithelium | 0.23 | 0.88 | intron | DNAJC1 | U |
| 2788 | chr16 | 80641327 | 80641624 | Breast Luminal Epithelium | 0.25 | 0.9 | intron | CDYL2 | U |
| 2789 | chr19 | 4990593 | 4990775 | Breast Luminal Epithelium | 0.26 | 0.88 | intron | KDM4B | U |
| 2790 | chr14 | 56607984 | 56608366 | Breast Luminal Epithelium | 0.28 | 0.9 | intron | PELI2 | U |
| 2791 | chr9 | 1339678153 | 133968043 | Breast Luminal Epithelium | 0.24 | 0.85 | exon | LAMC3 | U |
| 2792 | chr6 | 20106040 | 20106421 | Breast Luminal Epithelium | 0.29 | 0.9 | intron | MBOAT1 | U |
| 2793 | chr4 | 184343198 | 184343390 | Breast Luminal Epithelium | 0.31 | 0.9 | Intergenic | CDKN2AIP | U |
| 2794 | chr6 | 34506937 | 34507148 | Breast Luminal Epithelium | 0.3 | 0.89 | exon | SPDEF | U |
| 2795 | chr10 | 29414135 | 29414418 | Breast Luminal Epithelium | 0.28 | 0.87 | Intergenic | LYZLI | U |
| 2796 | chr22 | 44564263 | 44564384 | Breast Luminal Epithelium | 0.34 | 0.91 | intron | PARVB | U |
| 2797 | chr8 | 141054097 | 141054499 | Breast Luminal Epithelium | 0.31 | 0.87 | intron | TRAPPC9 | U |
| 2798 | chr9 | 96105123 | 96105421 | Breast Luminal Epithelium | 0.31 | 0.86 | intron | C9orf129 | U |
| 2799 | chr12 | 111402971 | 111403283 | Breast Luminal Epithelium | 0.26 | 0.8 | Intergenic | LOC100131138 | U |
| 2800 | chr3 | 46949042 | 46949419 | Breast Luminal Epithelium | 0.32 | 0.86 | Intergenic | PTH1R | U |
| 2801 | chr20 | 30530332 | 30530753 | Breast Luminal Epithelium | 0.35 | 0.87 | intron, TTS | TTLL9, TTLL9 | U |
| 2802 | chr17 | 45946181 | 45946406 | Breast Luminal Epithelium | 0.31 | 0.78 | Intergenic | SP6 | U |
| 2803 | chr12 | 54433551 | 54433688 | Breast Luminal Epithelium | 0.87 | 0.12 | intron | HOXC4 | M |
| 2804 | chr3 | 180462104 | 180462290 | Breast Luminal Epithelium | 0.88 | 0.2 | Intergenic | CCDC39 | M |
| 2805 | chr1 | 89663866 | 89664034 | Breast Luminal Epithelium | 0.75 | 0.13 | intron | GBP4 | M |
| 2806 | chr16 | 629196 | 629406 | Breast Luminal Epithelium | 0.81 | 0.19 | exon, intron | PIGQ, PIGQ | M |
| 2807 | chr9 | 129400487 | 129400618 | Breast Luminal Epithelium | 0.76 | 0.2 | intron | LMX1B | M |
| 2808 | chr1 | 27961103 | 27961345 | Breast Luminal Epithelium | 0.72 | 0.17 | intron | FGR | M |
| 2809 | chr12 | 99287010 | 99287145 | Breast Luminal Epithelium | 0.69 | 0.2 | intron | ANKS1B | M |
| 2810 | chr19 | 47920660 | 47920904 | Breast Luminal Epithelium | 0.6 | 0.12 | intron | MEIS3 | M |
| 2811 | chr5 | 16600590 | 16600747 | Breast Luminal Epithelium | 0.65 | 0.19 | intron | FAM134B | M |
| 2812 | chr5 | 43040044 | 43040376 | Breast Luminal Epithelium | 0.57 | 0.11 | exon | ANXA2R | M |
| 2813 | chr1 | 18526236 | 18526402 | Breast Luminal Epithelium | 0.68 | 0.28 | intron | IGSF21 | M |
| 2814 | chrX | 1050652911 | 105065501 | Breast Luminal Epithelium | 0.67 | 0.29 | Intergenic | NRK | M |
| 2815 | chrX | 21676769 | 21676820 | Breast Luminal Epithelium | 0.63 | 0.28 | promoter-TSS | KLHL34 | M |
| 2816 | chr6 | 103246276 | 103246718 | Breast Luminal Epithelium | 0.64 | 0.1 | Intergenic | GRIK2 | M |
| 2817 | chr11 | 61062962 | 61063044 | Breast Luminal Epithelium | 0.9 | 0.12 | promoter-TSS | VWCE | M |
| 2818 | chr6 | 50818692 | 50819121 | Breast Luminal Epithelium | 0.87 | 0.1 | Intergenic | TFAP2B | M |
| 2819 | chr12 | 54408233 | 54408284 | Breast Luminal Epithelium | 0.84 | 0.11 | Intergenic | HOXC6 | M |
| 2820 | chr3 | 127794984 | 127795235 | Breast Luminal Epithelium | 0.81 | 0.11 | Intergenic | SEC61A1 | M |
| 2821 | chr9 | 129445271 | 129445732 | Breast Luminal Epithelium | 0.66 | 0.03 | intron | LMX1B | M |
| 2822 | chr15 | 736596871 | 73659812 | Breast Luminal Epithelium | 0.73 | 0.18 | exon, intron | HCN4, HCN4 | M |
| 2823 | chr17 | 60885306 | 60885424 | Breast Luminal Epithelium | 0.74 | 0.2 | intron | MARCH10 | M |
| 2824 | chr9 | 129445737 | 129445865 | Breast Luminal Epithelium | 0.6 | 0.07 | intron | LMX1B | M |
| 2825 | chr5 | 1741474443 | 174147569 | Breast Luminal Epithelium | 0.61 | 0.12 | Intergenic | MSX2 | M |
| 2826 | chr9 | 109622286 | 109622383 | Breast Luminal Epithelium | 0.55 | 0.15 | Intergenic | ZNF462 | M |
| 2827 | chr19 | 49466763 | 49467029 | Breast Luminal Epithelium | 0.53 | 0.13 | Intergenic | FTL | M |
| 2828 | chr16 | 22363430 | 22363834 | Lung Alveolar Epithelium | 0.05 | 0.95 | intron | CDR2 | U |
| 2829 | chr19 | 33202756 | 33203019 | Lung Alveolar Epithelium | 0.07 | 0.93 | exon | NUDT19 | U |
| 2830 | chr15 | 57626002 | 57626444 | Lung Alveolar Epithelium | 0.06 | 0.91 | Intergenic | LOC283663 | U |
| 2831 | chr22 | 46109795 | 46110257 | Lung Alveolar Epithelium | 0.08 | 0.93 | intron | ATXN10 | U |
| 2832 | chr3 | 182870189 | 182870399 | Lung Alveolar Epithelium | 0.04 | 0.89 | intron | LAMP3 | U |
| 2833 | chr2 | 100131233 | 100131368 | Lung Alveolar Epithelium | 0.08 | 0.9 | Intergenic | REV1 | U |
| 2834 | chr1 | 54554193 | 54554672 | Lung Alveolar Epithelium | 0.1 | 0.92 | exon | TCEANC2 | U |
| 2835 | chr14 | 96790748 | 96790914 | Lung Alveolar Epithelium | 0.13 | 0.95 | intron | ATG2B | U |
| 2836 | chr17 | 37700769 | 37701018 | Lung Alveolar Epithelium | 0.13 | 0.95 | Intergenic | NEUROD2 | U |
| 2837 | chr7 | 66074950 | 66075088 | Lung Alveolar Epithelium | 0.11 | 0.92 | Intergenic | KCTD7 | U |
| 2838 | chr17 | 55071173 | 55071656 | Lung Alveolar Epithelium | 0.15 | 0.93 | intron | SCPEP1 | U |
| 2839 | chr4 | 129396222 | 129396578 | Lung Alveolar Epithelium | 0.03 | 0.92 | Intergenic | PGRMC2 | U |
| 2840 | chr4 | 103637380 | 103637623 | Lung Alveolar Epithelium | 0.06 | 0.93 | intron | MANBA | U |
| 2841 | chr11 | 68510996 | 68511288 | Lung Alveolar Epithelium | 0.04 | 0.91 | intron | MTL5 | U |
| 2842 | chr17 | 53293250 | 53293655 | Lung Alveolar Epithelium | 0.03 | 0.9 | Intergenic | HLF | U |
| 2843 | chr5 | 132720735 | 132720848 | Lung Alveolar Epithelium | 0.05 | 0.91 | intron | FSTL4 | U |
| 2844 | chr15 | 95850339 | 95850565 | Lung Alveolar Epithelium | 0.05 | 0.91 | intron | LOC400456 | U |
| 2845 | chr11 | 352849071 | 35285182 | Lung Alveolar Epithelium | 0.07 | 0.93 | intron | SLC1A2 | U |
| 2846 | chr10 | 80179638 | 80179921 | Lung Alveolar Epithelium | 0.04 | 0.9 | Intergenic | LINC00595 | U |
| 2847 | chr2 | 227714792 | 227715182 | Lung Alveolar Epithelium | 0.05 | 0.91 | intron | RHBDD1 | U |
| 2848 | chr13 | 27754052 | 27754186 | Lung Alveolar Epithelium | 0.03 | 0.88 | Intergenic | USP12 | U |
| 2849 | chr7 | 158595013 | 158595183 | Lung Alveolar Epithelium | 0.03 | 0.88 | intron | ESYT2 | U |
| 2850 | chr10 | 25352752 | 25352978 | Lung Alveolar Epithelium | 0.1 | 0.95 | Intergenic | THNSL1 | U |
| 2851 | chr1 | 94296799 | 94297055 | Lung Alveolar Epithelium | 0.07 | 0.92 | intron | BCAR3 | U |
| 2852 | chr11 | 121367621 | 121367913 | Lung Alveolar Epithelium | 0.03 | 0.88 | intron | SORL1 | U |
| 2853 | chr10 | 81345579 | 81345701 | Lung Alveolar Epithelium | 0.02 | 0.85 | Intergenic | SFTPA1 | U |
| 2854 | chr11 | 46200227 | 46200478 | Lung Alveolar Epithelium | 0.08 | 0.91 | Intergenic | PHF21A | U |
| 2855 | chr2 | 85893108 | 85893606 | Lung Alveolar Epithelium | 0.07 | 0.9 | intron | SFTPB | U |
| 2856 | chr5 | 1546436 | 1546597 | Lung Alveolar Epithelium | 0.05 | 0.87 | Intergenic | LPCAT1 | U |
| 2857 | chr7 | 87920503 | 87920757 | Lung Alveolar Epithelium | 0.07 | 0.89 | intron | STEAP4 | U |
| 2858 | chr11 | 27325873 | 27326147 | Lung Alveolar Epithelium | 0.04 | 0.86 | Intergenic | CCDC34 | U |
| 2859 | chr10 | 74176410 | 74176729 | Lung Alveolar Epithelium | 0.06 | 0.88 | intron | MICU1 | U |
| 2860 | chr17 | 15937103 | 15937495 | Lung Alveolar Epithelium | 0.12 | 0.94 | intron | NCOR1 | U |
| 2861 | chr8 | 12525700 | 12525832 | Lung Alveolar Epithelium | 0.11 | 0.92 | Intergenic | LOC729732 | U |
| 2862 | chr13 | 113438392 | 113438560 | Lung Alveolar Epithelium | 0.07 | 0.88 | intron | ATP11A | U |
| 2863 | chr9 | 138096180 | 138096362 | Lung Alveolar Epithelium | 0.03 | 0.84 | Intergenic | LOC401557 | U |
| 2864 | chr4 | 25515327 | 25515665 | Lung Alveolar Epithelium | 0.07 | 0.88 | Intergenic | ANAPC4 | U |
| 2865 | chr2 | 25851442 | 25851858 | Lung Alveolar Epithelium | 0.11 | 0.92 | intron | DTNB | U |
| 2866 | chr18 | 9856637 | 19356774 | Lung Alveolar Epithelium | 0.11 | 0.91 | intron | MIB1 | U |
| 2867 | chr10 | 33997244 | 33997405 | Lung Alveolar Epithelium | 0.04 | 0.84 | Intergenic | LINC00838 | U |
| 2868 | chr16 | 69133299 | 69133521 | Lung Alveolar Epithelium | 0.1 | 0.9 | Intergenic | HAS3 | U |
| 2869 | chr6 | 38572720 | 38573038 | Lung Alveolar Epithelium | 0.11 | 0.91 | intron | BTBD9 | U |
| 2870 | chr2 | 65602434 | 65602899 | Lung Alveolar Epithelium | 0.13 | 0.93 | intron | SPRED2 | U |
| 2871 | chr2 | 109895272 | 109895384 | Lung Alveolar Epithelium | 0.1 | 0.89 | intron | SH3RF3 | U |
| 2872 | chr10 | 3212788 | 3212986 | Lung Alveolar Epithelium | 0.1 | 0.89 | intron | PITRM1 | U |
| 2873 | chr2 | 35892633 | 85892909 | Lung Alveolar Epithelium | 0.06 | 0.85 | exon | SFTPB | U |
| 2874 | chr10 | 73956581 | 73956730 | Lung Alveolar Epithelium | 0.1 | 0.88 | exon | ASCC1 | U |
| 2875 | chr5 | 132720911 | 132721184 | Lung Alveolar Epithelium | 0.1 | 0.88 | intron | FSTL4 | U |
| 2876 | chr18 | 3512750 | 3513056 | Lung Alveolar Epithelium | 0.09 | 0.87 | intron | DLGAP1 | U |
| 2877 | chr18 | 11585537 | 11585881 | Lung Alveolar Epithelium | 0.08 | 0.86 | Intergenic | GNAL | U |
| 2878 | chr3 | 48338671 | 48339047 | Lung Alveolar Epithelium | 0.1 | 0.9 | intron | NMEG | U |
| 2879 | chr6 | 150714124 | 150714583 | Lung Alveolar Epithelium | 0.1 | 0.9 | intron | IYD | U |
| 2880 | chr16 | 31523180 | 31523661 | Lung Alveolar Epithelium | 0.09 | 0.87 | Intergenic | C16orf58 | U |
| 2881 | chr4 | 148745488 | 148745733 | Lung Alveolar Epithelium | 0.11 | 0.88 | intron | ARHGAP10 | U |
| 2882 | chr11 | 46959181 | 46959324 | Lung Alveolar Epithelium | 0.15 | 0.91 | intron | C11orf49 | U |
| 2883 | chr18 | 22059526 | 22059718 | Lung Alveolar Epithelium | 0.11 | 0.87 | exon, TTS | HRH4, HRH4 | U |
| 2884 | chr1 | 200393978 | 200394246 | Lung Alveolar Epithelium | 0.08 | 0.84 | Intergenic | ZNF281 | U |
| 2885 | chr16 | 47961569 | 47961782 | Lung Alveolar Epithelium | 0.14 | 0.89 | Intergenic | ABCC12 | U |
| 2886 | chr13 | 27657033 | 27657130 | Lung Alveolar Epithelium | 0.23 | 0.97 | intron | USP12 | U |
| 2887 | chr17 | 47496663 | 47496701 | Lung Alveolar Epithelium | 0.18 | 0.91 | Intergenic | PHB | U |
| 2888 | chr3 | 171292399 | 171292700 | Lung Alveolar Epithelium | 0.14 | 0.87 | Intergenic | TNIK | U |
| 2889 | chr4 | 6180089 | 6180440 | Lung Alveolar Epithelium | 0.11 | 0.84 | intron | JAKMIP1 | U |
| 2890 | chr1 | 1983574 | 1983759 | Lung Alveolar Epithelium | 0.14 | 0.86 | intron | PRKCZ | U |
| 2891 | chr12 | 122486051 | 122486455 | Lung Alveolar Epithelium | 0.21 | 0.93 | intron | BCL7A | U |
| 2892 | chr7 | 65587218 | 65587319 | Lung Alveolar Epithelium | 0.22 | 0.93 | intron | CRCP | U |
| 2893 | chr9 | 130694348 | 130694514 | Lung Alveolar Epithelium | 0.18 | 0.89 | Intergenic | PIP5KL1 | U |
| 2894 | chr9 | 127823530 | 127823864 | Lung Alveolar Epithelium | 0.24 | 0.95 | intron | SCAI | U |
| 2895 | chr1 | 1435888 | 1436130 | Lung Alveolar Epithelium | 0.15 | 0.85 | Intergenic | ATAD3A | U |
| 2896 | chr7 | 97767447 | 97767608 | Lung Alveolar Epithelium | 0.24 | 0.93 | intron | LMTK2 | U |
| 2897 | chr12 | 104911000 | 104911372 | Lung Alveolar Epithelium | 0.26 | 0.94 | intron | CHST11 | U |
| 2898 | chr17 | 80071399 | 80071607 | Lung Alveolar Epithelium | 0.24 | 0.9 | intron | CCDC57 | U |
| 2899 | chr1 | 167740172 | 167740485 | Lung Alveolar Epithelium | 0.27 | 0.92 | intron | MPZL1 | U |
| 2900 | chr6 | 151583157 | 151583385 | Lung Alveolar Epithelium | 0.08 | 0.93 | intron | AKAP12 | U |
| 2901 | chr18 | 61135163 | 61135409 | Lung Alveolar Epithelium | 0.1 | 0.9 | Intergenic | SERPINB5 | U |
| 2902 | chr10 | 93396090 | 93396444 | Lung Alveolar Epithelium | 0.09 | 0.87 | Intergenic | PPP1R3C | U |
| 2903 | chr2 | 232035234 | 232035440 | Lung Alveolar Epithelium | 0.23 | 0.92 | exon | PSMD1 | U |
| 2904 | chr6 | 138883706 | 138884001 | Lung Alveolar Epithelium | 0.05 | 0.94 | intron | NHSL1 | U |
| 2905 | chr16 | 678028 | 678173 | Lung Alveolar Epithelium | 0.03 | 0.91 | exon | RAB40C | U |
| 2906 | chr2 | 97305286 | 97305541 | Lung Alveolar Epithelium | 0.06 | 0.94 | Intergenic | KANSL3 | U |
| 2907 | chr22 | 24928939 | 24929341 | Lung Alveolar Epithelium | 0.06 | 0.92 | Intergenic | GUCD1 | U |
| 2908 | chr1 | 244823723 | 244823817 | Lung Alveolar Epithelium | 0.1 | 0.96 | intron | DESI2 | U |
| 2909 | chr21 | 33175293 | 33175675 | Lung Alveolar Epithelium | 0.03 | 0.89 | Intergenic | HUNK | U |
| 2910 | chr7 | 2473795 | 2474257 | Lung Alveolar Epithelium | 0.05 | 0.9 | exon | CHST12 | U |
| 2911 | chr2 | 185490785 | 185490895 | Lung Alveolar Epithelium | 0.07 | 0.91 | intron | ZNF804A | U |
| 2912 | chr14 | 62002256 | 62002702 | Lung Alveolar Epithelium | 0.08 | 0.92 | intron | PRKCH | U |
| 2913 | chr2 | 160086171 | 160086571 | Lung Alveolar Epithelium | 0.08 | 0.91 | exon | TANC1 | U |
| 2914 | chr17 | 57185537 | 57185818 | Lung Alveolar Epithelium | 0.15 | 0.95 | Intergenic | TRIM37 | U |
| 2915 | chr11 | 67781212 | 67781525 | Lung Alveolar Epithelium | 0.13 | 0.91 | intron | ALDH3B1 | U |
| 2916 | chr2 | 61452835 | 61453241 | Lung Alveolar Epithelium | 0.19 | 0.94 | intron | USP34 | U |
| 2917 | chr3 | 179449170 | 179449589 | Lung Alveolar Epithelium | 0.02 | 0.91 | intron | USP13 | U |
| 2918 | chr18 | 72670023 | 72670206 | Lung Alveolar Epithelium | 0.02 | 0.89 | intron | ZNF407 | U |
| 2919 | chr20 | 49179013 | 49179362 | Lung Alveolar Epithelium | 0.06 | 0.91 | intron | PTPN1 | U |
| 2920 | chr15 | 42129252 | 42129616 | Lung Alveolar Epithelium | 0.06 | 0.91 | intron, exon | JMJD7, JMJD7 | U |
| 2921 | chr2 | 98870904 | 98871360 | Lung Alveolar Epithelium | 0.05 | 0.9 | intron | VWA3B | U |
| 2922 | chr2 | 73723864 | 73724126 | Lung Alveolar Epithelium | 0.09 | 0.93 | intron | ALMS1 | U |
| 2923 | chr1 | 252003741 | 25200693 | Lung Alveolar Epithelium | 0.06 | 0.9 | Intergenic | RUNX3 | U |
| 2924 | chr6 | 127669485 | 127669890 | Lung Alveolar Epithelium | 0.1 | 0.94 | Intergenic | ECHDC1 | U |
| 2925 | chr14 | 63872855 | 63872912 | Lung Alveolar Epithelium | 0.1 | 0.93 | intron | PPP2R5E | U |
| 2926 | chr22 | 30907485 | 30907625 | Lung Alveolar Epithelium | 0.05 | 0.88 | Intergenic | SEC14L4 | U |
| 2927 | chr22 | 30216739 | 30216883 | Lung Alveolar Epithelium | 0.1 | 0.92 | intron | ASCC2 | U |
| 2928 | chr12 | 107272882 | 107273121 | Lung Alveolar Epithelium | 0.06 | 0.88 | intron | RIC8B | U |
| 2929 | chr18 | 12849921 | 12850413 | Lung Alveolar Epithelium | 0.06 | 0.88 | intron | PTPN2 | U |
| 2930 | chr3 | 37765199 | 37765284 | Lung Alveolar Epithelium | 0.14 | 0.93 | intron | ITGA9 | U |
| 2931 | chr10 | 135030800 | 135030993 | Lung Alveolar Epithelium | 0.05 | 0.84 | intron | KNDC1 | U |
| 2932 | chr12 | 131478682 | 131478883 | Lung Alveolar Epithelium | 0.13 | 0.92 | intron | GPR133 | U |
| 2933 | chr2 | 100812090 | 100812519 | Lung Alveolar Epithelium | 0.09 | 0.88 | Intergenic | AFF3 | U |
| 2934 | chr9 | 2272215 | 2272359 | Lung Alveolar Epithelium | 0.15 | 0.93 | Intergenic | SMARCA2 | U |
| 2935 | chr14 | 59165532 | 59165760 | Lung Alveolar Epithelium | 0.09 | 0.87 | Intergenic | DACT1 | U |
| 2936 | chr16 | 11398056 | 11398454 | Lung Alveolar Epithelium | 0.14 | 0.92 | Intergenic | PRM1 | U |
| 2937 | chr17 | 78587637 | 78988060 | Lung Alveolar Epithelium | 0.14 | 0.92 | intron | RPTOR | U |
| 2938 | chr14 | 103363706 | 103363938 | Lung Alveolar Epithelium | 0.13 | 0.9 | intron | TRAF3 | U |
| 2939 | chr1 | 231037988 | 231038262 | Lung Alveolar Epithelium | 0.17 | 0.94 | Intergenic | C1orf198 | U |
| 2940 | chr9 | 90154688 | 90154983 | Lung Alveolar Epithelium | 0.18 | 0.95 | intron | DAPK1 | U |
| 2941 | chr1 | 87607301 | 87607738 | Lung Alveolar Epithelium | 0.11 | 0.88 | intron | LOC339524 | U |
| 2942 | chr6 | 14941192 | 14941688 | Lung Alveolar Epithelium | 0.16 | 0.93 | Intergenic | JARID2 | U |
| 2943 | chr5 | 158567331 | 158567722 | Lung Alveolar Epithelium | 0.16 | 0.92 | intron | SERAC1 | U |
| 2944 | chr4 | 1637282 | 1637720 | Lung Alveolar Epithelium | 0.15 | 0.91 | Intergenic | FAM53A | U |
| 2945 | chr7 | 98601588 | 98601745 | Lung Alveolar Epithelium | 0.16 | 0.91 | intron | TRRAP | U |
| 2946 | chr9 | 1029071981 | 102907628 | Lung Alveolar Epithelium | 0.17 | 0.91 | intron | INVS | U |
| 2947 | chr15 | 80217246 | 80217531 | Lung Alveolar Epithelium | 0.23 | 0.93 | TTS, promoter-TSS | C15orf37, ST20 | U |
| 2948 | chr9 | 38075126 | 38075485 | Lung Alveolar Epithelium | 0.24 | 0.94 | Intergenic | SHB | U |
| 2949 | chr16 | 3139060 | 3139148 | Lung Alveolar Epithelium | 0.24 | 0.93 | exon | ZSCAN10 | U |
| 2950 | chr22 | 29203527 | 29203817 | Lung Alveolar Epithelium | 0.25 | 0.94 | Intergenic | XBP1 | U |
| 2951 | chr19 | 7158237 | 7158339 | Lung Alveolar Epithelium | 0.26 | 0.92 | intron | INSR | U |
| 2952 | chr22 | 47197735 | 47198162 | Lung Alveolar Epithelium | 0.28 | 0.94 | intron | TBC1D22A | U |
| 2953 | chr1 | 150748460 | 150748752 | Lung Alveolar Epithelium | 0.35 | 0.93 | Intergenic | CTSS | U |
| 2954 | chr5 | 87439252 | 87439630 | Lung Alveolar Epithelium | 0.94 | 0.16 | Intergenic | TMEM1618 | M |
| 2955 | chr4 | 57521209 | 57521311 | Lung Alveolar Epithelium | 0.78 | 0.19 | intron | HOPX | M |
| 2956 | chr13 | 27050627 | 27050868 | Lung Alveolar Epithelium | 0.7 | 0.14 | Intergenic | WASF3 | M |
| 2957 | chr14 | 91710906 | 91711100 | Lung Alveolar Epithelium | 0.63 | 0.16 | promoter-TSS | GPR68 | M |
| 2958 | chr19 | 18706051 | 18706131 | Lung Alveolar Epithelium | 0.63 | 0.26 | intron | CRLF1 | M |
| 2959 | chr19 | 49112138 | 49112279 | Lung Alveolar Epithelium | 0.63 | 0.28 | intron | FAM83E | M |
| 2960 | chr3 | 139082331 | 13908303 | Lung Alveolar Epithelium | 0.61 | 0.27 | intron | WNT7A | M |
| 2961 | chr3 | 44063807 | 44064029 | Lung Alveolar Epithelium | 0.79 | 0.09 | Intergenic | MIR138-1 | M |
| 2962 | chr19 | 17008520 | 17008796 | Lung Alveolar Epithelium | 0.78 | 0.1 | intron | CPAMD8 | M |
| 2963 | chr2 | 111875094 | 111875507 | Lung Alveolar Epithelium | 0.71 | 0.03 | exon | ACOXL | M |
| 2964 | chr19 | 17007039 | 17007486 | Lung Alveolar Epithelium | 0.75 | 0.07 | intron | CPAMD8 | M |
| 2965 | chr6 | 152623159 | 152623510 | Lung Alveolar Epithelium | 0.64 | 0.02 | intron | SYNE1 | M |
| 2966 | chr5 | 87440121 | 87440509 | Lung Alveolar Epithelium | 0.76 | 0.14 | Intergenic | TMEM161B | M |
| 2967 | chr4 | 57521336 | 57521507 | Lung Alveolar Epithelium | 0.65 | 0.04 | intron | HOPX | M |
| 2968 | chr19 | 17008817 | 17008852 | Lung Alveolar Epithelium | 0.73 | 0.15 | intron | CPAMD8 | M |
| 2969 | chr3 | 44063289 | 44063326 | Lung Alveolar Epithelium | 0.72 | 0.15 | Intergenic | MIR138-1 | M |
| 2970 | chr19 | 11492629 | 11492913 | Lung Alveolar Epithelium | 0.71 | 0.15 | exon, intron | EPOR, EPOR | M |
| 2971 | chr10 | 122708511 | 122708747 | Lung Alveolar Epithelium | 0.63 | 0.09 | intron | MIR5694 | M |
| 2972 | chr5 | 3594139 | 3594432 | Lung Alveolar Epithelium | 0.67 | 0.14 | Intergenic | IRX1 | M |
| 2973 | chr19 | 11492268 | 11492404 | Lung Alveolar Epithelium | 0.58 | 0.06 | exon | EPOR | M |
| 2974 | chr5 | 3606587 | 3607009 | Lung Alveolar Epithelium | 0.63 | 0.14 | Intergenic | IRX1 | M |
| 2975 | chr4 | 122301277 | 122301447 | Lung Alveolar Epithelium | 0.61 | 0.13 | intron | QRFPR | M |
| 2976 | chr1 | 47974491 | 47974712 | Lung Alveolar Epithelium | 0.61 | 0.13 | Intergenic | FOXDZ | M |
| 2977 | chr19 | 104072143 | 10407260 | Lung Alveolar Epithelium | 0.63 | 0.16 | exon | ICAM5 | M |
| 2978 | chr8 | 102038446 | 102038850 | Lung Alveolar Epithelium | 0.61 | 0.14 | Intergenic | FLI42969 | M |
| 2979 | chr16 | 23408418 | 23408836 | Lung Bronchial Epithelium | 0.05 | 0.93 | intron | COG7 | U |
| 2980 | chr8 | 26293472 | 26293783 | Lung Bronchial Epithelium | 0.08 | 0.92 | Intergenic | BNIP3L | U |
| 2981 | chr17 | 56027572 | 56027663 | Lung Bronchial Epithelium | 0.1 | 0.94 | intron | CUEDC1 | U |
| 2982 | chr17 | 64274922 | 64275067 | Lung Bronchial Epithelium | 0.1 | 0.94 | Intergenic | PRKCA | U |
| 2983 | chr8 | 19268415 | 19268524 | Lung Bronchial Epithelium | 0.09 | 0.92 | intron | CSGALNACT1 | U |
| 2984 | chr17 | 8209419 | 8209553 | Lung Bronchial Epithelium | 0.07 | 0.9 | Intergenic | ARHGEF15 | U |
| 2985 | chr8 | 59583884 | 59584023 | Lung Bronchial Epithelium | 0.04 | 0.87 | Intergenic | NSMAF | U |
| 2986 | chr5 | 132231880 | 132232256 | Lung Bronchial Epithelium | 0.04 | 0.87 | exon | AFF4 | U |
| 2987 | chr11 | 120077845 | 120078073 | Lung Bronchial Epithelium | 0.1 | 0.92 | Intergenic | OAF | U |
| 2988 | chr17 | 64571956 | 64572372 | Lung Bronchial Epithelium | 0.12 | 0.94 | intron | PRKCA | U |
| 2989 | chr21 | 33872620 | 33873117 | Lung Bronchial Epithelium | 0.11 | 0.92 | intron | EVA1C | U |
| 2990 | chr12 | 98213200 | 98213306 | Lung Bronchial Epithelium | 0.09 | 0.89 | Intergenic | MIR4303 | U |
| 2991 | chr18 | 44084653 | 44084849 | Lung Bronchial Epithelium | 0.06 | 0.84 | intron | LOXHD1 | U |
| 2992 | chr3 | 147749806 | 147750024 | Lung Bronchial Epithelium | 0.05 | 0.82 | Intergenic | ZIC1 | U |
| 2993 | chr17 | 53331547 | 53331840 | Lung Bronchial Epithelium | 0.15 | 0.91 | Intergenic | HLF | U |
| 2994 | chr8 | 59582952 | 59583311 | Lung Bronchial Epithelium | 0.12 | 0.88 | Intergenic | NSMAF | U |
| 2995 | chr8 | 72269986 | 72270116 | Lung Bronchial Epithelium | 0.11 | 0.86 | intron | EYA1 | U |
| 2996 | chr7 | 64711787 | 64711972 | Lung Bronchial Epithelium | 0.08 | 0.83 | Intergenic | SNF92 | U |
| 2997 | chr3 | 57143301 | 57143517 | Lung Bronchial Epithelium | 0.19 | 0.94 | intron | IL17RD | U |
| 2998 | chr2 | 231426805 | 231427158 | Lung Bronchial Epithelium | 0.14 | 0.85 | Intergenic | LOC151475 | U |
| 2999 | chr2 | 62030600 | 62030903 | Lung Bronchial Epithelium | 0.22 | 0.92 | Intergenic | FAM161A | U |
| 3000 | chr16 | 1752224 | 1752508 | Lung Bronchial Epithelium | 0.32 | 0.93 | TTS | HN1L | U |
| 3001 | chr1 | 155691915 | 155692294 | Lung Bronchial Epithelium | 0.38 | 0.95 | intron | DAP3 | U |
| 3002 | chr6 | 107980870 | 107981125 | Lung Bronchial Epithelium | 0.05 | 0.93 | exon | SOBP | U |
| 3003 | chr5 | 137191290 | 137191665 | Lung Bronchial Epithelium | 0.04 | 0.92 | Intergenic | MYOT | U |
| 3004 | chr13 | 80201369 | 80201594 | Lung Bronchial Epithelium | 0.04 | 0.9 | Intergenic | NDFIP2-AS1 | U |
| 3005 | chr17 | 53331611 | 53331841 | Lung Bronchial Epithelium | 0.06 | 0.92 | Intergenic | HLF | U |
| 3006 | chr2 | 33447183 | 33447527 | Lung Bronchial Epithelium | 0.08 | 0.93 | intron | LTBP1 | U |
| 3007 | chr2 | 61359540 | 61359941 | Lung Bronchial Epithelium | 0.05 | 0.9 | intron | KIAA1841 | U |
| 3008 | chr2 | 206421572 | 206421663 | Lung Bronchial Epithelium | 0.03 | 0.87 | intron | PARD38 | U |
| 3009 | chr10 | 13789249 | 13789452 | Lung Bronchial Epithelium | 0.08 | 0.92 | intron | FRMD4A | U |
| 3010 | chr2 | 68057829 | 68058240 | Lung Bronchial Epithelium | 0.05 | 0.89 | Intergenic | C1D | U |
| 3011 | chr21 | 36192712 | 36192750 | Lung Bronchial Epithelium | 0.11 | 0.93 | TTS | RUNX1 | U |
| 3012 | chr4 | 124277967 | 124278127 | Lung Bronchial Epithelium | 0.05 | 0.87 | Intergenic | SPRY1 | U |
| 3013 | chr14 | 90006939 | 90007031 | Lung Bronchial Epithelium | 0.14 | 0.95 | intron | FOXN3 | U |
| 3014 | chr16 | 4345479 | 4345610 | Lung Bronchial Epithelium | 0.09 | 0.9 | Intergenic | TFAP4 | U |
| 3015 | chr16 | 14108508 | 14108704 | Lung Bronchial Epithelium | 0.05 | 0.86 | Intergenic | MKL2 | U |
| 3016 | chr11 | 27461641 | 27461890 | Lung Bronchial Epithelium | 0.11 | 0.92 | intron | LGR4 | U |
| 3017 | chr10 | 70192040 | 70192309 | Lung Bronchial Epithelium | 0.12 | 0.93 | exon | DNA2 | U |
| 3018 | chr17 | 71045999 | 71046291 | Lung Bronchial Epithelium | 0.08 | 0.89 | intron | SLC39A11 | U |
| 3019 | chr2 | 97080460 | 97080595 | Lung Bronchial Epithelium | 0.1 | 0.9 | Intergenic | NCAPH | U |
| 3020 | chr3 | 4401572 | 4401791 | Lung Bronchial Epithelium | 0.12 | 0.92 | TTS, Intergenic | SUMF1, SETMAR | U |
| 3021 | chr16 | 58613625 | 58613880 | Lung Bronchial Epithelium | 0.12 | 0.92 | intron | CNOT1 | U |
| 3022 | chr3 | 141828866 | 141829164 | Lung Bronchial Epithelium | 0.12 | 0.92 | intron | TFDP2 | U |
| 3023 | chr2 | 233979823 | 233979903 | Lung Bronchial Epithelium | 0.06 | 0.85 | intron | INPP5D | U |
| 3024 | chr2 | 28941738 | 28942085 | Lung Bronchial Epithelium | 0.04 | 0.83 | Intergenic | PPP1CB | U |
| 3025 | chr15 | 84557339 | 84557565 | Lung Bronchial Epithelium | 0.11 | 0.89 | intron | ADAMTSL3 | U |
| 3026 | chr8 | 32160407 | 32160473 | Lung Bronchial Epithelium | 0.08 | 0.85 | intron | NRG1 | U |
| 3027 | chr17 | 56027864 | 56027995 | Lung Bronchial Epithelium | 0.08 | 0.85 | intron | CUEDC1 | U |
| 3028 | chr18 | 75987918 | 75988365 | Lung Bronchial Epithelium | 0.09 | 0.86 | Intergenic | SALL3 | U |
| 3029 | chr4 | 956326501 | 95632851 | Lung Bronchial Epithelium | 0.14 | 0.9 | Intergenic | PDLIM5 | U |
| 3030 | chr19 | 47266433 | 47266803 | Lung Bronchial Epithelium | 0.13 | 0.89 | Intergenic | STRN4 | U |
| 3031 | chr11 | 67488307 | 67488744 | Lung Bronchial Epithelium | 0.12 | 0.88 | Intergenic | ALDH382 | U |
| 3032 | chr17 | 4549899 | 4549954 | Lung Bronchial Epithelium | 0.15 | 0.9 | Intergenic | ALOX15 | U |
| 3033 | chr2 | 118875322 | 118875465 | Lung Bronchial Epithelium | 0.12 | 0.87 | Intergenic | INSIG2 | U |
| 3034 | chr12 | 70367811 | 70368240 | Lung Bronchial Epithelium | 0.09 | 0.84 | Intergenic | RAB3IP | U |
| 3035 | chr1 | 168809120 | 168809550 | Lung Bronchial Epithelium | 0.11 | 0.86 | Intergenic | LINC00626 | U |
| 3036 | chr8 | 122873916 | 122874072 | Lung Bronchial Epithelium | 0.15 | 0.89 | Intergenic | HAS2 | U |
| 3037 | chr12 | 52071638 | 52071882 | Lung Bronchial Epithelium | 0.07 | 0.81 | intron | SCN8A | U |
| 3038 | chr13 | 242484861 | 24248751 | Lung Bronchial Epithelium | 0.1 | 0.84 | exon | TNFRSF19 | U |
| 3039 | chr13 | 25509965 | 25510435 | Lung Bronchial Epithelium | 0.1 | 0.84 | intron | TPTE2P1 | U |
| 3040 | chr10 | 74846359 | 74846552 | Lung Bronchial Epithelium | 0.16 | 0.89 | intron | P4HA1 | U |
| 3041 | chr6 | 158196250 | 158196563 | Lung Bronchial Epithelium | 0.11 | 0.84 | Intergenic | SNX9 | U |
| 3042 | chr9 | 123360632 | 123360948 | Lung Bronchial Epithelium | 0.21 | 0.94 | Intergenic | CDK5RAP2 | U |
| 3043 | chr10 | 129014611 | 129014940 | Lung Bronchial Epithelium | 0.15 | 0.88 | intron | DOCK1 | U |
| 3044 | chr2 | 218071757 | 218072113 | Lung Bronchial Epithelium | 0.07 | 0.8 | Intergenic | TNP1 | U |
| 3045 | chr1 | 24855202 | 24855636 | Lung Bronchial Epithelium | 0.16 | 0.89 | intron | RCAN3 | U |
| 3046 | chr13 | 50142996 | 50143481 | Lung Bronchial Epithelium | 0.17 | 0.9 | intron | RCBTB1 | U |
| 3047 | chr3 | 13287610 | 13287766 | Lung Bronchial Epithelium | 0.19 | 0.91 | Intergenic | NUP210 | U |
| 3048 | chr19 | 10271487 | 10271791 | Lung Bronchial Epithelium | 0.23 | 0.95 | intron | DNMT1 | U |
| 3049 | chr12 | 39751580 | 39751899 | Lung Bronchial Epithelium | 0.22 | 0.94 | intron | KIF21A | U |
| 3050 | chr7 | 70256599 | 70256930 | Lung Bronchial Epithelium | 0.2 | 0.92 | exor | AUTS2 | U |
| 3051 | chr4 | 124427917 | 124428276 | Lung Bronchial Epithelium | 0.21 | 0.93 | Intergenic | SPRY1 | U |
| 3052 | chr7 | 92105316 | 92105449 | Lung Bronchial Epithelium | 0.17 | 0.88 | Intergenic | GATAD1 | U |
| 3053 | chr8 | 146007799 | 146007961 | Lung Bronchial Epithelium | 0.15 | 0.86 | intron | ZNF34 | U |
| 3054 | chr2 | 74446080 | 74446564 | Lung Bronchial Epithelium | 0.13 | 0.84 | intron | SLC4AS | U |
| 3055 | chr1 | 21693223 | 21693342 | Lung Bronchial Epithelium | 0.22 | 0.92 | Intergenic | NBPF3 | U |
| 3056 | chr17 | 7423900 | 7424121 | Lung Bronchial Epithelium | 0.2 | 0.9 | Intergenic | TNFSF12-TNFSF13 | U |
| 3057 | chr12 | 16917346 | 16917592 | Lung Bronchial Epithelium | 0.12 | 0.82 | Intergenic | LMO3 | U |
| 3058 | chr6 | 1408433283 | 140843734 | Lung Bronchial Epithelium | 0.17 | 0.87 | Intergenic | MIR4465 | U |
| 3059 | chr8 | 123543820 | 123544281 | Lung Bronchial Epithelium | 0.17 | 0.87 | Intergenic | ZHX2 | U |
| 3060 | chr7 | 40647660 | 40647976 | Lung Bronchial Epithelium | 0.15 | 0.84 | intron | C7orf10 | U |
| 3061 | chr12 | 4000795 | 4001005 | Lung Bronchial Epithelium | 0.19 | 0.87 | Intergenic | PARP11 | U |
| 3062 | chr1 | 230085990 | 230086147 | Lung Bronchial Epithelium | 0.21 | 0.88 | Intergenic | GALNT2 | U |
| 3063 | chr6 | 122869021 | 122869240 | Lung Bronchial Epithelium | 0.21 | 0.88 | intron | PKIB | U |
| 3064 | chr16 | 29586452 | 29586631 | Lung Bronchial Epithelium | 0.22 | 0.88 | Intergenic | SLC7A5P1 | U |
| 3065 | chr1 | 113369423 | 113369766 | Lung Bronchial Epithelium | 0.22 | 0.88 | Intergenic | AKR7A2P1 | U |
| 3066 | chr3 | 5759429 | 5759837 | Lung Bronchial Epithelium | 0.19 | 0.85 | Intergenic | MIR4790 | U |
| 3067 | chr17 | 20338997 | 20339458 | Lung Bronchial Epithelium | 0.19 | 0.85 | Intergenic | LGALS9B | U |
| 3068 | chr1 | 10702185 | 10702373 | Lung Bronchial Epithelium | 0.14 | 0.79 | intron | CASZ1 | U |
| 3069 | chr13 | 50143575 | 50143912 | Lung Bronchial Epithelium | 0.28 | 0.93 | intron | RCBTB1 | U |
| 3070 | chr10 | 21621413 | 21621774 | Lung Bronchial Epithelium | 0.2 | 0.85 | Intergenic | NEBL-AS1 | U |
| 3071 | chr9 | 130261931 | 130262136 | Lung Bronchial Epithelium | 0.29 | 0.93 | intron | LRSAM1 | U |
| 3072 | chr3 | 170186154 | 170186327 | Lung Bronchial Epithelium | 0.28 | 0.91 | intron | SLC7A14 | U |
| 3073 | chr21 | 39623442 | 39623667 | Lung Bronchial Epithelium | 0.29 | 0.92 | intron | KCNJ15 | U |
| 3074 | chr2 | 27520111 | 2752237 | Lung Bronchial Epithelium | 0.15 | 0.78 | Intergenic | MYT1L | U |
| 3075 | chr8 | 126844817 | 126845111 | Lung Bronchial Epithelium | 0.27 | 0.89 | Intergenic | LOC100130231 | U |
| 3076 | chr9 | 1654895 | 1655283 | Lung Bronchial Epithelium | 0.22 | 0.84 | Intergenic | SMARCA2 | U |
| 3077 | chr2 | 225670270 | 225670761 | Lung Bronchial Epithelium | 0.27 | 0.89 | intron | DOCK10 | U |
| 3078 | chr15 | 47216695 | 47216791 | Lung Bronchial Epithelium | 0.27 | 0.88 | Intergenic | SEMA6D | U |
| 3079 | chr10 | 99450493 | 99450679 | Lung Bronchial Epithelium | 0.29 | 0.9 | Intergenic | AVPI1 | U |
| 3080 | chr17 | 10043549 | 10043882 | Lung Bronchial Epithelium | 0.26 | 0.87 | intron | GAS7 | U |
| 3081 | chr3 | 125144031 | 125144512 | Lung Bronchial Epithelium | 0.26 | 0.87 | Intergenic | ZNF148 | U |
| 3082 | chr19 | 42907630 | 42908130 | Lung Bronchial Epithelium | 0.32 | 0.93 | intron | LIPE | U |
| 3083 | chr16 | 68249693 | 68250013 | Lung Bronchial Epithelium | 0.35 | 0.95 | intron | NFATC3 | U |
| 3084 | chr12 | 105604559 | 105604915 | Lung Bronchial Epithelium | 0.33 | 0.92 | intron | APPL2 | U |
| 3085 | chr3 | 12413887 | 12414326 | Lung Bronchial Epithelium | 0.3 | 0.89 | intron | PPARG | U |
| 3086 | chr11 | 778593461 | 77859668 | Lung Bronchial Epithelium | 0.33 | 0.91 | Intergenic | ALG8 | U |
| 3087 | chr19 | 41659761 | 41659991 | Lung Bronchial Epithelium | 0.34 | 0.9 | Intergenic | CYP251 | U |
| 3088 | chr13 | 111897872 | 111897971 | Lung Bronchial Epithelium | 0.08 | 0.9 | intron | ARHGEF7 | U |
| 3089 | chr6 | 152651802 | 152652268 | Lung Bronchial Epithelium | 0.08 | 0.84 | exon | SYNE1 | U |
| 3090 | chr10 | 88544748 | 88545188 | Lung Bronchial Epithelium | 0.23 | 0.87 | intron | BMPRIA | U |
| 3091 | chr1 | 164761969 | 164762279 | Lung Bronchial Epithelium | 0.03 | 0.87 | intron | PBX1 | U |
| 3092 | chr9 | 107601248 | 107601574 | Lung Bronchial Epithelium | 0.11 | 0.9 | intron | ABCA1 | U |
| 3093 | chr1 | 1647617841 | 164761954 | Lung Bronchial Epithelium | 0.04 | 0.92 | exon | PBX1 | U |
| 3094 | chr13 | 255610623 | 25561152 | Lung Bronchial Epithelium | 0.07 | 0.88 | Intergenic | TPTE2P1 | U |
| 3095 | chr20 | 20752152 | 20752339 | Lung Bronchial Epithelium | 0.09 | 0.9 | Intergenic | RALGAPA2 | U |
| 3096 | chr20 | 20542933 | 20543154 | Lung Bronchial Epithelium | 0.06 | 0.87 | intron | RALGAPA2 | U |
| 3097 | chr16 | 16022532 | 16022815 | Lung Bronchial Epithelium | 0.13 | 0.93 | Intergenic | ABCC1 | U |
| 3098 | chr14 | 61150822 | 61150872 | Lung Bronchial Epithelium | 0.15 | 0.94 | Intergenic | SIX1 | U |
| 3099 | chr1 | 226003504 | 226003849 | Lung Bronchial Epithelium | 0.1 | 0.88 | intron | EPHX1 | U |
| 3100 | chr22 | 36683736 | 36683948 | Lung Bronchial Epithelium | 0.15 | 0.92 | intron | MYH9 | U |
| 3101 | chr1 | 22092159 | 22092330 | Lung Bronchial Epithelium | 0.14 | 0.85 | intron | USP48 | U |
| 3102 | chr16 | 89189928 | 89189970 | Lung Bronchial Epithelium | 0.23 | 0.89 | intron | ACSF3 | U |
| 3103 | chr12 | 110384902 | 110385148 | Lung Bronchial Epithelium | 0.27 | 0.93 | TTS | GIT2 | U |
| 3104 | chr20 | 36697235 | 36697651 | Lung Bronchial Epithelium | 0.34 | 0.93 | intron | RPRD1B | U |
| 3105 | chr8 | 72469784 | 72470079 | Lung Bronchial Epithelium | 0.96 | 0.15 | Intergenic | EYA1 | M |
| 3106 | chr7 | 19147936 | 19148283 | Lung Bronchial Epithelium | 0.75 | 0.12 | Intergenic | TWIST1 | M |
| 3107 | chr17 | 36101312 | 36101520 | Lung Bronchial Epithelium | 0.67 | 0.08 | intron | HNF18 | M |
| 3108 | chr17 | 36101617 | 36101694 | Lung Bronchial Epithelium | 0.81 | 0.28 | intron | HNF1B | M |
| 3109 | chr5 | 134365897 | 134366390 | Lung Bronchial Epithelium | 0.69 | 0.16 | intron | PITX1 | M |
| 3110 | chr8 | 72470207 | 72470504 | Lung Bronchial Epithelium | 0.95 | 0.09 | Intergenic | EYA1 | M |
| 3111 | chr8 | 72470524 | 72470833 | Lung Bronchial Epithelium | 0.93 | 0.11 | Intergenic | EYA1 | M |
| 3112 | chr14 | 36993562 | 36993880 | Lung Bronchial Epithelium | 0.9 | 0.08 | Intergenic | NKX2-1 | M |
| 3113 | chr8 | 72469494 | 72469643 | Lung Bronchial Epithelium | 0.97 | 0.16 | Intergenic | EYA1 | M |
| 3114 | chr8 | 72471017 | 72471160 | Lung Bronchial Epithelium | 0.9 | 0.1 | Intergenic | EYA1 | M |
| 3115 | chr8 | 72469259 | 72469478 | Lung Bronchial Epithelium | 0.89 | 0.09 | Intergenic | EYA1 | M |
| 3116 | chr14 | 36993918 | 36993963 | Lung Bronchial Epithelium | 0.94 | 0.18 | Intergenic | NKX2-1 | M |
| 3117 | chr14 | 36993345 | 36993518 | Lung Bronchial Epithelium | 0.95 | 0.2 | Intergenic | NKX2-1 | M |
| 3118 | chr14 | 36992248 | 36992379 | Lung Bronchial Epithelium | 0.82 | 0.08 | Intergenic | NKX2-1 | M |
| 3119 | chr14 | 36992388 | 36992488 | Lung Bronchial Epithelium | 0.85 | 0.12 | Intergenic | NKX2-1 | M |
| 3120 | chr14 | 36992090 | 36992210 | Lung Bronchial Epithelium | 0.84 | 0.12 | Intergenic | VKX2-1 | M |
| 3121 | chr14 | 36992526 | 36992748 | Lung Bronchial Epithelium | 0.84 | 0.17 | Intergenic | NKX2-1 | M |
| 3122 | chr5 | 134367238 | 134367397 | Lung Bronchial Epithelium | 0.83 | 0.18 | intron | PITX1 | M |
| 3123 | chr1 | 50891470 | 50891751 | Lung Bronchial Epithelium | 0.73 | 0.1 | Intergenic | DMRTA2 | M |
| 3124 | chr1 | 189724201 | 18972500 | Lung Bronchial Epithelium | 0.74 | 0.12 | intron | PAX7 | M |
| 3125 | chr6 | 16052741 | 1605353 | Lung Bronchial Epithelium | 0.74 | 0.13 | Intergenic | FOXC1 | M |
| 3126 | chr14 | 369940163 | 36994335 | Lung Bronchial Epithelium | 0.69 | 0.09 | Intergenic | NKX2-1 | M |
| 3127 | chr14 | 36976428 | 36976874 | Lung Bronchial Epithelium | 0.67 | 0.09 | intron | SFTA3 | M |
| 3128 | chr9 | 967980 | 968249 | Lung Bronchial Epithelium | 0.62 | 0.1 | exon | DMRT1 | M |
| 3129 | chr14 | 36991185 | 36991324 | Lung Bronchial Epithelium | 0.6 | 0.12 | Intergenic | NKX2-1 | M |
| 3130 | chr17 | 45289451 | 45289569 | Heart Cardiomyocytes | 0.02 | 0.96 | intron | MYL4 | U |
| 3131 | chr11 | 58317179 | 58317528 | Heart Cardiomyocytes | 0.04 | 0.95 | intron | LPXN | U |
| 3132 | chr20 | 50123513 | 50123595 | Heart Cardiomyocytes | 0.03 | 0.93 | intron | NFATC2 | U |
| 3133 | chr1 | 150995966 | 150996022 | Heart Cardiomyocytes | 0.04 | 0.94 | intron | PRUNE | U |
| 3134 | chr10 | 855627 | 855871 | Heart Cardiomyocytes | 0.05 | 0.95 | exon | LARP4B | U |
| 3135 | chr19 | 16495864 | 16496030 | Heart Cardiomyocytes | 0.04 | 0.93 | intron | EPS15L1 | U |
| 3136 | chr9 | 134111086 | 134111578 | Heart Cardiomyocytes | 0.04 | 0.93 | Intergenic | FAM78A | U |
| 3137 | chr19 | 2797235 | 2797659 | Heart Cardiomyocytes | 0.06 | 0.95 | intron | THOP1 | U |
| 3138 | chr14 | 93410391 | 93410462 | Heart Cardiomyocytes | 0.06 | 0.94 | intron | ITPK1 | U |
| 3139 | chr12 | 1752352 | 1752720 | Heart Cardiomyocytes | 0.06 | 0.94 | intron | WNT5B | U |
| 3140 | chr12 | 113712523 | 113712921 | Heart Cardiomyocytes | 0.06 | 0.93 | intron | TPCN1 | U |
| 3141 | chr5 | 31957413 | 31957569 | Heart Cardiomyocytes | 0.05 | 0.92 | intron | PDZD2 | U |
| 3142 | chr1 | 861573173 | 86157429 | Heart Cardiomyocytes | 0.07 | 0.93 | intron | ZNHIT6 | U |
| 3143 | chr15 | 91462055 | 91462511 | Heart Cardiomyocytes | 0.05 | 0.91 | exon | MAN2A2 | U |
| 3144 | chr2 | 39480266 | 39480431 | Heart Cardiomyocytes | 0.1 | 0.95 | intron | MAP4K3 | U |
| 3145 | chr1 | 11906187 | 11906623 | Heart Cardiomyocytes | 0.08 | 0.92 | intron | NPPA | U |
| 3146 | chr12 | 898153481 | 89815641 | Heart Cardiomyocytes | 0.1 | 0.92 | exon | POC1B | U |
| 3147 | chr10 | 71091101 | 71091451 | Heart Cardiomyocytes | 0.13 | 0.94 | intron | HK1 | U |
| 3148 | chr5 | 11175520 | 11175620 | Heart Cardiomyocytes | 0.02 | 0.93 | intron | CTNND2 | U |
| 3149 | chr11 | 11324205 | 11324346 | Heart Cardiomyocytes | 0.04 | 0.95 | intron | GALNT18 | U |
| 3150 | chr8 | 28853345 | 28853580 | Heart Cardiomyocytes | 0.04 | 0.95 | intron | HMBOX1 | U |
| 3151 | chr2 | 10985095 | 10985195 | Heart Cardiomyocytes | 0.02 | 0.92 | Intergenic | PDIA6 | U |
| 3152 | chr6 | 118876312 | 118876516 | Heart Cardiomyocytes | 0.04 | 0.93 | intron | PLN | U |
| 3153 | chr3 | 151599078 | 151599173 | Heart Cardiomyocytes | 0.04 | 0.92 | exon | SUCNR1 | U |
| 3154 | chr7 | 151419637 | 151419798 | Heart Cardiomyocytes | 0.03 | 0.91 | intron | PRKAG2 | U |
| 3155 | chr13 | 31797516 | 31797715 | Heart Cardiomyocytes | 0.06 | 0.94 | intron | B3GALTL | U |
| 3156 | chr21 | 20435 | 29935766 | Heart Cardiomyocytes | 0.04 | 0.92 | Intergenic | INC00161 | U |
| 3157 | chr18 | 19444129 | 19444184 | Heart Cardiomyocytes | 0.09 | 0.96 | intron | MIB1 | U |
| 3158 | chr13 | 113384765 | 113384930 | Heart Cardiomyocytes | 0.05 | 0.92 | intron | ATP11A | U |
| 3159 | chr18 | 21114779 | 21114982 | Heart Cardiomyocytes | 0.06 | 0.93 | intron | NPC1 | U |
| 3160 | chr1 | 74714016 | 74714177 | Heart Cardiomyocytes | 0.04 | 0.9 | intron | TNNI3K | U |
| 3161 | chr1 | 39702578 | 39702776 | Heart Cardiomyocytes | 0.05 | 0.91 | intron | MACF1 | U |
| 3162 | chr8 | 1038790363 | 103879274 | Heart Cardiomyocytes | 0.09 | 0.95 | Intergenic | AZIN1 | U |
| 3163 | chr18 | 20780515 | 20780760 | Heart Cardiomyocytes | 0.07 | 0.93 | intron | CABLES1 | U |
| 3164 | chr21 | 36822397 | 36822539 | Heart Cardiomyocytes | 0.06 | 0.91 | intron | LOC100506403 | U |
| 3165 | chr4 | 186583258 | 186583408 | Heart Cardiomyocytes | 0.06 | 0.91 | intron | SORBS2 | U |
| 3166 | chr16 | 58137284 | 58137468 | Heart Cardiomyocytes | 0.06 | 0.91 | Intergenic | C16orf80 | U |
| 3167 | chr12 | 659008 | 659201 | Heart Cardiomyocytes | 0.07 | 0.92 | intron | B4GALNT3 | U |
| 3168 | chr11 | 11832410 | 11832720 | Heart Cardiomyocytes | 0.07 | 0.92 | Intergenic | USP47 | U |
| 3169 | chr21 | 40723800 | 40724125 | Heart Cardiomyocytes | 0.08 | 0.93 | Intergenic | HMGN1 | U |
| 3170 | chr17 | 79664393 | 79664785 | Heart Cardiomyocytes | 0.04 | 0.89 | intron | HG5 | U |
| 3171 | chr4 | 3168017 | 3168191 | Heart Cardiomyocytes | 0.07 | 0.91 | intron | HTT | U |
| 3172 | chr16 | 31905880 | 31906152 | Heart Cardiomyocytes | 0.12 | 0.96 | intron | ZNF267 | U |
| 3173 | chr2 | 220494796 | 220495131 | Heart Cardiomyocytes | 0.06 | 0.9 | exon | SLC4A3 | U |
| 3174 | chr1 | 197611724 | 197612100 | Heart Cardiomyocytes | 0.07 | 0.91 | exor | DENND1B | U |
| 3175 | chr11 | 724038121 | 72404276 | Heart Cardiomyocytes | 0.06 | 0.9 | intron | ARAP1 | U |
| 3176 | chr6 | 40900691 | 40901188 | Heart Cardiomyocytes | 0.1 | 0.94 | Intergenic | UNC5CL | U |
| 3177 | chr6 | 42840212 | 42840268 | Heart Cardiomyocytes | 0.06 | 0.89 | Intergenic | RPL7L1 | U |
| 3178 | chr19 | 4891305 | 4891425 | Heart Cardiomyocytes | 0.06 | 0.89 | exon | ARRDC5 | U |
| 3179 | chr17 | 1406919 | 1407097 | Heart Cardiomyocytes | 0.08 | 0.91 | intron | INPP5K | U |
| 3180 | chr2 | 220495885 | 220496083 | Heart Cardiomyocytes | 0.08 | 0.91 | intron | SLC4A3 | U |
| 3181 | chr16 | 12221232 | 12221440 | Heart Cardiomyocytes | 0.11 | 0.94 | intron | SNX29 | U |
| 3182 | chr12 | 133317312 | 133317534 | Heart Cardiomyocytes | 0.03 | 0.86 | intron | ANKLE2 | U |
| 3183 | chr12 | 110725576 | 110725808 | Heart Cardiomyocytes | 0.08 | 0.91 | intron | ATP2A2 | U |
| 3184 | chr10 | 855884 | 856183 | Heart Cardiomyocytes | 0.06 | 0.89 | exon | LARP4B | U |
| 3185 | chr20 | 62894192 | 62894503 | Heart Cardiomyocytes | 0.11 | 0.94 | intron | PCMTD2 | U |
| 3186 | chr2 | 220500101 | 220500162 | Heart Cardiomyocytes | 0.12 | 0.94 | exon | SLC4A3 | U |
| 3187 | chr1 | 1560960 | 1561055 | Heart Cardiomyocytes | 0.13 | 0.95 | exon | MIB2 | U |
| 3188 | chr17 | 78862340 | 78862556 | Heart Cardiomyocytes | 0.1 | 0.92 | intron | RPTOR | U |
| 3189 | chr19 | 3965028 | 3965381 | Heart Cardiomyocytes | 0.09 | 0.91 | intron | DAPK3 | U |
| 3190 | chr22 | 47368954 | 47369344 | Heart Cardiomyocytes | 0.12 | 0.94 | intron | TBC1D22A | U |
| 3191 | chr1 | 12060489 | 12060716 | Heart Cardiomyocytes | 0.09 | 0.9 | intron | MFN2 | U |
| 3192 | chr17 | 45290345 | 45290640 | Heart Cardiomyocytes | 0.04 | 0.85 | intron | MYL4 | U |
| 3193 | chr15 | 29067052 | 29067437 | Heart Cardiomyocytes | 0.1 | 0.91 | intron | LOC646278 | U |
| 3194 | chr2 | 106053411 | 106053890 | Heart Cardiomyocytes | 0.08 | 0.89 | intron | FHL2 | U |
| 3195 | chr15 | 44166456 | 44166646 | Heart Cardiomyocytes | 0.14 | 0.94 | exon, TTS | FRMD5, PIN4P1 | U |
| 3196 | chr11 | 47371760 | 47371967 | Heart Cardiomyocytes | 0.14 | 0.94 | intron | MYBPC3 | U |
| 3197 | chr16 | 46780409 | 46780657 | Heart Cardiomyocytes | 0.05 | 0.85 | intron | MYLK3 | U |
| 3198 | chr11 | 47371313 | 47371620 | Heart Cardiomyocytes | 0.11 | 0.91 | exon | MYBPC3 | U |
| 3199 | chr16 | 79577110 | 79577439 | Heart Cardiomyocytes | 0.13 | 0.93 | Intergenic | MAF | U |
| 3200 | chr5 | 134686461 | 134686575 | Heart Cardiomyocytes | 0.15 | 0.94 | intron | H2AFY | U |
| 3201 | chr7 | 1880766 | 1880997 | Heart Cardiomyocytes | 0.15 | 0.94 | intron | MAD1L1 | U |
| 3202 | chr6 | 158320269 | 158320580 | Heart Cardiomyocytes | 0.12 | 0.91 | intron | SNX9 | U |
| 3203 | chr3 | 1232125681 | 123213047 | Heart Cardiomyocytes | 0.12 | 0.91 | TTS | PTPLB | U |
| 3204 | chr2 | 175827352 | 175827495 | Heart Cardiomyocytes | 0.1 | 0.88 | intron | CHN1 | U |
| 3205 | chr4 | 8374310 | 8374401 | Heart Cardiomyocytes | 0.11 | 0.88 | intron | ACOX3 | U |
| 3206 | chr3 | 58271022 | 58271200 | Heart Cardiomyocytes | 0.14 | 0.91 | intron | ABHD6 | U |
| 3207 | chr7 | 101662149 | 101662341 | Heart Cardiomyocytes | 0.16 | 0.93 | intron | CUX1 | U |
| 3208 | chr1 | 1164854 | 1165302 | Heart Cardiomyocytes | 0.14 | 0.91 | intron | SDF4 | U |
| 3209 | chr4 | 16704723 | 1670607 | Heart Cardiomyocytes | 0.15 | 0.9 | exon | FAM53A | U |
| 3210 | chr20 | 2126781 | 2127210 | Heart Cardiomyocytes | 0.15 | 0.9 | exon | STK35 | U |
| 3211 | chr12 | 65076064 | 65076220 | Heart Cardiomyocytes | 0.2 | 0.94 | intron | RASSF3 | U |
| 3212 | chr2 | 134867260 | 134867447 | Heart Cardiomyocytes | 0.22 | 0.96 | Intergenic | MIR3679 | U |
| 3213 | chr9 | 135195492 | 135195734 | Heart Cardiomyocytes | 0.22 | 0.96 | intron | SETX | U |
| 3214 | chr3 | 176989876 | 176990343 | Heart Cardiomyocytes | 0.2 | 0.94 | Intergenic | TBL1XR1 | U |
| 3215 | chr20 | 2123464 | 2123709 | Heart Cardiomyocytes | 0.2 | 0.93 | intron | STK35 | U |
| 3216 | chr12 | 133323784 | 133324163 | Heart Cardiomyocytes | 0.19 | 0.92 | intron | ANKLE2 | U |
| 3217 | chr11 | 2756110 | 2756326 | Heart Cardiomyocytes | 0.22 | 0.94 | intron | KCNQ1 | U |
| 3218 | chr17 | 78937940 | 78938224 | Heart Cardiomyocytes | 0.21 | 0.93 | intron, exon | RPTOR, RPTOR | U |
| 3219 | chr10 | 103727302 | 103727510 | Heart Cardiomyocytes | 0.22 | 0.93 | intron | C10orf76 | U |
| 3220 | chr2 | 100037591 | 100037819 | Heart Cardiomyocytes | 0.23 | 0.94 | intron | REV1 | U |
| 3221 | chr20 | 559823433 | 55982767 | Heart Cardiomyocytes | 0.25 | 0.94 | intron | RBM38 | U |
| 3222 | chr16 | 88019671 | 88020080 | Heart Cardiomyocytes | 0.22 | 0.9 | intron | BANP | U |
| 3223 | chr16 | 87432441 | 87432679 | Heart Cardiomyocytes | 0.29 | 0.93 | exon, intron | MAP1LC3B, MAP1LC3 [symbol] | U |
| 3224 | chr14 | 316422483 | 31642460 | Heart Cardiomyocytes | 0.06 | 0.97 | intron | HECTD1 | U |
| 3225 | chr14 | 238749903 | 23875361 | Heart Cardiomyocytes | 0.03 | 0.92 | intron | MYH6 | U |
| 3226 | chr1 | 230978623 | 230978905 | Heart Cardiomyocytes | 0.06 | 0.93 | exon, intron | C1orf198 | U |
| 3227 | chr11 | 68550868 | 68551336 | Heart Cardiomyocytes | 0.07 | 0.93 | intron | CPT1A | U |
| 3228 | chr22 | 198582221 | 19858452 | Heart Cardiomyocytes | 0.09 | 0.92 | Intergenic | GNB1L | U |
| 3229 | chr22 | 42042134 | 42042506 | Heart Cardiomyocytes | 0.11 | 0.93 | intron | XRCC6 | U |
| 3230 | chr11 | 68550315 | 68550775 | Heart Cardiomyocytes | 0.13 | 0.95 | intron | CPT1A | U |
| 3231 | chr13 | 1133836121 | 113383835 | Heart Cardiomyocytes | 0.03 | 0.92 | intron | ATP11A | U |
| 3232 | chr6 | 504028 | 504466 | Heart Cardiomyocytes | 0.07 | 0.95 | intron | EXOC2 | U |
| 3233 | chr22 | 283744971 | 28374626 | Heart Cardiomyocytes | 0.07 | 0.93 | exon | TTC28 | U |
| 3234 | chr14 | 52477280 | 52477727 | Heart Cardiomyocytes | 0.07 | 0.93 | intron | NID2 | U |
| 3235 | chr17 | 1792185 | 1792459 | Heart Cardiomyocytes | 0.07 | 0.92 | intron | RPA1 | U |
| 3236 | chr16 | 467817303 | 46782205 | Heart Cardiomyocytes | 0.05 | 0.9 | exon, intron | MYLK3, MYLK3 | U |
| 3237 | chr11 | 16877102 | 16877459 | Heart Cardiomyocytes | 0.13 | 0.94 | intron | PLEKHA7 | U |
| 3238 | chr22 | 22053867 | 22053901 | Heart Cardiomyocytes | 0.08 | 0.91 | exon | YPEL1 | U |
| 3239 | chr2 | 220508803 | 220509002 | Heart Cardiomyocytes | 0.07 | 0.89 | Intergenic | SLC4A3 | U |
| 3240 | chr13 | 1133833241 | 113383529 | Heart Cardiomyocytes | 0.1 | 0.92 | intron | ATP11A | U |
| 3241 | chr14 | 742978011 | 74298075 | Heart Cardiomyocytes | 0.12 | 0.94 | Intergenic | PTGR2 | U |
| 3242 | chr10 | 13735916 | 13736208 | Heart Cardiomyocytes | 0.1 | 0.92 | exon | ERMD4A | U |
| 3243 | chr2a | 47570179 | 47570512 | Heart Cardiomyocytes | 0.08 | 0.9 | intron | ARFGEF2 | U |
| 3244 | chr1 | 164810236 | 164810341 | Heart Cardiomyocytes | 0.13 | 0.94 | intron | PBX1 | U |
| 3245 | chr16 | 46781221 | 46781714 | Heart Cardiomyocytes | 0.05 | 0.86 | intron | MYLK3 | U |
| 3246 | chr1 | 1499885 | 1500143 | Heart Cardiomyocytes | 0.11 | 0.91 | intron | SSU72 | U |
| 3247 | chr21 | 432715121 | 43271686 | Heart Cardiomyocytes | 0.17 | 0.95 | intron | PRDM15 | U |
| 3248 | chr14 | 238660213 | 23866412 | Heart Cardiomyocytes | 0.13 | 0.91 | exon | MYHE | U |
| 3249 | chr22 | 42056809 | 42057295 | Heart Cardiomyocytes | 0.16 | 0.94 | intron | XRCC6 | U |
| 3250 | chr10 | 11505339 | 11505563 | Heart Cardiomyocytes | 0.21 | 0.95 | exon | USP6NL | U |
| 3251 | chr6 | 158094254 | 158094625 | Heart Cardiomyocytes | 0.25 | 0.93 | exon | ZDHHC14 | U |
| 3252 | chr11 | 47367776 | 47367872 | Heart Cardiomyocytes | 0.25 | 0.92 | intron | MYBPC3 | U |
| 3253 | chr8 | 141570717 | 141570984 | Heart Cardiomyocytes | 0.28 | 0.92 | intron | AGO2 | U |
| 3254 | chr9 | 134136258 | 134136566 | Heart Cardiomyocytes | 0.3 | 0.93 | exon | FAM7BA | U |
| 3255 | chr2 | 132249139 | 132249263 | Heart Cardiomyocytes | 0.86 | 0.14 | promoter-TSS | MIR4784 | M |
| 3256 | chr3 | 138892681 | 138892934 | Heart Cardiomyocytes | 0.81 | 0.09 | Intergenic | PISRT1 | M |
| 3257 | chr9 | 139636512 | 139636807 | Heart Cardiomyocytes | 0.85 | 0.15 | intron | LCN10 | M |
| 3258 | chr13 | 74862518 | 74862769 | Heart Cardiomyocytes | 0.78 | 0.09 | Intergenic | LINC00381 | M |
| 3259 | chr10 | 98869374 | 98869555 | Heart Cardiomyocytes | 0.88 | 0.2 | intron | SLIT1 | M |
| 3260 | chr13 | 1083738773 | 108374053 | Heart Cardiomyocytes | 0.81 | 0.16 | intron | FAM155A | M |
| 3261 | chr9 | 118915832 | 118916305 | Heart Cardiomyocytes | 0.71 | 0.08 | promoter-TSS, intron | PAPPA, PAPPA | M |
| 3262 | chr16 | 79320968 | 79321297 | Heart Cardiomyocytes | 0.65 | 0.06 | Intergenic | MAF | M |
| 3263 | chr14 | 94405462 | 94405535 | Heart Cardiomyocytes | 0.74 | 0.18 | exon | ASB2 | M |
| 3264 | chr5 | 99606013 | 99606312 | Heart Cardiomyocytes | 0.62 | 0.06 | Intergenic | LOC100133050 | M |
| 3265 | chr15 | 68870038 | 68870242 | Heart Cardiomyocytes | 0.54 | 0.07 | Intergenic | CORO28 | M |
| 3266 | chr22 | 45016649 | 45016747 | Heart Cardiomyocytes | 0.57 | 0.12 | intron | LINC00229 | M |
| 3267 | chr16 | 4010758 | 4011162 | Heart Cardiomyocytes | 0.77 | 0.09 | Intergenic | CREBBP | M |
| 3268 | chr13 | 35324583 | 35324774 | Heart Cardiomyocytes | 0.78 | 0.06 | Intergenic | LINC00457 | M |
| 3269 | chr9 | 821886453 | 82188827 | Heart Cardiomyocytes | 0.77 | 0.07 | intron | TLE4 | M |
| 3270 | chr11 | 3877391 | 3877608 | Heart Cardiomyocytes | 0.7 | 0.02 | promoter-TSS, TTS | STIM1, MIR4687 | M |
| 3271 | chr14 | 76795912 | 76796254 | Heart Cardiomyocytes | 0.76 | 0.1 | Intergenic | ESRRB | M |
| 3272 | chr11 | 125133120 | 125133568 | Heart Cardiomyocytes | 0.7 | 0.08 | intron | PKNOX2 | M |
| 3273 | chr6 | 12638413 | 12638585 | Heart Cardiomyocytes | 0.66 | 0.06 | Intergenic | PHACTR1 | M |
| 3274 | chr1 | 157090576 | 167090692 | Heart Cardiomyocytes | 0.67 | 0.08 | intron | DUSP27 | M |
| 3275 | chr17 | 45331940 | 45332089 | Heart Cardiomyocytes | 0.67 | 0.1 | intron | ITGB3 | M |
| 3276 | chr6 | 53517075 | 53517166 | Heart Cardiomyocytes | 0.57 | 0.04 | exon, intron | KLHL31, KLHL31 | M |
| 3277 | chr8 | 23560853 | 23561134 | Heart Cardiomyocytes | 0.61 | 0.08 | intron | NKX2-6 | M |
| 3278 | chr11 | 47587672 | 47587766 | Heart Cardiomyocytes | 0.55 | 0.04 | exon | PTPMT1 | M |
| 3279 | chr18 | 45934528 | 45934700 | Heart Cardiomyocytes | 0.55 | 0.08 | Intergenic | CTIF | M |
| 3280 | chr2 | 236526611 | 236526801 | Heart Fibroblasts | 0.04 | 0.92 | intron | AGAP1 | U |
| 3281 | chr1 | 20355843 | 20355899 | Heart Fibroblasts | 0.05 | 0.92 | Intergenic | PLA2G5 | U |
| 3282 | chr16 | 79173770 | 79174090 | Heart Fibroblasts | 0.08 | 0.92 | intron | WWOX | U |
| 3283 | chr17 | 10810563 | 10810873 | Heart Fibroblasts | 0.08 | 0.89 | Intergenic | PIRT | U |
| 3284 | chr16 | 55010895 | 55010996 | Heart Fibroblasts | 0.11 | 0.91 | Intergenic | IRX5 | U |
| 3285 | chr16 | 79174152 | 79174282 | Heart Fibroblasts | 0.12 | 0.92 | intron | WWOX | U |
| 3286 | chr13 | 47760131 | 47760254 | Heart Fibroblasts | 0.05 | 0.85 | Intergenic | HTR2A | U |
| 3287 | chr21 | 41033887 | 41034082 | Heart Fibroblasts | 0.15 | 0.93 | exon | B3GALT5 | U |
| 3288 | chr8 | 49110226 | 49110401 | Heart Fibroblasts | 0.07 | 0.83 | Intergenic | UBE2V2 | U |
| 3289 | chr7 | 104544631 | 104544863 | Heart Fibroblasts | 0.09 | 0.85 | intron | LHFPL3-AS2 | U |
| 3290 | chr8 | 13295679 | 13295959 | Heart Fibroblasts | 0.09 | 0.84 | intron | DLC1 | U |
| 3291 | chr15 | 45622883 | 45623238 | Heart Fibroblasts | 0.16 | 0.91 | Intergenic | GATM-AS1 | U |
| 3292 | chr3 | 64580263 | 64580714 | Heart Fibroblasts | 0.16 | 0.9 | exor | ADAMTS9 | U |
| 3293 | chr13 | 38955429 | 38955900 | Heart Fibroblasts | 0.1 | 0.83 | Intergenic | UFM1 | U |
| 3294 | chr1 | 1982376363 | 198237873 | Heart Fibroblasts | 0.24 | 0.95 | intron | NEK7 | U |
| 3295 | chr18 | 32893374 | 32893832 | Heart Fibroblasts | 0.22 | 0.92 | Intergenic | ZNF271 | U |
| 3296 | chr6 | 169497716 | 169498021 | Heart Fibroblasts | 0.13 | 0.82 | Intergenic | THBS2 | U |
| 3297 | chr8 | 25626261 | 25626364 | Heart Fibroblasts | 0.23 | 0.91 | Intergenic | EBF2 | U |
| 3298 | chr7 | 35569892 | 35570085 | Heart Fibroblasts | 0.24 | 0.91 | Intergenic | HERPUD2 | U |
| 3299 | chr16 | 940791 | 941094 | Heart Fibroblasts | 0.22 | 0.88 | intron | LMF1 | U |
| 3300 | chr19 | 3012448 | 3012864 | Heart Fibroblasts | 0.25 | 0.9 | intron | TLE2 | U |
| 3301 | chr6 | 169568431 | 169568565 | Heart Fibroblasts | 0.01 | 0.93 | Intergenic | THBS2 | U |
| 3302 | chr6 | 169568591 | 169568771 | Heart Fibroblasts | 0.01 | 0.88 | Intergenic | THBS2 | U |
| 3303 | chr21 | 27223171 | 27223269 | Heart Fibroblasts | 0.07 | 0.91 | Intergenic | ATP5J | U |
| 3304 | chr13 | 23013641 | 23013942 | Heart Fibroblasts | 0.08 | 0.89 | Intergenic | BASP1P1 | U |
| 3305 | chr9 | 136576958 | 136577013 | Heart Fibroblasts | 0.08 | 0.88 | intron | SARDH | U |
| 3306 | chr5 | 147854029 | 147854191 | Heart Fibroblasts | 0.08 | 0.88 | intron | HTR4 | U |
| 3307 | chr17 | 34278491 | 34278667 | Heart Fibroblasts | 0.1 | 0.9 | Intergenic | LYZL6 | U |
| 3308 | chr9 | 136576746 | 136576932 | Heart Fibroblasts | 0.08 | 0.88 | intron | SARDH | U |
| 3309 | chr5 | 160367907 | 160368132 | Heart Fibroblasts | 0.1 | 0.9 | Intergenic | LOC285629 | U |
| 3310 | chr1 | 12726365 | 12726621 | Heart Fibroblasts | 0.07 | 0.87 | exor | AADACL4 | U |
| 3311 | chr3 | 176304417 | 176304807 | Heart Fibroblasts | 0.07 | 0.87 | Intergenic | FBL1XR1 | U |
| 3312 | chr4 | 144518334 | 144518488 | Heart Fibroblasts | 0.08 | 0.87 | intron | FREM3 | U |
| 3313 | chr11 | 75984963 | 75985221 | Heart Fibroblasts | 0.1 | 0.88 | Intergenic | WNT11 | U |
| 3314 | chr10 | 100600096 | 100600434 | Heart Fibroblasts | 0.06 | 0.84 | intron | HPSE2 | U |
| 3315 | chr10 | 14745177 | 14745626 | Heart Fibroblasts | 0.14 | 0.92 | intron | FAM107B | U |
| 3316 | chr15 | 479332631 | 47933342 | Heart Fibroblasts | 0.09 | 0.86 | intron | SEMA6D | U |
| 3317 | chr4 | 25067589 | 25068017 | Heart Fibroblasts | 0.12 | 0.89 | Intergenic | LGI2 | U |
| 3318 | chr5 | 8232971 | 8233136 | Heart Fibroblasts | 0.07 | 0.83 | Intergenic | LOC729506 | U |
| 3319 | chr12 | 104750545 | 104750720 | Heart Fibroblasts | 0.14 | 0.9 | Intergenic | EID3 | U |
| 3320 | chr2 | 236845416 | 236845766 | Heart Fibroblasts | 0.12 | 0.88 | intron | AGAP1 | U |
| 3321 | chr10 | 108807125 | 108807567 | Heart Fibroblasts | 0.1 | 0.86 | intron | GORCS1 | U |
| 3322 | chr2 | 33461893 | 33462341 | Heart Fibroblasts | 0.11 | 0.87 | intron | LTBP1 | U |
| 3323 | chr2 | 3045032 | 3045115 | Heart Fibroblasts | 0.14 | 0.89 | Intergenic | TSSC1 | U |
| 3324 | chr2 | 129096704 | 129096789 | Heart Fibroblasts | 0.14 | 0.89 | Intergenic | HS6ST1 | U |
| 3325 | chr5 | 141683140 | 141683245 | Heart Fibroblasts | 0.13 | 0.87 | Intergenic | SPRY4 | U |
| 3326 | chr10 | 36381288 | 36381412 | Heart Fibroblasts | 0.17 | 0.91 | Intergenic | FZD8 | U |
| 3327 | chr6 | 159807233 | 159807380 | Heart Fibroblasts | 0.15 | 0.89 | Intergenic | FNDC1 | U |
| 3328 | chr16 | 72939959 | 72940108 | Heart Fibroblasts | 0.2 | 0.94 | intron | ZFHX3 | U |
| 3329 | chr10 | 102188822 | 102189059 | Heart Fibroblasts | 0.11 | 0.85 | Intergenic | WNT8B | U |
| 3330 | chr9 | 136577116 | 136577416 | Heart Fibroblasts | 0.09 | 0.83 | intron | SARDH | U |
| 3331 | chr1 | 61898568 | 61898890 | Heart Fibroblasts | 0.14 | 0.88 | intron | NFIA | U |
| 3332 | chr13 | 26556444 | 26556812 | Heart Fibroblasts | 0.1 | 0.84 | intron | ATP8A2 | U |
| 3333 | chr7 | 4038381 | 4038774 | Heart Fibroblasts | 0.19 | 0.93 | intron | SDK1 | U |
| 3334 | chr21 | 28838198 | 28838475 | Heart Fibroblasts | 0.16 | 0.89 | intron | MIR5009 | U |
| 3335 | chr3 | 108214631 | 108214942 | Heart Fibroblasts | 0.11 | 0.84 | intron | MYH15 | U |
| 3336 | chr2 | 204891253 | 204891624 | Heart Fibroblasts | 0.16 | 0.88 | Intergenic | ICOS | U |
| 3337 | chr14 | 80778042 | 80778428 | Heart Fibroblasts | 0.14 | 0.86 | intron | DIO2-AS1 | U |
| 3338 | chr17 | 70290476 | 70290970 | Heart Fibroblasts | 0.16 | 0.88 | Intergenic | SOX9 | U |
| 3339 | chr5 | 40914883 | 40915035 | Heart Fibroblasts | 0.17 | 0.88 | intron | C7 | U |
| 3340 | chr17 | 4510524 | 4510598 | Heart Fibroblasts | 0.2 | 0.9 | intron | SMTNL2 | U |
| 3341 | chr6 | 160683680 | 160683829 | Heart Fibroblasts | 0.14 | 0.84 | Intergenic | SLC22A2 | U |
| 3342 | chr7 | 70096458 | 70096640 | Heart Fibroblasts | 0.16 | 0.86 | intron | AUTS2 | U |
| 3343 | chr18 | 49667627 | 49667813 | Heart Fibroblasts | 0.15 | 0.85 | Intergenic | DCC | U |
| 3344 | chr4 | 184849937 | 184850214 | Heart Fibroblasts | 0.23 | 0.93 | intron | STOX2 | U |
| 3345 | chr17 | 3671806 | 3671944 | Heart Fibroblasts | 0.22 | 0.91 | intron | ITGAE | U |
| 3346 | chr10 | 34336290 | 34336713 | Heart Fibroblasts | 0.21 | 0.9 | Intergenic | LINC00838 | U |
| 3347 | chr5 | 81158936 | 81159388 | Heart Fibroblasts | 0.19 | 0.88 | Intergenic | BCKDHB | U |
| 3348 | chr5 | 17781368 | 177813727 | Heart Fibroblasts | 0.19 | 0.87 | intron | COL23A1 | U |
| 3349 | chr2 | 237572975 | 237573156 | Heart Fibroblasts | 0.2 | 0.88 | Intergenic | CXCR7 | U |
| 3350 | chr12 | 15236157 | 15236350 | Heart Fibroblasts | 0.16 | 0.84 | Intergenic | PDE6H | U |
| 3351 | chr7 | 94647863 | 94648116 | Heart Fibroblasts | 0.23 | 0.91 | intron | PPP1R9A | U |
| 3352 | chr10 | 60697460 | 60697760 | Heart Fibroblasts | 0.14 | 0.82 | Intergenic | FAM133CP | U |
| 3353 | chr18 | 19996170 | 19996646 | Heart Fibroblasts | 0.21 | 0.89 | exon | CTAGE1 | U |
| 3354 | chrX | 1181626353 | 118162689 | Heart Fibroblasts | 0.14 | 0.81 | Intergenic | LONRF3 | U |
| 3355 | chr8 | 1318016 | 1318077 | Heart Fibroblasts | 0.21 | 0.88 | Intergenic | LOC286083 | U |
| 3356 | chr1 | 2351586963 | 235158809 | Heart Fibroblasts | 0.21 | 0.88 | Intergenic | SNORA14B | U |
| 3357 | chr4 | 4341969 | 4342235 | Heart Fibroblasts | 0.13 | 0.8 | Intergenic | NSG1 | U |
| 3358 | chr21 | 47349563 | 47349788 | Heart Fibroblasts | 0.26 | 0.92 | intron | PCBP3 | U |
| 3359 | chr6 | 126381299 | 126381737 | Heart Fibroblasts | 0.25 | 0.91 | Intergenic | MIR5695 | U |
| 3360 | chr3 | 99359629 | 99360088 | Heart Fibroblasts | 0.22 | 0.88 | intron | COL8A1 | U |
| 3361 | chr11 | 2001208 | 2001355 | Heart Fibroblasts | 0.25 | 0.9 | Intergenic | MRPL23-AS1 | U |
| 3362 | chr17 | 74365585 | 74365762 | Heart Fibroblasts | 0.24 | 0.89 | Intergenic | SPHK1 | U |
| 3363 | chr2 | 107345065 | 107345421 | Heart Fibroblasts | 0.23 | 0.88 | Intergenic | ST6GAL2 | U |
| 3364 | chr11 | 78509223 | 78509392 | Heart Fibroblasts | 0.23 | 0.87 | intron | TENM4 | U |
| 3365 | chr10 | 45589779 | 45590124 | Heart Fibroblasts | 0.24 | 0.88 | Intergenic | RSU1P2 | U |
| 3366 | chr7 | 105659527 | 105659911 | Heart Fibroblasts | 0.25 | 0.89 | intron | CDHR3 | U |
| 3367 | chr17 | 67893232 | 67893395 | Heart Fibroblasts | 0.25 | 0.88 | Intergenic | KCNJ16 | U |
| 3368 | chr4 | 79038448 | 79038812 | Heart Fibroblasts | 0.26 | 0.89 | intron | FRAS1 | U |
| 3369 | chr2 | 66529058 | 66529160 | Heart Fibroblasts | 0.3 | 0.92 | Intergenic | MIR4778 | U |
| 3370 | chr17 | 2885214 | 2885369 | Heart Fibroblasts | 0.29 | 0.91 | intron | RAP1GAP2 | U |
| 3371 | chr11 | 120701316 | 120701516 | Heart Fibroblasts | 0.23 | 0.85 | intron | GRIKA | U |
| 3372 | chr5 | 142481323 | 142481751 | Heart Fibroblasts | 0.25 | 0.87 | intron | ARHGAP26 | U |
| 3373 | chr6 | 145357601 | 145358045 | Heart Fibroblasts | 0.26 | 0.88 | Intergenic | LOC100507557 | U |
| 3374 | chr2 | 2060527743 | 206053228 | Heart Fibroblasts | 0.29 | 0.91 | intron | PARD38 | U |
| 3375 | chr12 | 104750358 | 104750482 | Heart Fibroblasts | 0.22 | 0.83 | Intergenic | EID3 | U |
| 3376 | chr12 | 114652758 | 114652961 | Heart Fibroblasts | 0.22 | 0.83 | Intergenic | TBX5 | U |
| 3377 | chr16 | 11760791 | 11761065 | Heart Fibroblasts | 0.23 | 0.84 | Intergenic | SNN | U |
| 3378 | chr3 | 150124366 | 150124717 | Heart Fibroblasts | 0.26 | 0.87 | Intergenic | TSC22D2 | U |
| 3379 | chr11 | 1180410691 | 118041476 | Heart Fibroblasts | 0.23 | 0.84 | intron | SCN2B | U |
| 3380 | chr7 | 414870911 | 41487178 | Heart Fibroblasts | 0.32 | 0.92 | Intergenic | INHBA-AS1 | U |
| 3381 | chr21 | 44566045 | 44566149 | Heart Fibroblasts | 0.29 | 0.89 | Intergenic | CRYAA | U |
| 3382 | chr1 | 92055516 | 92055639 | Heart Fibroblasts | 0.26 | 0.86 | Intergenic | CDC7 | U |
| 3383 | chr2 | 1742576231 | 174257782 | Heart Fibroblasts | 0.24 | 0.83 | Intergenic | CDCA7 | U |
| 3384 | chr21 | 37819075 | 37819258 | Heart Fibroblasts | 0.32 | 0.91 | Intergenic | CLDN14 | U |
| 3385 | chr5 | 177955938 | 177956081 | Heart Fibroblasts | 0.28 | 0.86 | intron | COL23A1 | U |
| 3386 | chr2 | 42140447 | 42140683 | Heart Fibroblasts | 0.3 | 0.88 | Intergenic | LOC388942 | U |
| 3387 | chr12 | 111183872 | 111184194 | Heart Fibroblasts | 0.33 | 0.91 | Intergenic | PPPICC | U |
| 3388 | chr11 | 126187044 | 126187158 | Heart Fibroblasts | 0.36 | 0.93 | intron | DCPS | U |
| 3389 | chr4 | 156416292 | 156416774 | Heart Fibroblasts | 0.3 | 0.87 | Intergenic | MAP9 | U |
| 3390 | chr10 | 30547931 | 30548270 | Heart Fibroblasts | 0.28 | 0.84 | Intergenic | MTPAP | U |
| 3391 | chr1 | 7009315 | 7009624 | Heart Fibroblasts | 0.3 | 0.85 | intron | CAMTA1 | U |
| 3392 | chr18 | 2327465 | 2327567 | Heart Fibroblasts | 0.37 | 0.91 | Intergenic | METTL4 | U |
| 3393 | chr13 | 109637815 | 109638067 | Heart Fibroblasts | 0.38 | 0.92 | intron | MYO16 | U |
| 3394 | chr19 | 556387543 | 55638994 | Heart Fibroblasts | 0.35 | 0.88 | Intergenic | PPP1R12C | U |
| 3395 | chr20 | 54316572 | 54316673 | Heart Fibroblasts | 0.19 | 0.9 | Intergenic | CBLN4 | U |
| 3396 | chr3 | 89620409 | 89620655 | Heart Fibroblasts | 0.2 | 0.83 | Intergenic | EPHA3 | U |
| 3397 | chr6 | 1695677771 | 169567965 | Heart Fibroblasts | 0.05 | 0.9 | Intergenic | THBS2 | U |
| 3398 | chr8 | 140847540 | 140847721 | Heart Fibroblasts | 0.09 | 0.93 | intron | TRAPPC9 | U |
| 3399 | chr6 | 1695688593 | 169569139 | Heart Fibroblasts | 0.06 | 0.89 | Intergenic | THBS2 | U |
| 3400 | chr20 | 11969797 | 11969965 | Heart Fibroblasts | 0.11 | 0.91 | Intergenic | BTBD3 | U |
| 3401 | chr5 | 177793999 | 177794281 | Heart Fibroblasts | 0.03 | 0.89 | intron | COL23A1 | U |
| 3402 | chr14 | 35727869 | 35728029 | Heart Fibroblasts | 0.06 | 0.86 | intron | KIAA0391 | U |
| 3403 | chr9 | 78903902 | 78904297 | Heart Fibroblasts | 0.18 | 0.91 | intron | PCSK5 | U |
| 3404 | chr7 | 140267969 | 140268338 | Heart Fibroblasts | 0.15 | 0.87 | intron | DENND2A | U |
| 3405 | chr12 | 133008884 | 133009120 | Heart Fibroblasts | 0.2 | 0.89 | Intergenic | FBRSLJ | U |
| 3406 | chr6 | 14328472 | 14328888 | Heart Fibroblasts | 0.18 | 0.87 | Intergenic | CD83 | U |
| 3407 | chr5 | 172704461 | 172704671 | Heart Fibroblasts | 0.21 | 0.84 | Intergenic | NKX2-5 | U |
| 3408 | chr12 | 1148363683 | 114836517 | Heart Fibroblasts | 0.92 | 0.16 | exon | TBX5 | M |
| 3409 | chr12 | 114836605 | 114836934 | Heart Fibroblasts | 0.91 | 0.15 | intron | TBX5 | M |
| 3410 | chr12 | 1148524423 | 114852769 | Heart Fibroblasts | 0.85 | 0.15 | Intergenic | TBX5-AS1 | M |
| 3411 | chr4 | 549680453 | 54968482 | Heart Fibroblasts | 0.84 | 0.16 | TTS | GSX2 | M |
| 3412 | chr11 | 32459877 | 32460164 | Heart Fibroblasts | 0.62 | 0.1 | exon | WT1-AS | M |
| 3413 | chr7 | 32109909 | 32110030 | Heart Fibroblasts | 0.63 | 0.12 | exon | PDE1C | M |
| 3414 | chr6 | 85480636 | 85481113 | Heart Fibroblasts | 0.64 | 0.16 | Intergenic | TBX18 | M |
| 3415 | chr11 | 32449725 | 32449861 | Heart Fibroblasts | 0.9 | 0.14 | intron | WT1 | M |
| 3416 | chr11 | 32450215 | 32450498 | Heart Fibroblasts | 0.8 | 0.12 | intron | WT1 | M |
| 3417 | chr1 | 119527415 | 119527583 | Heart Fibroblasts | 0.84 | 0.1 | intron | TBX15 | M |
| 3418 | chr8 | 259070763 | 25907377 | Heart Fibroblasts | 0.85 | 0.12 | Intergenic | BF2 | M |
| 3419 | chr1 | 119527674 | 119527790 | Heart Fibroblasts | 0.83 | 0.11 | intron | TBX15 | M |
| 3420 | chr1 | 119531998 | 119532085 | Heart Fibroblasts | 0.85 | 0.17 | exon | TBX15 | M |
| 3421 | chr6 | 85476760 | 85476892 | Heart Fibroblasts | 0.85 | 0.17 | Intergenic | TBX18 | M |
| 3422 | chr8 | 25906732 | 25906809 | Heart Fibroblasts | 0.73 | 0.1 | Intergenic | EBF2 | M |
| 3423 | chr1 | 119526837 | 119526992 | Heart Fibroblasts | 0.74 | 0.12 | intron | TBX15 | M |
| 3424 | chr4 | 174452563 | 174452691 | Heart Fibroblasts | 0.8 | 0.2 | intron | NBLA00301 | M |
| 3425 | chr1 | 119531832 | 119531951 | Heart Fibroblasts | 0.73 | 0.14 | intron | TBX15 | M |
| 3426 | chr1 | 197890565 | 197890662 | Heart Fibroblasts | 0.78 | 0.2 | exon | LHX9 | M |
| 3427 | chr1 | 119526993 | 119527410 | Heart Fibroblasts | 0.63 | 0.06 | intron | TBX15 | M |
| 3428 | chr4 | 174452381 | 174452507 | Heart Fibroblasts | 0.7 | 0.14 | intron | NBLA00301 | M |
| 3429 | chr1 | 119531625 | 119531709 | Heart Fibroblasts | 0.7 | 0.15 | intron | TBX15 | M |
| 3430 | chr1 | 119521979 | 119522426 | Heart Fibroblasts | 0.66 | 0.13 | intron | TBX15 | M |
| 3431 | chr15 | 51633704 | 51633873 | Heart Fibroblasts | 0.59 | 0.09 | promoter-TSS | GLDN | M |
| 3432 | chr4 | 1744521683 | 174452256 | Heart Fibroblasts | 0.57 | 0.13 | promoter-TSS | HAND2 | M |
| 3433 | chr5 | 760142561 | 76014547 | Vascular Endothelial cells | 0.16 | 0.88 | intron | F2R | U |
| 3434 | chr17 | 80804200 | 80804265 | Vascular Endothelial cells | 0.16 | 0.85 | intron | TBCD | U |
| 3435 | chr17 | 8214564 | 8214718 | Vascular Endothelial cells | 0.19 | 0.87 | intron | ARHGEF15 | U |
| 3436 | chr5 | 778199551 | 77820339 | Vascular Endothelial cells | 0.24 | 0.91 | intron | LHFPL2 | U |
| 3437 | chr2 | 128416959 | 128417047 | Vascular Endothelial cells | 0.27 | 0.92 | intron | LIMS2 | U |
| 3438 | chr5 | 32098278 | 32098495 | Vascular Endothelial cells | 0.28 | 0.93 | intron | PDZD2 | U |
| 3439 | chr16 | 1562267 | 1562660 | Vascular Endothelial cells | 0.21 | 0.86 | intron | IFT140 | U |
| 3440 | chr5 | 71853664 | 71853918 | Vascular Endothelial cells | 0.18 | 0.83 | Intergenic | ZNF366 | U |
| 3441 | chr19 | 11707038 | 11707246 | Vascular Endothelial cells | 0.27 | 0.91 | Intergenic, promote [symbol] | ZNF627 | U |
| 3442 | chr1 | 1853364171 | 185336695 | Vascular Endothelial cells | 0.25 | 0.89 | Intergenic | LOC100288079 | U |
| 3443 | chr20 | 3719956 | 3720042 | Vascular Endothelial cells | 0.29 | 0.92 | intron | HSPA12B | U |
| 3444 | chr11 | 65379744 | 65379962 | Vascular Endothelial cells | 0.19 | 0.81 | intron | MAP3K11 | U |
| 3445 | chr2 | 160081735 | 160082056 | Vascular Endothelial cells | 0.29 | 0.91 | intron | TANC1 | U |
| 3446 | chr6 | 113817584 | 113817951 | Vascular Endothelial cells | 0.26 | 0.88 | Intergenic | MARCKS | U |
| 3447 | chr2 | 218848041 | 218848444 | Vascular Endothelial cells | 0.29 | 0.9 | Intergenic | TNS1 | U |
| 3448 | chr12 | 50040684 | 50040779 | Vascular Endothelial cells | 0.28 | 0.89 | exon | FMNL3 | U |
| 3449 | chr14 | 104326499 | 104326617 | Vascular Endothelial cells | 0.25 | 0.86 | Intergenic | LINC00637 | U |
| 3450 | chr3 | 1293267561 | 129326961 | Vascular Endothelial cells | 0.25 | 0.86 | Intergenic | PLXND1 | U |
| 3451 | chr16 | 87213128 | 87213220 | Vascular Endothelial cells | 0.26 | 0.86 | Intergenic | C16orf95 | U |
| 3452 | chr20 | 4101440 | 4101638 | Vascular Endothelial cells | 0.27 | 0.86 | Intergenic | SMOX | U |
| 3453 | chr11 | 109900473 | 109900818 | Vascular Endothelial cells | 0.28 | 0.87 | Intergenic | ZC3H12C | U |
| 3454 | chr5 | 171707601 | 17171195 | Vascular Endothelial cells | 0.28 | 0.85 | intron | LOC285696 | U |
| 3455 | chr9 | 138903401 | 138903478 | Vascular Endothelial cells | 0.25 | 0.78 | exon | NACC2 | U |
| 3456 | chr7 | 45197792 | 45197980 | Vascular Endothelial cells | 0.24 | 0.75 | intron | RAMP3 | U |
| 3457 | chr9 | 1306139863 | 130614101 | Vascular Endothelial cells | 0.15 | 0.86 | intron | ENG | U |
| 3458 | chr1 | 21605850 | 21605900 | Vascular Endothelial cells | 0.18 | 0.88 | exon | ECE1 | U |
| 3459 | chr16 | 1562673 | 1563151 | Vascular Endothelial cells | 0.2 | 0.89 | intron | IFT140 | U |
| 3460 | chr4 | 166687299 | 166687454 | Vascular Endothelial cells | 0.22 | 0.89 | Intergenic | TLL1 | U |
| 3461 | chr2 | 48613218 | 48613599 | Vascular Endothelial cells | 0.18 | 0.85 | Intergenic | PPP1R21 | U |
| 3462 | chr9 | 132339217 | 132339270 | Vascular Endothelial cells | 0.24 | 0.89 | Intergenic | C9orf50 | U |
| 3463 | chr21 | 44899070 | 44899170 | Vascular Endothelial cells | 0.21 | 0.85 | promoter-TSS, Interg [symbol] | LINC00313, LINC0031 [symbol] | U |
| 3464 | chr1 | 51320582 | 51320733 | Vascular Endothelial cells | 0.29 | 0.93 | intron | FAF1 | U |
| 3465 | chr1 | 185336511 | 185336696 | Vascular Endothelial cells | 0.23 | 0.87 | Intergenic | LOC100288079 | U |
| 3466 | chr9 | 1305307613 | 130531143 | Vascular Endothelial cells | 0.2 | 0.84 | intron | SH2D3C | U |
| 3467 | chr17 | 465503 | 465626 | Vascular Endothelial cells | 0.24 | 0.87 | intron | VPS53 | U |
| 3468 | chr10 | 30140200 | 30140383 | Vascular Endothelial cells | 0.22 | 0.85 | Intergenic | KIAA1462 | U |
| 3469 | chr7 | 139573546 | 139573948 | Vascular Endothelial cells | 0.24 | 0.87 | intron | TBXAS1 | U |
| 3470 | chr11 | 86662732 | 86663161 | Vascular Endothelial cells | 0.23 | 0.86 | exon | FZD4 | U |
| 3471 | chr11 | 75017440 | 75017929 | Vascular Endothelial cells | 0.25 | 0.88 | intron | ARRB | U |
| 3472 | chr21 | 467298211 | 46729883 | Vascular Endothelial cells | 0.23 | 0.85 | Intergenic | LOC642852 | U |
| 3473 | chr1 | 55097881 | 55097980 | Vascular Endothelial cells | 0.23 | 0.85 | intron | ACOT11 | U |
| 3474 | chr3 | 129214369 | 129214507 | Vascular Endothelial cells | 0.3 | 0.92 | exon | IFT122 | U |
| 3475 | chr15 | 74678214 | 74678365 | Vascular Endothelial cells | 0.25 | 0.87 | Intergenic | CYP11A1 | U |
| 3476 | chr13 | 114585785 | 114585973 | Vascular Endothelial cells | 0.25 | 0.87 | Intergenic | LOC100506394 | U |
| 3477 | chr2 | 46575075 | 46575353 | Vascular Endothelial cells | 0.22 | 0.84 | intron | EPAS1 | U |
| 3478 | chr15 | 41274883 | 41275365 | Vascular Endothelial cells | 0.24 | 0.86 | intron, exon | INO80, INO80 | U |
| 3479 | chr17 | 80560634 | 80560718 | Vascular Endothelial cells | 0.29 | 0.9 | exon | FOXK2 | U |
| 3480 | chr17 | 30051202 | 30051379 | Vascular Endothelial cells | 0.22 | 0.83 | Intergenic | COPR5 | U |
| 3481 | chr17 | 7758473 | 7758693 | Vascular Endothelial cells | 0.24 | 0.85 | promoter-TSS, TTS | TMEM88, KDM6B | U |
| 3482 | chr8 | 641451 | 641542 | Vascular Endothelial cells | 0.3 | 0.9 | intron | ERICH1 | U |
| 3483 | chr22 | 46913360 | 46913470 | Vascular Endothelial cells | 0.29 | 0.89 | intron | CELSR1 | U |
| 3484 | chr21 | 46739702 | 46739820 | Vascular Endothelial cells | 0.19 | 0.79 | Intergenic | LOC642852 | U |
| 3485 | chr6 | 42096212 | 42096342 | Vascular Endothelial cells | 0.26 | 0.86 | intron | C6orf132 | U |
| 3486 | chr7 | 47369132 | 47369289 | Vascular Endothelial cells | 0.27 | 0.87 | intron | TNS3 | U |
| 3487 | chr5 | 149844479 | 149844642 | Vascular Endothelial cells | 0.25 | 0.85 | Intergenic | RPS14 | U |
| 3488 | chr6 | 138126946 | 138127185 | Vascular Endothelial cells | 0.24 | 0.84 | Intergenic | TNFAIP3 | U |
| 3489 | chr10 | 31989512 | 31989773 | Vascular Endothelial cells | 0.29 | 0.89 | Intergenic | ARHGAP12 | U |
| 3490 | chr10 | 30444665 | 30444961 | Vascular Endothelial cells | 0.26 | 0.86 | Intergenic | KIAA1462 | U |
| 3491 | chr12 | 121527599 | 121527904 | Vascular Endothelial cells | 0.25 | 0.85 | Intergenic | P2RX7 | U |
| 3492 | chr3 | 12964529 | 12964881 | Vascular Endothelial cells | 0.27 | 0.87 | intron | IQSEC1 | U |
| 3493 | chr3 | 129320831 | 129321288 | Vascular Endothelial cells | 0.26 | 0.86 | intron | PLXND1 | U |
| 3494 | chr11 | 110268874 | 110268980 | Vascular Endothelial cells | 0.25 | 0.84 | Intergenic | FDX1 | U |
| 3495 | chr19 | 39190658 | 39190829 | Vascular Endothelial cells | 0.25 | 0.84 | intron | ACTN4 | U |
| 3496 | chr9 | 138902846 | 138903063 | Vascular Endothelial cells | 0.29 | 0.88 | exon | NACC2 | U |
| 3497 | chr14 | 102817450 | 102817718 | Vascular Endothelial cells | 0.3 | 0.89 | intron | CINP | U |
| 3498 | chr18 | 19510086 | 19510358 | Vascular Endothelial cells | 0.25 | 0.84 | Intergenic | MIR1-2 | U |
| 3499 | chr8 | 131429260 | 131429605 | Vascular Endothelial cells | 0.29 | 0.88 | intron | ASAP1 | U |
| 3500 | chr7 | 131217619 | 131217688 | Vascular Endothelial cells | 0.26 | 0.84 | intron | PODXL | U |
| 3501 | chr1 | 46087002 | 46087125 | Vascular Endothelial cells | 0.26 | 0.84 | exon | CCDC17 | U |
| 3502 | chr19 | 6219883 | 6220017 | Vascular Endothelial cells | 0.23 | 0.81 | intron | MLLT1 | U |
| 3503 | chr7 | 100041870 | 100042025 | Vascular Endothelial cells | 0.23 | 0.81 | Intergenic | PPP1R35 | U |
| 3504 | chr21 | 43445208 | 43445384 | Vascular Endothelial cells | 0.26 | 0.84 | TTS | ZNF295-AS1 | U |
| 3505 | chr2 | 20773321 | 20773646 | Vascular Endothelial cells | 0.28 | 0.86 | Intergenic | HS1BP3 | U |
| 3506 | chr12 | 19104640 | 19104983 | Vascular Endothelial cells | 0.26 | 0.84 | Intergenic | PLEKHA5 | U |
| 3507 | chr8 | 82305505 | 82305853 | Vascular Endothelial cells | 0.27 | 0.85 | Intergenic | PMP2 | U |
| 3508 | chr8 | 26032468 | 26032900 | Vascular Endothelial cells | 0.28 | 0.86 | Intergenic | PPP2R2A | U |
| 3509 | chr17 | 7758376 | 7758448 | Vascular Endothelial cells | 0.19 | 0.76 | promoter-TSS | TMEM88 | U |
| 3510 | chr5 | 3303745 | 3303868 | Vascular Endothelial cells | 0.29 | 0.86 | Intergenic | LOC285577 | U |
| 3511 | chr9 | 124420223 | 124420374 | Vascular Endothelial cells | 0.26 | 0.83 | intron | DAB2IP | U |
| 3512 | chr12 | 50041247 | 50041566 | Vascular Endothelial cells | 0.28 | 0.85 | intron, exon | FMNL3, FMNL3 | U |
| 3513 | chr4 | 41052805 | 41053155 | Vascular Endothelial cells | 0.29 | 0.86 | intron | APBB2 | U |
| 3514 | chr20 | 62319997 | 62320091 | Vascular Endothelial cells | 0.3 | 0.86 | intron | RTEL1-TNFRSF6B | U |
| 3515 | chr19 | 11364111 | 11364456 | Vascular Endothelial cells | 0.29 | 0.85 | intron | DOCK6 | U |
| 3516 | chr10 | 45631136 | 45631206 | Vascular Endothelial cells | 0.28 | 0.83 | intron | RSU1P2 | U |
| 3517 | chr10 | 30034810 | 30034889 | Vascular Endothelial cells | 0.33 | 0.88 | Intergenic | SVIL | U |
| 3518 | chr17 | 1075364 | 1075599 | Vascular Endothelial cells | 0.28 | 0.83 | intron | ABR | U |
| 3519 | chr9 | 140281552 | 140281802 | Vascular Endothelial cells | 0.25 | 0.8 | intron | EXD3 | U |
| 3520 | chr6 | 33577711 | 33578032 | Vascular Endothelial cells | 0.24 | 0.79 | Intergenic | ITPRS | U |
| 3521 | chr11 | 76377013 | 76377449 | Vascular Endothelial cells | 0.3 | 0.85 | intron | LRRC32 | U |
| 3522 | chr6 | 108773814 | 108774286 | Vascular Endothelial cells | 0.27 | 0.82 | intron | LACE1 | U |
| 3523 | chr11 | 74231820 | 74232309 | Vascular Endothelial cells | 0.29 | 0.84 | Intergenic | LIPT2 | U |
| 3524 | chr18 | 77172345 | 77172402 | Vascular Endothelial cells | 0.28 | 0.82 | intron | NFATC1 | U |
| 3525 | chr14 | 102526697 | 102526768 | Vascular Endothelial cells | 0.28 | 0.82 | Intergenic | HSP90AA1 | U |
| 3526 | chr19 | 45383231 | 45383387 | Vascular Endothelial cells | 0.24 | 0.78 | intron | PVRL2 | U |
| 3527 | chr6 | 170251667 | 170251859 | Vascular Endothelial cells | 0.27 | 0.81 | Intergenic | LINC00242 | U |
| 3528 | chr19 | 419592 | 419789 | Vascular Endothelial cells | 0.23 | 0.77 | intron | SHC2 | U |
| 3529 | chr2 | 128394957 | 128395180 | Vascular Endothelial cells | 0.29 | 0.83 | TTS | LIMS2 | U |
| 3530 | chr7 | 739312 | 739563 | Vascular Endothelial cells | 0.29 | 0.83 | intron | PRKAR1B | U |
| 3531 | chr16 | 78704128 | 78704380 | Vascular Endothelial cells | 0.31 | 0.85 | intron | WWOX | U |
| 3532 | chr7 | 158299886 | 158300208 | Vascular Endothelial cells | 0.3 | 0.84 | intron | PTPRN2 | U |
| 3533 | chr21 | 41934629 | 41934846 | Vascular Endothelial cells | 0.31 | 0.84 | intron | DSCAM | U |
| 3534 | chr2 | 127819304 | 127819650 | Vascular Endothelial cells | 0.27 | 0.8 | intron | BIN1 | U |
| 3535 | chr8 | 144286474 | 144286703 | Vascular Endothelial cells | 0.29 | 0.81 | Intergenic | GPIHBP1 | U |
| 3536 | chr19 | 42005720 | 42005973 | Vascular Endothelial cells | 0.34 | 0.86 | intron | LOC100505495 | U |
| 3537 | chr20 | 61509056 | 61509139 | Vascular Endothelial cells | 0.28 | 0.79 | TTS | DIDO1 | U |
| 3538 | chr1 | 230673463 | 230673575 | Vascular Endothelial cells | 0.3 | 0.81 | Intergenic | COG2 | U |
| 3539 | chr14 | 103702488 | 103702654 | Vascular Endothelial cells | 0.32 | 0.83 | Intergenic | LINC00605 | U |
| 3540 | chr9 | 139640201 | 139640430 | Vascular Endothelial cells | 0.3 | 0.81 | promoter-TSS | LOC100128593 | U |
| 3541 | chr9 | 140282141 | 140282234 | Vascular Endothelial cells | 0.35 | 0.85 | intron | EXD3 | U |
| 3542 | chr22 | 47559806 | 47559920 | Vascular Endothelial cells | 0.3 | 0.8 | intron | TBC1D22A | U |
| 3543 | chrX | 7816429 | 7816561 | Vascular Endothelial cells | 0.24 | 0.74 | Intergenic | VCX | U |
| 3544 | chr3 | 197192159 | 197192336 | Vascular Endothelial cells | 0.34 | 0.84 | Intergenic | BDH1 | U |
| 3545 | chr17 | 41167472 | 41167708 | Vascular Endothelial cells | 0.31 | 0.81 | TTS, exon | IFI35, VAT1 | U |
| 3546 | chr4 | 39392193 | 39392289 | Vascular Endothelial cells | 0.28 | 0.76 | Intergenic | KL8 | U |
| 3547 | chr14 | 103750028 | 103750123 | Vascular Endothelial cells | 0.35 | 0.81 | Intergenic | EIF5 | U |
| 3548 | chr8 | 49595474 | 49595652 | Vascular Endothelial cells | 0.24 | 0.84 | Intergenic | EFCAB1 | U |
| 3549 | chr3 | 149333935 | 149334377 | Vascular Endothelial cells | 0.28 | 0.84 | intron | WWTR1 | U |
| 3550 | chr3 | 50371010 | 50371191 | Vascular Endothelial cells | 0.3 | 0.83 | intron | RASSF1 | U |
| 3551 | chr14 | 35883185 | 35883512 | Vascular Endothelial cells | 0.27 | 0.89 | Intergenic | NFKBIA | U |
| 3552 | chr9 | 116265681 | 116266124 | Vascular Endothelial cells | 0.2 | 0.89 | intron | RGS3 | U |
| 3553 | chr22 | 22112353 | 22112706 | Vascular Endothelial cells | 0.27 | 0.91 | Intergenic | YPEL1 | U |
| 3554 | chr22 | 32727342 | 32727399 | Vascular Endothelial cells | 0.25 | 0.82 | Intergenic | RFPL3 | U |
| 3555 | chr22 | 41626840 | 41627156 | Vascular Endothelial cells | 0.28 | 0.85 | exon | L3MBTL2 | U |
| 3556 | chr20 | 38024079 | 38024417 | Vascular Endothelial cells | 0.28 | 0.84 | Intergenic | LOC339568 | U |
| 3557 | chr14 | 54016534 | 54016806 | Vascular Endothelial cells | 0.29 | 0.84 | Intergenic | DDHD1 | U |
| 3558 | chr1 | 212415240 | 212415615 | Vascular Endothelial cells | 0.31 | 0.82 | Intergenic | PPP2R5A | U |
| 3559 | chr20 | 36763521 | 36763771 | Vascular Endothelial cells | 0.29 | 0.79 | intron | TGM2 | U |
| 3560 | chr15 | 41219177 | 41219309 | Vascular Endothelial cells | 0.8 | 0.2 | Intergenic | DLL4 | M |
| 3561 | chr5 | 10288725 | 10288850 | Vascular Endothelial cells | 0.73 | 0.14 | intron | CMBL | M |
| 3562 | chr16 | 75142901 | 75143153 | Vascular Endothelial cells | 0.67 | 0.08 | exon | ZNRF1 | M |
| 3563 | chr19 | 46094335 | 46094504 | Vascular Endothelial cells | 0.65 | 0.12 | exon | GPR4 | M |
| 3564 | chr1 | 6535629 | 6535666 | Vascular Endothelial cells | 0.67 | 0.15 | intron | PLEKHG5 | M |
| 3565 | chr19 | 8398351 | 8398591 | Vascular Endothelial cells | 0.68 | 0.16 | intron, exon | KANK3, KANK3 | M |
| 3566 | chr15 | 90728654 | 90728847 | Vascular Endothelial cells | 0.63 | 0.13 | intron | SEMA4B | M |
| 3567 | chr3 | 129063124 | 129063271 | Vascular Endothelial cells | 0.61 | 0.13 | Intergenic | H1FX | M |
| 3568 | chr19 | 8399168 | 399335 | Vascular Endothelial cells | 0.7 | 0.23 | exon, intron | KANK3, KANK3 | M |
| 3569 | chr19 | 46094508 | 46094547 | Vascular Endothelial cells | 0.63 | 0.21 | exon | GPR4 | M |
| 3570 | chr3 | 193922356 | 193922482 | Vascular Endothelial cells | 0.59 | 0.17 | Intergenic | HES1 | M |
| 3571 | chr8 | 49782523 | 49782603 | Vascular Endothelial cells | 0.63 | 0.24 | Intergenic | SNAI2 | M |
| 3572 | chr17 | 65242623 | 65242741 | Vascular Endothelial cells | 0.58 | 0.2 | Intergenic | HELZ | M |
| 3573 | chr1 | 24119962 | 24120129 | Vascular Endothelial cells | 0.61 | 0.23 | intron | LYPLA2 | M |
| 3574 | chr7 | 150598713 | 150598926 | Vascular Endothelial cells | 0.56 | 0.18 | Intergenic | ABP1 | M |
| 3575 | chr2 | 10261227 | 10261460 | Vascular Endothelial cells | 0.59 | 0.22 | Intergenic | RRM2 | M |
| 3576 | chr19 | 55997002 | 55997101 | Vascular Endothelial cells | 0.66 | 0.3 | intron | NAT14 | M |
| 3577 | chr2 | 241519290 | 241519427 | Vascular Endothelial cells | 0.62 | 0.27 | Intergenic | CAPN10 | M |
| 3578 | chr17 | 37828205 | 37828378 | Vascular Endothelial cells | 0.57 | 0.22 | exon | PGAP3 | M |
| 3579 | chrX | 149529520 | 149529625 | Vascular Endothelial cells | 0.59 | 0.26 | Intergenic | MAMLD1 | M |
| 3580 | chr6 | 150276493 | 150276716 | Vascular Endothelial cells | 0.61 | 0.19 | Intergenic | ULBP1 | M |
| 3581 | chr19 | 8399343 | 8399484 | Vascular Endothelial cells | 0.68 | 0.1 | exon | KANK3 | M |
| 3582 | chr6 | 6002647 | 6002703 | Vascular Endothelial cells | 0.69 | 0.24 | exon | NRN1 | M |
| 3583 | chr17 | 47296997 | 47297158 | Vascular Endothelial cells | 0.64 | 0.19 | exon, intron | ABI3, ABI3 | M |
| 3584 | chr22 | 24627294 | 24627458 | Vascular Endothelial cells | 0.62 | 0.3 | exon, intron | GGT5, GGT5 | M |
| 3585 | chr17 | 74419888 | 74420090 | Blood B cells | 0.03 | 0.95 | intron | UBE2O | U |
| 3586 | chr15 | 91138717 | 91138945 | Blood B cells | 0.02 | 0.94 | intron | CRTC3 | U |
| 3587 | chr19 | 16554452 | 16554747 | Blood B cells | 0.03 | 0.95 | intron | EPS15L1 | U |
| 3588 | chr15 | 50736822 | 50737206 | Blood B cells | 0.02 | 0.94 | intron | USP8 | U |
| 3589 | chr21 | 44800830 | 44801108 | Blood B cells | 0.01 | 0.91 | Intergenic | SIK1 | U |
| 3590 | chr16 | 29348723 | 29349009 | Blood B cells | 0.02 | 0.92 | intron | SNX29P2 | U |
| 3591 | chr11 | 45960244 | 45960604 | Blood B cells | 0.03 | 0.93 | intron | PHF21A | U |
| 3592 | chr4 | 38764383 | 38764513 | Blood B cells | 0.02 | 0.91 | Intergenic | TLR10 | U |
| 3593 | chr12 | 65007600 | 65007772 | Blood B cells | 0.02 | 0.91 | intron | RASSF3 | U |
| 3594 | chr16 | 71762004 | 71762092 | Blood B cells | 0.06 | 0.95 | TTS | AP1G1 | U |
| 3595 | chr16 | 85944509 | 85944670 | Blood B cells | 0.04 | 0.92 | intron | IRFB | U |
| 3596 | chr7 | 97943968 | 97944178 | Blood B cells | 0.05 | 0.92 | intron | BAIAP2L1 | U |
| 3597 | chr13 | 111328090 | 111328432 | Blood B cells | 0.09 | 0.96 | intron | CARS2 | U |
| 3598 | chr11 | 82777661 | 82777873 | Blood B cells | 0.06 | 0.92 | intron | RAB30 | U |
| 3599 | chr16 | 216579613 | 21658137 | Blood B cells | 0.09 | 0.95 | intron | IGSF6 | U |
| 3600 | chr1 | 101712282 | 101712511 | Blood B cells | 0.03 | 0.89 | Intergenic | S1PRI | U |
| 3601 | chr8 | 38134856 | 38135040 | Blood B cells | 0.1 | 0.95 | intron | WHSC1L1 | U |
| 3602 | chr12 | 131464806 | 131465103 | Blood B cells | 0.05 | 0.9 | intron | GPR133 | U |
| 3603 | chr10 | 45390700 | 45390846 | Blood B cells | 0.09 | 0.93 | intron | TMEM72-AS1 | U |
| 3604 | chr6 | 64375368 | 64375609 | Blood B cells | 0.11 | 0.93 | intron | PHF3 | U |
| 3605 | chr3 | 42705063 | 42705491 | Blood B cells | 0.11 | 0.92 | intron | ZBTB47 | U |
| 3606 | chr11 | 2414931 | 2415350 | Blood B cells | 0.12 | 0.92 | intron | CD81 | U |
| 3607 | chr12 | 57681746 | 57682066 | Blood B cells | 0.16 | 0.94 | intron | R3HDM2 | U |
| 3608 | chr6 | 107096723 | 107097077 | Blood B cells | 0.02 | 0.94 | exon | QRSL1 | U |
| 3609 | chr19 | 1648937 | 1648991 | Blood B cells | 0.02 | 0.93 | intron | TCF3 | U |
| 3610 | chr2 | 198009875 | 198009972 | Blood B cells | 0.04 | 0.94 | intron | ANKRD44 | U |
| 3611 | chr12 | 123305259 | 123305345 | Blood B cells | 0.02 | 0.91 | intron | CCDC62 | U |
| 3612 | chr21 | 346685413 | 34668701 | Blood B cells | 0.03 | 0.92 | intron, exon | IL10RB, IL10RB | U |
| 3613 | chr16 | 88079457 | 88079796 | Blood B cells | 0.02 | 0.91 | intron | BANP | U |
| 3614 | chr2 | 145319859 | 145320213 | Blood B cells | 0.03 | 0.92 | Intergenic | ZEB2 | U |
| 3615 | chr19 | 38540408 | 38540518 | Blood B cells | 0.05 | 0.93 | intron | SIPA1L3 | U |
| 3616 | chr12 | 132250981 | 132251257 | Blood B cells | 0.02 | 0.9 | intron | SFSWAP | U |
| 3617 | chr10 | 126289844 | 126290136 | Blood B cells | 0.03 | 0.91 | intron | LAPP | U |
| 3618 | chr19 | 2680895 | 2681205 | Blood B cells | 0.02 | 0.9 | intron | GNG7 | U |
| 3619 | chr6 | 99932478 | 99932972 | Blood B cells | 0.05 | 0.93 | intron | USP45 | U |
| 3620 | chr12 | 113488772 | 113488926 | Blood B cells | 0.03 | 0.9 | Intergenic | DTX1 | U |
| 3621 | chr1 | 185572197 | 185572415 | Blood B cells | 0.07 | 0.94 | Intergenic | HMCN1 | U |
| 3622 | chr1 | 161675214 | 161675517 | Blood B cells | 0.06 | 0.93 | Intergenic | FCRLA | U |
| 3623 | chr11 | 75535804 | 75535970 | Blood B cells | 0.03 | 0.89 | intron | UVRAG | U |
| 3624 | chr17 | 76736048 | 76736238 | Blood B cells | 0.07 | 0.93 | intron | CYTH1 | U |
| 3625 | chr8 | 28196033 | 28196315 | Blood B cells | 0.03 | 0.89 | intron | PNOC | U |
| 3626 | chr12 | 112452758 | 112453042 | Blood B cells | 0.08 | 0.94 | intron | ERP29 | U |
| 3627 | chr17 | 620029151 | 62003306 | Blood B cells | 0.02 | 0.88 | Intergenic, intergeni [symbol] | GH1, CD798 | U |
| 3628 | chr11 | 18251394 | 18251534 | Blood B cells | 0.02 | 0.87 | Intergenic | SAA4 | U |
| 3629 | chr21 | 44801137 | 44801320 | Blood B cells | 0.02 | 0.87 | Intergenic | SIK1 | U |
| 3630 | chr2 | 128335752 | 128335810 | Blood B cells | 0.1 | 0.94 | exon | MYO7B | U |
| 3631 | chr2 | 233989525 | 233989627 | Blood B cells | 0.04 | 0.88 | intron | INPP5D | U |
| 3632 | chr2 | 61691741 | 61691923 | Blood B cells | 0.05 | 0.89 | intron | USP34 | U |
| 3633 | chr16 | 88079879 | 88080175 | Blood B cells | 0.09 | 0.93 | intron | BANP | U |
| 3634 | chr6 | 74013762 | 74013930 | Blood B cells | 0.04 | 0.87 | intron | C6orf147 | U |
| 3635 | chr12 | 122447888 | 122448058 | Blood B cells | 0.05 | 0.88 | Intergenic | BCL7A | U |
| 3636 | chr11 | 35293206 | 35293377 | Blood B cells | 0.11 | 0.94 | intron | SLC1A2 | U |
| 3637 | chr9 | 136993737 | 136994083 | Blood B cells | 0.06 | 0.89 | Intergenic | WDR5 | U |
| 3638 | chr8 | 19467459 | 19467866 | Blood B cells | 0.08 | 0.91 | intron | CSGALNACT1 | U |
| 3639 | chr3 | 66436552 | 66437002 | Blood B cells | 0.07 | 0.9 | intron | LRIG1 | U |
| 3640 | chr16 | 87735396 | 87735517 | Blood B cells | 0.01 | 0.83 | Intergenic | KLHDC4 | U |
| 3641 | chr16 | 15101232 | 15101388 | Blood B cells | 0.11 | 0.93 | intron | PDXDC1 | U |
| 3642 | chr3 | 164754053 | 16475588 | Blood B cells | 0.1 | 0.92 | exon | RFTN1 | U |
| 3643 | chr16 | 68104804 | 68105016 | Blood B cells | 0.09 | 0.91 | intron, exon | DUS2L, DUS2L | U |
| 3644 | chr1 | 178574833 | 178575054 | Blood B cells | 0.11 | 0.93 | Intergenic | C1orf220 | U |
| 3645 | chr3 | 20168036 | 20168338 | Blood B cells | 0.12 | 0.94 | intron | KAT2B | U |
| 3646 | chr6 | 132005035 | 132005181 | Blood B cells | 0.13 | 0.91 | intron | ENPP3 | U |
| 3647 | chr6 | 43352107 | 43352270 | Blood B cells | 0.09 | 0.9 | Intergenic | ZNF318 | U |
| 3648 | chr7 | 403585 | 403752 | Blood B cells | 0.08 | 0.89 | Intergenic | LOC442497 | U |
| 3649 | chr13 | 100082003 | 100082172 | Blood B cells | 0.09 | 0.9 | Intergenic | MIR54BAN | U |
| 3650 | chr17 | 37706849 | 37707048 | Blood B cells | 0.09 | 0.9 | Intergenic | NEUROD2 | U |
| 3651 | chr3 | 13127967 | 13128167 | Blood B cells | 0.07 | 0.88 | Intergenic | IQSEC1 | U |
| 3652 | chr2 | 3258229 | 3258479 | Blood B cells | 0.11 | 0.92 | intron | TSSC1 | U |
| 3653 | chr10 | 1618865 | 1619186 | Blood B cells | 0.07 | 0.88 | intron | ADARB2 | U |
| 3654 | chr12 | 56769221 | 56769576 | Blood B cells | 0.07 | 0.88 | Intergenic | APOF | U |
| 3655 | chr8 | 28195582 | 28195952 | Blood B cells | 0.05 | 0.86 | intron | PNOC | U |
| 3656 | chr5 | 157986713 | 157987095 | Blood B cells | 0.09 | 0.9 | Intergenic | EBF1 | U |
| 3657 | chr4 | 15786449 | 15786843 | Blood B cells | 0.08 | 0.89 | intron | CD38 | U |
| 3658 | chr15 | 85999841 | 86000245 | Blood B cells | 0.12 | 0.93 | intron | AKAP13 | U |
| 3659 | chr11 | 70283519 | 70284008 | Blood B cells | 0.14 | 0.95 | Intergenic | CTTN | U |
| 3660 | chr8 | 11351835 | 11351929 | Blood B cells | 0.02 | 0.82 | exon | BLK | U |
| 3661 | chr17 | 3493609 | 3493903 | Blood B cells | 0.12 | 0.92 | exon | TRPV1 | U |
| 3662 | chr19 | 11548895 | 11549203 | Blood B cells | 0.11 | 0.91 | intron | PRKCSH | U |
| 3663 | chr21 | 46419673 | 46420022 | Blood B cells | 0.11 | 0.91 | intron | LINC00162 | U |
| 3664 | chr20 | 49427147 | 49427638 | Blood B cells | 0.12 | 0.92 | intron | BCAS4 | U |
| 3665 | chr15 | 100055770 | 100055858 | Blood B cells | 0.11 | 0.9 | Intergenic | MEF2A | U |
| 3666 | chr16 | 1530823 | 1530937 | Blood B cells | 0.04 | 0.83 | Intergenic | CLCN7 | U |
| 3667 | chr14 | 106285075 | 106285224 | Blood B cells | 0.06 | 0.85 | Intergenic | KIAA0125 | U |
| 3668 | chr5 | 132439040 | 132439295 | Blood B cells | 0.12 | 0.91 | intron | HSPA4 | U |
| 3669 | chr9 | 136826772 | 136827084 | Blood B cells | 0.11 | 0.9 | intron | VAV2 | U |
| 3670 | chr20 | 62702729 | 62702820 | Blood B cells | 0.06 | 0.84 | intron | TCEA2 | U |
| 3671 | chr2 | 89305601 | 89305840 | Blood B cells | 0.05 | 0.83 | Intergenic | MIR4436A | U |
| 3672 | chr1 | 25911759 | 25912018 | Blood B cells | 0.12 | 0.9 | Intergenic | MAN1C1 | U |
| 3673 | chr3 | 169564165 | 169564565 | Blood B cells | 0.12 | 0.9 | intron | LRRC31 | U |
| 3674 | chr1 | 181101405 | 181101828 | Blood B cells | 0.15 | 0.93 | Intergenic | IER5 | U |
| 3675 | chr19 | 35814453 | 35814908 | Blood B cells | 0.1 | 0.88 | Intergenic | CD22 | U |
| 3676 | chr6 | 138241334 | 138241799 | Blood B cells | 0.13 | 0.91 | Intergenic | LOC100130476 | U |
| 3677 | chr2 | 45922768 | 45922905 | Blood B cells | 0.12 | 0.89 | intron | PRKCE | U |
| 3678 | chr9 | 645656 | 645812 | Blood B cells | 0.15 | 0.92 | intron | KANK1 | U |
| 3679 | chr18 | 361310 | 361595 | Blood B cells | 0.13 | 0.9 | intron | COLEC12 | U |
| 3680 | chr12 | 122443613 | 122443967 | Blood B cells | 0.16 | 0.93 | Intergenic | BCL7A | U |
| 3681 | chr15 | 44886044 | 44886157 | Blood B cells | 0.12 | 0.88 | intron | SPG11 | U |
| 3682 | chr9 | 136993014 | 136993141 | Blood B cells | 0.17 | 0.93 | Intergenic | WDR5 | U |
| 3683 | chr2 | 89159064 | 89159274 | Blood B cells | 0.18 | 0.94 | Intergenic | MIR4436A | U |
| 3684 | chr4 | 1014995 | 1015467 | Blood B cells | 0.13 | 0.89 | intron | FGFRL1 | U |
| 3685 | chr14 | 103383229 | 103383582 | Blood B cells | 0.12 | 0.87 | Intergenic | AMN | U |
| 3686 | chr13 | 99090437 | 99090850 | Blood B cells | 0.16 | 0.91 | intron | FARP1 | U |
| 3687 | chr1 | 3496959 | 3497162 | Blood B cells | 0.08 | 0.82 | intron | MEGF6 | U |
| 3688 | chr1 | 101713983 | 101714195 | Blood B cells | 0.19 | 0.93 | Intergenic | S1PR1 | U |
| 3689 | chr11 | 36595278 | 36595594 | Blood B cells | 0.15 | 0.89 | exon | RAG1 | U |
| 3690 | chr11 | 66565836 | 66566020 | Blood B cells | 0.19 | 0.92 | intron | C11orf80 | U |
| 3691 | chr4 | 42333872 | 42333988 | Blood B cells | 0.1 | 0.82 | Intergenic | SHISA3 | U |
| 3692 | chr19 | 14688402 | 14688624 | Blood B cells | 0.15 | 0.87 | Intergenic | CLEC17A | U |
| 3693 | chr2 | 3257930 | 3258157 | Blood B cells | 0.23 | 0.95 | intron | TSSC1 | U |
| 3694 | chr15 | 28510556 | 28510729 | Blood B cells | 0.19 | 0.9 | intron | HERC2 | U |
| 3695 | chr10 | 80953658 | 80953873 | Blood B cells | 0.18 | 0.87 | intron | ZMIZ1 | U |
| 3696 | chr8 | 123929295 | 123929516 | Blood B cells | 0.23 | 0.92 | intron | ZHX2 | U |
| 3697 | chr5 | 130983529 | 130983911 | Blood B cells | 0.27 | 0.95 | intron | FNIP1 | U |
| 3698 | chr2 | 109810720 | 109810959 | Blood B cells | 0.26 | 0.92 | intron | SH3RF3 | U |
| 3699 | chr17 | 55081324 | 55081620 | Blood B cells | 0.32 | 0.95 | intron | SCPEP1 | U |
| 3700 | chr12 | 132255459 | 132255921 | Blood B cells | 0.28 | 0.91 | intron | SFSWAP | U |
| 3701 | chr12 | 56772333 | 56772693 | Blood B cells | 0.29 | 0.9 | Intergenic | APOF | U |
| 3702 | chr13 | 43562634 | 43562854 | Blood B cells | 0.17 | 0.95 | intron | EPSTI1 | U |
| 3703 | chr20 | 16373028 | 16373293 | Blood B cells | 0.02 | 0.94 | intron | KIF16B | U |
| 3704 | chr6 | 14254953 | 14255245 | Blood B cells | 0.06 | 0.95 | Intergenic | CD83 | U |
| 3705 | chr22 | 42332019 | 42332166 | Blood B cells | 0.05 | 0.9 | Intergenic | TNFRSF13C | U |
| 3706 | chr22 | 42752683 | 42752806 | Blood B cells | 0.02 | 0.86 | Intergenic | NFAM1 | U |
| 3707 | chr22 | 39469570 | 39469715 | Blood B cells | 0.01 | 0.85 | Intergenic | APOBEC3G | U |
| 3708 | chr22 | 33964527 | 33964904 | Blood B cells | 0.1 | 0.92 | intron | LARGE | U |
| 3709 | chr9 | 37189397 | 37189677 | Blood B cells | 0.14 | 0.95 | intron | ZCCHC7 | U |
| 3710 | chr22 | 24095077 | 24095518 | Blood B cells | 0.12 | 0.93 | TTS, intron | VPREB3, VPREB3 | U |
| 3711 | chr22 | 41379242 | 41379502 | Blood B cells | 0.18 | 0.91 | Intergenic | RBX1 | U |
| 3712 | chr22 | 30775765 | 30776040 | Blood B cells | 0.18 | 0.87 | exon, intron | RNF215, RNF215 | U |
| 3713 | chr11 | 67071719 | 67071793 | Blood B cells | 0.72 | 0.07 | intron | SSH3 | M |
| 3714 | chr16 | 81602029 | 81602179 | Blood B cells | 0.85 | 0.21 | intron | CMIP | M |
| 3715 | chr19 | 801276 | 801570 | Blood B cells | 0.73 | 0.1 | intron | PTBP1 | M |
| 3716 | chr11 | 118781778 | 118782027 | Blood B cells | 0.77 | 0.15 | promoter-TSS | BCL9L | M |
| 3717 | chr5 | 158407204 | 158407551 | Blood B cells | 0.71 | 0.09 | intron | EBF1 | M |
| 3718 | chr5 | 125839477 | 125839766 | Blood B cells | 0.75 | 0.14 | Intergenic | GRAMD3 | M |
| 3719 | chr7 | 99868422 | 99868626 | Blood B cells | 0.64 | 0.1 | intron | GATS | M |
| 3720 | chr11 | 118781633 | 118781712 | Blood B cells | 0.63 | 0.1 | promoter-TSS, prom [symbol] | MIR4492, BCL9L | M |
| 3721 | chr12 | 131322949 | 131323047 | Blood B cells | 0.58 | 0.06 | intron | STX2 | M |
| 3722 | chr11 | 316098 | 316385 | Blood B cells | 0.66 | 0.14 | TTS | IFITM1 | M |
| 3723 | chr18 | 24327182 | 24327297 | Blood B cells | 0.69 | 0.18 | Intergenic | LOC728606 | M |
| 3724 | chr7 | 101447905 | 101448166 | Blood B cells | 0.64 | 0.13 | Intergenic | CUX1 | M |
| 3725 | chr12 | 24103577 | 24103842 | Blood B cells | 0.61 | 0.11 | exon | SOX5 | M |
| 3726 | chr9 | 134283110 | 134283407 | Blood B cells | 0.6 | 0.11 | Intergenic | PRRC28 | M |
| 3727 | chr5 | 14582816 | 14582955 | Blood B cells | 0.63 | 0.16 | intron | FAM105A | M |
| 3728 | chr7 | 1498024 | 1498370 | Blood B cells | 0.61 | 0.16 | intron | MICALL2 | M |
| 3729 | chr19 | 56037380 | 56037716 | Blood B cells | 0.59 | 0.15 | Intergenic | SBK2 | M |
| 3730 | chr7 | 36192083 | 36192192 | Blood B cells | 0.54 | 0.15 | promoter-TSS | EEPD1 | M |
| 3731 | chr7 | 1014482781 | 101448507 | Blood B cells | 0.54 | 0.15 | Intergenic | CUX1 | M |
| 3732 | chr15 | 70877381 | 70877455 | Blood B cells | 0.53 | 0.16 | Intergenic | UACA | M |
| 3733 | chr22 | 50312817 | 50312922 | Blood B cells | 0.54 | 0.19 | promoter-TSS, prom [symbol] | CRELD2, ALG12 | M |
| 3734 | chr3 | 4909705 | 4909829043 | Blood B cells | 0.71 | 0.11 | Intergenic | BHLHE40-AS1 | M |
| 3735 | chr9 | 36985835 | 36986025 | Blood B cells | 0.65 | 0.08 | intron | PAX5 | M |
| 3736 | chr19 | 45281302 | 45281513 | Blood B cells | 0.58 | 0.13 | promoter-TSS, exon | CBLC, CBLC | M |
| 3737 | chr20 | 36514658 | 36514688 | Blood B cells | 0.58 | 0.24 | Intergenic | VSTM2L | M |
| 3738 | chr5 | 1475254 | 1475346 | Blood Granulocytes | 0.02 | 0.95 | intron | LPCAT1 | U |
| 3739 | chr19 | 19295400 | 19295569 | Blood Granulocytes | 0.02 | 0.94 | Intron | MEF2BNB-MEF28 | U |
| 3740 | chr2 | 8926362 | 8926831 | Blood Granulocytes | 0.01 | 0.92 | intron | KIDINS220 | U |
| 3741 | chr12 | 57894060 | 57894296 | Blood Granulocytes | 0.05 | 0.95 | exon | MARS | U |
| 3742 | chr3 | 150286079 | 150286436 | Blood Granulocytes | 0.04 | 0.94 | intron | EIF2A | U |
| 3743 | chr2 | 9035989 | 9036451 | Blood Granulocytes | 0.05 | 0.95 | intron | MBOAT2 | U |
| 3744 | chr16 | 46661322 | 46661443 | Blood Granulocytes | 0.02 | 0.91 | Intergenic | SHCBP1 | U |
| 3745 | chr7 | 100028821 | 100028979 | Blood Granulocytes | 0.01 | 0.89 | exon | MEPCE | U |
| 3746 | chr16 | 15053620 | 15054096 | Blood Granulocytes | 0.02 | 0.9 | Intergenic | PDXDC1 | U |
| 3747 | chr12 | 133242506 | 133242771 | Blood Granulocytes | 0.07 | 0.94 | intron | POLE | U |
| 3748 | chr7 | 105274407 | 105274692 | Blood Granulocytes | 0.06 | 0.92 | intron | ATXN7L1 | U |
| 3749 | chr16 | 67755255 | 67755383 | Blood Granulocytes | 0 | 0.86 | Intergenic | GFOD2 | U |
| 3750 | chr3 | 38322197 | 38322420 | Blood Granulocytes | 0.09 | 0.94 | Intergenic | SLC22A13 | U |
| 3751 | chr10 | 1344004353 | 134400535 | Blood Granulocytes | 0.08 | 0.91 | intron | INPP5A | U |
| 3752 | chr12 | 76934829 | 76935130 | Blood Granulocytes | 0.1 | 0.93 | intron | OSBPL8 | U |
| 3753 | chr7 | 105082754 | 105082935 | Blood Granulocytes | 0.11 | 0.94 | Intergenic | SRPK2 | U |
| 3754 | chr11 | 113641630 | 113641842 | Blood Granulocytes | 0.13 | 0.94 | intron | ZW10 | U |
| 3755 | chr1 | 3563696 | 3563873 | Blood Granulocytes | 0.09 | 0.88 | intron | WRAP73 | U |
| 3756 | chr16 | 4678631 | 4678872 | Blood Granulocytes | 0.19 | 0.96 | Intron | MGRN1 | U |
| 3757 | chr12 | 133257773 | 133257855 | Blood Granulocytes | 0.2 | 0.96 | intron | POLE | U |
| 3758 | chr12 | 67058221 | 6705998 | Blood Granulocytes | 0.17 | 0.93 | intron | CHD4 | U |
| 3759 | chr7 | 65214762 | 65214844 | Blood Granulocytes | 0.02 | 0.95 | intron | LOC441242 | U |
| 3760 | chr12 | 113770034 | 113770170 | Blood Granulocytes | 0.01 | 0.94 | intron | SLC24A6 | U |
| 3761 | chr10 | 3815120 | 3815328 | Blood Granulocytes | 0.01 | 0.94 | Intergenic | KLF6 | U |
| 3762 | chrX | 44780151 | 44780402 | Blood Granulocytes | 0.02 | 0.95 | intron | KDM6A | U |
| 3763 | chr15 | 50266301 | 50266366 | Blood Granulocytes | 0.02 | 0.94 | intron | ATP884 | U |
| 3764 | chr2 | 30935561 | 30935725 | Blood Granulocytes | 0.01 | 0.93 | Intergenic | CAPN13 | U |
| 3765 | chr15 | 63180784 | 63180872 | Blood Granulocytes | 0.01 | 0.92 | Intergenic | MIR190A | U |
| 3766 | chr20 | 61582887 | 61583050 | Blood Granulocytes | 0.01 | 0.92 | Intergenic, promote [symbol] | SLC17A9, SLC17A9 | U |
| 3767 | chr8 | 131000351 | 131000563 | Blood Granulocytes | 0.02 | 0.93 | intron | FAM498 | U |
| 3768 | chr1 | 10211350 | 10211689 | Blood Granulocytes | 0.01 | 0.92 | exon | UBE4B | U |
| 3769 | chr2 | 64234846 | 64235273 | Blood Granulocytes | 0.02 | 0.93 | intron | VPS54 | U |
| 3770 | chr1 | 6035727 | 6035846 | Blood Granulocytes | 0.01 | 0.91 | intron | NPHP4 | U |
| 3771 | chr19 | 4464265 | 4464433 | Blood Granulocytes | 0.01 | 0.91 | Intergenic | UBXN6 | U |
| 3772 | chr4 | 140852379 | 140852580 | Blood Granulocytes | 0.02 | 0.92 | intron | MAML3 | U |
| 3773 | chr16 | 89365093 | 89365308 | Blood Granulocytes | 0.01 | 0.91 | intron | ANKRD11 | U |
| 3774 | chr2 | 98429359 | 98429682 | Blood Granulocytes | 0.01 | 0.91 | intron | TMEM131 | U |
| 3775 | chr2 | 64642834 | 64643180 | Blood Granulocytes | 0.02 | 0.92 | Intergenic | GALSL | U |
| 3776 | chr10 | 6374510 | 6374605 | Blood Granulocytes | 0.04 | 0.93 | intron | LOC399715 | U |
| 3777 | chr11 | 47734458 | 47734630 | Blood Granulocytes | 0.05 | 0.94 | intron | AGBL2 | U |
| 3778 | chr14 | 90440873 | 90441060 | Blood Granulocytes | 0.01 | 0.9 | intron | TDP1 | U |
| 3779 | chr17 | 2203353 | 2203570 | Blood Granulocytes | 0.02 | 0.91 | exon | SMG6 | U |
| 3780 | chr2 | 99760705 | 99761005 | Blood Granulocytes | 0.02 | 0.91 | intron | C2orf15 | U |
| 3781 | chr3 | 183662759 | 183663081 | Blood Granulocytes | 0.01 | 0.9 | intron | ABCC5 | U |
| 3782 | chr3 | 128710307 | 128710637 | Blood Granulocytes | 0.03 | 0.92 | intron | KIAA1257 | U |
| 3783 | chr1 | 1097120811 | 109712163 | Blood Granulocytes | 0.03 | 0.91 | intron | KIAA1324 | U |
| 3784 | chr2 | 30666895 | 30667038 | Blood Granulocytes | 0.03 | 0.91 | Intergenic | LCLAT1 | U |
| 3785 | chr15 | 78291531 | 78291693 | Blood Granulocytes | 0.01 | 0.89 | intron | TBC1D2B | U |
| 3786 | chr8 | 61496608 | 61496839 | Blood Granulocytes | 0.03 | 0.91 | intron | RAB2A | U |
| 3787 | chr3 | 5131788 | 5131877 | Blood Granulocytes | 0.01 | 0.88 | Intergenic | ARL8B | U |
| 3788 | chr16 | 895669413 | 89567064 | Blood Granulocytes | 0.01 | 0.88 | Intergenic | SPG7 | U |
| 3789 | chr9 | 1398065561 | 139806684 | Blood Granulocytes | 0.03 | 0.9 | intron | TRAF2 | U |
| 3790 | chr17 | 64421921 | 64422066 | Blood Granulocytes | 0.01 | 0.88 | intron | PRKCA | U |
| 3791 | chr2 | 9136659 | 9136856 | Blood Granulocytes | 0.06 | 0.93 | intron | MBOAT2 | U |
| 3792 | chr19 | 41238916 | 41239115 | Blood Granulocytes | 0.02 | 0.89 | intron | ITPKC | U |
| 3793 | chr15 | 70096332 | 70096600 | Blood Granulocytes | 0.07 | 0.94 | Intergenic | LINC00593 | U |
| 3794 | chr7 | 23327214 | 23327556 | Blood Granulocytes | 0.01 | 0.88 | Intergenic | MALSU1 | U |
| 3795 | chr4 | 146708334 | 146708388 | Blood Granulocytes | 0.09 | 0.95 | intron | ZNF827 | U |
| 3796 | chr15 | 99074273 | 99074398 | Blood Granulocytes | 0.05 | 0.91 | Intergenic | FAM169B | U |
| 3797 | chr12 | 1243416271 | 124341771 | Blood Granulocytes | 0.07 | 0.93 | exon | DNAH10 | U |
| 3798 | chr15 | 65585965 | 65586123 | Blood Granulocytes | 0.01 | 0.87 | Intergenic | PARP16 | U |
| 3799 | chr9 | 139812189 | 139812430 | Blood Granulocytes | 0.07 | 0.93 | intron | TRAF2 | U |
| 3800 | chr17 | 40534781 | 4053742 | Blood Granulocytes | 0.04 | 0.9 | intron | CYB5D2 | U |
| 3801 | chr17 | 33319549 | 33319932 | Blood Granulocytes | 0.06 | 0.92 | intron | LIG3 | U |
| 3802 | chr1 | 213066546 | 213066948 | Blood Granulocytes | 0.09 | 0.95 | intron | FLVCR1 | U |
| 3803 | chr19 | 2303624 | 2303682 | Blood Granulocytes | 0.07 | 0.92 | intron | LINGO3 | U |
| 3804 | chr7 | 99745687 | 99745752 | Blood Granulocytes | 0.07 | 0.92 | promoter-TSS | LAMTOR4 | U |
| 3805 | chr16 | 3663807 | 3663900 | Blood Granulocytes | 0.11 | 0.96 | Intergenic | SLX4 | U |
| 3806 | chr18 | 9704835 | 9705006 | Blood Granulocytes | 0.01 | 0.86 | Intergenic | RAB31 | U |
| 3807 | chr13 | 21045259 | 21045318 | Blood Granulocytes | 0.09 | 0.93 | intron | CRYL1 | U |
| 3808 | chr17 | 4081029 | 4081148 | Blood Granulocytes | 0.09 | 0.93 | intron | ANKFY1 | U |
| 3809 | chr7 | 2185546 | 2185719 | Blood Granulocytes | 0.1 | 0.94 | intron | MAD1L1 | U |
| 3810 | chr1 | 21786129 | 21786323 | Blood Granulocytes | 0.11 | 0.95 | intron | NBPF3 | U |
| 3811 | chr11 | 33720840 | 33721148 | Blood Granulocytes | 0.03 | 0.87 | intron | C11orf91 | U |
| 3812 | chr15 | 91488251 | 91488695 | Blood Granulocytes | 0.08 | 0.92 | intron | UNC45A | U |
| 3813 | chr9 | 132286031 | 132286384 | Blood Granulocytes | 0.1 | 0.93 | Intergenic | LOC100506190 | U |
| 3814 | chr5 | 78498499 | 78498589 | Blood Granulocytes | 0.11 | 0.93 | Intergenic | JMY | U |
| 3815 | chr11 | 3953224 | 3953341 | Blood Granulocytes | 0.12 | 0.94 | intron | STIM1 | U |
| 3816 | chr10 | 105092700 | 105092833 | Blood Granulocytes | 0.11 | 0.93 | intron | PCGFS | U |
| 3817 | chr10 | 70826761 | 70826942 | Blood Granulocytes | 0.12 | 0.94 | Intergenic | SRGN | U |
| 3818 | chr17 | 47810066 | 47810180 | Blood Granulocytes | 0.1 | 0.91 | intron | FAM117A | U |
| 3819 | chr9 | 126185525 | 126185683 | Blood Granulocytes | 0.11 | 0.92 | intron | DENND1A | U |
| 3820 | chr1 | 172769019 | 172769212 | Blood Granulocytes | 0.11 | 0.92 | Intergenic | FASLG | U |
| 3821 | chr1 | 2027115801 | 202711865 | Blood Granulocytes | 0.14 | 0.95 | exon | KDMSB | U |
| 3822 | chr10 | 69962050 | 69962185 | Blood Granulocytes | 0.07 | 0.87 | intron | MYPN | U |
| 3823 | chr2 | 95779443 | 95779605 | Blood Granulocytes | 0.14 | 0.94 | intron | MRPS5 | U |
| 3824 | chr5 | 145560642 | 145560809 | Blood Granulocytes | 0.15 | 0.95 | intron | LARS | U |
| 3825 | chr18 | 12025394 | 12025602 | Blood Granulocytes | 0.13 | 0.93 | Intron | IMPA2 | U |
| 3826 | chr19 | 1423535 | 1423830 | Blood Granulocytes | 0.13 | 0.93 | intron | DAZAP1 | U |
| 3827 | chr12 | 132358250 | 132358563 | Blood Granulocytes | 0.1 | 0.9 | Intergenic | ULK1 | U |
| 3828 | chr19 | 19292201 | 19292561 | Blood Granulocytes | 0.11 | 0.91 | TTS | MEF2BNB | U |
| 3829 | chr9 | 130511864 | 130511940 | Blood Granulocytes | 0.11 | 0.9 | exon | SH2D3C | U |
| 3830 | chr10 | 323625 | 323769 | Blood Granulocytes | 0.12 | 0.91 | intron | DIP2C | U |
| 3831 | chr16 | 69047468 | 69047685 | Blood Granulocytes | 0.15 | 0.93 | intron | TANGO6 | U |
| 3832 | chr7 | 2874556 | 2874621 | Blood Granulocytes | 0.15 | 0.92 | intron | GNA12 | U |
| 3833 | chr12 | 990207271 | 99020999 | Blood Granulocytes | 0.16 | 0.93 | intron | IKBIP | U |
| 3834 | chr1 | 6100977 | 6101098 | Blood Granulocytes | 0.11 | 0.87 | intron | KCNAB2 | U |
| 3835 | chr17 | 47312993 | 47313289 | Blood Granulocytes | 0.01 | 0.77 | Intergenic | PHOSPHO1 | U |
| 3836 | chr10 | 120801913 | 120802124 | Blood Granulocytes | 0.19 | 0.92 | exon | EIF3A | U |
| 3837 | chr16 | 75632204 | 75632503 | Blood Granulocytes | 0.21 | 0.94 | exon, Intergenic | ADAT1, ADAT1 | U |
| 3838 | chr18 | 77489211 | 77489347 | Blood Granulocytes | 0.24 | 0.96 | intron | CTDP1 | U |
| 3839 | chr11 | 63919718 | 63919836 | Blood Granulocytes | 0.2 | 0.91 | exon, intron | MACROD1, MACROD [symbol] | U |
| 3840 | chr9 | 124224459 | 124224697 | Blood Granulocytes | 0.19 | 0.9 | Intron | GGTA1P | U |
| 3841 | chr12 | 11937527 | 11937785 | Blood Granulocytes | 0.22 | 0.93 | Intron | ETV6 | U |
| 3842 | chr11 | 68529887 | 68530203 | Blood Granulocytes | 0.22 | 0.93 | intron | CPT1A | U |
| 3843 | chr16 | 4686197 | 4686426 | Blood Granulocytes | 0.2 | 0.9 | intron | MGRN1 | U |
| 3844 | chr11 | 73553706 | 73554049 | Blood Granulocytes | 0.23 | 0.93 | intron | MRPL48 | U |
| 3845 | chr8 | 74870779 | 74871205 | Blood Granulocytes | 0.23 | 0.92 | intron | TCEB1 | U |
| 3846 | chr8 | 28203960 | 28204405 | Blood Granulocytes | 0.19 | 0.88 | exon | ZNF395 | U |
| 3847 | chr2 | 234166507 | 234166753 | Blood Granulocytes | 0.28 | 0.96 | intron | ATG16L1 | U |
| 3848 | chr8 | 121553241 | 121553667 | Blood Granulocytes | 0.25 | 0.93 | intron | SNT81 | U |
| 3849 | chr12 | 6790100 | 6790430 | Blood Granulocytes | 0.26 | 0.93 | intron | ZNF384 | U |
| 3850 | chr14 | 102676909 | 102677377 | Blood Granulocytes | 0.04 | 0.91 | TTS | WDR20 | U |
| 3851 | chr8 | 68262826 | 68263288 | Blood Granulocytes | 0.04 | 0.9 | Intergenic | ARFGEF1 | U |
| 3852 | chr20 | 48270862 | 48271230 | Blood Granulocytes | 0.01 | 0.93 | intron | B4GALTS | U |
| 3853 | chr21 | 46335363 | 46335431 | Blood Granulocytes | 0 | 0.89 | intron | ITGB2 | U |
| 3854 | chr20 | 33197229 | 33197638 | Blood Granulocytes | 0.11 | 0.95 | intron | PIGU | U |
| 3855 | chr7 | 8046949 | 8047052 | Blood Granulocytes | 0.23 | 0.96 | intron | GLCCI1 | U |
| 3856 | chr9 | 101592971 | 101593231 | Blood Granulocytes | 0.02 | 0.9 | intron | GALNT12 | U |
| 3857 | chr20 | 47779597 | 47779715 | Blood Granulocytes | 0.06 | 0.93 | intron | STAU1 | U |
| 3858 | chr9 | 92271825 | 92271989 | Blood Granulocytes | 0.03 | 0.9 | intron | UNQ6494 | U |
| 3859 | chr9 | 84254232 | 84254591 | Blood Granulocytes | 0.06 | 0.93 | intron | TLE1 | U |
| 3860 | chr9 | 371314401 | 37131855 | Blood Granulocytes | 0.09 | 0.92 | intron | ZCCHC7 | U |
| 3861 | chr9 | 88899143 | 88899283 | Blood Granulocytes | 0.1 | 0.92 | Intergenic | ISCA1 | U |
| 3862 | chr6 | 14827822 | 14827984 | Blood Granulocytes | 0.12 | 0.93 | Intergenic | JARID2 | U |
| 3863 | chr19 | 17185295 | 17185540 | Blood Granulocytes | 0.66 | 0.12 | intron, promoter-TS [symbol] | HAUS8, HAUS8 | M |
| 3864 | chr1 | 25253237 | 25253456 | Blood Granulocytes | 0.67 | 0.14 | intron | RUNX3 | M |
| 3865 | chr12 | 117096360 | 117096543 | Blood Granulocytes | 0.57 | 0.06 | Intergenic | C12orf49 | M |
| 3866 | chr18 | 44701530 | 44701801 | Blood Granulocytes | 0.65 | 0.14 | intron | IER3IP1 | M |
| 3867 | chr10 | 15209430 | 15209669 | Blood Granulocytes | 0.62 | 0.12 | intron | NMT2 | M |
| 3868 | chr17 | 80339122 | 80339255 | Blood Granulocytes | 0.65 | 0.17 | Intergenic | UTS2R | M |
| 3869 | chr19 | 2503973 | 2503999 | Blood Granulocytes | 0.69 | 0.22 | Intergenic | GADD45B | M |
| 3870 | chr13 | 108866962 | 108867198 | Blood Granulocytes | 0.61 | 0.14 | promoter-TSS | LIG4 | M |
| 3871 | chr19 | 39339082 | 39339288 | Blood Granulocytes | 0.62 | 0.16 | intron | HNRNPL | M |
| 3872 | chr6 | 38670144 | 38670313 | Blood Granulocytes | 0.61 | 0.16 | intron | GLO1 | M |
| 3873 | chr21 | 35446809 | 35447021 | Blood Granulocytes | 0.54 | 0.09 | intron | MRPS6 | M |
| 3874 | chr16 | 21059351 | 21059646 | Blood Granulocytes | 0.62 | 0.17 | intron | DNAH3 | M |
| 3875 | chr11 | 72392383 | 72392660 | Blood Granulocytes | 0.57 | 0.13 | Intergenic | PDE2A | M |
| 3876 | chr8 | 55013175 | 55013407 | Blood Granulocytes | 0.61 | 0.18 | intron | LYPLA1 | M |
| 3877 | chr20 | 2450253 | 2450335 | Blood Granulocytes | 0.54 | 0.14 | intron | SNRPB | M |
| 3878 | chr4 | 6718724 | 6718935 | Blood Granulocytes | 0.54 | 0.14 | exon | BLOC154 | M |
| 3879 | chr1 | 247093815 | 247094007 | Blood Granulocytes | 0.61 | 0.23 | intron | AHCTF1 | M |
| 3880 | chr22 | 46938036 | 46938104 | Blood Granulocytes | 0.6 | 0.24 | Intergenic | CELSRI | M |
| 3881 | chr18 | 60985262 | 60985381 | Blood Granulocytes | 0.54 | 0.18 | TTS, exon | BCL2, BCL2 | M |
| 3882 | chr5 | 180611773 | 180611842 | Blood Granulocytes | 0.64 | 0.29 | Intergenic | TRIM7 | M |
| 3883 | chr19 | 32329465 | 32329599 | Blood Granulocytes | 0.55 | 0.2 | Intergenic | THEGS | M |
| 3884 | chr19 | 5877489 | 55877514 | Blood Granulocytes | 0.65 | 0.35 | exon | IL11 | M |
| 3885 | chr7 | 30678941 | 3068044 | Blood Granulocytes | 0.67 | 0.15 | intron | CARD11 | M |
| 3886 | chr22 | 39919480 | 39919725 | Blood Granulocytes | 0.57 | 0.11 | TTS | ATFA | M |
| 3887 | chr11 | 73733661 | 73733929 | Blood Monocytes + Macrophages | 0.12 | 0.94 | Intergenic | UCP3 | U |
| 3888 | chr1 | 60046062 | 60046409 | Blood Monocytes + Macrophages | 0.11 | 0.92 | intron | FGGY | U |
| 3889 | chr16 | 29184910 | 29185241 | Blood Monocytes + Macrophages | 0.12 | 0.92 | Intergenic | RRN3P2 | U |
| 3890 | chr11 | 33219522 | 33219704 | Blood Monocytes + Macrophages | 0.13 | 0.92 | Intergenic | CSTF3-AS1 | U |
| 3891 | chr2 | 234151559 | 234151741 | Blood Monocytes + Macrophages | 0.15 | 0.94 | Intergenic | ATG16L1 | U |
| 3892 | chr7 | 106668694 | 106668906 | Blood Monocytes + Macrophages | 0.16 | 0.94 | Intergenic | PRKAR2B | U |
| 3893 | chr2 | 64981299 | 64981412 | Blood Monocytes + Macrophages | 0.16 | 0.93 | Intergenic | SERTAD2 | U |
| 3894 | chr12 | 25120044 | 25120202 | Blood Monocytes + Macrophages | 0.16 | 0.92 | Intergenic | BCAT1 | U |
| 3895 | chr2 | 122044859 | 122045164 | Blood Monocytes + Macrophages | 0.11 | 0.87 | Intergenic | TFCP2L1 | U |
| 3896 | chr21 | 478520401 | 47852138 | Blood Monocytes + Macrophages | 0.16 | 0.91 | exon | PCNT | U |
| 3897 | chr19 | 523147191 | 52314907 | Blood Monocytes + Macrophages | 0.14 | 0.89 | intron | FPR3 | U |
| 3898 | chr12 | 10328181 | 1033044 | Blood Monocytes + Macrophages | 0.2 | 0.93 | intron | RAD52 | U |
| 3899 | chr14 | 1036572701 | 103657436 | Blood Monocytes + Macrophages | 0.19 | 0.91 | Intergenic | LINC00605 | U |
| 3900 | chr19 | 52327634 | 52327730 | Blood Monocytes + Macrophages | 0.21 | 0.91 | exor | FPR3 | U |
| 3901 | chr12 | 14405611 | 14405730 | Blood Monocytes + Macrophages | 0.23 | 0.93 | Intergenic | ATF7IP | U |
| 3902 | chr14 | 103909521 | 103909986 | Blood Monocytes + Macrophages | 0.24 | 0.93 | intron | MARK3 | U |
| 3903 | chr3 | 13620469 | 13620615 | Blood Monocytes + Macrophages | 0.18 | 0.87 | intron | FBLN2 | U |
| 3904 | chr10 | 134264798 | 134264878 | Blood Monocytes + Macrophages | 0.25 | 0.93 | Intergenic | C10orf91 | U |
| 3905 | chr2 | 152905911 | 152905994 | Blood Monocytes + Macrophages | 0.24 | 0.9 | intron | CACNB4 | U |
| 3906 | chr19 | 192387243 | 19239022 | Blood Monocytes + Macrophages | 0.28 | 0.94 | intron | TMEM161A | U |
| 3907 | chr7 | 2284482 | 2284611 | Blood Monocytes + Macrophages | 0.3 | 0.94 | intron | NUDT1 | U |
| 3908 | chr10 | 114911613 | 114911856 | Blood Monocytes + Macrophages | 0.36 | 0.94 | intron | TCF7L2 | U |
| 3909 | chr1 | 46483872 | 46484334 | Blood Monocytes + Macrophages | 0.36 | 0.93 | intron | MAST2 | U |
| 3910 | chr19 | 10236782 | 10236959 | Blood Monocytes + Macrophages | 0.1 | 0.92 | Intergenic | EIF3G | U |
| 3911 | chr12 | 112326273 | 112326443 | Blood Monocytes + Macrophages | 0.14 | 0.94 | exon | MAPKAPK5 | U |
| 3912 | chr2 | 102138126 | 102138223 | Blood Monocytes + Macrophages | 0.13 | 0.92 | Intergenic | RFX8 | U |
| 3913 | chr6 | 134696479 | 134696724 | Blood Monocytes + Macrophages | 0.15 | 0.94 | Intergenic | LOC154092 | U |
| 3914 | chr17 | 64434250 | 64434490 | Blood Monocytes + Macrophages | 0.09 | 0.87 | intron | PRKCA | U |
| 3915 | chr8 | 27248671 | 27248761 | Blood Monocytes + Macrophages | 0.15 | 0.91 | intron | PTK2B | U |
| 3916 | chr3 | 196302048 | 196302102 | Blood Monocytes + Macrophages | 0.14 | 0.89 | intron | FBXO45 | U |
| 3917 | chr7 | 140194671 | 140194744 | Blood Monocytes + Macrophages | 0.19 | 0.94 | Intergenic | MKRN1 | U |
| 3918 | chr17 | 79300342 | 79300419 | Blood Monocytes + Macrophages | 0.14 | 0.89 | intron | TMEM105 | U |
| 3919 | chr20 | 52313293 | 52313611 | Blood Monocytes + Macrophages | 0.17 | 0.92 | Intergenic | ZNF217 | U |
| 3920 | chr17 | 78186771 | 78186866 | Blood Monocytes + Macrophages | 0.17 | 0.91 | intron | SGSH | U |
| 3921 | chr8 | 28961290 | 28961451 | Blood Monocytes + Macrophages | 0.14 | 0.88 | intron | KIF13B | U |
| 3922 | chr2 | 219564598 | 219564772 | Blood Monocytes + Macrophages | 0.18 | 0.92 | intron | STK36 | U |
| 3923 | chr1 | 40499816 | 40499992 | Blood Monocytes + Macrophages | 0.11 | 0.85 | Intergenic | CAP1 | U |
| 3924 | chr19 | 46396750 | 46397031 | Blood Monocytes + Macrophages | 0.12 | 0.86 | intron | MYPOP | U |
| 3925 | chr12 | 1032945 | 1033045 | Blood Monocytes + Macrophages | 0.22 | 0.95 | intron | RAD52 | U |
| 3926 | chr1 | 184886535 | 184886642 | Blood Monocytes + Macrophages | 0.16 | 0.89 | intron | FAM129A | U |
| 3927 | chr2 | 100402240 | 100402431 | Blood Monocytes + Macrophages | 0.11 | 0.84 | intron | AFF3 | U |
| 3928 | chr1 | 6116351 | 6116401 | Blood Monocytes + Macrophages | 0.17 | 0.89 | intron | KCNAB2 | U |
| 3929 | chr1 | 179919826 | 179919985 | Blood Monocytes + Macrophages | 0.2 | 0.92 | Intergenic | CEP350 | U |
| 3930 | chr16 | 16035816 | 16036072 | Blood Monocytes + Macrophages | 0.17 | 0.89 | Intergenic | ABCC1 | U |
| 3931 | chrX | 44305596 | 44305693 | Blood Monocytes + Macrophages | 0.14 | 0.85 | Intergenic | FUNDC1 | U |
| 3932 | chr19 | 54349022 | 54349161 | Blood Monocytes + Macrophages | 0.17 | 0.88 | Intergenic | NLRP12 | U |
| 3933 | chr3 | 185367216 | 185367389 | Blood Monocytes + Macrophages | 0.16 | 0.87 | intron | IGF28P2 | U |
| 3934 | chr17 | 19826637 | 19826881 | Blood Monocytes + Macrophages | 0.24 | 0.95 | intron | AKAP10 | U |
| 3935 | chr12 | 124426212 | 124426498 | Blood Monocytes + Macrophages | 0.2 | 0.91 | intron | CCDC92 | U |
| 3936 | chr16 | 53838299 | 53838631 | Blood Monocytes + Macrophages | 0.23 | 0.94 | intron | FTO | U |
| 3937 | chr13 | 41355868 | 41356209 | Blood Monocytes + Macrophages | 0.18 | 0.89 | Intergenic | SLC25A15 | U |
| 3938 | chr3 | 143717052 | 143717459 | Blood Monocytes + Macrophages | 0.16 | 0.87 | Intergenic | C3orf58 | U |
| 3939 | chr20 | 52314857 | 52314996 | Blood Monocytes + Macrophages | 0.21 | 0.91 | Intergenic | ZNF217 | U |
| 3940 | chr1 | 117269817 | 117270000 | Blood Monocytes + Macrophages | 0.18 | 0.88 | Intergenic | CD2 | U |
| 3941 | chr21 | 47852152 | 47852335 | Blood Monocytes + Macrophages | 0.17 | 0.87 | intron | PCNT | U |
| 3942 | chr16 | 4038109 | 4038296 | Blood Monocytes + Macrophages | 0.18 | 0.88 | intron | ADCY9 | U |
| 3943 | chr5 | 142544963 | 142545178 | Blood Monocytes + Macrophages | 0.22 | 0.92 | Intron | ARHGAP26 | U |
| 3944 | chr12 | 117495495 | 117495754 | Blood Monocytes + Macrophages | 0.19 | 0.89 | intron | TESC | U |
| 3945 | chr17 | 25740818 | 25741249 | Blood Monocytes + Macrophages | 0.18 | 0.88 | Intergenic | TBC1D3P5 | U |
| 3946 | chr1 | 113425936 | 113426010 | Blood Monocytes + Macrophages | 0.18 | 0.87 | Intergenic | AKR7A2P1 | U |
| 3947 | chr19 | 6686504 | 6686578 | Blood Monocytes + Macrophages | 0.17 | 0.86 | intron, exon | C3, C3 | U |
| 3948 | chr19 | 7608727 | 7608825 | Blood Monocytes + Macrophages | 0.22 | 0.91 | intron | PNPLA6 | U |
| 3949 | chr15 | 72756712 | 72756899 | Blood Monocytes + Macrophages | 0.21 | 0.9 | Intergenic | ARIH1 | U |
| 3950 | chr12 | 133058610 | 133058836 | Blood Monocytes + Macrophages | 0.16 | 0.85 | Intergenic | FBRSLI | U |
| 3951 | chr4 | 1327181 | 1327450 | Blood Monocytes + Macrophages | 0.23 | 0.92 | intron | MAEA | U |
| 3952 | chr2 | 8417289 | 8417424 | Blood Monocytes + Macrophages | 0.22 | 0.9 | intron | LINC00299 | U |
| 3953 | chr12 | 111624255 | 111624399 | Blood Monocytes + Macrophages | 0.12 | 0.8 | intron | CUX2 | U |
| 3954 | chr10 | 134987822 | 134987974 | Blood Monocytes + Macrophages | 0.23 | 0.91 | intron | KNDC1 | U |
| 3955 | chr11 | 63401540 | 63401775 | Blood Monocytes + Macrophages | 0.24 | 0.92 | intron | ATL3 | U |
| 3956 | chr1 | 42157705 | 42157945 | Blood Monocytes + Macrophages | 0.24 | 0.92 | intron | HIVEP3 | U |
| 3957 | chr10 | 50493567 | 50493836 | Blood Monocytes + Macrophages | 0.12 | 0.8 | Intergenic | C10orf71 | U |
| 3958 | chr15 | 81011275 | 81011754 | Blood Monocytes + Macrophages | 0.24 | 0.92 | intron | FAM108C1 | U |
| 3959 | chr7 | 139692528 | 139692736 | Blood Monocytes + Macrophages | 0.22 | 0.89 | intron | TBXASI | U |
| 3960 | chr10 | 105225247 | 105225401 | Blood Monocytes + Macrophages | 0.21 | 0.87 | Intergenic | CALHM1 | U |
| 3961 | chr19 | 47328399 | 47328584 | Blood Monocytes + Macrophages | 0.19 | 0.85 | Intergenic | SNAR-E | U |
| 3962 | chr8 | 26290788 | 26290992 | Blood Monocytes + Macrophages | 0.21 | 0.87 | Intergenic | BNIP3L | U |
| 3963 | chr1 | 6116603 | 6116830 | Blood Monocytes + Macrophages | 0.2 | 0.86 | intron | KCNAB2 | U |
| 3964 | chr12 | 111129103 | 111129424 | Blood Monocytes + Macrophages | 0.23 | 0.89 | Intergenic | HVCN1 | U |
| 3965 | chr2 | 148400250 | 148400672 | Blood Monocytes + Macrophages | 0.23 | 0.88 | Intergenic | ACVR2A | U |
| 3966 | chr7 | 1955684 | 1955910 | Blood Monocytes + Macrophages | 0.26 | 0.9 | intron | MAD1L1 | U |
| 3967 | chr15 | 75447339 | 75447636 | Blood Monocytes + Macrophages | 0.27 | 0.91 | Intergenic | C15orf39 | U |
| 3968 | chr16 | 75605929 | 75606017 | Blood Monocytes + Macrophages | 0.28 | 0.91 | intron | GABARAPL2 | U |
| 3969 | chr4 | 1220762 | 1220877 | Blood Monocytes + Macrophages | 0.25 | 0.88 | intron | CTBP1 | U |
| 3970 | chr1 | 3759631 | 3760019 | Blood Monocytes + Macrophages | 0.3 | 0.93 | intron | CEP104 | U |
| 3971 | chr7 | 76615403 | 76615523 | Blood Monocytes + Macrophages | 0.25 | 0.87 | intron | DTX2P1-UPK3BP1-PM [symbol] | U |
| 3972 | chr19 | 47262540 | 47262759 | Blood Monocytes + Macrophages | 0.21 | 0.83 | TTS | FKRP | U |
| 3973 | chr4 | 103514429 | 103514692 | Blood Monocytes + Macrophages | 0.29 | 0.91 | intron | NFKB1 | U |
| 3974 | chr12 | 402268 | 402558 | Blood Monocytes + Macrophages | 0.32 | 0.94 | intron | KDM5A | U |
| 3975 | chr18 | 10797425 | 10797759 | Blood Monocytes + Macrophages | 0.22 | 0.84 | exon, intron | PIEZO2, PIEZO2 | U |
| 3976 | chr10 | 738511953 | 73851333 | Blood Monocytes + Macrophages | 0.32 | 0.93 | Intergenic | SPOCK2 | U |
| 3977 | chr1 | 26711952 | 26712115 | Blood Monocytes + Macrophages | 0.24 | 0.85 | Intergenic | ZNF683 | U |
| 3978 | chr9 | 140538629 | 140538902 | Blood Monocytes + Macrophages | 0.29 | 0.9 | intron | EHMT1 | U |
| 3979 | chr17 | 19514244 | 19514536 | Blood Monocytes + Macrophages | 0.25 | 0.86 | Intergenic | ALDH3A2 | U |
| 3980 | chr10 | 95146992 | 95147326 | Blood Monocytes + Macrophages | 0.29 | 0.9 | Intron | MYOF | U |
| 3981 | chr11 | 16812551 | 16812905 | Blood Monocytes + Macrophages | 0.28 | 0.89 | exon | PLEKHA7 | U |
| 3982 | chr1 | 117040473 | 117040700 | Blood Monocytes + Macrophages | 0.25 | 0.85 | Intergenic | CD58 | U |
| 3983 | chr6 | 149591904 | 149592153 | Blood Monocytes + Macrophages | 0.32 | 0.92 | Intergenic | TAB2 | U |
| 3984 | chr17 | 45149888 | 45150225 | Blood Monocytes + Macrophages | 0.27 | 0.87 | Intergenic | RPRML | U |
| 3985 | chr18 | 60244241 | 60244632 | Blood Monocytes + Macrophages | 0.3 | 0.9 | exon | ZCCHC2 | U |
| 3986 | chr12 | 125204469 | 125204695 | Blood Monocytes + Macrophages | 0.3 | 0.89 | Intergenic | SCARB1 | U |
| 3987 | chr1 | 179310040 | 179310423 | Blood Monocytes + Macrophages | 0.34 | 0.93 | exon | SOATI | U |
| 3988 | chr7 | 6395854 | 6396328 | Blood Monocytes + Macrophages | 0.26 | 0.85 | Intergenic | FAM220A | U |
| 3989 | chr7 | 157562675 | 157562752 | Blood Monocytes + Macrophages | 0.2 | 0.78 | intron | PTPRN2 | U |
| 3990 | chr18 | 48356987 | 48357385 | Blood Monocytes + Macrophages | 0.34 | 0.91 | Intergenic | MRO | U |
| 3991 | chr5 | 132098766 | 132099123 | Blood Monocytes + Macrophages | 0.34 | 0.9 | intron | SEPT8 | U |
| 3992 | chr6 | 534481573 | 53448534 | Blood Monocytes + Macrophages | 0.36 | 0.92 | Intergenic | GCLC | U |
| 3993 | chr15 | 67159291 | 67159476 | Blood Monocytes + Macrophages | 0.37 | 0.92 | Intergenic | SMAD6 | U |
| 3994 | chr22 | 45687903 | 45688141 | Blood Monocytes + Macrophages | 0.27 | 0.8 | intron | UPK3A | U |
| 3995 | chr5 | 1697920781 | 169792341 | Blood Monocytes + Macrophages | 0.3 | 0.83 | intron | KCNIP1 | U |
| 3996 | chr5 | 154403647 | 154403723 | Blood Monocytes + Macrophages | 0.34 | 0.86 | Intergenic | KIF48 | U |
| 3997 | chr1 | 27315925 | 27316263 | Blood Monocytes + Macrophages | 0.37 | 0.85 | Intergenic | TRNP1 | U |
| 3998 | chr2 | 25503391 | 25503476 | Blood Monocytes + Macrophages | 0.1 | 0.88 | TTS | DNMT3A | U |
| 3999 | chr20 | 57493774 | 57493934 | Blood Monocytes + Macrophages | 0.12 | 0.86 | Intergenic | GNAS | U |
| 4000 | chr3 | 37814257 | 37814515 | Blood Monocytes + Macrophages | 0.27 | 0.86 | intron | ITGA9 | U |
| 4001 | chr6 | 26545988 | 26546169 | Blood Monocytes + Macrophages | 0.17 | 0.91 | exon | HMGN4 | U |
| 4002 | chr9 | 112918684 | 112918832 | Blood Monocytes + Macrophages | 0.26 | 0.92 | exor | AKAP2 | U |
| 4003 | chr12 | 26513019 | 26513305 | Blood Monocytes + Macrophages | 0.12 | 0.9 | intron | ITPR2 | U |
| 4004 | chr14 | 77984470 | 77984510 | Blood Monocytes + Macrophages | 0.16 | 0.91 | exon | SPTLC2 | U |
| 4005 | chr14 | 65675233 | 65675596 | Blood Monocytes + Macrophages | 0.19 | 0.89 | Intergenic | MAX | U |
| 4006 | chr5 | 2375895 | 2376032 | Blood Monocytes + Macrophages | 0.21 | 0.89 | intron | LOC100508120 | U |
| 4007 | chr22 | 39725254 | 39725514 | Blood Monocytes + Macrophages | 0.18 | 0.85 | Intergenic | RPL3 | U |
| 4008 | chr19 | 4666898 | 4667172 | Blood Monocytes + Macrophages | 0.28 | 0.92 | intron | C19orf10 | U |
| 4009 | chr6 | 15223330 | 15223449 | Blood Monocytes + Macrophages | 0.26 | 0.88 | Intergenic | JARID2 | U |
| 4010 | chr22 | 18243005 | 18243175 | Blood Monocytes + Macrophages | 0.26 | 0.88 | intron | BID | U |
| 4011 | chr22 | 40830751 | 40831106 | Blood Monocytes + Macrophages | 0.31 | 0.91 | intron | MKL1 | U |
| 4012 | chr20 | 20380706 | 20381076 | Blood Monocytes + Macrophages | 0.31 | 0.9 | intron | RALGAPA2 | U |
| 4013 | chr5 | 36564952 | 36565103 | Blood Monocytes + Macrophages | 0.72 | 0.16 | intron | SRSF3 | M |
| 4014 | chr8 | 22734960 | 22735112 | Blood Monocytes + Macrophages | 0.75 | 0.2 | intron | PEBP4 | M |
| 4015 | chr2 | 242810850 | 242811150 | Blood Monocytes + Macrophages | 0.7 | 0.19 | promoter-TSS | CXXC11 | M |
| 4016 | chr19 | 17185295 | 17185540 | Blood Monocytes + Macrophages | 0.61 | 0.12 | intron, promoter-TS [symbol] | HAUS8, HAUS8 | M |
| 4017 | chr7 | 99868422 | 99868626 | Blood Monocytes + Macrophages | 0.57 | 0.1 | intron | GATS | M |
| 4018 | chr6 | 143167094 | 143167322 | Blood Monocytes + Macrophages | 0.53 | 0.06 | intron | HIVEP2 | M |
| 4019 | chr17 | 1300733 | 1301023 | Blood Monocytes + Macrophages | 0.66 | 0.19 | Intron | YWHAE | M |
| 4020 | chr4 | 186950939 | 186951408 | Blood Monocytes + Macrophages | 0.6 | 0.14 | Intergenic | TLR3 | M |
| 4021 | chr17 | 7588787 | 7588920 | Blood Monocytes + Macrophages | 0.64 | 0.19 | promoter-TSS | WRAP53 | M |
| 4022 | chr20 | 60204143 | 60204393 | Blood Monocytes + Macrophages | 0.62 | 0.18 | intron | CDH4 | M |
| 4023 | chr11 | 661045631 | 66104621 | Blood Monocytes + Macrophages | 0.63 | 0.2 | promoter-TSS | RIN1 | M |
| 4024 | chr2 | 167350575 | 167350706 | Blood Monocytes + Macrophages | 0.57 | 0.14 | Intergenic | SCN7A | M |
| 4025 | chr10 | 133879665 | 133879805 | Blood Monocytes + Macrophages | 0.57 | 0.15 | Intergenic | JAKMIP3 | M |
| 4026 | chr9 | 140023480 | 140023651 | Blood Monocytes + Macrophages | 0.55 | 0.13 | Intergenic | GRIN1 | M |
| 4027 | chr10 | 43760488 | 43760706 | Blood Monocytes + Macrophages | 0.56 | 0.15 | intron | RASGEF1A | M |
| 4028 | chr16 | 21059351 | 21059646 | Blood Monocytes + Macrophages | 0.58 | 0.17 | intron | DNAH3 | M |
| 4029 | chr2 | 73496873 | 73497078 | Blood Monocytes + Macrophages | 0.55 | 0.15 | promoter-TSS | FBXO41 | M |
| 4030 | chr10 | 134256701 | 13425777 | Blood Monocytes + Macrophages | 0.54 | 0.16 | Intergenic | SEPHS1 | M |
| 4031 | chr19 | 17712257 | 17712367 | Blood Monocytes + Macrophages | 0.59 | 0.21 | exon, TTS | UNC13A, UNC13A | M |
| 4032 | chr3 | 161632615 | 161632867 | Blood Monocytes + Macrophages | 0.55 | 0.19 | Intergenic | OTOL1 | M |
| 4033 | chr19 | 13413607 | 13413705 | Blood Monocytes + Macrophages | 0.62 | 0.27 | intron | CACNA1A | M |
| 4034 | chr19 | 32329465 | 32329599 | Blood Monocytes + Macrophages | 0.55 | 0.2 | Intergenic | THEG5 | M |
| 4035 | chr13 | 46219611 | 46219885 | Blood Monocytes + Macrophages | 0.67 | 0.33 | Intergenic | FAM194B | M |
| 4036 | chr19 | 55877489 | 55877514 | Blood Monocytes + Macrophages | 0.68 | 0.35 | exon | IL11 | M |
| 4037 | chr22 | 19949901 | 19950167 | Blood Monocytes + Macrophages | 0.68 | 0.14 | promoter-TSS | COMT | M |
| 4038 | chr15 | 91370195 | 91370327 | Blood NK cells | 0.04 | 0.93 | Intergenic | FURIN | U |
| 4039 | chr17 | 72464526 | 72464888 | Blood NK cells | 0.07 | 0.93 | intron | CD300A | U |
| 4040 | chr3 | 17196544 | 17196765 | Blood NK cells | 0.07 | 0.92 | Intergenic | MIR3714 | U |
| 4041 | chr12 | 9983597 | 9983989 | Blood NK cells | 0.07 | 0.92 | intron | KLRF1 | U |
| 4042 | chr6 | 170426268 | 170426366 | Blood NK cells | 0.04 | 0.89 | Intergenic | LOC154449 | U |
| 4043 | chr17 | 724642343 | 72464452 | Blood NK cells | 0.09 | 0.91 | intron | CD300A | U |
| 4044 | chr18 | 77391680 | 77392004 | Blood NK cells | 0.08 | 0.9 | Intergenic | CTDP1 | U |
| 4045 | chr17 | 72460470 | 72460657 | Blood NK cells | 0.09 | 0.89 | Intergenic | CD300A | U |
| 4046 | chr19 | 30167085 | 30167286 | Blood NK cells | 0.1 | 0.9 | TTS | PLEKHF1 | U |
| 4047 | chr7 | 2039945 | 2040189 | Blood NK cells | 0.15 | 0.94 | intron | MAD1L1 | U |
| 4048 | chr6 | 166748511 | 166748769 | Blood NK cells | 0.15 | 0.93 | intron | SFT2D1 | U |
| 4049 | chr17 | 20601541 | 20601800 | Blood NK cells | 0.14 | 0.92 | Intergenic | LOC100287072 | U |
| 4050 | chr13 | 110411405 | 110411560 | Blood NK cells | 0.13 | 0.9 | intron | IRS2 | U |
| 4051 | chr7 | 1983823 | 1983918 | Blood NK cells | 0.16 | 0.88 | intron | MAD1L1 | U |
| 4052 | chr17 | 9465579 | 9465717 | Blood NK cells | 0.23 | 0.95 | intron | STX8 | U |
| 4053 | chr1 | 46386901 | 46387052 | Blood NK cells | 0.22 | 0.94 | intron | MAST2 | U |
| 4054 | chr3 | 32945527 | 32945860 | Blood NK cells | 0.22 | 0.93 | Intergenic | CCR4 | U |
| 4055 | chr17 | 55652681 | 55652809 | Blood NK cells | 0.26 | 0.93 | intron | MSI2 | U |
| 4056 | chr17 | 81012325 | 81012656 | Blood NK cells | 0.22 | 0.89 | Intergenic | B3GNTL1 | U |
| 4057 | chr3 | 32604098 | 32604525 | Blood NK cells | 0.27 | 0.94 | intron | DYNC1LI1 | U |
| 4058 | chr12 | 53762133 | 53762556 | Blood NK cells | 0.3 | 0.92 | Intergenic | SP1 | U |
| 4059 | chr2 | 68596508 | 68596737 | Blood NK cells | 0.29 | 0.9 | intron | PLEK | U |
| 4060 | chr2 | 225961049 | 225961156 | Blood NK cells | 0.34 | 0.93 | Intergenic | DOCK10 | U |
| 4061 | chr19 | 16483480 | 16483937 | Blood NK cells | 0.36 | 0.92 | intron | EPS15L1 | U |
| 4062 | chr7 | 100734328 | 100734388 | Blood NK cells | 0.05 | 0.95 | TTS | TRIM56 | U |
| 4063 | chr2 | 8423040 | 8423139 | Blood NK cells | 0.03 | 0.92 | intron | LINC00299 | U |
| 4064 | chr2 | 8595989 | 8596120 | Blood NK cells | 0.06 | 0.93 | Intergenic | LINC00299 | U |
| 4065 | chr6 | 35491881 | 35492060 | Blood NK cells | 0.05 | 0.92 | Intergenic | TULP1 | U |
| 4066 | chr1 | 1674160883 | 167416227 | Blood NK cells | 0.04 | 0.89 | intron | CD247 | U |
| 4067 | chr1 | 178380889 | 178381054 | Blood NK cells | 0.06 | 0.91 | intron | RASAL2 | U |
| 4068 | chr1 | 44059026 | 44059320 | Blood NK cells | 0.08 | 0.93 | intron | PTPRF | U |
| 4069 | chr13 | 110386260 | 110386324 | Blood NK cells | 0.11 | 0.95 | Intergenic | IRS2 | U |
| 4070 | chr2 | 240617639 | 240617769 | Blood NK cells | 0.09 | 0.93 | Intergenic | LOC150935 | U |
| 4071 | chr10 | 7285284 | 7285392 | Blood NK cells | 0.08 | 0.91 | intron | SFMBT2 | U |
| 4072 | chr11 | 333161 | 333286 | Blood NK cells | 0.08 | 0.9 | Intergenic | IFITM3 | U |
| 4073 | chr11 | 119767286 | 119767429 | Blood NK cells | 0.04 | 0.86 | Intergenic | PVRL1 | U |
| 4074 | chr11 | 1019378 | 1019547 | Blood NK cells | 0.07 | 0.89 | exon | MUC6 | U |
| 4075 | chr11 | 113945043 | 113945266 | Blood NK cells | 0.07 | 0.89 | intron | ZBTB16 | U |
| 4076 | chr9 | 139853947 | 139854192 | Blood NK cells | 0.06 | 0.88 | Intergenic | LCN12 | U |
| 4077 | chr9 | 127387483 | 127387755 | Blood NK cells | 0.11 | 0.93 | intron | NR6A1 | U |
| 4078 | chr1 | 167448709 | 167448982 | Blood NK cells | 0.07 | 0.89 | intron | CD247 | U |
| 4079 | chr7 | 80505151 | 80505424 | Blood NK cells | 0.06 | 0.88 | intron | SEMA3C | U |
| 4080 | chr16 | 88719942 | 88720407 | Blood NK cells | 0.07 | 0.89 | intron | MVD | U |
| 4081 | chr14 | 99917863 | 99917989 | Blood NK cells | 0.12 | 0.93 | intron | SETD3 | U |
| 4082 | chr20 | 50122196 | 50122404 | Blood NK cells | 0.09 | 0.9 | intron | NFATC2 | U |
| 4083 | chr6 | 170771086 | 170771501 | Blood NK cells | 0.09 | 0.9 | Intergenic | PSMB1 | U |
| 4084 | chr9 | 126308447 | 126308566 | Blood NK cells | 0.09 | 0.89 | intron | DENND1A | U |
| 4085 | chr8 | 28639413 | 28639559 | Blood NK cells | 0.15 | 0.95 | intron | INTS9 | U |
| 4086 | chr17 | 3608369 | 3608604 | Blood NK cells | 0.1 | 0.9 | Intergenic | P2RX5 | U |
| 4087 | chr12 | 680633263 | 68063567 | Blood NK cells | 0.12 | 0.92 | Intergenic | DYRK2 | U |
| 4088 | chr2 | 30517023 | 30517292 | Blood NK cells | 0.12 | 0.92 | Intergenic | LBH | U |
| 4089 | chr14 | 93006257 | 93006373 | Blood NK cells | 0.04 | 0.83 | intron | RIN3 | U |
| 4090 | chr16 | 358740 | 359147 | Blood NK cells | 0.14 | 0.93 | intron | AXIN1 | U |
| 4091 | chr16 | 85676577 | 85676678 | Blood NK cells | 0.1 | 0.88 | intron | GSE1 | U |
| 4092 | chr16 | 57682411 | 57682704 | Blood NK cells | 0.1 | 0.88 | intron | GPR56 | U |
| 4093 | chr11 | 870099563 | 87010087 | Blood NK cells | 0.18 | 0.95 | intron | TMEM135 | U |
| 4094 | chr22 | 43651426 | 43651560 | Blood NK cells | 0.07 | 0.84 | intron | SCUBE1 | U |
| 4095 | chr1 | 42362308 | 42362481 | Blood NK cells | 0.18 | 0.94 | intron | HIVEP3 | U |
| 4096 | chr5 | 10377133 | 10377320 | Blood NK cells | 0.19 | 0.95 | intron | MARCH6 | U |
| 4097 | chr17 | 45777414 | 45777900 | Blood NK cells | 0.16 | 0.92 | intron | TBKBP1 | U |
| 4098 | chr16 | 88720466 | 38720591 | Blood NK cells | 0.13 | 0.88 | intron | MVD | U |
| 4099 | chr16 | 297118 | 297331 | Blood NK cells | 0.15 | 0.9 | intron | ITFG3 | U |
| 4100 | chr16 | 85676406 | 85676565 | Blood NK cells | 0.1 | 0.84 | intron | GSE1 | U |
| 4101 | chr17 | 45817373 | 45817535 | Blood NK cells | 0.19 | 0.93 | intron | TBX21 | U |
| 4102 | chr17 | 80264260 | 80264504 | Blood NK cells | 0.17 | 0.91 | Intergenic | CD7 | U |
| 4103 | chr1 | 10585743 | 10585973 | Blood NK cells | 0.22 | 0.95 | intron | PEX14 | U |
| 4104 | chr8 | 124111382 | 124111562 | Blood NK cells | 0.21 | 0.93 | intron | WDR67 | U |
| 4105 | chr11 | 3161061 | 3161276 | Blood NK cells | 0.18 | 0.9 | intron | OSBPL5 | U |
| 4106 | chr3 | 57639835 | 57640177 | Blood NK cells | 0.21 | 0.93 | intron | DENND6A | U |
| 4107 | chr2 | 239314826 | 239315232 | Blood NK cells | 0.21 | 0.93 | Intergenic | ASB1 | U |
| 4108 | chr15 | 26047563 | 26047669 | Blood NK cells | 0.12 | 0.83 | intron | ATP10A | U |
| 4109 | chr22 | 466351223 | 46635299 | Blood NK cells | 0.19 | 0.9 | exon | PPARA | U |
| 4110 | chr17 | 65238302 | 65238485 | Blood NK cells | 0.2 | 0.91 | intron | HELZ | U |
| 4111 | chr7 | 32086031 | 3208890 | Blood NK cells | 0.16 | 0.87 | Intergenic | CARD11 | U |
| 4112 | chr19 | 12663796 | 12663860 | Blood NK cells | 0.21 | 0.91 | Intergenic | ZNF564 | U |
| 4113 | chr7 | 1983944 | 1984039 | Blood NK cells | 0.19 | 0.89 | intron | MAD1L1 | U |
| 4114 | chr16 | 81885018 | 81885221 | Blood NK cells | 0.22 | 0.92 | intron | PLOG2 | U |
| 4115 | chr16 | 4530035 | 4530345 | Blood NK cells | 0.21 | 0.91 | intron | HMOX2 | U |
| 4116 | chr2 | 420847 | 421203 | Blood NK cells | 0.22 | 0.92 | Intergenic | FAM150B | U |
| 4117 | chr6 | 161680430 | 161680823 | Blood NK cells | 0.25 | 0.95 | intron | AGPAT4 | U |
| 4118 | chr17 | 72468723 | 72469129 | Blood NK cells | 0.22 | 0.91 | intron | CD300A | U |
| 4119 | chr11 | 60891585 | 60892045 | Blood NK cells | 0.23 | 0.92 | intron | CD5 | U |
| 4120 | chr15 | 20817606 | 20817774 | Blood NK cells | 0.14 | 0.81 | Intergenic | GOLGA8CP | U |
| 4121 | chr3 | 9898214 | 9898473 | Blood NK cells | 0.23 | 0.9 | Intergenic | RPUSD3 | U |
| 4122 | chr16 | 29121968 | 29122251 | Blood NK cells | 0.2 | 0.87 | intron | RRN3P2 | U |
| 4123 | chr21 | 45430004 | 45430363 | Blood NK cells | 0.24 | 0.91 | Intergenic | TRAPPC10 | U |
| 4124 | chr3 | 15316508 | 15316951 | Blood NK cells | 0.21 | 0.88 | intron | SH3BP5 | U |
| 4125 | chr5 | 78839248 | 78839357 | Blood NK cells | 0.27 | 0.93 | Intergenic | HOMER1 | U |
| 4126 | chr12 | 102444277 | 102444421 | Blood NK cells | 0.26 | 0.92 | intron | CCDC53 | U |
| 4127 | chr17 | 779775431 | 77977704 | Blood NK cells | 0.26 | 0.92 | intron | TBC1D16 | U |
| 4128 | chr16 | 11331723 | 11332124 | Blood NK cells | 0.28 | 0.94 | Intergenic | SOCS1 | U |
| 4129 | chr5 | 159701203 | 159701619 | Blood NK cells | 0.21 | 0.87 | intron | CCNJL | U |
| 4130 | chr12 | 295321 | 295414 | Blood NK cells | 0.19 | 0.84 | Intergenic | SLC6A12 | U |
| 4131 | chr19 | 196380771 | 19638256 | Blood NK cells | 0.27 | 0.92 | exon | NDUFA13 | U |
| 4132 | chr19 | 2551962 | 2552155 | Blood NK cells | 0.23 | 0.88 | intron | GNG7 | U |
| 4133 | chr19 | 3799711 | 3799957 | Blood NK cells | 0.26 | 0.91 | intron | MATK | U |
| 4134 | chr8 | 123959972 | 123960220 | Blood NK cells | 0.3 | 0.95 | intron | ZHX2 | U |
| 4135 | chr17 | 45792622 | 45792988 | Blood NK cells | 0.22 | 0.87 | Intergenic | TBX21 | U |
| 4136 | chr11 | 128670964 | 128671386 | Blood NK cells | 0.27 | 0.92 | intron | FLI1 | U |
| 4137 | chr18 | 74830766 | 74831235 | Blood NK cells | 0.3 | 0.94 | intron | MBP | U |
| 4138 | chr19 | 18805212 | 18805698 | Blood NK cells | 0.3 | 0.93 | intron | CRTC1 | U |
| 4139 | chr2 | 105691355 | 105691759 | Blood NK cells | 0.34 | 0.96 | intron | MRPS9 | U |
| 4140 | chr18 | 54240473 | 54240658 | Blood NK cells | 0.31 | 0.92 | Intergenic | TXNL1 | U |
| 4141 | chr15 | 234849903 | 23485384 | Blood NK cells | 0.21 | 0.82 | Intergenic | GOLGA8EP | U |
| 4142 | chr7 | 132942682 | 132943008 | Blood NK cells | 0.33 | 0.93 | intron | EXOC4 | U |
| 4143 | chr21 | 34575182 | 34575275 | Blood NK cells | 0.31 | 0.89 | Intergenic | IFNAR2 | U |
| 4144 | chr18 | 74828467 | 74828674 | Blood NK cells | 0.35 | 0.93 | intron | MBP | U |
| 4145 | chr15 | 69088450 | 69088578 | Blood NK cells | 0.33 | 0.89 | intron | ANP32A | U |
| 4146 | chr7 | 104995335 | 104995830 | Blood NK cells | 0.35 | 0.9 | intron | SRPK2 | U |
| 4147 | chr3 | 255027721 | 25503190 | Blood NK cells | 0.09 | 0.92 | intron | RARB | U |
| 4148 | chr1 | 3278151 | 3278603 | Blood NK cells | 0.33 | 0.9 | intron | PRDM16 | U |
| 4149 | chr20 | 5977891 | 5978014 | Blood NK cells | 0.11 | 0.93 | Intergenic | CRLS1 | U |
| 4150 | chr14 | 25147832 | 25147903 | Blood NK cells | 0.06 | 0.89 | Intergenic | GZMB | U |
| 4151 | chr6 | 15505860 | 15505967 | Blood NK cells | 0.03 | 0.86 | intron | JARID2 | U |
| 4152 | chr6 | 15505986 | 15506113 | Blood NK cells | 0.02 | 0.83 | intron | JARID2 | U |
| 4153 | chr19 | 13997072 | 13997271 | Blood NK cells | 0.11 | 0.9 | intron | C19orf57 | U |
| 4154 | chr14 | 56677405 | 56677888 | Blood NK cells | 0.1 | 0.87 | intron | PELI2 | U |
| 4155 | chr14 | 35210909 | 35210977 | Blood NK cells | 0.13 | 0.88 | Intergenic | CFL2 | U |
| 4156 | chr14 | 25101099 | 25101378 | Blood NK cells | 0.18 | 0.91 | exon | GZMB | U |
| 4157 | chr9 | 27676350 | 27676628 | Blood NK cells | 0.2 | 0.88 | Intergenic | C9orf72 | U |
| 4158 | chr20 | 25327048 | 25327427 | Blood NK cells | 0.25 | 0.93 | intron | ABHD12 | U |
| 4159 | chr2 | 45926949 | 45927238 | Blood NK cells | 0.26 | 0.93 | intron | PRKCE | U |
| 4160 | chr20 | 43612904 | 43613139 | Blood NK cells | 0.28 | 0.94 | intron | STK4 | U |
| 4161 | chr9 | 113684077 | 113684327 | Blood NK cells | 0.25 | 0.88 | intron | PAR1 | U |
| 4162 | chr14 | 25096504 | 25096619 | Blood NK cells | 0.29 | 0.91 | Intergenic | GZMB | U |
| 4163 | chr3 | 126193438 | 126193625 | Blood NK cells | 0.68 | 0.16 | intron | ZXDC | M |
| 4164 | chr4 | 186950939 | 186951408 | Blood NK cells | 0.64 | 0.13 | Intergenic | TLR3 | M |
| 4165 | chr12 | 50497589 | 50497828 | Blood NK cells | 0.59 | 0.09 | exon | GPD1 | M |
| 4166 | chr19 | 1860062 | 1860310 | Blood NK cells | 0.64 | 0.14 | intron | KLF16 | M |
| 4167 | chr9 | 130741664 | 130742038 | Blood NK cells | 0.55 | 0.06 | intron | FAM102A | M |
| 4168 | chr1 | 93249291 | 93249657 | Blood NK cells | 0.62 | 0.14 | intron | EVI5 | M |
| 4169 | chr19 | 49371794 | 49371940 | Blood NK cells | 0.59 | 0.12 | exon, promoter-TSS | PLEKHA4, PLEKHA4 | M |
| 4170 | chr3 | 49396303 | 49396392 | Blood NK cells | 0.7 | 0.24 | promoter-TSS | GPX1 | M |
| 4171 | chr11 | 72392383 | 72392660 | Blood NK cells | 0.59 | 0.13 | Intergenic | PDE2A | M |
| 4172 | chr16 | 790134 | 790306 | Blood NK cells | 0.6 | 0.15 | intron | NARFL | M |
| 4173 | chr12 | 50017659 | 50017936 | Blood NK cells | 0.63 | 0.18 | exon | PRPF40B | M |
| 4174 | chr2 | 88925612 | 88925997 | Blood NK cells | 0.53 | 0.08 | intron | EIF2AK3 | M |
| 4175 | chr7 | 100304423 | 100304582 | Blood NK cells | 0.53 | 0.09 | exon | POP7 | M |
| 4176 | chr16 | 11034436 | 11034739 | Blood NK cells | 0.67 | 0.23 | intron | DEXI | M |
| 4177 | chr17 | 20811492 | 20811549 | Blood NK cells | 0.59 | 0.16 | Intergenic | CCDC144NL | M |
| 4178 | chr3 | 10053303 | 10053557 | Blood NK cells | 0.6 | 0.18 | promoter-TSS | LOC401052 | M |
| 4179 | chr7 | 101448278 | 101448507 | Blood NK cells | 0.56 | 0.15 | Intergenic | CUX1 | M |
| 4180 | chr17 | 7740472 | 7740848 | Blood NK cells | 0.53 | 0.12 | Intergenic | KDM68 | M |
| 4181 | chr1 | 45451434 | 45451503 | Blood NK cells | 0.52 | 0.12 | intron | EIF283 | M |
| 4182 | chr7 | 156744110 | 156744441 | Blood NK cells | 0.56 | 0.16 | intron | NOM1 | M |
| 4183 | chr11 | 73358873 | 73358989 | Blood NK cells | 0.59 | 0.2 | promoter-TSS | PLEKHB1 | M |
| 4184 | chrX | 47508721 | 47508942 | Blood NK cells | 0.6 | 0.25 | intron | ELK1 | M |
| 4185 | chr14 | 35590322 | 35590444 | Blood NK cells | 0.68 | 0.17 | intron | PPP2R3C | M |
| 4186 | chr22 | 39919480 | 39919725 | Blood NK cells | 0.62 | 0.11 | TTS | ATF4 | M |
| 4187 | chr20 | 62340144 | 62340242 | Blood NK cells | 0.59 | 0.21 | promoter-TSS | ARFRP1 | M |
| 4188 | chr5 | 118635509 | 118635757 | Blood T cells | 0.02 | 0.91 | intron | TNFAIP8 | U |
| 4189 | chr7 | 3501574 | 3501867 | Blood T cells | 0.06 | 0.92 | intron | SDK1 | U |
| 4190 | chr1 | 32718447 | 32718737 | Blood T cells | 0.03 | 0.88 | intron | LCK | U |
| 4191 | chr11 | 118176757 | 118177142 | Blood T cells | 0.05 | 0.89 | intron | CD3E | U |
| 4192 | chr16 | 68244845 | 68245279 | Blood T cells | 0.09 | 0.92 | intron | NFATC3 | U |
| 4193 | chr11 | 60739310 | 60739437 | Blood T cells | 0.03 | 0.86 | exon | CD6 | U |
| 4194 | chr19 | 6362839 | 6362914 | Blood T cells | 0.09 | 0.9 | intron | CLPP | U |
| 4195 | chr11 | 118213527 | 118214010 | Blood T cells | 0.06 | 0.87 | promoter-TSS | CD3D | U |
| 4196 | chr1 | 12237782 | 12237917 | Blood T cells | 0.08 | 0.86 | intron | TNFRSF1B | U |
| 4197 | chr10 | 129131921 | 129132266 | Blood T cells | 0.15 | 0.92 | intron | DOCK1 | U |
| 4198 | chr2 | 205108059 | 205108161 | Blood T cells | 0.13 | 0.89 | Intergenic | PARD38 | U |
| 4199 | chr19 | 7225929 | 7226136 | Blood T cells | 0.05 | 0.81 | intron | INSR | U |
| 4200 | chr22 | 48475730 | 48475916 | Blood T cells | 0.1 | 0.85 | Intergenic | MIR3201 | U |
| 4201 | chr12 | 69285539 | 69285673 | Blood T cells | 0.17 | 0.9 | intron | CPM | U |
| 4202 | chr17 | 71818566 | 71818917 | Blood T cells | 0.18 | 0.91 | intron | LINC00469 | U |
| 4203 | chr12 | 47605685 | 47606094 | Blood T cells | 0.23 | 0.94 | intron | PCED1B-ASI | U |
| 4204 | chr2 | 85667088 | 85667541 | Blood T cells | 0.21 | 0.91 | Intergenic | SH2D6 | U |
| 4205 | chr3 | 197596061 | 197596302 | Blood T cells | 0.26 | 0.94 | intron | LRCH3 | U |
| 4206 | chr3 | 111261184 | 111261528 | Blood T cells | 0.04 | 0.89 | intron | CD96 | U |
| 4207 | chr1 | 206976573 | 206976899 | Blood T cells | 0.01 | 0.85 | intron | IL19 | U |
| 4208 | chr13 | 40761258 | 40761586 | Blood T cells | 0.04 | 0.88 | intron | LINC00332 | U |
| 4209 | chr1 | 32718801 | 32719173 | Blood T cells | 0.05 | 0.89 | intron | LCK | U |
| 4210 | chr5 | 156620811 | 156621258 | Blood T cells | 0.01 | 0.85 | intron | ITK | U |
| 4211 | chr11 | 60870283 | 60870687 | Blood T cells | 0.04 | 0.87 | intron | CD5 | U |
| 4212 | chr15 | 38945624 | 38945753 | Blood T cells | 0.07 | 0.89 | Intergenic | C15orf53 | U |
| 4213 | chr2 | 175354316 | 175354510 | Blood T cells | 0.09 | 0.91 | Intergenic | GPR155 | U |
| 4214 | chr2 | 234176989 | 234177299 | Blood T cells | 0.04 | 0.86 | intron | ATG16L1 | U |
| 4215 | chr11 | 77914232 | 77914342 | Blood T cells | 0.11 | 0.92 | intron | USP35 | U |
| 4216 | chr5 | 1186350981 | 118635285 | Blood T cells | 0.12 | 0.93 | intron | TNFAIP8 | U |
| 4217 | chr4 | 873212 | 873550 | Blood T cells | 0.07 | 0.88 | intron | GAK | U |
| 4218 | chr1 | 39443248 | 39443657 | Blood T cells | 0.08 | 0.89 | Intergenic | AKIRIN1 | U |
| 4219 | chr2 | 86159584 | 86159709 | Blood T cells | 0.08 | 0.88 | Intergenic | ST3GAL5 | U |
| 4220 | chr5 | 118635784 | 118636033 | Blood T cells | 0.13 | 0.93 | intron | TNFAIP8 | U |
| 4221 | chr5 | 39198919 | 39199198 | Blood T cells | 0.1 | 0.9 | intron | FY8 | U |
| 4222 | chr10 | 27390494 | 27390837 | Blood T cells | 0.06 | 0.86 | Intergenic | ANKRD26 | U |
| 4223 | chr13 | 48760259 | 48760363 | Blood T cells | 0.08 | 0.87 | Intergenic | ITM2B | U |
| 4224 | chr22 | 50232991 | 50233298 | Blood T cells | 0.09 | 0.88 | Intergenic | ZBED4 | U |
| 4225 | chr1 | 1172802991 | 117280524 | Blood T cells | 0.09 | 0.87 | Intergenic | CD2 | U |
| 4226 | chr11 | 60870871 | 60871101 | Blood T cells | 0.04 | 0.82 | intron | CD5 | U |
| 4227 | chr10 | 128899365 | 128899644 | Blood T cells | 0.13 | 0.91 | intron | DOCK1 | U |
| 4228 | chr3 | 45984836 | 45985169 | Blood T cells | 0.13 | 0.91 | promoter-TSS | CXCR6 | U |
| 4229 | chr7 | 1506954003 | 150695536 | Blood T cells | 0.08 | 0.84 | exon | NOS3 | U |
| 4230 | chr3 | 195336331 | 195336579 | Blood T cells | 0.14 | 0.89 | Intergenic | APOD | U |
| 4231 | chr4 | 114604657 | 114605003 | Blood T cells | 0.12 | 0.87 | intron | CAMK2D | U |
| 4232 | chr20 | 48819424 | 48819564 | Blood T cells | 0.16 | 0.9 | Intergenic | CEBPB | U |
| 4233 | chr12 | 66788079 | 66788229 | Blood T cells | 0.09 | 0.83 | intron | GRIP1 | U |
| 4234 | chr2 | 64205129 | 64205490 | Blood T cells | 0.17 | 0.91 | intron | VPS54 | U |
| 4235 | chr10 | 11887167 | 11887647 | Blood T cells | 0.14 | 0.88 | intron | PROSER2 | U |
| 4236 | chr20 | 62270221 | 62270344 | Blood T cells | 0.14 | 0.87 | TTS | STMN3 | U |
| 4237 | chr5 | 80303344 | 80303560 | Blood T cells | 0.13 | 0.86 | intron | RASGRF2 | U |
| 4238 | chr5 | 169740386 | 169740677 | Blood T cells | 0.00 | 0.82 | Intergenic | LCP2 | U |
| 4239 | chr12 | 27654980 | 27655356 | Blood T cells | 0.16 | 0.89 | TTS | C12orf70 | U |
| 4240 | chr19 | 1079557 | 1079662 | Blood T cells | 0.1 | 0.82 | intron | HMHA1 | U |
| 4241 | chr1 | 11965595 | 11965703 | Blood T cells | 0.17 | 0.89 | Intergenic | KIAA2013 | U |
| 4242 | chr9 | 139005420 | 139005539 | Blood T cells | 0.17 | 0.89 | TTS | C9orf69 | U |
| 4243 | chr4 | 7856825 | 7857021 | Blood T cells | 0.14 | 0.86 | intron | AFAP1 | U |
| 4244 | chr5 | 133455511 | 133455735 | Blood T cells | 0.18 | 0.9 | intron | TCF7 | U |
| 4245 | chr11 | 11171265 | 11171698 | Blood T cells | 0.14 | 0.85 | Intergenic | CSNK2A3 | U |
| 4246 | chr6 | 37177349 | 37177491 | Blood T cells | 0.13 | 0.83 | Intergenic | PIM1 | U |
| 4247 | chr11 | 1178233701 | 117823587 | Blood T cells | 0.19 | 0.89 | Intergenic | TMPRSS13 | U |
| 4248 | chr11 | 676881943 | 67688672 | Blood T cells | 0.15 | 0.85 | Intergenic | UNC93B1 | U |
| 4249 | chr7 | 99221780 | 99222108 | Blood T cells | 0.2 | 0.89 | intron | ZSCAN25 | U |
| 4250 | chr15 | 78914218 | 78914285 | Blood T cells | 0.19 | 0.87 | promoter-TSS | CHRNA3 | U |
| 4251 | chr11 | 69153814 | 69153915 | Blood T cells | 0.21 | 0.89 | Intergenic | MYEOV | U |
| 4252 | chr5 | 142217501 | 14222178 | Blood T cells | 0.25 | 0.93 | intron | TRIO | U |
| 4253 | chr5 | 156616441 | 156616815 | Blood T cells | 0.22 | 0.89 | intron | ITK | U |
| 4254 | chr3 | 1285071603 | 128507648 | Blood T cells | 0.21 | 0.88 | intron | RAB7A | U |
| 4255 | chr17 | 2465833 | 2466048 | Blood T cells | 0.17 | 0.83 | Intergenic | PAFAH1B1 | U |
| 4256 | chrX | 16907400 | 16907708 | Blood T cells | 0.24 | 0.9 | Intergenic | RBBP7 | U |
| 4257 | chr17 | 75449254 | 75449558 | Blood T cells | 0.24 | 0.89 | intron | SEPT9 | U |
| 4258 | chr1 | 224906543 | 224906691 | Blood T cells | 0.24 | 0.88 | intron | CNIH3 | U |
| 4259 | chr7 | 99816908 | 99817259 | Blood T cells | 0.2 | 0.84 | intron | PVRIG | U |
| 4260 | chr6 | 39890453 | 39890917 | Blood T cells | 0.24 | 0.88 | intron | MOCS1 | U |
| 4261 | chr1 | 2949671 | 2949793 | Blood T cells | 0.25 | 0.88 | Intergenic | ACTRT2 | U |
| 4262 | chr2 | 1970209913 | 197021425 | Blood T cells | 0.27 | 0.9 | exor | STK17B | U |
| 4263 | chr6 | 91182911 | 91183254 | Blood T cells | 0.27 | 0.88 | Intergenic | MAP3K7 | U |
| 4264 | chr6 | 141887894 | 141888315 | Blood T cells | 0.27 | 0.88 | Intergenic | NMBR | U |
| 4265 | chr19 | 9919947 | 9920429 | Blood T cells | 0.28 | 0.89 | TTS, exon | FBXL12, FBXL12 | U |
| 4266 | chr4 | 10163370 | 10163839 | Blood T cells | 0.28 | 0.88 | Intergenic | WDR1 | U |
| 4267 | chr16 | 29033092 | 29033226 | Blood T cells | 0.29 | 0.87 | Intergenic | LAT | U |
| 4268 | chr15 | 58108937 | 58109125 | Blood T cells | 0.25 | 0.83 | Intergenic | POLR2M | U |
| 4269 | chr9 | 132653217 | 132653454 | Blood T cells | 0.33 | 0.91 | intron | FNBP1 | U |
| 4270 | chr15 | 22992596 | 22992896 | Blood T cells | 0.33 | 0.9 | intron | CYFIP1 | U |
| 4271 | chrX | 20372817 | 20372961 | Blood T cells | 0.22 | 0.78 | Intergenic | RPS6KA3 | U |
| 4272 | chr20 | 4359556 | 4359846 | Blood T cells | 0.33 | 0.89 | Intergenic | ADRA1D | U |
| 4273 | chr9 | 1356993141 | 135699800 | Blood T cells | 0.29 | 0.85 | intron | AK8 | U |
| 4274 | chr1 | 9252942 | 9253192 | Blood T cells | 0.23 | 0.77 | Intergenic | MIR34A | U |
| 4275 | chr11 | 1339282013 | 133928275 | Blood T cells | 0.07 | 0.89 | Intergenic | JAM3 | U |
| 4276 | chr1 | 226919824 | 226920198 | Blood T cells | 0.11 | 0.9 | intron | ITPKB | U |
| 4277 | chr3 | 28918821 | 28919041 | Blood T cells | 0.06 | 0.92 | Intergenic | HMBOX1 | U |
| 4278 | chr9 | 92096477 | 92096893 | Blood T cells | 0.06 | 0.89 | Intergenic | SEMA4D | U |
| 4279 | chr17 | 80084861 | 80085213 | Blood T cells | 0.1 | 0.92 | intron | CCDC57 | U |
| 4280 | chr14 | 22973391 | 22973496 | Blood T cells | 0.13 | 0.94 | Intergenic | DAD1 | U |
| 4281 | chr11 | 118214295 | 118214531 | Blood T cells | 0.09 | 0.89 | promoter-TSS | CD3G | U |
| 4282 | chr8 | 144543703 | 144543810 | Blood T cells | 0.28 | 0.91 | intron | ZC3H3 | U |
| 4283 | chr22 | 40297780 | 40297925 | Blood T cells | 0.02 | 0.9 | intron | GRAP2 | U |
| 4284 | chr17 | 80084613 | 80084816 | Blood T cells | 0.02 | 0.9 | intron | CCDC57 | U |
| 4285 | chr17 | 80084450 | 80084581 | Blood T cells | 0.07 | 0.94 | intron | CCDC57 | U |
| 4286 | chr7 | 138588277 | 138588505 | Blood T cells | 0.04 | 0.9 | exon | KIAA1549 | U |
| 4287 | chr14 | 61799217 | 61799678 | Blood T cells | 0.02 | 0.87 | intron | PRKCH | U |
| 4288 | chr1 | 8212967 | 8213183 | Blood T cells | 0.1 | 0.94 | Intergenic | ERRFI1 | U |
| 4289 | chr7 | 623458 | 623727 | Blood T cells | 0.07 | 0.91 | intron | PRKAR1B | U |
| 4290 | chr8 | 144543841 | 144544020 | Blood T cells | 0.07 | 0.9 | intron | ZC3H3 | U |
| 4291 | chr21 | 43825682 | 43825849 | Blood T cells | 0.11 | 0.93 | intron | UBASH3A | U |
| 4292 | chr22 | 40720366 | 40720634 | Blood T cells | 0.1 | 0.91 | exon | TNRC6B | U |
| 4293 | chr6 | 548666 | 548817 | Blood T cells | 0.11 | 0.9 | intron | EXOC2 | U |
| 4294 | chr9 | 132631612 | 132631844 | Blood T cells | 0.08 | 0.87 | intron | USP20 | U |
| 4295 | chr14 | 22965217 | 22965481 | Blood T cells | 0.15 | 0.94 | Intergenic | DAD1 | U |
| 4296 | chr14 | 69248340 | 69248721 | Blood T cells | 0.13 | 0.89 | Intergenic | ZFP36L1 | U |
| 4297 | chr9 | 97384575 | 97384723 | Blood T cells | 0.16 | 0.91 | intron | FBP1 | U |
| 4298 | chr21 | 43825906 | 43826269 | Blood T cells | 0.11 | 0.86 | intron | UBASH3A | U |
| 4299 | chr14 | 22983921 | 22984402 | Blood T cells | 0.12 | 0.87 | Intergenic | DAD1 | U |
| 4300 | chr14 | 91712322 | 91712592 | Blood T cells | 0.2 | 0.94 | intron | GPR68 | U |
| 4301 | chr7 | 138778366 | 138778558 | Blood T cells | 0.2 | 0.93 | intron | ZC3HAV1 | U |
| 4302 | chr22 | 37634189 | 37634518 | Blood T cells | 0.17 | 0.9 | intron | RAC2 | U |
| 4303 | chr13 | 114776475 | 114776550 | Blood T cells | 0.17 | 0.89 | intron | RASA3 | U |
| 4304 | chr22 | 40721118 | 40721588 | Blood T cells | 0.18 | 0.9 | exon | TNRC6B | U |
| 4305 | chr7 | 1864297 | 1864452 | Blood T cells | 0.13 | 0.84 | intron | MAD1L1 | U |
| 4306 | chr16 | 89163357 | 89163626 | Blood T cells | 0.2 | 0.89 | intron | ACSF3 | U |
| 4307 | chr19 | 1079683 | 1079785 | Blood T cells | 0.26 | 0.94 | intron | HMHA1 | U |
| 4308 | chr20 | 35273540 | 35274018 | Blood T cells | 0.23 | 0.91 | intron | SLA2 | U |
| 4309 | chr14 | 23017482 | 23017886 | Blood T cells | 0.22 | 0.89 | Intergenic | DAD1 | U |
| 4310 | chr14 | 22983517 | 22983907 | Blood T cells | 0.28 | 0.93 | Intergenic | DAD1 | U |
| 4311 | chr12 | 1334437263 | 133443869 | Blood T cells | 0.24 | 0.88 | intron | SCHER | U |
| 4312 | chr22 | 37627299 | 37627492 | Blood T cells | 0.23 | 0.86 | exon, intron | RAC2, RAC2 | U |
| 4313 | chr5 | 169407439 | 169407751 | Blood T cells | 0.89 | 0.07 | exon | FAM1968 | M |
| 4314 | chr10 | 92794681 | 92794868 | Blood T cells | 0.92 | 0.14 | Intergenic | LINC00502 | M |
| 4315 | chr19 | 18268001 | 18268236 | Blood T cells | 0.85 | 0.08 | intron | PIK3R2 | M |
| 4316 | chr6 | 108883848 | 108884146 | Blood T cells | 0.84 | 0.08 | intron | FOXO3 | M |
| 4317 | chr22 | 43390988 | 43391450 | Blood T cells | 0.81 | 0.09 | intron | PACSIN2 | M |
| 4318 | chr17 | 33825598 | 33825940 | Blood T cells | 0.88 | 0.22 | Intergenic | SLFN12L | M |
| 4319 | chr1 | 27855041 | 27855172 | Blood T cells | 0.64 | 0.04 | Intergenic | WASF2 | M |
| 4320 | chr12 | 51610762 | 51610956 | Blood T cells | 0.65 | 0.06 | intron | POU6F1 | M |
| 4321 | chr11 | 48001422 | 48001494 | Blood T cells | 0.69 | 0.11 | promoter-TSS | PTPRJ | M |
| 4322 | chr1 | 9352196 | 9352547 | Blood T cells | 0.58 | 0.08 | promoter-TSS | SPSB1 | M |
| 4323 | chr5 | 10695232 | 10695495 | Blood T cells | 0.66 | 0.03 | intron | DAP | M |
| 4324 | chr6 | 108883005 | 108883217 | Blood T cells | 0.91 | 0.07 | intron | FOXO3 | M |
| 4325 | chr6 | 108882762 | 108882982 | Blood T cells | 0.85 | 0.09 | exon | FOXO3 | M |
| 4326 | chr6 | 108883281 | 108883578 | Blood T cells | 0.87 | 0.11 | intron | FOXO3 | M |
| 4327 | chr3 | 170073717 | 170074014 | Blood T cells | 0.85 | 0.11 | Intergenic | SKIL | M |
| 4328 | chr1 | 24229215 | 24229320 | Blood T cells | 0.77 | 0.09 | intron | CNR2 | M |
| 4329 | chr6 | 12013731 | 12013888 | Blood T cells | 0.7 | 0.04 | intron | HIVEP1 | M |
| 4330 | chr10 | 88295324 | 88295707 | Blood T cells | 0.73 | 0.07 | Intergenic | WAPAL | M |
| 4331 | chr1 | 27928352 | 27928843 | Blood T cells | 0.69 | 0.04 | intron | AHDC1 | M |
| 4332 | chr18 | 46067903 | 45067968 | Blood T cells | 0.68 | 0.04 | intron | CTIF | M |
| 4333 | chr1 | 24229334 | 24229683 | Blood T cells | 0.64 | 0.03 | intron | CNR2 | M |
| 4334 | chr9 | 132806098 | 132806194 | Blood T cells | 0.65 | 0.06 | promoter-TSS | FNBP1 | M |
| 4335 | chr13 | 413642271 | 41364434 | Blood T cells | 0.62 | 0.03 | intron | SLC25A15 | M |
| 4336 | chr8 | 90770736 | 90770983 | Blood T cells | 0.64 | 0.05 | promoter-TSS, intron | RIPK2, RIPK2 | M |
| 4337 | chr22 | 21239949 | 21240108 | Blood T cells | 0.66 | 0.08 | intron | SNAP29 | M |
| 4338 | chr6 | 135513150 | 135513182 | Erythrocyte progenitor cells | 0.01 | 0.96 | intron | MYB | U |
| 4339 | chr16 | 31089524 | 31089734 | Erythrocyte progenitor cells | 0 | 0.95 | exon | ZNF646 | U |
| 4340 | chr19 | 13830749 | 13830838 | Erythrocyte progenitor cells | 0 | 0.94 | Intergenic | CCDC130 | U |
| 4341 | chr5 | 1452240223 | 145224183 | Erythrocyte progenitor cells | 0 | 0.94 | Intergenic | PRELID2 | U |
| 4342 | chr6 | 34583467 | 34583665 | Erythrocyte progenitor cells | 0 | 0.94 | intron | C6orf106 | U |
| 4343 | chr1 | 52541390 | 52541632 | Erythrocyte progenitor cells | 0 | 0.94 | intron | BTF3L4 | U |
| 4344 | chr16 | 566478 | 566642 | Erythrocyte progenitor cells | 0.01 | 0.94 | intron | RAB11FIP3 | U |
| 4345 | chr15 | 34946822 | 34947087 | Erythrocyte progenitor cells | 0.01 | 0.94 | Intergenic | GOLGA8B | U |
| 4346 | chr19 | 19396535 | 19396859 | Erythrocyte progenitor cells | 0.03 | 0.96 | intron | SUGP1 | U |
| 4347 | chr19 | 56045142 | 56045196 | Erythrocyte progenitor cells | 0.01 | 0.93 | intron | SBK2 | U |
| 4348 | chr8 | 41910906 | 41910992 | Erythrocyte progenitor cells | 0.01 | 0.93 | Intergenic | KAT6A | U |
| 4349 | chr12 | 113629175 | 113629398 | Erythrocyte progenitor cells | 0.02 | 0.94 | exon | C12orf52 | U |
| 4350 | chr9 | 1402835881 | 140283784 | Erythrocyte progenitor cells | 0.03 | 0.93 | intron | EXD3 | U |
| 4351 | chr16 | 449350 | 449653 | Erythrocyte progenitor cells | 0 | 0.9 | intron | NME4 | U |
| 4352 | chr9 | 139122369 | 139122429 | Erythrocyte progenitor cells | 0.05 | 0.95 | intron | QSOX2 | U |
| 4353 | chr15 | 85160527 | 85160623 | Erythrocyte progenitor cells | 0.06 | 0.96 | TTS | ZSCAN2 | U |
| 4354 | chr7 | 2369007 | 2369160 | Erythrocyte progenitor cells | 0.05 | 0.95 | Intergenic | SNX8 | U |
| 4355 | chr10 | 46070843 | 46071051 | Erythrocyte progenitor cells | 0.06 | 0.96 | intron | Mar-08 | U |
| 4356 | chr2 | 233922626 | 233922747 | Erythrocyte progenitor cells | 0.04 | 0.93 | Intergenic | INPP5D | U |
| 4357 | chr1 | 11975161 | 1197811 | Erythrocyte progenitor cells | 0.05 | 0.94 | intron | UBE2J2 | U |
| 4358 | chr7 | 100132911 | 100133067 | Erythrocyte progenitor cells | 0.06 | 0.94 | Intergenic | AGFG2 | U |
| 4359 | chr2 | 171834299 | 171834625 | Erythrocyte progenitor cells | 0.06 | 0.94 | Intergenic | GORASP2 | U |
| 4360 | chr16 | 21548067 | 21548198 | Erythrocyte progenitor cells | 0.11 | 0.95 | Intergenic | SLC7A5P2 | U |
| 4361 | chr11 | 43385285 | 43385628 | Erythrocyte progenitor cells | 0.12 | 0.95 | intron | TTC17 | U |
| 4362 | chr12 | 10854582 | 10854720 | Erythrocyte progenitor cells | 0 | 0.94 | intron | CSDA | U |
| 4363 | chr19 | 14253916 | 14254072 | Erythrocyte progenitor cells | 0 | 0.93 | intron | LOC100507373 | U |
| 4364 | chr2 | 37642469 | 37642704 | Erythrocyte progenitor cells | 0.01 | 0.93 | Intergenic | QPCT | U |
| 4365 | chr3 | 43719906 | 43720154 | Erythrocyte progenitor cells | 0.01 | 0.93 | Intergenic | ABHD5 | U |
| 4366 | chr19 | 6387724 | 6387972 | Erythrocyte progenitor cells | 0.01 | 0.93 | intron | GTF2F1 | U |
| 4367 | chr6 | 142733020 | 142733281 | Erythrocyte progenitor cells | 0.02 | 0.94 | intron | GPR126 | U |
| 4368 | chr8 | 41654193 | 41654456 | Erythrocyte progenitor cells | 0 | 0.91 | intron | ANK1 | U |
| 4369 | chr16 | 449680 | 449814 | Erythrocyte progenitor cells | 0 | 0.9 | exon, intron | NME4, NME4 | U |
| 4370 | chr8 | 41654461 | 41654661 | Erythrocyte progenitor cells | 0.01 | 0.91 | intron | ANK1 | U |
| 4371 | chr9 | 130603725 | 130603934 | Erythrocyte progenitor cells | 0 | 0.9 | intron | ENG | U |
| 4372 | chr3 | 98302871 | 98303126 | Erythrocyte progenitor cells | 0.01 | 0.91 | intron | CPOX | U |
| 4373 | chr1 | 230380975 | 230381265 | Erythrocyte progenitor cells | 0.05 | 0.95 | intron | GALNT2 | U |
| 4374 | chr5 | 141487592 | 141487910 | Erythrocyte progenitor cells | 0.05 | 0.95 | promoter-TSS | NDFIP1 | U |
| 4375 | chr6 | 160107983 | 160108315 | Erythrocyte progenitor cells | 0.01 | 0.91 | intron | SOD2 | U |
| 4376 | chr6 | 604475 | 604839 | Erythrocyte progenitor cells | 0.03 | 0.93 | intron | EXOC2 | U |
| 4377 | chr10 | 12067474 | 12067879 | Erythrocyte progenitor cells | 0.01 | 0.91 | intron | UPF2 | U |
| 4378 | chr1 | 155732093 | 155732567 | Erythrocyte progenitor cells | 0.04 | 0.94 | intron | GON4L | U |
| 4379 | chr2 | 9138738 | 9139229 | Erythrocyte progenitor cells | 0 | 0.9 | intron | MBOAT2 | U |
| 4380 | chr2 | 97584676 | 97584797 | Erythrocyte progenitor cells | 0.01 | 0.9 | intron | FAM1788 | U |
| 4381 | chr19 | 3194305 | 3194737 | Erythrocyte progenitor cells | 0.04 | 0.93 | intron | NCLN | U |
| 4382 | chr12 | 122640193 | 122640326 | Erythrocyte progenitor cells | 0 | 0.88 | Intergenic | LRRC43 | U |
| 4383 | chr7 | 5878899 | 5879036 | Erythrocyte progenitor cells | 0.02 | 0.9 | exon, intron | ZNF815P, ZNF815P | U |
| 4384 | chr6 | 161686743 | 161686906 | Erythrocyte progenitor cells | 0.01 | 0.89 | intron | AGPAT4 | U |
| 4385 | chr1 | 228333578 | 228333910 | Erythrocyte progenitor cells | 0.01 | 0.89 | intron | GUK1 | U |
| 4386 | chr2 | 1493006553 | 149300999 | Erythrocyte progenitor cells | 0 | 0.88 | Intergenic | EPC2 | U |
| 4387 | chr17 | 30626833 | 30627225 | Erythrocyte progenitor cells | 0.03 | 0.91 | intron | RHBDL3 | U |
| 4388 | chr3 | 49510811 | 49510850 | Erythrocyte progenitor cells | 0.04 | 0.91 | intron | DAG1 | U |
| 4389 | chr12 | 53704069 | 53704171 | Erythrocyte progenitor cells | 0.03 | 0.9 | intron | AAAS | U |
| 4390 | chr9 | 140283642 | 140283835 | Erythrocyte progenitor cells | 0.07 | 0.94 | intron | EXD3 | U |
| 4391 | chr1 | 179277528 | 179277802 | Erythrocyte progenitor cells | 0.07 | 0.94 | intron | SOAT1 | U |
| 4392 | chr2 | 74358977 | 74359290 | Erythrocyte progenitor cells | 0.04 | 0.91 | Intergenic | BOLA3 | U |
| 4393 | chr1 | 17044689 | 17044818 | Erythrocyte progenitor cells | 0.01 | 0.87 | intron | ESPNP | U |
| 4394 | chr2 | 2202188683 | 220219030 | Erythrocyte progenitor cells | 0.01 | 0.87 | Intergenic | RESP1B | U |
| 4395 | chr1 | 21680073 | 21680300 | Erythrocyte progenitor cells | 0.01 | 0.87 | Intergenic | LOC100506801 | U |
| 4396 | chr4 | 79731105 | 79731565 | Erythrocyte progenitor cells | 0.04 | 0.9 | intron | BMP2K | U |
| 4397 | chr17 | 81079169 | 81079664 | Erythrocyte progenitor cells | 0.06 | 0.91 | Intergenic | METRNL | U |
| 4398 | chr2 | 106002785 | 106002910 | Erythrocyte progenitor cells | 0.1 | 0.94 | exon | FHL2 | U |
| 4399 | chr19 | 42911473 | 42911641 | Erythrocyte progenitor cells | 0.06 | 0.9 | intron, exon, intron | LIPE, LIPE, LIPE | U |
| 4400 | chr14 | 101513595 | 101513839 | Erythrocyte progenitor cells | 0.02 | 0.86 | promoter-TSS | MIR539 | U |
| 4401 | chr7 | 5500335 | 5500580 | Erythrocyte progenitor cells | 0.09 | 0.93 | Intergenic | MIR589 | U |
| 4402 | chr3 | 186276568 | 186276814 | Erythrocyte progenitor cells | 0.11 | 0.94 | intron | TBCCD1 | U |
| 4403 | chr16 | 74546117 | 74546248 | Erythrocyte progenitor cells | 0.15 | 0.97 | intron | GLG1 | U |
| 4404 | chr3 | 156787192 | 156787465 | Erythrocyte progenitor cells | 0.08 | 0.9 | Intergenic | LOC100498859 | U |
| 4405 | chr8 | 145276559 | 145276678 | Erythrocyte progenitor cells | 0.08 | 0.89 | intron | MROH1 | U |
| 4406 | chr7 | 1990001 | 1990145 | Erythrocyte progenitor cells | 0.09 | 0.9 | intron | MADIL1 | U |
| 4407 | chr7 | 1894920 | 1895079 | Erythrocyte progenitor cells | 0.13 | 0.94 | intron | MAD1L1 | U |
| 4408 | chr16 | 577586103 | 57758778 | Erythrocyte progenitor cells | 0.08 | 0.89 | exon, intron | CCDC135, CCDC135 | U |
| 4409 | chr16 | 29666057 | 29666231 | Erythrocyte progenitor cells | 0.1 | 0.91 | Intergenic | SPN | U |
| 4410 | chr17 | 80419253 | 80419526 | Erythrocyte progenitor cells | 0.13 | 0.94 | intron | NARF | U |
| 4411 | chr5 | 1802090101 | 180209317 | Erythrocyte progenitor cells | 0.09 | 0.9 | Intergenic | MGAT1 | U |
| 4412 | chr10 | 127504782 | 127505166 | Erythrocyte progenitor cells | 0.14 | 0.95 | intron | UROS | U |
| 4413 | chr16 | 449076 | 449259 | Erythrocyte progenitor cells | 0.13 | 0.93 | exon, intron | NME4, NME4 | U |
| 4414 | chr12 | 53703422 | 53703823 | Erythrocyte progenitor cells | 0.05 | 0.85 | intron | AAAS | U |
| 4415 | chr3 | 197283517 | 197283945 | Erythrocyte progenitor cells | 0.12 | 0.92 | promoter-TSS | BDH1 | U |
| 4416 | chr2 | 9508904 | 9509139 | Erythrocyte progenitor cells | 0.13 | 0.92 | intron | ASAP2 | U |
| 4417 | chr11 | 65613991 | 65614226 | Erythrocyte progenitor cells | 0.08 | 0.87 | intron | SNX32 | U |
| 4418 | chr5 | 177604200 | 177604526 | Erythrocyte progenitor cells | 0.14 | 0.93 | Intergenic | GMCL1P1 | U |
| 4419 | chr13 | 114020135 | 114020574 | Erythrocyte progenitor cells | 0.12 | 0.91 | Intergenic | GRTP1 | U |
| 4420 | chr17 | 57779656 | 57780121 | Erythrocyte progenitor cells | 0.15 | 0.94 | intron | PTRH2 | U |
| 4421 | chr7 | 99892312 | 99892531 | Erythrocyte progenitor cells | 0.15 | 0.93 | Intergenic | SPDYE3 | U |
| 4422 | chr19 | 50376109 | 50376389 | Erythrocyte progenitor cells | 0.14 | 0.92 | intron, exon | AKT1S1, AKT1S1 | U |
| 4423 | chr7 | 66104515 | 66104804 | Erythrocyte progenitor cells | 0.13 | 0.91 | exon | KCTD7 | U |
| 4424 | chr17 | 2823992 | 2824289 | Erythrocyte progenitor cells | 0.14 | 0.92 | intron | RAP1GAP2 | U |
| 4425 | chr1 | 228113376 | 228113762 | Erythrocyte progenitor cells | 0.13 | 0.91 | intron | WNT9A | U |
| 4426 | chr3 | 45563583 | 45563981 | Erythrocyte progenitor cells | 0.15 | 0.93 | intron | LARS2 | U |
| 4427 | chr19 | 439487841 | 43948972 | Erythrocyte progenitor cells | 0.12 | 0.89 | Intergenic | LYPD3 | U |
| 4428 | chr15 | 78568978 | 78569357 | Erythrocyte progenitor cells | 0.07 | 0.84 | intron | DNAJA4 | U |
| 4429 | chr1 | 90363428 | 90363837 | Erythrocyte progenitor cells | 0.16 | 0.92 | intron | LRRC8D | U |
| 4430 | chr12 | 110533427 | 110533921 | Erythrocyte progenitor cells | 0.15 | 0.91 | Intergenic | IFT81 | U |
| 4431 | chr14 | 104197417 | 104197579 | Erythrocyte progenitor cells | 0.19 | 0.94 | intron | ZFYVE21 | U |
| 4432 | chr16 | 67615261 | 67615568 | Erythrocyte progenitor cells | 0.2 | 0.95 | intron | CTCF | U |
| 4433 | chr16 | 16248495 | 16248667 | Erythrocyte progenitor cells | 0.16 | 0.9 | exon | ABCC6 | U |
| 4434 | chr2 | 218931177 | 218931403 | Erythrocyte progenitor cells | 0.15 | 0.88 | intron | RUFY4 | U |
| 4435 | chr9 | 4850162 | 4850407 | Erythrocyte progenitor cells | 0.21 | 0.94 | promoter-TSS | MIR101-2 | U |
| 4436 | chr16 | 31029177 | 31029458 | Erythrocyte progenitor cells | 0.15 | 0.88 | Intergenic | STX18 | U |
| 4437 | chr21 | 46487394 | 46487786 | Erythrocyte progenitor cells | 0.16 | 0.89 | Intergenic | SSR4P1 | U |
| 4438 | chr3 | 127303699 | 127303878 | Erythrocyte progenitor cells | 0.22 | 0.94 | intron | TPRA1 | U |
| 4439 | chr19 | 2421753 | 2421967 | Erythrocyte progenitor cells | 0.21 | 0.93 | intron, exon | TMPRSS9, TMPRSS9 | U |
| 4440 | chr2 | 96837551 | 96837915 | Erythrocyte progenitor cells | 0.21 | 0.93 | Intergenic | DUSP2 | U |
| 4441 | chr19 | 12910879 | 12911053 | Erythrocyte progenitor cells | 0.18 | 0.89 | TTS | PRDX2 | U |
| 4442 | chr7 | 129593580 | 129593730 | Erythrocyte progenitor cells | 0.21 | 0.91 | promoter-TSS | UBE2H | U |
| 4443 | chr21 | 33940107 | 33940423 | Erythrocyte progenitor cells | 0.24 | 0.94 | Intergenic | TCP10L | U |
| 4444 | chr7 | 120648099 | 120648446 | Erythrocyte progenitor cells | 0.24 | 0.94 | intron | CPED1 | U |
| 4445 | chr12 | 1600710 | 1601104 | Erythrocyte progenitor cells | 0.22 | 0.92 | exor | ERC1 | U |
| 4446 | chr8 | 128904792 | 128905016 | Erythrocyte progenitor cells | 0.25 | 0.94 | intron | PVT1 | U |
| 4447 | chr1 | 19439018 | 19439348 | Erythrocyte progenitor cells | 0.26 | 0.95 | intron | UBR4 | U |
| 4448 | chr12 | 112170744 | 112171151 | Erythrocyte progenitor cells | 0.28 | 0.93 | intron | ACAD10 | U |
| 4449 | chr16 | 157905833 | 15790760 | Erythrocyte progenitor cells | 0.3 | 0.94 | intron | NDE1 | U |
| 4450 | chr16 | 68806081 | 68806566 | Erythrocyte progenitor cells | 0.03 | 0.91 | intron | CDH1 | U |
| 4451 | chr3 | 10178211 | 10178463 | Erythrocyte progenitor cells | 0.12 | 0.93 | Intergenic | VHL | U |
| 4452 | chr13 | 111948368 | 111948464 | Erythrocyte progenitor cells | 0.17 | 0.96 | TTS | ARHGEF7 | U |
| 4453 | chr14 | 103213119 | 103213348 | Erythrocyte progenitor cells | 0.17 | 0.91 | Intergenic | TRAF3 | U |
| 4454 | chr9 | 114911542 | 114911999 | Erythrocyte progenitor cells | 0.06 | 0.92 | intron | SUSD1 | U |
| 4455 | chr14 | 31666439 | 31666606 | Erythrocyte progenitor cells | 0 | 0.9 | intron | HECTD1 | U |
| 4456 | chr22 | 38532110 | 38532334 | Erythrocyte progenitor cells | 0.03 | 0.91 | intron | PLA2G6 | U |
| 4457 | chr9 | 1068642481 | 106864520 | Erythrocyte progenitor cells | 0.05 | 0.93 | intron, exon | SMC2, SMC2 | U |
| 4458 | chr19 | 5996750 | 5997048 | Erythrocyte progenitor cells | 0.01 | 0.89 | intron | RFX2 | U |
| 4459 | ofchi2 | 304954163 | 30495827 | Erythrocyte progenitor cells | 0.02 | 0.89 | intron | TTLL9 | U |
| 4460 | chr15 | 78555871 | 78556250 | Erythrocyte progenitor cells | 0.05 | 0.9 | promoter-TSS, Interg [symbol] | DNAJA4, DNAJA4 | U |
| 4461 | chr20 | 45993559 | 45993701 | Erythrocyte progenitor cells | 0.08 | 0.92 | Intergenic | ZMYND8 | U |
| 4462 | chr14 | 20871852 | 20872145 | Erythrocyte progenitor cells | 0.09 | 0.92 | intron | TEP1 | U |
| 4463 | chr14 | 39786036 | 39786529 | Erythrocyte progenitor cells | 0.16 | 0.95 | intron | CTAGE5 | U |
| 4464 | chr22 | 39884875 | 39885010 | Erythrocyte progenitor cells | 0.15 | 0.91 | exon | MGAT3 | U |
| 4465 | chr17 | 80171382 | 80171582 | Erythrocyte progenitor cells | 0.63 | 0.06 | promoter-TSS | CCDC57 | M |
| 4466 | chr6 | 157505409 | 157505527 | Erythrocyte progenitor cells | 0.55 | 0.11 | exon | ARID1B | M |
| 4467 | chr5 | 1274178341 | 127417987 | Erythrocyte progenitor cells | 0.58 | 0.21 | intron | FLI33630 | M |
| 4468 | chr11 | 796841 | 796992 | Erythrocyte progenitor cells | 0.57 | 0.22 | promoter-TSS | SLC25A22 | M |
| 4469 | chr1 | 151162943 | 151162973 | Erythrocyte progenitor cells | 0.54 | 0.21 | promoter-TSS | VPS72 | M |
| 4470 | chr8 | 89392239 | 89392496 | Erythrocyte progenitor cells | 0.82 | 0.87 | Intergenic | MMP16 | M |
| 4471 | chrX | 84117156 | 84117269 | Epidermal Keratinocytes | 0.03 | 0.92 | Intergenic | UBE2DNL | U |
| 4472 | chr5 | 2592741 | 2592950 | Epidermal Keratinocytes | 0.02 | 0.9 | Intergenic | IRX2 | U |
| 4473 | chr16 | 79143557 | 79143897 | Epidermal Keratinocytes | 0.03 | 0.9 | intron | WWOX | U |
| 4474 | chr3 | 65838606 | 65838836 | Epidermal Keratinocytes | 0.07 | 0.92 | intron | MAGI1 | U |
| 4475 | chr8 | 90867618 | 90867746 | Epidermal Keratinocytes | 0.11 | 0.95 | Intergenic | OSGIN2 | U |
| 4476 | chr12 | 4424217 | 4424338 | Epidermal Keratinocytes | 0.09 | 0.92 | Intergenic | C12orf5 | U |
| 4477 | chr12 | 106289786 | 106290035 | Epidermal Keratinocytes | 0.1 | 0.91 | Intergenic | NUAK1 | U |
| 4478 | chr19 | 2230349 | 2230507 | Epidermal Keratinocytes | 0.13 | 0.93 | exon | DOT1L | U |
| 4479 | chr1 | 32466777 | 32467150 | Epidermal Keratinocytes | 0.11 | 0.89 | Intergenic | KHDRBS1 | U |
| 4480 | chr21 | 46169969 | 46170228 | Epidermal Keratinocytes | 0.15 | 0.92 | Intergenic | TSPEAR | U |
| 4481 | chr1 | 6010708 | 6010977 | Epidermal Keratinocytes | 0.14 | 0.91 | intron | NPHP4 | U |
| 4482 | chr1 | 116471365 | 116471755 | Epidermal Keratinocytes | 0.15 | 0.91 | Intergenic | SLC22A15 | U |
| 4483 | chr15 | 35320312 | 35320433 | Epidermal Keratinocytes | 0.17 | 0.92 | Intergenic | ZNF770 | U |
| 4484 | chr3 | 37890977 | 37891333 | Epidermal Keratinocytes | 0.2 | 0.93 | Intergenic | CTDSPL | U |
| 4485 | chr12 | 106749774 | 106750248 | Epidermal Keratinocytes | 0.2 | 0.92 | Intergenic | POLR3B | U |
| 4486 | chr13 | 27699652 | 27700119 | Epidermal Keratinocytes | 0.27 | 0.96 | intron | USP12 | U |
| 4487 | chr12 | 6475922 | 6476358 | Epidermal Keratinocytes | 0.24 | 0.92 | intron | SCNN1A | U |
| 4488 | chr1 | 246959768 | 246960053 | Epidermal Keratinocytes | 0.27 | 0.94 | Intergenic | LOC149134 | U |
| 4489 | chr19 | 877313 | 877799 | Epidermal Keratinocytes | 0.27 | 0.93 | intron | MED16 | U |
| 4490 | chr11 | 61917560 | 61917804 | Epidermal Keratinocytes | 0.3 | 0.93 | intron | INCENP | U |
| 4491 | chr8 | 2135497 | 2135629 | Epidermal Keratinocytes | 0.03 | 0.63 | Intergenic | MYOM2 | U |
| 4492 | chr17 | 2172445 | 2172644 | Epidermal Keratinocytes | 0.35 | 0.95 | intron | SMG6 | U |
| 4493 | chr18 | 28876586 | 28876648 | Epidermal Keratinocytes | 0.05 | 0.93 | Intergenic | DSG1 | U |
| 4494 | chr15 | 52531305 | 52531368 | Epidermal Keratinocytes | 0.04 | 0.92 | intron | MYO5C | U |
| 4495 | chr19 | 48925153 | 48925209 | Epidermal Keratinocytes | 0.06 | 0.93 | exon, intron | GRIN2D, GRIN2D | U |
| 4496 | chr6 | 169850857 | 169850988 | Epidermal Keratinocytes | 0.03 | 0.9 | Intergenic | THBS2 | U |
| 4497 | chr11 | 76869347 | 76869413 | Epidermal Keratinocytes | 0.07 | 0.92 | intron | MYO7A | U |
| 4498 | chr15 | 28099623 | 28099842 | Epidermal Keratinocytes | 0.04 | 0.89 | intron | OCA2 | U |
| 4499 | chrX | 152998053 | 152998156 | Epidermal Keratinocytes | 0.08 | 0.92 | intron | ABCD1 | U |
| 4500 | chr11 | 48080498 | 48080643 | Epidermal Keratinocytes | 0.03 | 0.87 | intron | PTPRJ | U |
| 4501 | chr11 | 1140895363 | 114089817 | Epidermal Keratinocytes | 0.07 | 0.9 | intron | ZBTB16 | U |
| 4502 | chr1 | 246959348 | 246959700 | Epidermal Keratinocytes | 0.07 | 0.9 | Intergenic | LOC149134 | U |
| 4503 | chr12 | 92677309 | 92677664 | Epidermal Keratinocytes | 0.09 | 0.91 | Intergenic | BTG1 | U |
| 4504 | chr16 | 88760182 | 88760278 | Epidermal Keratinocytes | 0.1 | 0.91 | Intergenic | SNAI3 | U |
| 4505 | chr16 | 578492401 | 57849356 | Epidermal Keratinocytes | 0.06 | 0.87 | Intergenic | KIFC3 | U |
| 4506 | chr14 | 101868213 | 101868345 | Epidermal Keratinocytes | 0.07 | 0.88 | Intergenic | DIO3OS | U |
| 4507 | chrX | 152079723 | 152079875 | Epidermal Keratinocytes | 0.08 | 0.89 | Intergenic | ZNF185 | U |
| 4508 | chrX | 48349412 | 48349483 | Epidermal Keratinocytes | 0 | 0.8 | Intergenic | FTSJ1 | U |
| 4509 | chr9 | 136527053 | 136527191 | Epidermal Keratinocytes | 0.1 | 0.9 | Intergenic | DBH | U |
| 4510 | chr8 | 20176552 | 20176780 | Epidermal Keratinocytes | 0.12 | 0.92 | Intergenic | LZTS1-AS1 | U |
| 4511 | chr13 | 106891181 | 106891238 | Epidermal Keratinocytes | 0.11 | 0.9 | Intergenic | LINC00460 | U |
| 4512 | chr16 | 15803146 | 15803424 | Epidermal Keratinocytes | 0.14 | 0.93 | intron | MYH11 | U |
| 4513 | chr15 | 99659291 | 99659469 | Epidermal Keratinocytes | 0.1 | 0.88 | exon | SYNM | U |
| 4514 | chr1 | 32171523 | 32171741 | Epidermal Keratinocytes | 0.12 | 0.9 | Intergenic | COL16A1 | U |
| 4515 | chr8 | 2135178 | 2135470 | Epidermal Keratinocytes | 0.05 | 0.83 | Intergenic | MYOM2 | U |
| 4516 | chr10 | 91252311 | 91252644 | Epidermal Keratinocytes | 0.12 | 0.89 | intron | SLC16A12 | U |
| 4517 | chr6 | 82008699 | 82009196 | Epidermal Keratinocytes | 0.11 | 0.88 | Intergenic | FAM46A | U |
| 4518 | chr1 | 9390401 | 939130 | Epidermal Keratinocytes | 0.16 | 0.92 | Intergenic | HES4 | U |
| 4519 | chr1 | 385077801 | 38507887 | Epidermal Keratinocytes | 0.16 | 0.92 | Intergenic | POU3F1 | U |
| 4520 | chr1 | 116690861 | 116691020 | Epidermal Keratinocytes | 0.14 | 0.9 | Intergenic | MAB21L3 | U |
| 4521 | chr2 | 110424988 | 110425335 | Epidermal Keratinocytes | 0.13 | 0.89 | Intergenic | SOWAHC | U |
| 4522 | chr174 | 76553240 | 76553636 | Epidermal Keratinocytes | 0.09 | 0.85 | intron | DNAH17 | U |
| 4523 | chr14 | 98414975 | 98415030 | Epidermal Keratinocytes | 0.16 | 0.91 | intron | C14orf64 | U |
| 4524 | chr10 | 125117714 | 125117858 | Epidermal Keratinocytes | 0.1 | 0.85 | Intergenic | BUB3 | U |
| 4525 | chr5 | 80982809 | 80983081 | Epidermal Keratinocytes | 0.2 | 0.95 | intron | SSBP2 | U |
| 4526 | chr17 | 54926110 | 54926430 | Epidermal Keratinocytes | 0.18 | 0.93 | intron | DGKE | U |
| 4527 | chr9 | 1309387141 | 130939120 | Epidermal Keratinocytes | 0.19 | 0.94 | intron | CIZ1 | U |
| 4528 | chr7 | 2160533 | 2160617 | Epidermal Keratinocytes | 0.15 | 0.89 | intron | MAD1L1 | U |
| 4529 | chr10 | 44702307 | 44702403 | Epidermal Keratinocytes | 0.14 | 0.88 | Intergenic | LOC100130539 | U |
| 4530 | chr7 | 116085373 | 116085530 | Epidermal Keratinocytes | 0.15 | 0.89 | Intergenic | CAV2 | U |
| 4531 | chr1 | 214721551 | 214721786 | Epidermal Keratinocytes | 0.15 | 0.89 | intron | PTPN14 | U |
| 4532 | chr10 | 63424439 | 63424719 | Epidermal Keratinocytes | 0.14 | 0.88 | intron | C10orf107 | U |
| 4533 | chr1 | 2117017851 | 211702236 | Epidermal Keratinocytes | 0.11 | 0.85 | Intergenic | RD3 | U |
| 4534 | chrx | 49127163 | 49127402 | Epidermal Keratinocytes | 0.12 | 0.85 | promoter-TSS | PPP1R3F | U |
| 4535 | chr8 | 98391448 | 98391550 | Epidermal Keratinocytes | 0.16 | 0.88 | Intergenic | TSPYL5 | U |
| 4536 | chrX | 48330441 | 48330603 | Epidermal Keratinocytes | 0.11 | 0.83 | Intergenic | SLC38A5 | U |
| 4537 | chr7 | 152289520 | 152289720 | Epidermal Keratinocytes | 0.15 | 0.87 | Intergenic | XRCC2 | U |
| 4538 | chr17 | 48895912 | 48896138 | Epidermal Keratinocytes | 0.2 | 0.92 | Intergenic | WFIKKN2 | U |
| 4539 | chr21 | 44578204 | 44578445 | Epidermal Keratinocytes | 0.13 | 0.84 | Intergenic | CRYAA | U |
| 4540 | chr7 | 148180198 | 148180560 | Epidermal Keratinocytes | 0.22 | 0.93 | Intergenic | C7orf33 | U |
| 4541 | chr9 | 1329058163 | 132905902 | Epidermal Keratinocytes | 0.12 | 0.82 | Intergenic | NCS1 | U |
| 4542 | chr15 | 85372719 | 85372852 | Epidermal Keratinocytes | 0.22 | 0.92 | intron | ALPK3 | U |
| 4543 | chr9 | 139151659 | 139151843 | Epidermal Keratinocytes | 0.13 | 0.83 | Intergenic | QSOX2 | U |
| 4544 | chrX | 151807905 | 151808145 | Epidermal Keratinocytes | 0.11 | 0.81 | intron | GABRQ | U |
| 4545 | chr18 | 77938790 | 77938892 | Epidermal Keratinocytes | 0.2 | 0.89 | intron | PARD6G | U |
| 4546 | chr11 | 57126582 | 57126711 | Epidermal Keratinocytes | 0.15 | 0.84 | intron | P2RX3 | U |
| 4547 | chr17 | 71097077 | 71097238 | Epidermal Keratinocytes | 0.26 | 0.95 | Intergenic | SLC39A11 | U |
| 4548 | chr1 | 237546768 | 237547021 | Epidermal Keratinocytes | 0.19 | 0.88 | intron | RYR2 | U |
| 4549 | chr7 | 40938603 | 40938875 | Epidermal Keratinocytes | 0.15 | 0.84 | Intergenic | C7orf10 | U |
| 4550 | chr5 | 168202191 | 16820638 | Epidermal Keratinocytes | 0.23 | 0.92 | intron | MYO10 | U |
| 4551 | chr22 | 486052761 | 48605314 | Epidermal Keratinocytes | 0.16 | 0.84 | Intergenic | MIR3201 | U |
| 4552 | chr7 | 126298920 | 126299005 | Epidermal Keratinocytes | 0.2 | 0.88 | Intron | GRM8 | U |
| 4553 | chr17 | 639372 | 639583 | Epidermal Keratinocytes | 0.26 | 0.94 | intron | FAM57A | U |
| 4554 | chr16 | 54244135 | 54244396 | Epidermal Keratinocytes | 0.18 | 0.86 | Intergenic | IRX3 | U |
| 4555 | chr10 | 99239715 | 99240020 | Epidermal Keratinocytes | 0.19 | 0.87 | intron | MMS19 | U |
| 4556 | chr8 | 119044608 | 119044938 | Epidermal Keratinocytes | 0.23 | 0.91 | intron | EXT1 | U |
| 4557 | chr1 | 245786057 | 245786216 | Epidermal Keratinocytes | 0.24 | 0.91 | intron | KIF26B | U |
| 4558 | chr1 | 2055734691 | 205573736 | Epidermal Keratinocytes | 0.26 | 0.93 | Intergenic | ELK4 | U |
| 4559 | chr11 | 125276308 | 125276504 | Epidermal Keratinocytes | 0.2 | 0.86 | intron | PKNOX2 | U |
| 4560 | chr17 | 724151281 | 72415595 | Epidermal Keratinocytes | 0.24 | 0.9 | Intergenic | GPRC5C | U |
| 4561 | chr20 | 60306851 | 60307049 | Epidermal Keratinocytes | 0.18 | 0.82 | intron | CDH4 | U |
| 4562 | chr1 | 53995480 | 53995661 | Epidermal Keratinocytes | 0.27 | 0.9 | exon | GLIS1 | U |
| 4563 | chr16 | 23495499 | 23495664 | Epidermal Keratinocytes | 0.31 | 0.93 | intron | GGA2 | U |
| 4564 | chr19 | 46787721 | 46788042 | Epidermal Keratinocytes | 0.3 | 0.92 | intron | RNU6-66 | U |
| 4565 | chr15 | 50945080 | 50945477 | Epidermal Keratinocytes | 0.3 | 0.92 | intron | TRPM7 | U |
| 4566 | chr12 | 6475764 | 6475891 | Epidermal Keratinocytes | 0.31 | 0.92 | intron | SCNN1A | U |
| 4567 | chr17 | 62938635 | 62938768 | Epidermal Keratinocytes | 0.31 | 0.92 | Intergenic | LRRC37A3 | U |
| 4568 | chr13 | 24152430 | 24152564 | Epidermal Keratinocytes | 0.27 | 0.88 | intron | TNFRSF19 | U |
| 4569 | chr21 | 40128349 | 40128578 | Epidermal Keratinocytes | 0.34 | 0.93 | intron | LINC00114 | U |
| 4570 | chr1 | 236266130 | 236266146 | Epidermal Keratinocytes | 0.3 | 0.88 | Intergenic | NID1 | U |
| 4571 | chr17 | 79638116 | 79638334 | Epidermal Keratinocytes | 0.39 | 0.96 | intron | CCDC137 | U |
| 4572 | chr12 | 699039 | 699443 | Epidermal Keratinocytes | 0.36 | 0.92 | intron | NINJ2 | U |
| 4573 | chr11 | 62680073 | 6268253 | Epidermal Keratinocytes | 0.39 | 0.91 | Intergenic | CNGA4 | U |
| 4574 | chr10 | 8302733 | 8302841 | Epidermal Keratinocytes | 0.08 | 0.92 | Intergenic | GATA3 | U |
| 4575 | chrX | 1530573881 | 153057520 | Epidermal Keratinocytes | 0.13 | 0.88 | intron | IDH3G | U |
| 4576 | chr6 | 71602829 | 71603020 | Epidermal Keratinocytes | 0.14 | 0.87 | intron | B3GAT2 | U |
| 4577 | chr20 | 50884577 | 50884769 | Epidermal Keratinocytes | 0.21 | 0.91 | Intergenic | ZFP64 | U |
| 4578 | chr8 | 71185517 | 71185641 | Epidermal Keratinocytes | 0.05 | 0.92 | intron | NCOA2 | U |
| 4579 | chr1 | 236044087 | 236044286 | Epidermal Keratinocytes | 0.18 | 0.92 | Intergenic | LYST | U |
| 4580 | chr16 | 1017921 | 1018068 | Epidermal Keratinocytes | 0.07 | 0.92 | intron | LMF1 | U |
| 4581 | chr2 | 9960715 | 9960843 | Epidermal Keratinocytes | 0.05 | 0.87 | Intergenic | TAF1B | U |
| 4582 | chr6 | 12185473 | 12185769 | Epidermal Keratinocytes | 0.09 | 0.9 | Intergenic | EDN1 | U |
| 4583 | chr8 | 144203483 | 144203628 | Epidermal Keratinocytes | 0.12 | 0.91 | Intergenic | LY6H | U |
| 4584 | chr4 | 122144251 | 122144586 | Epidermal Keratinocytes | 0.11 | 0.89 | intron | TNIP3 | U |
| 4585 | chr9 | 34659141 | 34659216 | Epidermal Keratinocytes | 0.15 | 0.92 | intron | IL11RA | U |
| 4586 | chr7 | 54866720 | 54866924 | Epidermal Keratinocytes | 0.13 | 0.88 | Intergenic | SEC61G | U |
| 4587 | chr21 | 46169568 | 46169950 | Epidermal Keratinocytes | 0.13 | 0.88 | Intergenic | TSPEAR | U |
| 4588 | chr6 | 10115299 | 10115347 | Epidermal Keratinocytes | 0.21 | 0.93 | Intergenic | LOC100130275 | U |
| 4589 | chr14 | 24241129 | 24241240 | Epidermal Keratinocytes | 0.25 | 0.94 | Intergenic | DHRS2 | U |
| 4590 | chr8 | 144203694 | 144203777 | Epidermal Keratinocytes | 0.22 | 0.9 | Intergenic | LY6H | U |
| 4591 | chr11 | 60515803 | 60515948 | Epidermal Keratinocytes | 0.23 | 0.91 | Intergenic | MS4A15 | U |
| 4592 | chr16 | 88709751 | 88710019 | Epidermal Keratinocytes | 0.22 | 0.9 | TTS, exon | CYBA, CYBA | U |
| 4593 | chr17 | 60739758 | 60740225 | Epidermal Keratinocytes | 0.28 | 0.9 | intron | MRC2 | U |
| 4594 | chr1 | 2522399 | 2522847 | Epidermal Keratinocytes | 0.34 | 0.93 | exon | FAM213B | U |
| 4595 | chr3 | 179182829 | 179183167 | Epidermal Keratinocytes | 0.35 | 0.92 | Intergenic | GNB4 | U |
| 4596 | chr17 | 18345569 | 18345653 | Epidermal Keratinocytes | 0.96 | 0.11 | exon, intron | KRT16P1, KRT16P1 | M |
| 4597 | chr12 | 54384175 | 54384440 | Epidermal Keratinocytes | 0.69 | 0.12 | TTS | HOXC10 | M |
| 4598 | chrX | 152950260 | 152950499 | Epidermal Keratinocytes | 0.9 | 0.37 | Intergenic | SLC6A8 | M |
| 4599 | chr7 | 27225772 | 27225898 | Epidermal Keratinocytes | 0.86 | 0.18 | promoter-TSS | HOXA11 | M |
| 4600 | chr10 | 119294251 | 119294603 | Epidermal Keratinocytes | 0.88 | 0.09 | intron | EMX2OS | M |
| 4601 | chr19 | 52223109 | 52223208 | Epidermal Keratinocytes | 0.9 | 0.12 | intron | HAS1 | M |
| 4602 | chr5 | 3602865 | 3603307 | Epidermal Keratinocytes | 0.9 | 0.12 | Intergenic | IRX1 | M |
| 4603 | chr12 | 54360064 | 54360424 | Epidermal Keratinocytes | 0.92 | 0.15 | intron | HOTAIR | M |
| 4604 | chr12 | 54345855 | 54346116 | Epidermal Keratinocytes | 0.83 | 0.11 | Intergenic | HOXC12 | M |
| 4605 | chr1 | 209849084 | 209849396 | Epidermal Keratinocytes | 0.75 | 0.03 | exon | G0S2 | M |
| 4606 | chr5 | 134879183 | 134879241 | Epidermal Keratinocytes | 0.87 | 0.16 | Intergenic | NEUROG1 | M |
| 4607 | chr17 | 48049829 | 48049928 | Epidermal Keratinocytes | 0.77 | 0.07 | promoter-TSS | DLX4 | M |
| 4608 | chr12 | 54354783 | 54355008 | Epidermal Keratinocytes | 0.79 | 0.1 | Intergenic | HOXC12 | M |
| 4609 | chr12 | 54355009 | 54355431 | Epidermal Keratinocytes | 0.76 | 0.07 | TTS | HOTAIR | M |
| 4610 | chr12 | 54346155 | 54346439 | Epidermal Keratinocytes | 0.83 | 0.15 | Intergenic | HOXC12 | M |
| 4611 | chr17 | 48041265 | 48041556 | Epidermal Keratinocytes | 0.73 | 0.07 | Intergenic | DLX4 | M |
| 4612 | chr17 | 48041956 | 48042292 | Epidermal Keratinocytes | 0.8 | 0.14 | Intergenic | DLX4 | M |
| 4613 | chr7 | 27225396 | 27225734 | Epidermal Keratinocytes | 0.75 | 0.12 | promoter-TSS | HOXA11 | M |
| 4614 | chr2 | 219647056 | 219647233 | Epidermal Keratinocytes | 0.67 | 0.06 | exon, intron | CYP27A1, CYP27A1 | M |
| 4615 | chr12 | 54345258 | 54345650 | Epidermal Keratinocytes | 0.68 | 0.11 | Intergenic | HOXC12 | M |
| 4616 | chr12 | 54345660 | 54345841 | Epidermal Keratinocytes | 0.58 | 0.06 | Intergenic | HOXC12 | M |
| 4617 | chr5 | 78281663 | 78281984 | Epidermal Keratinocytes | 0.58 | 0.06 | promoter-TSS | ARSB | M |
| 4618 | chr12 | 54383396 | 54383766 | Epidermal Keratinocytes | 0.57 | 0.12 | exon | HOXC10 | M |
| 4619 | chr12 | 47298922 | 47298957 | Dermal Fibroblasts | 0.08 | 0.92 | Intergenic | SLC38A4 | U |
| 4620 | chr11 | 104454814 | 104454954 | Dermal Fibroblasts | 0.07 | 0.91 | Intergenic | CASP12 | U |
| 4621 | chr15 | 50684234 | 50684377 | Dermal Fibroblasts | 0.07 | 0.9 | Intergenic | MIR4712 | U |
| 4622 | chr13 | 68483269 | 68483339 | Dermal Fibroblasts | 0.05 | 0.88 | Intergenic | PCDH9 | U |
| 4623 | chr7 | 36650421 | 36650719 | Dermal Fibroblasts | 0.09 | 0.91 | intron | AOAH | U |
| 4624 | chr3 | 169250875 | 169251263 | Dermal Fibroblasts | 0.05 | 0.87 | intron | MECOM | U |
| 4625 | chr12 | 51943598 | 51943720 | Dermal Fibroblasts | 0.11 | 0.89 | Intergenic | SCN8A | U |
| 4626 | chr2 | 99690665 | 99690793 | Dermal Fibroblasts | 0.15 | 0.91 | intron | TSGA10 | U |
| 4627 | chr8 | 26238970 | 26239143 | Dermal Fibroblasts | 0.16 | 0.92 | Intergenic | BNIP3L | U |
| 4628 | chr8 | 13359161 | 13359514 | Dermal Fibroblasts | 0.09 | 0.85 | intron | DLC1 | U |
| 4629 | chr16 | 81183400 | 81183469 | Dermal Fibroblasts | 0.16 | 0.9 | exon | PKD1L2 | U |
| 4630 | chrX | 134033886 | 134034247 | Dermal Fibroblasts | 0.1 | 0.84 | intron | MOSPD1 | U |
| 4631 | chr17 | 6152148 | 6152348 | Dermal Fibroblasts | 0.18 | 0.91 | Intergenic | WSCD1 | U |
| 4632 | chr1 | 222080603 | 222080834 | Dermal Fibroblasts | 0.2 | 0.9 | Intergenic | DUSP10 | U |
| 4633 | chr19 | 36662820 | 36662960 | Dermal Fibroblasts | 0.07 | 0.76 | Intergenic | COX7A1 | U |
| 4634 | chr3 | 11791178 | 11791495 | Dermal Fibroblasts | 0.2 | 0.89 | Intergenic | VGLLA | U |
| 4635 | chr7 | 6266433 | 6266755 | Dermal Fibroblasts | 0.22 | 0.89 | intron | CYTH3 | U |
| 4636 | chr11 | 66816067 | 66816270 | Dermal Fibroblasts | 0.3 | 0.93 | exon | SYT12 | U |
| 4637 | chrY | 7287132 | 7287207 | Dermal Fibroblasts | 0.06 | 0.66 | Intergenic | PRKY | U |
| 4638 | chr17 | 64077760 | 64078210 | Dermal Fibroblasts | 0.35 | 0.95 | intron | CEP112 | U |
| 4639 | chr6 | 80776401 | 80776577 | Dermal Fibroblasts | 0.35 | 0.92 | Intergenic | BCKDHB | U |
| 4640 | chr7 | 65668495 | 65668767 | Dermal Fibroblasts | 0.32 | 0.88 | Intergenic | TPST1 | U |
| 4641 | chr17 | 79390776 | 79391088 | Dermal Fibroblasts | 0.09 | 0.61 | intron | BAHCC1 | U |
| 4642 | chr2 | 60457415 | 60457705 | Dermal Fibroblasts | 0.04 | 0.9 | Intergenic | MIR4432 | U |
| 4643 | chr18 | 7129948 | 7130102 | Dermal Fibroblasts | 0.09 | 0.85 | Intergenic | LAMA1 | U |
| 4644 | chr8 | 62322984 | 62323287 | Dermal Fibroblasts | 0.08 | 0.84 | intron | CLVS1 | U |
| 4645 | chr3 | 61649226 | 61649611 | Dermal Fibroblasts | 0.16 | 0.9 | intron | PTPRG | U |
| 4646 | chr16 | 81183402 | 81183470 | Dermal Fibroblasts | 0.17 | 0.9 | exon | PKD1L2 | U |
| 4647 | chr7 | 1182309 | 1182436 | Dermal Fibroblasts | 0.13 | 0.86 | Intergenic | C7orf50 | U |
| 4648 | chr5 | 4023345 | 4023729 | Dermal Fibroblasts | 0.1 | 0.83 | Intergenic | IRX1 | U |
| 4649 | chr13 | 114620058 | 114620176 | Dermal Fibroblasts | 0.13 | 0.85 | Intergenic | LINC00565 | U |
| 4650 | chr10 | 2409461 | 2409680 | Dermal Fibroblasts | 0.16 | 0.88 | Intergenic | LINC00701 | U |
| 4651 | chr17 | 54337761 | 54338003 | Dermal Fibroblasts | 0.1 | 0.82 | intron | ANKFN1 | U |
| 4652 | chr13 | 22330275 | 22330375 | Dermal Fibroblasts | 0.15 | 0.86 | Intergenic | FGF9 | U |
| 4653 | chr2 | 1113111 | 1113451 | Dermal Fibroblasts | 0.09 | 0.8 | intron | SNTG2 | U |
| 4654 | chr10 | 102566154 | 102566256 | Dermal Fibroblasts | 0.16 | 0.86 | exon | PAX2 | U |
| 4655 | chr22 | 49061263 | 49061300 | Dermal Fibroblasts | 0.18 | 0.87 | intron | FAM19A5 | U |
| 4656 | chr6 | 167384565 | 167384733 | Dermal Fibroblasts | 0.21 | 0.9 | Intergenic | RNASET2 | U |
| 4657 | chr10 | 110085565 | 110085777 | Dermal Fibroblasts | 0.18 | 0.87 | Intergenic | RNU6-53 | U |
| 4658 | chr11 | 1639388 | 1639550 | Dermal Fibroblasts | 0.2 | 0.88 | intron | MOB2 | U |
| 4659 | chr2 | 28575383 | 28575616 | Dermal Fibroblasts | 0.2 | 0.88 | Intergenic | FOSL2 | U |
| 4660 | chr18 | 21300187 | 21300466 | Dermal Fibroblasts | 0.21 | 0.89 | intron | LAMA3 | U |
| 4661 | chr7 | 155211140 | 155211198 | Dermal Fibroblasts | 0.21 | 0.88 | Intergenic | EN2 | U |
| 4662 | chr21 | 40021088 | 40021155 | Dermal Fibroblasts | 0.24 | 0.91 | Intron | ERG | U |
| 4663 | chr6 | 1406547 | 1406727 | Dermal Fibroblasts | 0.15 | 0.82 | Intergenic | FOXF2 | U |
| 4664 | chr2 | 62443595 | 62443884 | Dermal Fibroblasts | 0.2 | 0.87 | intron | B3GNT2 | U |
| 4665 | chr13 | 23820643 | 23820940 | Dermal Fibroblasts | 0.2 | 0.87 | intron | SGCG | U |
| 4666 | chr18 | 26042946 | 26043292 | Dermal Fibroblasts | 0.19 | 0.86 | Intergenic | CDH2 | U |
| 4667 | chr17 | 7256414 | 7256482 | Dermal Fibroblasts | 0.19 | 0.85 | exon | KCTD11 | U |
| 4668 | chr4 | 183312528 | 183312683 | Dermal Fibroblasts | 0.19 | 0.85 | intron | TENM3 | U |
| 4669 | chr15 | 99981501 | 99981772 | Dermal Fibroblasts | 0.22 | 0.88 | Intergenic | MEF2A | U |
| 4670 | chrX | 25734836 | 25735304 | Dermal Fibroblasts | 0.12 | 0.78 | Intergenic | MAGEB18 | U |
| 4671 | chr15 | 89111807 | 89112040 | Dermal Fibroblasts | 0.16 | 0.81 | Intergenic | DET1 | U |
| 4672 | chr17 | 54512024 | 54512329 | Dermal Fibroblasts | 0.21 | 0.86 | intron | ANKFN1 | U |
| 4673 | chr5 | 91244079 | 91244449 | Dermal Fibroblasts | 0.19 | 0.84 | Intergenic | ARRDC3 | U |
| 4674 | chr5 | 120422725 | 120422805 | Dermal Fibroblasts | 0.22 | 0.86 | Intergenic | PRR16 | U |
| 4675 | chr5 | 898191 | 89958 | Dermal Fibroblasts | 0.23 | 0.87 | Intergenic | PLEKHG4B | U |
| 4676 | chrX | 18852174 | 18852336 | Dermal Fibroblasts | 0.17 | 0.81 | Intergenic | PHKA2-AS1 | U |
| 4677 | chr14 | 81712529 | 81712902 | Dermal Fibroblasts | 0.23 | 0.87 | Intergenic | GTF2A1 | U |
| 4678 | chr17 | 15242034 | 15242125 | Dermal Fibroblasts | 0.31 | 0.94 | intron | TEKT3 | U |
| 4679 | chr13 | 114620235 | 114620337 | Dermal Fibroblasts | 0.24 | 0.87 | Intergenic | LINC00565 | U |
| 4680 | chr21 | 41218176 | 41218297 | Dermal Fibroblasts | 0.28 | 0.91 | Intergenic | PCP4 | U |
| 4681 | chr5 | 166774911 | 166775092 | Dermal Fibroblasts | 0.26 | 0.89 | intron | TENM2 | U |
| 4682 | chr18 | 52781109 | 52781340 | Dermal Fibroblasts | 0.25 | 0.88 | Intergenic | CCDC68 | U |
| 4683 | chrX | 118747545 | 118747628 | Dermal Fibroblasts | 0.22 | 0.84 | Intergenic | NKRF | U |
| 4684 | chr11 | 130886648 | 130887074 | Dermal Fibroblasts | 0.27 | 0.89 | Intergenic | SNX19 | U |
| 4685 | chr5 | 66934952 | 66935091 | Dermal Fibroblasts | 0.27 | 0.88 | Intergenic | CD180 | U |
| 4686 | chr2 | 145408181 | 145408618 | Dermal Fibroblasts | 0.29 | 0.9 | Intergenic | DKFZp68501327 | U |
| 4687 | chr8 | 95040092 | 95040575 | Dermal Fibroblasts | 0.28 | 0.89 | Intergenic | PDP1 | U |
| 4688 | chr11 | 42272254 | 42272345 | Dermal Fibroblasts | 0.27 | 0.87 | intron | LOC100507205 | U |
| 4689 | chr16 | 62994506 | 62994647 | Dermal Fibroblasts | 0.31 | 0.91 | Intergenic | CDH8 | U |
| 4690 | chr10 | 28685637 | 28685825 | Dermal Fibroblasts | 0.24 | 0.84 | Intergenic | MPP7 | U |
| 4691 | chr13 | 87215142 | 87215336 | Dermal Fibroblasts | 0.27 | 0.87 | Intergenic | SLITRK6 | U |
| 4692 | chr5 | 5132809 | 5133037 | Dermal Fibroblasts | 0.3 | 0.9 | Intergenic | ADAMTS16 | U |
| 4693 | chr11 | 72415227 | 72415280 | Dermal Fibroblasts | 0.29 | 0.88 | exon | ARAP1 | U |
| 4694 | chr14 | 101864895 | 101864968 | Dermal Fibroblasts | 0.32 | 0.91 | Intergenic | DIO3OS | U |
| 4695 | chr18 | 73888077 | 73888224 | Dermal Fibroblasts | 0.3 | 0.89 | Intergenic | LOC339298 | U |
| 4696 | chr2 | 165655267 | 165655525 | Dermal Fibroblasts | 0.34 | 0.93 | intron | COBLL1 | U |
| 4697 | chr8 | 41328179 | 41328507 | Dermal Fibroblasts | 0.2 | 0.79 | Intergenic | GOLGA7 | U |
| 4698 | chr16 | 68396507 | 68396843 | Dermal Fibroblasts | 0.26 | 0.85 | intron | SMPD3 | U |
| 4699 | chr15 | 89270476 | 89270532 | Dermal Fibroblasts | 0.29 | 0.87 | Intergenic | ACAN | U |
| 4700 | chr13 | 101717738 | 101717918 | Dermal Fibroblasts | 0.31 | 0.89 | exon | NALCN | U |
| 4701 | chr21 | 46248887 | 46249273 | Dermal Fibroblasts | 0.27 | 0.85 | Intergenic | SUMO3 | U |
| 4702 | chr1 | 87338081 | 87338253 | Dermal Fibroblasts | 0.37 | 0.94 | intron | SEP15 | U |
| 4703 | chr1 | 71240943 | 71241182 | Dermal Fibroblasts | 0.23 | 0.8 | Intergenic | ZRANB2-AS1 | U |
| 4704 | chr3 | 72628306 | 72628676 | Dermal Fibroblasts | 0.23 | 0.8 | Intergenic | RYBP | U |
| 4705 | chr19 | 6207787 | 6208210 | Dermal Fibroblasts | 0.27 | 0.84 | Intergenic | MLLT1 | U |
| 4706 | chr8 | 144457024 | 144457465 | Dermal Fibroblasts | 0.32 | 0.89 | intron | RHPN1 | U |
| 4707 | chr16 | 86901654 | 86901892 | Dermal Fibroblasts | 0.31 | 0.87 | Intergenic | FOXLI | U |
| 4708 | chr19 | 8085903 | 8086328 | Dermal Fibroblasts | 0.29 | 0.85 | Intergenic | ELAVL1 | U |
| 4709 | chrX | 3491869 | 3492347 | Dermal Fibroblasts | 0.26 | 0.82 | Intergenic | PRKX | U |
| 4710 | chr18 | 65647088 | 65647305 | Dermal Fibroblasts | 0.27 | 0.82 | Intergenic | DSEL | U |
| 4711 | chr6 | 166249801 | 166249862 | Dermal Fibroblasts | 0.36 | 0.9 | Intergenic | LINC00602 | U |
| 4712 | chr12 | 295430611 | 29543199 | Dermal Fibroblasts | 0.36 | 0.9 | intron | LOC101055625 | U |
| 4713 | chr10 | 766464 | 766765 | Dermal Fibroblasts | 0.36 | 0.9 | Intergenic | DIP2C | U |
| 4714 | chr3 | 21847797 | 21847989 | Dermal Fibroblasts | 0.35 | 0.88 | Intergenic | ZNF385D | U |
| 4715 | chr15 | 98648149 | 98648258 | Dermal Fibroblasts | 0.39 | 0.9 | Intergenic | ARRDC4 | U |
| 4716 | chr2 | 232739219 | 232739571 | Dermal Fibroblasts | 0.33 | 0.84 | Intergenic | MIR1471 | U |
| 4717 | chr5 | 62400816 | 62401078 | Dermal Fibroblasts | 0.4 | 0.9 | Intergenic | LRRC70 | U |
| 4718 | chr7 | 151097193 | 151097689 | Dermal Fibroblasts | 0.39 | 0.89 | intron | WDR86 | U |
| 4719 | chr2 | 1096982181 | 109698498 | Dermal Fibroblasts | 0.37 | 0.85 | Intergenic | SH3RF3 | U |
| 4720 | chr8 | 41118707 | 41119167 | Dermal Fibroblasts | 0.08 | 0.84 | TTS | SFRP1 | U |
| 4721 | chr13 | 1117705803 | 111770837 | Dermal Fibroblasts | 0.1 | 0.87 | intron | ARHGEF7 | U |
| 4722 | chr21 | 27843249 | 27843440 | Dermal Fibroblasts | 0.16 | 0.88 | intron | CYYR1 | U |
| 4723 | chr11 | 105695367 | 105695635 | Dermal Fibroblasts | 0.15 | 0.84 | intron | GRIA4 | U |
| 4724 | chr12 | 13966164 | 13966589 | Dermal Fibroblasts | 0.18 | 0.83 | Intron | GRIN2B | U |
| 4725 | chr21 | 34314271 | 34314436 | Dermal Fibroblasts | 0.28 | 0.89 | Intergenic | OLIG2 | U |
| 4726 | chr2 | 85289565 | 85289866 | Dermal Fibroblasts | 0.28 | 0.88 | Intergenic | TCF7L1 | U |
| 4727 | chr4 | 190748609 | 190748983 | Dermal Fibroblasts | 0.27 | 0.86 | Intergenic | FRG1 | U |
| 4728 | chr6 | 9564844 | 9564989 | Dermal Fibroblasts | 0.19 | 0.88 | Intergenic | LOC100130275 | U |
| 4729 | chr20 | 20913889 | 20914064 | Dermal Fibroblasts | 0.11 | 0.88 | Intergenic | PLK1S1 | U |
| 4730 | chr12 | 14819230 | 14819535 | Dermal Fibroblasts | 0.19 | 0.91 | intron | GUCY2C | U |
| 4731 | chr13 | 114075763 | 114075950 | Dermal Fibroblasts | 0.17 | 0.86 | TTS | ADPRHL1 | U |
| 4732 | chr9 | 77399441 | 77399749 | Dermal Fibroblasts | 0.15 | 0.83 | intron | TRPM6 | U |
| 4733 | chr11 | 64427940 | 64428279 | Dermal Fibroblasts | 0.17 | 0.84 | intron | NRXN2 | U |
| 4734 | chr22 | 23138766 | 23139149 | Dermal Fibroblasts | 0.24 | 0.89 | Intergenic | MIR650 | U |
| 4735 | chr16 | 84823111 | 84823267 | Dermal Fibroblasts | 0.29 | 0.88 | Intergenic | CRISPLD2 | U |
| 4736 | chr14 | 88527213 | 88527494 | Dermal Fibroblasts | 0.28 | 0.86 | intron | LOC283587 | U |
| 4737 | chr20 | 16542545 | 16542727 | Dermal Fibroblasts | 0.31 | 0.88 | intron | KIF16B | U |
| 4738 | chr5 | 177708296 | 177708499 | Dermal Fibroblasts | 0.34 | 0.89 | intron | COL23A1 | U |
| 4739 | chr8 | 136440032 | 136440406 | Dermal Fibroblasts | 0.36 | 0.89 | Intergenic | KHDRBS3 | U |
| 4740 | chr10 | 112326274 | 112326400 | Dermal Fibroblasts | 0.37 | 0.86 | Intergenic | SMC3 | U |
| 4741 | chr20 | 41965620 | 41965878 | Dermal Fibroblasts | 0.39 | 0.87 | Intergenic | SRSF6 | U |
| 4742 | chr7 | 27241913 | 27242098 | Dermal Fibroblasts | 0.85 | 0.12 | exon | HOTTIP | M |
| 4743 | chr7 | 27242911 | 27243256 | Dermal Fibroblasts | 0.89 | 0.17 | intron | HOTTIP | M |
| 4744 | chr2 | 1068862141 | 106886708 | Dermal Fibroblasts | 0.73 | 0.05 | Intergenic | UXS1 | M |
| 4745 | chr12 | 115130140 | 115130437 | Dermal Fibroblasts | 0.54 | 0.04 | Intergenic | TBX3 | M |
| 4746 | chr1 | 148604014 | 148604095 | Dermal Fibroblasts | 0.77 | 0.39 | Intergenic | PPIAL4E | M |
| 4747 | chr4 | 190991531 | 190991966 | Dermal Fibroblasts | 0.91 | 0.57 | promoter-TSS | DUX4L6 | M |
| 4748 | chr11 | 44333794 | 44334264 | Dermal Fibroblasts | 0.7 | 0.12 | Intergenic | ALX4 | M |
| 4749 | chr2 | 119592075 | 119592516 | Dermal Fibroblasts | 0.95 | 0.13 | Intergenic | EN1 | M |
| 4750 | chr3 | 157815256 | 157815624 | Dermal Fibroblasts | 0.89 | 0.08 | exon | SHOX2 | M |
| 4751 | chr2 | 119592543 | 119592929 | Dermal Fibroblasts | 0.84 | 0.06 | Intergenic | EN1 | M |
| 4752 | chr1 | 119535707 | 119535963 | Dermal Fibroblasts | 0.91 | 0.16 | Intergenic | TBX15 | M |
| 4753 | chr2 | 119614187 | 119614576 | Dermal Fibroblasts | 0.83 | 0.09 | Intergenic | EN1 | M |
| 4754 | chr3 | 157816222 | 157816601 | Dermal Fibroblasts | 0.84 | 0.11 | intron | SHOX2 | M |
| 4755 | chr7 | 27232857 | 27232967 | Dermal Fibroblasts | 0.8 | 0.1 | Intergenic | HOXA13 | M |
| 4756 | chr2 | 1752079433 | 175208160 | Dermal Fibroblasts | 0.85 | 0.15 | Intergenic | SP9 | M |
| 4757 | chr2 | 175195675 | 175196043 | Dermal Fibroblasts | 0.86 | 0.16 | TTS | LOC285084 | M |
| 4758 | chr2 | 175208488 | 175208650 | Dermal Fibroblasts | 0.81 | 0.12 | Intergenic | SP9 | M |
| 4759 | chr2 | 1196145941 | 119614858 | Dermal Fibroblasts | 0.76 | 0.07 | Intergenic | EN1 | M |
| 4760 | chr7 | 27233045 | 27233242 | Dermal Fibroblasts | 0.85 | 0.17 | Intergenic | HOXA13 | M |
| 4761 | chr7 | 27237063 | 27237340 | Dermal Fibroblasts | 0.82 | 0.16 | exon | HOXA13 | M |
| 4762 | chr2 | 175196199 | 175196562 | Dermal Fibroblasts | 0.81 | 0.15 | Intergenic | SP9 | M |
| 4763 | chr7 | 27240758 | 27241133 | Dermal Fibroblasts | 0.72 | 0.11 | exor | HOTTIP | M |
| 4764 | chr8 | 17271025 | 17271348 | Dermal Fibroblasts | 0.67 | 0.08 | promoter-TSS | MTMR7 | M |
| 4765 | chr2 | 119614872 | 119615072 | Dermal Fibroblasts | 0.67 | 0.1 | Intergenic | EN1 | M |
| 4766 | chr3 | 157812688 | 157812966 | Dermal Fibroblasts | 0.69 | 0.12 | TTS | SHOX2 | M |
| 4767 | chr13 | 76765436 | 76765494 | Osteoblasts | 0.01 | 0.89 | Intergenic | C13orf45 | U |
| 4768 | chr6 | 143447049 | 143447402 | Osteoblasts | 0.05 | 0.93 | intron | AIG1 | U |
| 4769 | chr7 | 6952692 | 6952930 | Osteoblasts | 0.06 | 0.92 | Intergenic | CCZ1B | U |
| 4770 | chr2 | 39646607 | 39647084 | Osteoblasts | 0.02 | 0.88 | intron | MAP4K3 | U |
| 4771 | chr1 | 244532629 | 244532893 | Osteoblasts | 0.07 | 0.91 | intron | C1orf100 | U |
| 4772 | chr19 | 57454683 | 57454949 | Osteoblasts | 0.08 | 0.92 | Intergenic | MIMT1 | U |
| 4773 | chr13 | 76765181 | 76765309 | Osteoblasts | 0.08 | 0.91 | Intergenic | C13orf45 | U |
| 4774 | chr1 | 118130149 | 118130486 | Osteoblasts | 0.09 | 0.92 | Intergenic | FAM46C | U |
| 4775 | chr17 | 206787531 | 20678921 | Osteoblasts | 0.11 | 0.93 | Intergenic | LOC100287072 | U |
| 4776 | chr4 | 7107002 | 7107094 | Osteoblasts | 0.12 | 0.91 | Intergenic | FLI36777 | U |
| 4777 | chr12 | 19589066 | 19589285 | Osteoblasts | 0.1 | 0.89 | Intergenic | AEBP2 | U |
| 4778 | chr16 | 86264260 | 86264308 | Osteoblasts | 0.12 | 0.89 | Intergenic | LOC146513 | U |
| 4779 | chr11 | 1520812 | 1520881 | Osteoblasts | 0.26 | 0.97 | intron | MOB2 | U |
| 4780 | chr5 | 1501806 | 1502130 | Osteoblasts | 0.24 | 0.95 | intron | LPCAT1 | U |
| 4781 | chr2 | 34887501 | 3489235 | Osteoblasts | 0.23 | 0.92 | Intergenic | ADI1 | U |
| 4782 | chr7 | 105159466 | 105159943 | Osteoblasts | 0.29 | 0.95 | intron | PUS7 | U |
| 4783 | chr5 | 154334374 | 154334648 | Osteoblasts | 0.35 | 0.96 | intron | MRPL22 | U |
| 4784 | chr10 | 100288820 | 100288831 | Osteoblasts | 0.04 | 0.96 | intron | HPSE2 | U |
| 4785 | chr15 | 89238600 | 89238630 | Osteoblasts | 0.03 | 0.91 | Intergenic | ISG20 | U |
| 4786 | chr8 | 117168001 | 117168155 | Osteoblasts | 0.03 | 0.91 | intron | LINC00536 | U |
| 4787 | chr4 | 184962449 | 184962691 | Osteoblasts | 0.04 | 0.91 | Intergenic | STOX2 | U |
| 4788 | chr1 | 172215845 | 172216338 | Osteoblasts | 0.03 | 0.9 | intron | DNM3 | U |
| 4789 | chr7 | 730057 | 730536 | Osteoblasts | 0.06 | 0.92 | intron | PRKAR1B | U |
| 4790 | chr10 | 3856157 | 3856583 | Osteoblasts | 0.02 | 0.87 | Intergenic | KLF6 | U |
| 4791 | chr17 | 77713422 | 77713480 | Osteoblasts | 0.04 | 0.88 | intron | ENPP7 | U |
| 4792 | chr10 | 100288470 | 100288791 | Osteoblasts | 0.01 | 0.85 | intron | HPSE2 | U |
| 4793 | chr17 | 40997798 | 40997852 | Osteoblasts | 0.03 | 0.86 | exon | AOC2 | U |
| 4794 | chr9 | 138428373 | 138428451 | Osteoblasts | 0.03 | 0.86 | Intergenic | OBP2A | U |
| 4795 | chr1 | 10881052 | 10881210 | Osteoblasts | 0.05 | 0.88 | Intergenic | CASZ1 | U |
| 4796 | chr4 | 16695064 | 16695222 | Osteoblasts | 0.05 | 0.88 | intron | LDB2 | U |
| 4797 | chr12 | 132431728 | 132431778 | Osteoblasts | 0.11 | 0.93 | Intergenic | EP400 | U |
| 4798 | chr2 | 237228919 | 237228993 | Osteoblasts | 0.05 | 0.87 | Intergenic | ASB18 | U |
| 4799 | chr7 | 71790979 | 71791077 | Osteoblasts | 0.07 | 0.89 | intron | CALNJ | U |
| 4800 | chr9 | 124206177 | 124206331 | Osteoblasts | 0.09 | 0.91 | Intergenic | GGTA1P | U |
| 4801 | chr17 | 12949850 | 12950004 | Osteoblasts | 0.06 | 0.88 | Intergenic | ELAC2 | U |
| 4802 | chr17 | 16833421 | 16833663 | Osteoblasts | 0.08 | 0.9 | Intergenic | TNFRSF13B | U |
| 4803 | chr3 | 182999060 | 182999530 | Osteoblasts | 0.06 | 0.88 | intron | MCF2L2 | U |
| 4804 | chr17 | 77713718 | 77713771 | Osteoblasts | 0.07 | 0.88 | intron | ENPP7 | U |
| 4805 | chr12 | 111522484 | 111522676 | Osteoblasts | 0.09 | 0.9 | intron | CUX2 | U |
| 4806 | chr6 | 169110971 | 169111170 | Osteoblasts | 0.06 | 0.87 | Intergenic | SMOC2 | U |
| 4807 | chr18 | 46486493 | 46486702 | Osteoblasts | 0.07 | 0.88 | Intergenic | SMAD7 | U |
| 4808 | chr6 | 107204712 | 107204932 | Osteoblasts | 0.09 | 0.9 | intron | LOC100422737 | U |
| 4809 | chr5 | 159566311 | 159566544 | Osteoblasts | 0.08 | 0.89 | Intergenic | PWWP2A | U |
| 4810 | chr10 | 28490796 | 28491051 | Osteoblasts | 0.06 | 0.87 | intron | MPP7 | U |
| 4811 | chr4 | 186835453 | 186835753 | Osteoblasts | 0.09 | 0.9 | intron | SORBS2 | U |
| 4812 | chr1 | 22729239 | 22729326 | Osteoblasts | 0.07 | 0.87 | Intergenic | ZBTB40 | U |
| 4813 | chr2 | 23531183 | 235311959 | Osteoblasts | 0.02 | 0.82 | Intergenic | ARL4C | U |
| 4814 | chr7 | 74254530 | 74254686 | Osteoblasts | 0.1 | 0.9 | intron | GTF2IRD2 | U |
| 4815 | chr9 | 125878907 | 125879080 | Osteoblasts | 0.13 | 0.93 | Intergenic | MIR600HG | U |
| 4816 | chr17 | 71334790 | 71334988 | Osteoblasts | 0.1 | 0.9 | exon | SDK2 | U |
| 4817 | chr17 | 70318036 | 70318269 | Osteoblasts | 0.08 | 0.88 | Intergenic | SOX9 | U |
| 4818 | chr4 | 27056084 | 27056412 | Osteoblasts | 0.09 | 0.89 | Intergenic | STIM2 | U |
| 4819 | chr4 | 188104455 | 188104695 | Osteoblasts | 0.08 | 0.87 | Intergenic | LOC339975 | U |
| 4820 | chr2 | 100214336 | 100214597 | Osteoblasts | 0.07 | 0.86 | intron | AFF3 | U |
| 4821 | chr2 | 237105887 | 237106294 | Osteoblasts | 0.07 | 0.86 | intron | ASB18 | U |
| 4822 | chr12 | 18868524 | 18868939 | Osteoblasts | 0.06 | 0.85 | intron | PLCZ1 | U |
| 4823 | chr5 | 141633552 | 141633688 | Osteoblasts | 0.08 | 0.86 | Intergenic | SPRY4 | U |
| 4824 | chr3 | 145899029 | 145899202 | Osteoblasts | 0.14 | 0.92 | Intergenic | PLOD2 | U |
| 4825 | chr2 | 47763919 | 47764260 | Osteoblasts | 0.12 | 0.9 | intron | KCNK12 | U |
| 4826 | chr15 | 85826295 | 85826642 | Osteoblasts | 0.11 | 0.89 | Intergenic | LOC642423 | U |
| 4827 | chr3 | 175598604 | 175599090 | Osteoblasts | 0.09 | 0.87 | Intergenic | MIR4789 | U |
| 4828 | chr5 | 175863425 | 175863560 | Osteoblasts | 0.09 | 0.86 | Intergenic | FAF2 | U |
| 4829 | chr15 | 65234718 | 65234984 | Osteoblasts | 0.09 | 0.86 | exon, intron | ANKDD1A, ANKDD1A | U |
| 4830 | chr11 | 46953537 | 46953836 | Osteoblasts | 0.11 | 0.88 | Intergenic | C11orf49 | U |
| 4831 | chr2 | 225464554 | 225464869 | Osteoblasts | 0.14 | 0.91 | Intergenic | CUL3 | U |
| 4832 | chr2 | 121222350 | 121222490 | Osteoblasts | 0.15 | 0.91 | exon | LOC84931 | U |
| 4833 | chr15 | 86557719 | 86557900 | Osteoblasts | 0.13 | 0.89 | Intergenic | AGBL1 | U |
| 4834 | chr17 | 59361606 | 59361958 | Osteoblasts | 0.17 | 0.93 | intron | BCAB3 | U |
| 4835 | chr1 | 245242718 | 245242841 | Osteoblasts | 0.06 | 0.81 | intron | EFCAB2 | U |
| 4836 | chr8 | 75009771 | 75009896 | Osteoblasts | 0.15 | 0.9 | Intergenic | LY96 | U |
| 4837 | chr2 | 175631591 | 175631770 | Osteoblasts | 0.12 | 0.87 | Intergenic | CHRNA1 | U |
| 4838 | chr14 | 101171821 | 101172072 | Osteoblasts | 0.15 | 0.9 | Intergenic | DLK1 | U |
| 4839 | chr15 | 77253399 | 77253650 | Osteoblasts | 0.12 | 0.87 | Intergenic | RCN2 | U |
| 4840 | chr12 | 2483309 | 2483755 | Osteoblasts | 0.09 | 0.84 | intron | CACNA1C | U |
| 4841 | chr5 | 39615979 | 39616082 | Osteoblasts | 0.18 | 0.92 | Intergenic | DAB2 | U |
| 4842 | chr21 | 39324736 | 39324840 | Osteoblasts | 0.1 | 0.84 | Intergenic | KCNJ6 | U |
| 4843 | chr6 | 157906764 | 157906994 | Osteoblasts | 0.16 | 0.89 | intron | ZDHHC14 | U |
| 4844 | chr2 | 172753519 | 172753976 | Osteoblasts | 0.17 | 0.9 | Intergenic | SLC25A12 | U |
| 4845 | chr2 | 205337267 | 205337491 | Osteoblasts | 0.13 | 0.85 | Intergenic | PARD3B | U |
| 4846 | chr5 | 153913670 | 153914092 | Osteoblasts | 0.13 | 0.85 | Intergenic | HAND1 | U |
| 4847 | chr8 | 123106884 | 123107335 | Osteoblasts | 0.16 | 0.88 | Intergenic | HAS2 | U |
| 4848 | chr4 | 53536853 | 53537331 | Osteoblasts | 0.13 | 0.85 | Intergenic | USP46 | U |
| 4849 | chr10 | 74673021 | 74673364 | Osteoblasts | 0.16 | 0.86 | exon, intron | OIT3, OIT3 | U |
| 4850 | chr6 | 1179370311 | 117937449 | Osteoblasts | 0.2 | 0.9 | Intergenic | GOPC | U |
| 4851 | chr22 | 45070295 | 45070430 | Osteoblasts | 0.2 | 0.89 | intron | PRRS | U |
| 4852 | chr16 | 870620461 | 87062274 | Osteoblasts | 0.19 | 0.88 | Intergenic | C16orf95 | U |
| 4853 | chr7 | 1396534541 | 139653729 | Osteoblasts | 0.25 | 0.94 | intron | TBXAS1 | U |
| 4854 | chr11 | 46326464 | 46326700 | Osteoblasts | 0.21 | 0.89 | intron | CREB3L1 | U |
| 4855 | chr2 | 27173679 | 27174079 | Osteoblasts | 0.24 | 0.92 | TTS | DPYSL5 | U |
| 4856 | chr4 | 42123330 | 42123411 | Osteoblasts | 0.28 | 0.95 | intron | BEND4 | U |
| 4857 | chr19 | 3806500 | 3806614 | Osteoblasts | 0.22 | 0.89 | intron | ZFR2 | U |
| 4858 | chr7 | 1856511 | 1856721 | Osteoblasts | 0.19 | 0.86 | intron | MAD1L1 | U |
| 4859 | chr7 | 6633827 | 6634176 | Osteoblasts | 0.23 | 0.9 | intron | C7orf26 | U |
| 4860 | chr8 | 117595358 | 117595546 | Osteoblasts | 0.22 | 0.88 | Intergenic | EIF3H | U |
| 4861 | chr18 | 14090045 | 14090326 | Osteoblasts | 0.24 | 0.9 | intron | ZNF519 | U |
| 4862 | chr10 | 102787307 | 102787537 | Osteoblasts | 0.22 | 0.87 | intron | PDZD7 | U |
| 4863 | chr16 | 78433833 | 78434070 | Osteoblasts | 0.27 | 0.92 | intron | WWOX | U |
| 4864 | chr17 | 29804489 | 29804756 | Osteoblasts | 0.27 | 0.92 | intron | RAB11FIP4 | U |
| 4865 | chr11 | 13702816 | 13703244 | Osteoblasts | 0.29 | 0.94 | intron | FAR1 | U |
| 4866 | chr11 | 68425532 | 68425979 | Osteoblasts | 0.27 | 0.92 | Intergenic | GAL | U |
| 4867 | chr11 | 114085364 | 114085523 | Osteoblasts | 0.3 | 0.92 | intron | ZBTB16 | U |
| 4868 | chr3 | 1527640513 | 152764235 | Osteoblasts | 0.31 | 0.92 | Intergenic | RAP2B | U |
| 4869 | chr15 | 28423980 | 28424356 | Osteoblasts | 0.38 | 0.95 | intron | HERC2 | U |
| 4870 | chr6 | 71012146 | 71012302 | Osteoblasts | 0.03 | 0.91 | intron | COL9A1 | U |
| 4871 | chr10 | 130929379 | 130929518 | Osteoblasts | 0.08 | 0.92 | Intergenic | MGMT | U |
| 4872 | chr19 | 57850780 | 57850937 | Osteoblasts | 0.12 | 0.86 | Intergenic | ZNF304 | U |
| 4873 | chr6 | 71010703 | 71011017 | Osteoblasts | 0.05 | 0.88 | intron | COL9A1 | U |
| 4874 | chr21 | 33300962 | 33301128 | Osteoblasts | 0.07 | 0.88 | intron | HUNK | U |
| 4875 | chr16 | 87665731 | 87666123 | Osteoblasts | 0.04 | 0.83 | intron | JPH3 | U |
| 4876 | chr9 | 121658020 | 121658313 | Osteoblasts | 0.14 | 0.9 | Intergenic | DBC1 | U |
| 4877 | chr12 | 117630839 | 117630916 | Osteoblasts | 0.23 | 0.91 | Intergenic | FBXO21 | U |
| 4878 | chr22 | 25310719 | 25311022 | Osteoblasts | 0.02 | 0.94 | intron | SGSM1 | U |
| 4879 | chr17 | 25927592 | 25927656 | Osteoblasts | 0.08 | 0.96 | intron | KSR1 | U |
| 4880 | chr20 | 47056018 | 47056109 | Osteoblasts | 0.05 | 0.9 | Intergenic | LINC00494 | U |
| 4881 | chr6 | 3075149 | 3075314 | Osteoblasts | 0.15 | 0.89 | Intergenic | RIPK1 | U |
| 4882 | chr2 | 25456972 | 25457242 | Osteoblasts | 0.21 | 0.93 | exon | DNMT3A | U |
| 4883 | chr9 | 993163773 | 99316425 | Osteoblasts | 0.05 | 0.94 | intron | CDC14B | U |
| 4884 | chr9 | 94565110 | 94565267 | Osteoblasts | 0.09 | 0.91 | intron | ROR2 | U |
| 4885 | chr22 | 33403343 | 33403543 | Osteoblasts | 0.07 | 0.86 | promoter-TSS | SYN3 | U |
| 4886 | chr14 | 34085388 | 34085645 | Osteoblasts | 0.13 | 0.89 | intron | NPAS3 | U |
| 4887 | chr6 | 2414868 | 2415181 | Osteoblasts | 0.15 | 0.91 | TTS | LOC100508120 | U |
| 4888 | chr22 | 50054483 | 50054582 | Osteoblasts | 0.18 | 0.92 | Intergenic | C22orf34 | U |
| 4889 | chr20 | 11252715 | 11252998 | Osteoblasts | 0.14 | 0.88 | intron | LOC339593 | U |
| 4890 | chr9 | 98545897 | 98546074 | Osteoblasts | 0.18 | 0.9 | Intergenic | ERCC6L2 | U |
| 4891 | chr20 | 17905267 | 17905456 | Osteoblasts | 0.33 | 0.93 | Intergenic | SNORD17 | U |
| 4892 | chr18 | 77397505 | 77397593 | Osteoblasts | 0.86 | 0.16 | Intergenic | CTDP1 | M |
| 4893 | chr4 | 13533239 | 13533336 | Osteoblasts | 0.9 | 0.21 | promoter-TSS | LOC285547 | M |
| 4894 | chr4 | 13536606 | 13536659 | Osteoblasts | 0.8 | 0.16 | Intergenic | LOC285547 | M |
| 4895 | chr4 | 13535466 | 13535713 | Osteoblasts | 0.72 | 0.12 | Intergenic | LOC285547 | M |
| 4896 | chr4 | 13532927 | 13533188 | Osteoblasts | 0.55 | 0.07 | promoter-TSS | LOC285547 | M |
| 4897 | chr15 | 20779839 | 20780059 | Osteoblasts | 0.74 | 0.78 | exon | GOLGA8CP | M |
| 4898 | chr1 | 119542629 | 119543008 | Osteoblasts | 0.95 | 0.14 | Intergenic | TBX15 | M |
| 4899 | chr16 | 86612280 | 86612426 | Osteoblasts | 0.91 | 0.12 | exon | FOXL1 | M |
| 4900 | chr1 | 1195430881 | 119543454 | Osteoblasts | 0.87 | 0.08 | Intergenic | TBX15 | M |
| 4901 | chr18 | 77397614 | 77397745 | Osteoblasts | 0.94 | 0.16 | Intergenic | CTDP1 | M |
| 4902 | chr16 | 866131323 | 86613395 | Osteoblasts | 0.87 | 0.1 | exon | FOXL1 | M |
| 4903 | chr16 | 86610170 | 86610571 | Osteoblasts | 0.83 | 0.08 | Intergenic | FOXL1 | M |
| 4904 | chr7 | 27228664 | 27228806 | Osteoblasts | 0.84 | 0.12 | exon | HOXA11-AS | M |
| 4905 | chr19 | 18899000 | 18899055 | Osteoblasts | 0.86 | 0.18 | intron, exon | COMP, COMP | M |
| 4906 | chr12 | 114838313 | 114838411 | Osteoblasts | 0.82 | 0.14 | intron | TBX5 | M |
| 4907 | chr5 | 727401791 | 72740383 | Osteoblasts | 0.82 | 0.14 | Intergenic | FOXD1 | M |
| 4908 | chr12 | 114833665 | 114833985 | Osteoblasts | 0.74 | 0.09 | intron | TBX5 | M |
| 4909 | chr12 | 114838431 | 114838466 | Osteoblasts | 0.84 | 0.21 | intron | TBX5 | M |
| 4910 | chr4 | 13540614 | 13541000 | Osteoblasts | 0.71 | 0.09 | Intergenic | NKX3-2 | M |
| 4911 | chr4 | 13530923 | 13531028 | Osteoblasts | 0.75 | 0.15 | intron | LOC285547 | M |
| 4912 | chr4 | 13536483 | 13536583 | Osteoblasts | 0.62 | 0.08 | Intergenic | LOC285547 | M |
| 4913 | chr6 | 41341201 | 41341338 | Osteoblasts | 0.61 | 0.07 | Intergenic | NCR2 | M |
| 4914 | chr4 | 13535985 | 13536425 | Osteoblasts | 0.53 | 0.04 | Intergenic | LOC285547 | M |
| 4915 | chr19 | 18899119 | 18899510 | Osteoblasts | 0.53 | 0.07 | exon, intron | COMP, COMP | M |
| 4916 | chr2 | 176968736 | 176969226 | Osteoblasts | 0.51 | 0.07 | Intergenic | HOXD11 | M |
| 4917 | chr19 | 8203063 | 8203187 | Skeletal Muscle cells | 0.31 | 0.93 | exon | FBN3 | U |
| 4918 | chr1 | 556670043 | 55667230 | Skeletal Muscle cells | 0.35 | 0.94 | intron | USP24 | U |
| 4919 | chr19 | 3442501 | 3442685 | Skeletal Muscle cells | 0.34 | 0.92 | intron | NFIC | U |
| 4920 | chr20 | 48908487 | 48908567 | Skeletal Muscle cells | 0.32 | 0.89 | promoter-TSS | LOC284751 | U |
| 4921 | chr3 | 48127949 | 48128104 | Skeletal Muscle cells | 0.32 | 0.89 | intron | MAP4 | U |
| 4922 | chr10 | 23353063 | 23353386 | Skeletal Muscle cells | 0.36 | 0.92 | Intergenic | MSRB2 | U |
| 4923 | chr2 | 127072611 | 127073080 | Skeletal Muscle cells | 0.34 | 0.9 | Intergenic | GYPC | U |
| 4924 | chr2 | 1108061813 | 110806243 | Skeletal Muscle cells | 0.32 | 0.87 | Intergenic | MIR4267 | U |
| 4925 | chr15 | 98977214 | 98977282 | Skeletal Muscle cells | 0.33 | 0.88 | Intergenic | FAM1698 | U |
| 4926 | chr8 | 33401219 | 33401412 | Skeletal Muscle cells | 0.36 | 0.9 | Intergenic | RNF122 | U |
| 4927 | chr19 | 4893283 | 4893584 | Skeletal Muscle cells | 0.31 | 0.85 | intron | ARRDC5 | U |
| 4928 | chr2 | 1108064153 | 110806719 | Skeletal Muscle cells | 0.36 | 0.89 | Intergenic | MIR4267 | U |
| 4929 | chr4 | 1689116 | 1689174 | Skeletal Muscle cells | 0.35 | 0.87 | Intergenic | FAM53A | U |
| 4930 | chr1 | 1567243451 | 156724473 | Skeletal Muscle cells | 0.36 | 0.88 | Intergenic | HDGF | U |
| 4931 | chr17 | 5430619 | 5430879 | Skeletal Muscle cells | 0.39 | 0.91 | intron | NLRP1 | U |
| 4932 | chr16 | 21517221 | 21517585 | Skeletal Muscle cells | 0.37 | 0.89 | Intergenic | LOC100271836 | U |
| 4933 | chr19 | 490210903 | 49021217 | Skeletal Muscle cells | 0.35 | 0.86 | Intergenic | LMTK3 | U |
| 4934 | chr15 | 43566080 | 43566250 | Skeletal Muscle cells | 0.38 | 0.89 | Intergenic | TGM5 | U |
| 4935 | chr6 | 117596420 | 117596651 | Skeletal Muscle cells | 0.36 | 0.87 | Intergenic | VGLL2 | U |
| 4936 | chr20 | 55876271 | 55876308 | Skeletal Muscle cells | 0.3 | 0.79 | Intergenic | MIR4325 | U |
| 4937 | chr9 | 1400315211 | 140031628 | Skeletal Muscle cells | 0.39 | 0.84 | Intergenic | GRIN1 | U |
| 4938 | chr11 | 107584376 | 107584419 | Skeletal Muscle cells | 0.2 | 0.85 | Intergenic | SLN | U |
| 4939 | chr12 | 1311734671 | 131173598 | Skeletal Muscle cells | 0.31 | 0.93 | Intergenic | STX2 | U |
| 4940 | chr17 | 27967189 | 27967337 | Skeletal Muscle cells | 0.23 | 0.85 | intron | SSH2 | U |
| 4941 | chr19 | 45619325 | 45619559 | Skeletal Muscle cells | 0.26 | 0.88 | intron | PPP1R37 | U |
| 4942 | chr15 | 64186563 | 64186671 | Skeletal Muscle cells | 0.27 | 0.86 | Intergenic | HERC1 | U |
| 4943 | chr4 | 187826071 | 187826229 | Skeletal Muscle cells | 0.32 | 0.91 | Intergenic | FAT1 | U |
| 4944 | chr18 | 57863480 | 57863833 | Skeletal Muscle cells | 0.3 | 0.89 | Intergenic | MC4R | U |
| 4945 | chr15 | 619162493 | 61916272 | Skeletal Muscle cells | 0.3 | 0.88 | Intergenic | VPS13C | U |
| 4946 | chr15 | 42652008 | 42652187 | Skeletal Muscle cells | 0.31 | 0.89 | exon | CAPN3 | U |
| 4947 | chr2 | 2325535133 | 232553561 | Skeletal Muscle cells | 0.36 | 0.93 | Intergenic | PTMA | U |
| 4948 | chr6 | 336975593 | 33697652 | Skeletal Muscle cells | 0.34 | 0.91 | intron | IP6K3 | U |
| 4949 | chr13 | 1067442041 | 106744325 | Skeletal Muscle cells | 0.33 | 0.9 | Intergenic | LINC00460 | U |
| 4950 | chr2 | 234984056 | 234984232 | Skeletal Muscle cells | 0.31 | 0.88 | intron | SPP2 | U |
| 4951 | chr16 | 78936064 | 78936337 | Skeletal Muscle cells | 0.34 | 0.91 | intron | WWOX | U |
| 4952 | chr3 | 187724991 | 187725055 | Skeletal Muscle cells | 0.33 | 0.89 | Intergenic | LPP-AS2 | U |
| 4953 | chr15 | 41215757 | 41215904 | Skeletal Muscle cells | 0.34 | 0.9 | Intergenic | DLL4 | U |
| 4954 | chr2 | 177833296 | 177833478 | Skeletal Muscle cells | 0.27 | 0.83 | Intergenic | HNRNPA3 | U |
| 4955 | chr10 | 69881845 | 69882049 | Skeletal Muscle cells | 0.31 | 0.87 | exon | MYPN | U |
| 4956 | chr12 | 47086665 | 47086941 | Skeletal Muscle cells | 0.34 | 0.9 | Intergenic | SLC38A4 | U |
| 4957 | chr3 | 15540003 | 15540161 | Skeletal Muscle cells | 0.3 | 0.85 | exon | COLQ | U |
| 4958 | chr11 | 1993784 | 1993963 | Skeletal Muscle cells | 0.36 | 0.91 | Intergenic | MRPL23-AS1 | U |
| 4959 | chr18 | 633846 | 633900 | Skeletal Muscle cells | 0.38 | 0.92 | intron | CLUL1 | U |
| 4960 | chr12 | 122848458 | 122848547 | Skeletal Muscle cells | 0.36 | 0.9 | intron | CLIP1 | U |
| 4961 | chr21 | 44857515 | 44857623 | Skeletal Muscle cells | 0.36 | 0.9 | Intergenic | SIK1 | U |
| 4962 | chr17 | 4528360 | 4528541 | Skeletal Muscle cells | 0.36 | 0.9 | Intergenic | ALOX15 | U |
| 4963 | chr8 | 144551748 | 144551942 | Skeletal Muscle cells | 0.35 | 0.89 | intron | ZC3H3 | U |
| 4964 | chr2 | 218735522 | 218735734 | Skeletal Muscle cells | 0.35 | 0.89 | intron | TNS1 | U |
| 4965 | chr19 | 50347798 | 50348017 | Skeletal Muscle cells | 0.31 | 0.85 | exon | PTOV1-AS1 | U |
| 4966 | chr21 | 19642209 | 19642491 | Skeletal Muscle cells | 0.33 | 0.87 | exon, intron | TMPRSS15, TMPRSS1 [symbol] | U |
| 4967 | chr7 | 36250051 | 36250343 | Skeletal Muscle cells | 0.3 | 0.84 | intron | EEPD1 | U |
| 4968 | chr3 | 84954050 | 84954379 | Skeletal Muscle cells | 0.3 | 0.84 | Intergenic | LOC440970 | U |
| 4969 | chr10 | 62608802 | 62609231 | Skeletal Muscle cells | 0.35 | 0.89 | Intergenic | CDK1 | U |
| 4970 | chr17 | 65040029 | 65040463 | Skeletal Muscle cells | 0.34 | 0.88 | promoter-TSS | CACNG1 | U |
| 4971 | chr4 | 148927308 | 148927474 | Skeletal Muscle cells | 0.34 | 0.87 | intron | ARHGAP10 | U |
| 4972 | chr4 | 6230304 | 6230371 | Skeletal Muscle cells | 0.3 | 0.82 | intron | LOC285484 | U |
| 4973 | chr7 | 187369 | 187453 | Skeletal Muscle cells | 0.36 | 0.88 | Intergenic | FAM20C | U |
| 4974 | chr2 | 179632508 | 1796326201 | Skeletal Muscle cells | 0.34 | 0.86 | exon | TTN | U |
| 4975 | chr7 | 152397270 | 152397439 | Skeletal Muscle cells | 0.34 | 0.86 | Intergenic | XRCC2 | U |
| 4976 | chr3 | 42726949 | 42727134 | Skeletal Muscle cells | 0.3 | 0.82 | promoter-TSS | KLHL40 | U |
| 4977 | chr2 | 1690267 | 1690466 | Skeletal Muscle cells | 0.32 | 0.84 | intron | PXDN | U |
| 4978 | chr7 | 127858051 | 127858403 | Skeletal Muscle cells | 0.28 | 0.8 | Intergenic | MIR129-1 | U |
| 4979 | chr12 | 57644425 | 57644780 | Skeletal Muscle cells | 0.27 | 0.79 | intron | STAC3 | U |
| 4980 | chr2 | 85659668 | 85660162 | Skeletal Muscle cells | 0.37 | 0.89 | Intergenic | SH2D6 | U |
| 4981 | chr1 | 196619616 | 196619773 | Skeletal Muscle cells | 0.34 | 0.85 | Intergenic | CFH | U |
| 4982 | chr11 | 119219095 | 119219309 | Skeletal Muscle cells | 0.32 | 0.83 | Intergenic | C1QTNF5 | U |
| 4983 | chr1 | 199357175 | 199357536 | Skeletal Muscle cells | 0.36 | 0.87 | Intergenic | LOC100131234 | U |
| 4984 | chr16 | 87004646 | 87004878 | Skeletal Muscle cells | 0.37 | 0.87 | Intergenic | C16orf95 | U |
| 4985 | chr1 | 115727622 | 115727898 | Skeletal Muscle cells | 0.35 | 0.85 | Intergenic | TSPAN2 | U |
| 4986 | chr15 | 61916027 | 61916136 | Skeletal Muscle cells | 0.31 | 0.8 | Intergenic | VPS13C | U |
| 4987 | chr22 | 48977209 | 48977383 | Skeletal Muscle cells | 0.35 | 0.84 | intron | FAM19A5 | U |
| 4988 | chr11 | 61477123 | 61477312 | Skeletal Muscle cells | 0.31 | 0.8 | intron | DAGLA | U |
| 4989 | chr4 | 137276273 | 137276479 | Skeletal Muscle cells | 0.37 | 0.86 | Intergenic | PCDH18 | U |
| 4990 | chr5 | 31869910 | 31870233 | Skeletal Muscle cells | 0.36 | 0.85 | intron | PDZD2 | U |
| 4991 | chr10 | 128959870 | 128960264 | Skeletal Muscle cells | 0.35 | 0.84 | intron | FAM196A | U |
| 4992 | chr1 | 118832980 | 118833398 | Skeletal Muscle cells | 0.34 | 0.83 | Intergenic | SPAG17 | U |
| 4993 | chr17 | 78460515 | 78460559 | Skeletal Muscle cells | 0.27 | 0.75 | Intergenic | NPTX1 | U |
| 4994 | chr19 | 32808404 | 32808566 | Skeletal Muscle cells | 0.34 | 0.82 | Intergenic | ZNF507 | U |
| 4995 | chr1 | 53953114 | 53953284 | Skeletal Muscle cells | 0.37 | 0.85 | Intergenic | DMRT81 | U |
| 4996 | chr2 | 242152815 | 242153018 | Skeletal Muscle cells | 0.36 | 0.84 | intron | ANO7 | U |
| 4997 | chr2 | 234242884 | 234243117 | Skeletal Muscle cells | 0.36 | 0.84 | intron | SAG | U |
| 4998 | chr4 | 187874572 | 187874999 | Skeletal Muscle cells | 0.39 | 0.87 | Intergenic | FAT1 | U |
| 4999 | chr15 | 27702726 | 27702873 | Skeletal Muscle cells | 0.37 | 0.84 | intron | GABRG3 | U |
| 5000 | chr15 | 65698874 | 65699074 | Skeletal Muscle cells | 0.35 | 0.82 | intron | IGDCC4 | U |
| 5001 | chr15 | 87030198 | 87030480 | Skeletal Muscle cells | 0.38 | 0.85 | intron | AGBL1 | U |
| 5002 | chr17 | 13365740 | 13366160 | Skeletal Muscle cells | 0.35 | 0.82 | Intergenic | HS3ST3A1 | U |
| 5003 | chr17 | 17550190 | 17550422 | Skeletal Muscle cells | 0.33 | 0.79 | Intergenic | RAI1 | U |
| 5004 | chr13 | 97912473 | 97912720 | Skeletal Muscle cells | 0.38 | 0.84 | intron | MBNL2 | U |
| 5005 | chr18 | 47370091 | 47370400 | Skeletal Muscle cells | 0.37 | 0.83 | intron | MYO5B | U |
| 5006 | chr8 | 58130870 | 58131180 | Skeletal Muscle cells | 0.37 | 0.83 | promoter-TSS | LOC100507651 | U |
| 5007 | chr10 | 53061543 | 53061963 | Skeletal Muscle cells | 0.38 | 0.84 | intron | PRKG1 | U |
| 5008 | chr6 | 169779678 | 169779870 | Skeletal Muscle cells | 0.37 | 0.82 | Intergenic | THBS2 | U |
| 5009 | chr1 | 910433 | 910476 | Skeletal Muscle cells | 0.37 | 0.81 | TTS | PLEKHN1 | U |
| 5010 | chr3 | 195489940 | 195490218 | Skeletal Muscle cells | 0.37 | 0.8 | intron | MUC4 | U |
| 5011 | chr2 | 118892245 | 118892609 | Skeletal Muscle cells | 0.39 | 0.82 | Intergenic | INSIG2 | U |
| 5012 | chr2 | 219696690 | 219697160 | Skeletal Muscle cells | 0.39 | 0.82 | promoter-TSS | PRKAG3 | U |
| 5013 | chr18 | 76517219 | 76517285 | Skeletal Muscle cells | 0.36 | 0.78 | Intergenic | SALL3 | U |
| 5014 | chr12 | 3118961 | 3119134 | Skeletal Muscle cells | 0.37 | 0.79 | intron | TEAD4 | U |
| 5015 | chr19 | 4561919 | 4562055 | Skeletal Muscle cells | 0.37 | 0.78 | Intergenic | SEMA6B | U |
| 5016 | chr2 | 3050453 | 3050602 | Skeletal Muscle cells | 0.38 | 0.78 | Intergenic | FSSC1 | U |
| 5017 | chr12 | 117878550 | 117878698 | Skeletal Muscle cells | 0.36 | 0.87 | Intergenic | NOS1 | U |
| 5018 | chr6 | 152664348 | 152664590 | Skeletal Muscle cells | 0.34 | 0.9 | intron | SYNE1 | U |
| 5019 | chr5 | 38046369 | 38046580 | Skeletal Muscle cells | 0.36 | 0.88 | Intergenic | GDNF | U |
| 5020 | chr1 | 229572271 | 229572423 | Skeletal Muscle cells | 0.36 | 0.85 | Intergenic | ACTA1 | U |
| 5021 | chr4 | 134357530 | 134357673 | Skeletal Muscle cells | 0.36 | 0.84 | Intergenic | PCDH10 | U |
| 5022 | chr1 | 240689970 | 240690130 | Skeletal Muscle cells | 0.37 | 0.84 | intron | GREM2 | U |
| 5023 | chr1 | 229544900 | 229545255 | Skeletal Muscle cells | 0.39 | 0.85 | Intergenic | ACTA1 | U |
| 5024 | chr14 | 20904169 | 20904320 | Skeletal Muscle cells | 0.32 | 0.92 | promoter-TSS | KLHL33 | U |
| 5025 | chr9 | 84081386 | 84081501 | Skeletal Muscle cells | 0.31 | 0.89 | Intergenic | TLE1 | U |
| 5026 | chr8 | 58130236 | 58130521 | Skeletal Muscle cells | 0.38 | 0.9 | Intergenic | LOC100507651 | U |
| 5027 | chr14 | 20903959 | 20904321 | Skeletal Muscle cells | 0.32 | 0.9 | promoter-TSS | KLHL33 | U |
| 5028 | chr14 | 584101441 | 58410459 | Skeletal Muscle cells | 0.28 | 0.84 | Intergenic | SLC35F4 | U |
| 5029 | chr6 | 36336696 | 36336879 | Skeletal Muscle cells | 0.35 | 0.89 | exon | ETV7 | U |
| 5030 | chr9 | 74426982 | 74427329 | Skeletal Muscle cells | 0.35 | 0.89 | Intergenic | TMEM2 | U |
| 5031 | chr20 | 20065420 | 20065874 | Skeletal Muscle cells | 0.33 | 0.87 | intron | C20orf26 | U |
| 5032 | chr6 | 17296804 | 17297082 | Skeletal Muscle cells | 0.35 | 0.88 | Intergenic | RBM24 | U |
| 5033 | chr19 | 5507442 | 5507541 | Skeletal Muscle cells | 0.29 | 0.81 | Intergenic | ZNRF4 | U |
| 5034 | chr5 | 3489600 | 3489849 | Skeletal Muscle cells | 0.29 | 0.81 | intron | LOC285577 | U |
| 5035 | chr18 | 76151431 | 76151522 | Skeletal Muscle cells | 0.37 | 0.88 | Intergenic | SALL3 | U |
| 5036 | chr11 | 2048934 | 2049033 | Skeletal Muscle cells | 0.39 | 0.87 | Intergenic | H19 | U |
| 5037 | chr8 | 58130560 | 58130672 | Skeletal Muscle cells | 0.36 | 0.81 | Intergenic | LOC100507651 | U |
| 5038 | chr22 | 18915145 | 18915393 | Skeletal Muscle cells | 0.38 | 0.83 | intron | PRODH | U |
| 5039 | chr22 | 39580653 | 39580954 | Skeletal Muscle cells | 0.38 | 0.82 | Intergenic | CBX7 | U |
| 5040 | chr6 | 5843289 | 5843661 | Skeletal Muscle cells | 0.35 | 0.79 | Intergenic | NRN1 | U |
| 5041 | chr9 | 133308491 | 133308595 | Skeletal Muscle cells | 0.71 | 0.17 | Intergenic | ASS1 | M |
| 5042 | chr19 | 39055700 | 39055814 | Skeletal Muscle cells | 0.57 | 0.07 | exon | RYR1 | M |
| 5043 | chr4 | 89618840 | 89618862 | Skeletal Muscle cells | 0.79 | 0.45 | exon | NAP1L5 | M |
| 5044 | chr2 | 223153657 | 223153970 | Skeletal Muscle cells | 0.67 | 0.15 | intron | PAX3 | M |
| 5045 | chr6 | 100902882 | 100903073 | Skeletal Muscle cells | 0.66 | 0.19 | intron | SIM1 | M |
| 5046 | chr2 | 239072766 | 239072927 | Skeletal Muscle cells | 0.72 | 0.09 | Intergenic | KLHL30 | M |
| 5047 | chr1 | 119522486 | 119522674 | Skeletal Muscle cells | 0.72 | 0.11 | intron | TBX15 | M |
| 5048 | chr10 | 102975459 | 102975755 | Skeletal Muscle cells | 0.63 | 0.07 | Intergenic | LBX1 | M |
| 5049 | chr13 | 79181211 | 79181333 | Skeletal Muscle cells | 0.64 | 0.13 | exon | POU4F1-ASI | M |
| 5050 | chr19 | 2251365 | 2251656 | Skeletal Muscle cells | 0.63 | 0.12 | TTS | JSRP1 | M |
| 5051 | chr15 | 68127629 | 68127976 | Skeletal Muscle cells | 0.58 | 0.08 | Intergenic | SKOR1 | M |
| 5052 | chr10 | 102983359 | 102983478 | Skeletal Muscle cells | 0.58 | 0.09 | Intergenic | LBX1 | M |
| 5053 | chr2 | 223165479 | 223165799 | Skeletal Muscle cells | 0.57 | 0.09 | intron | CCDC140 | M |
| 5054 | chr10 | 1029782523 | 102978631 | Skeletal Muscle cells | 0.6 | 0.12 | Intergenic | LBX1 | M |
| 5055 | chr2 | 2231662863 | 223166343 | Skeletal Muscle cells | 0.65 | 0.18 | intron | CCDC140 | M |
| 5056 | chr6 | 100904161 | 100904317 | Skeletal Muscle cells | 0.6 | 0.13 | intron | SIM1 | M |
| 5057 | chr10 | 102982888 | 102983161 | Skeletal Muscle cells | 0.54 | 0.08 | Intergenic | LBX1 | M |
| 5058 | chr3 | 147106635 | 147107083 | Skeletal Muscle cells | 0.58 | 0.12 | intron | ZIC4 | M |
| 5059 | chr6 | 100903707 | 100904127 | Skeletal Muscle cells | 0.53 | 0.09 | intron | SIM1 | M |
| 5060 | chr10 | 102975233 | 102975392 | Skeletal Muscle cells | 0.55 | 0.12 | Intergenic | LBX1 | M |
| 5061 | chr10 | 102996412 | 102996511 | Skeletal Muscle cells | 0.57 | 0.15 | intron | FLI41350 | M |
| 5062 | chr2 | 2231693383 | 223169478 | Skeletal Muscle cells | 0.53 | 0.13 | exon | CCDC140 | M |
| 5063 | chr11 | 20229033 | 20229218 | Skeletal Muscle cells | 0.54 | 0.14 | Intergenic | DBX1 | M |
| 5064 | chr6 | 134214113 | 134214135 | Skeletal Muscle cells | 0.57 | 0.18 | TTS | TCF21 | M |
| 5065 | chr1 | 162472870 | 162473127 | Smooth Muscle cells | 0.15 | 0.92 | intron | UHMK1 | U |
| 5066 | chr1 | 19668409 | 19668671 | Smooth Muscle cells | 0.14 | 0.85 | intron | CAPZB | U |
| 5067 | chr13 | 85761481 | 85761897 | Smooth Muscle cells | 0.2 | 0.87 | Intergenic | LINC00351 | U |
| 5068 | chr12 | 93346409 | 93346508 | Smooth Muscle cells | 0.22 | 0.87 | Intergenic | EEA1 | U |
| 5069 | chr5 | 105502349 | 105502820 | Smooth Muscle cells | 0.14 | 0.78 | Intergenic | RAB9BP1 | U |
| 5070 | chr5 | 150054296 | 150054520 | Smooth Muscle cells | 0.26 | 0.89 | intron | MYOZ3 | U |
| 5071 | chr17 | 27924735 | 27925011 | Smooth Muscle cells | 0.26 | 0.86 | intron | ANKRD13B | U |
| 5072 | chr4 | 187344569 | 187344895 | Smooth Muscle cells | 0.29 | 0.88 | intron | LOC285441 | U |
| 5073 | chr1 | 4329526 | 4329591 | Smooth Muscle cells | 0.26 | 0.81 | Intergenic | LOC284661 | U |
| 5074 | chr11 | 41437638 | 41438037 | Smooth Muscle cells | 0.25 | 0.8 | intron | LRRC4C | U |
| 5075 | chrX | 37870948 | 37871245 | Smooth Muscle cells | 0.25 | 0.79 | intron | SYTL5 | U |
| 5076 | chr2 | 239618443 | 239618634 | Smooth Muscle cells | 0.27 | 0.8 | Intergenic | TWIST2 | U |
| 5077 | chr9 | 1084974 | 1085359 | Smooth Muscle cells | 0.34 | 0.86 | Intergenic | DMRT2 | U |
| 5078 | chr18 | 18785355 | 18785725 | Smooth Muscle cells | 0.31 | 0.81 | Intergenic | GREB1L | U |
| 5079 | chr9 | 132085461 | 132085596 | Smooth Muscle cells | 0.32 | 0.82 | TTS | C9orf106 | U |
| 5080 | chr19 | 33279635 | 33280113 | Smooth Muscle cells | 0.33 | 0.83 | intron | TDRD12 | U |
| 5081 | chr8 | 1271433173 | 127143534 | Smooth Muscle cells | 0.34 | 0.83 | Intergenic | LOC100130231 | U |
| 5082 | chr7 | 159083175 | 159083533 | Smooth Muscle cells | 0.3 | 0.78 | Intergenic | VIPR2 | U |
| 5083 | chr16 | 2249613 | 2249795 | Smooth Muscle cells | 0.32 | 0.77 | Intergenic | CASKIN1 | U |
| 5084 | chr2 | 2416843741 | 241684584 | Smooth Muscle cells | 0.33 | 0.78 | intron | KIF1A | U |
| 5085 | chr2 | 234106430 | 234106749 | Smooth Muscle cells | 0.35 | 0.79 | intron | INPP5D | U |
| 5086 | chr1 | 42621305 | 42621502 | Smooth Muscle cells | 0.33 | 0.77 | TTS | GUCA2B | U |
| 5087 | chr15 | 61264553 | 61264728 | Smooth Muscle cells | 0.12 | 0.84 | intron | RORA | U |
| 5088 | chr1 | 19668811 | 19669130 | Smooth Muscle cells | 0.16 | 0.87 | Intron | CAPZB | U |
| 5089 | chr16 | 60313084 | 60313179 | Smooth Muscle cells | 0.19 | 0.85 | Intergenic | LOC644649 | U |
| 5090 | chr20 | 59234431 | 59234489 | Smooth Muscle cells | 0.19 | 0.84 | Intergenic | MIR4533 | U |
| 5091 | chr16 | 79167187 | 79167363 | Smooth Muscle cells | 0.24 | 0.88 | intron | WWOX | U |
| 5092 | chr11 | 117755919 | 117756301 | Smooth Muscle cells | 0.24 | 0.88 | Intergenic | FXYD6-FXYD2 | U |
| 5093 | chr15 | 53729197 | 53729635 | Smooth Muscle cells | 0.19 | 0.83 | Intergenic | WDR72 | U |
| 5094 | chr11 | 38195199 | 38195382 | Smooth Muscle cells | 0.21 | 0.84 | Intergenic | RAG2 | U |
| 5095 | chr1 | 3999997 | 4000145 | Smooth Muscle cells | 0.19 | 0.81 | promoter-TSS | LOC728716 | U |
| 5096 | chr18 | 70791867 | 70792080 | Smooth Muscle cells | 0.21 | 0.83 | Intergenic | LOC400655 | U |
| 5097 | chr16 | 4313460 | 4313710 | Smooth Muscle cells | 0.22 | 0.84 | intron | TFAP4 | U |
| 5098 | chr21 | 35231278 | 35231433 | Smooth Muscle cells | 0.24 | 0.85 | intron | ITSN1 | U |
| 5099 | chr19 | 5926434 | 5926755 | Smooth Muscle cells | 0.24 | 0.85 | intron | RANBP3 | U |
| 5100 | chr9 | 135414930 | 135415076 | Smooth Muscle cells | 0.19 | 0.79 | intron | C9orf171 | U |
| 5101 | chr3 | 560079023 | 56008341 | Smooth Muscle cells | 0.25 | 0.86 | intron | ERC2 | U |
| 5102 | chr16 | 74303746 | 74303946 | Smooth Muscle cells | 0.28 | 0.87 | Intergenic | PSMD7 | U |
| 5103 | chr17 | 606964501 | 60696713 | Smooth Muscle cells | 0.28 | 0.87 | Intergenic | MRC2 | U |
| 5104 | chr8 | 286667 | 286882 | Smooth Muscle cells | 0.27 | 0.85 | Intergenic | FBXO25 | U |
| 5105 | chr17 | 10100002 | 10100239 | Smooth Muscle cells | 0.26 | 0.84 | intron | GAS7 | U |
| 5106 | chr6 | 43711267 | 43711738 | Smooth Muscle cells | 0.29 | 0.87 | Intergenic | VEGFA | U |
| 5107 | chr20 | 8658174 | 3658389 | Smooth Muscle cells | 0.21 | 0.78 | intron | ADAM33 | U |
| 5108 | chr16 | 79238285 | 79238502 | Smooth Muscle cells | 0.27 | 0.84 | intron | WWOX | U |
| 5109 | chr2 | 691790 | 692052 | Smooth Muscle cells | 0.3 | 0.87 | Intergenic | TMEM18 | U |
| 5110 | chr16 | 29210481 | 29210814 | Smooth Muscle cells | 0.3 | 0.87 | Intergenic | SNX29P2 | U |
| 5111 | chrX | 68254156 | 68254588 | Smooth Muscle cells | 0.29 | 0.86 | Intergenic | PJA1 | U |
| 5112 | chr10 | 134845366 | 134845556 | Smooth Muscle cells | 0.25 | 0.81 | Intergenic | GPR123 | U |
| 5113 | chr11 | 59613940 | 59614213 | Smooth Muscle cells | 0.27 | 0.83 | Intergenic | GIF | U |
| 5114 | chr19 | 31131014 | 31131195 | Smooth Muscle cells | 0.29 | 0.84 | Intergenic | ZNF536 | U |
| 5115 | chr2 | 16266027 | 16266345 | Smooth Muscle cells | 0.26 | 0.81 | Intergenic | MYCNOS | U |
| 5116 | chr14 | 97923916 | 97924046 | Smooth Muscle cells | 0.29 | 0.83 | Intergenic | LOC100129345 | U |
| 5117 | chr15 | 26962426 | 26962831 | Smooth Muscle cells | 0.28 | 0.82 | promoter-TSS | GABRB3 | U |
| 5118 | chr14 | 1040013153 | 104001782 | Smooth Muscle cells | 0.29 | 0.83 | exon | TRMT61A | U |
| 5119 | chr4 | 187424572 | 187425045 | Smooth Muscle cells | 0.29 | 0.83 | Intergenic | LOC285441 | U |
| 5120 | chr22 | 43946806 | 43947015 | Smooth Muscle cells | 0.3 | 0.83 | intron | EFCAB6 | U |
| 5121 | chr3 | 53722379 | 53722607 | Smooth Muscle cells | 0.28 | 0.81 | intron | CACNA1D | U |
| 5122 | chr2 | 1231898 | 1232145 | Smooth Muscle cells | 0.26 | 0.79 | intron | SNTG2 | U |
| 5123 | chr12 | 53458465 | 53458841 | Smooth Muscle cells | 0.32 | 0.85 | TTS | TENC1 | U |
| 5124 | chr11 | 131316805 | 131317191 | Smooth Muscle cells | 0.25 | 0.78 | intron | NTM | U |
| 5125 | chr7 | 7011930 | 7012353 | Smooth Muscle cells | 0.29 | 0.82 | Intergenic | LOC100131257 | U |
| 5126 | chr20 | 60441678 | 60441790 | Smooth Muscle cells | 0.28 | 0.8 | intron | CDH4 | U |
| 5127 | chr2 | 8116225 | 8116503 | Smooth Muscle cells | 0.28 | 0.8 | intron | LOC339788 | U |
| 5128 | chr5 | 298575 | 298952 | Smooth Muscle cells | 0.28 | 0.8 | intron | PDCD6 | U |
| 5129 | chr4 | 139578057 | 139578485 | Smooth Muscle cells | 0.32 | 0.84 | Intergenic | LINC00499 | U |
| 5130 | chr7 | 45299101 | 4530342 | Smooth Muscle cells | 0.26 | 0.78 | Intergenic | FOXK1 | U |
| 5131 | chr1 | 239071144 | 239071596 | Smooth Muscle cells | 0.3 | 0.82 | Intergenic | LOC339535 | U |
| 5132 | chr5 | 3297915 | 3298378 | Smooth Muscle cells | 0.29 | 0.81 | Intergenic | LOC285577 | U |
| 5133 | chr12 | 119858815 | 119858904 | Smooth Muscle cells | 0.26 | 0.77 | intron | CCDC60 | U |
| 5134 | chr18 | 36480723 | 36481033 | Smooth Muscle cells | 0.27 | 0.78 | Intergenic | MIR5583-1 | U |
| 5135 | chr16 | 5546289 | 5546607 | Smooth Muscle cells | 0.29 | 0.8 | Intergenic | FAM86A | U |
| 5136 | chr5 | 53122510 | 53122874 | Smooth Muscle cells | 0.33 | 0.84 | Intergenic | MIR581 | U |
| 5137 | chr2 | 157516784 | 157517172 | Smooth Muscle cells | 0.31 | 0.82 | Intergenic | GPD2 | U |
| 5138 | chr7 | 4581687 | 4582108 | Smooth Muscle cells | 0.32 | 0.83 | Intergenic | FOXK1 | U |
| 5139 | chr14 | 104503689 | 104503821 | Smooth Muscle cells | 0.3 | 0.8 | intron | TDRD9 | U |
| 5140 | chr2 | 126895975 | 126896193 | Smooth Muscle cells | 0.32 | 0.82 | Intergenic | GYPC | U |
| 5141 | chr6 | 170409103 | 170409328 | Smooth Muscle cells | 0.24 | 0.74 | Intergenic | LOC154449 | U |
| 5142 | chr15 | 62017772 | 62018000 | Smooth Muscle cells | 0.28 | 0.78 | Intergenic | VPS13C | U |
| 5143 | chr11 | 62167036 | 62167371 | Smooth Muscle cells | 0.31 | 0.81 | Intergenic | SCGB1A1 | U |
| 5144 | chr15 | 61545575 | 61545932 | Smooth Muscle cells | 0.36 | 0.86 | Intergenic | RORA | U |
| 5145 | chr11 | 59989577 | 59990004 | Smooth Muscle cells | 0.32 | 0.82 | Intergenic | MS4A6A | U |
| 5146 | chr7 | 21427949 | 21428417 | Smooth Muscle cells | 0.33 | 0.83 | Intergenic | SP4 | U |
| 5147 | chr1 | 96105828 | 96106182 | Smooth Muscle cells | 0.31 | 0.8 | Intergenic | FLI31662 | U |
| 5148 | chr7 | 157665797 | 157666012 | Smooth Muscle cells | 0.35 | 0.83 | intron | PTPRN2 | U |
| 5149 | chr16 | 6864852 | 6865069 | Smooth Muscle cells | 0.35 | 0.83 | intron | RBFOX1 | U |
| 5150 | chr7 | 154389079 | 154389364 | Smooth Muscle cells | 0.33 | 0.81 | intron | DPP6 | U |
| 5151 | chr2 | 16119310 | 16119640 | Smooth Muscle cells | 0.3 | 0.78 | Intergenic | MYCNOS | U |
| 5152 | chr17 | 31745526 | 31745960 | Smooth Muscle cells | 0.29 | 0.77 | intron | ASIC2 | U |
| 5153 | chr13 | 68453611 | 68454048 | Smooth Muscle cells | 0.33 | 0.81 | Intergenic | PCDH9 | U |
| 5154 | chr7 | 157667235 | 157667336 | Smooth Muscle cells | 0.34 | 0.81 | intron | PTPRN2 | U |
| 5155 | chr14 | 98724094 | 98724302 | Smooth Muscle cells | 0.36 | 0.83 | Intergenic | C14orf64 | U |
| 5156 | chr13 | 70710716 | 70711087 | Smooth Muscle cells | 0.33 | 0.8 | intron | ATXN8OS | U |
| 5157 | chr12 | 109477369 | 109477694 | Smooth Muscle cells | 0.33 | 0.78 | Intergenic | USP30 | U |
| 5158 | chr1 | 166754379 | 166754739 | Smooth Muscle cells | 0.35 | 0.8 | Intergenic | POGK | U |
| 5159 | chr14 | 97715471 | 97715839 | Smooth Muscle cells | 0.34 | 0.79 | Intergenic | LOC100129345 | U |
| 5160 | chr13 | 53517414 | 53517793 | Smooth Muscle cells | 0.35 | 0.8 | Intergenic | OLFM4 | U |
| 5161 | chr3 | 194756583 | 194756647 | Smooth Muscle cells | 0.31 | 0.75 | Intergenic | XXYLT1 | U |
| 5162 | chr8 | 10825656 | 10825979 | Smooth Muscle cells | 0.35 | 0.79 | intron | XKR6 | U |
| 5163 | chr3 | 117987970 | 117988358 | Smooth Muscle cells | 0.35 | 0.79 | Intergenic | IGSF11-AS1 | U |
| 5164 | chr2 | 153958 | 154414 | Smooth Muscle cells | 0.34 | 0.78 | Intergenic | FAM110C | U |
| 5165 | chr7 | 157823927 | 157824386 | Smooth Muscle cells | 0.34 | 0.78 | intron | PTPRN2 | U |
| 5166 | chr1 | 111040980 | 111041120 | Smooth Muscle cells | 0.34 | 0.77 | Intergenic | CYMP | U |
| 5167 | chr3 | 97353123 | 97353445 | Smooth Muscle cells | 0.33 | 0.76 | intron | EPHAG | U |
| 5168 | chr11 | 39890287 | 39890688 | Smooth Muscle cells | 0.33 | 0.76 | Intergenic | LRRC4C | U |
| 5169 | chr12 | 34029238 | 34029378 | Smooth Muscle cells | 0.38 | 0.8 | Intergenic | ALG10 | U |
| 5170 | chr1 | 35213151 | 35213428 | Smooth Muscle cells | 0.3 | 0.72 | Intergenic | GJB5 | U |
| 5171 | chr10 | 1903252 | 1903566 | Smooth Muscle cells | 0.35 | 0.77 | Intergenic | ADARB2 | U |
| 5172 | chr8 | 102324166 | 102324500 | Smooth Muscle cells | 0.36 | 0.77 | Intergenic | NACAP1 | U |
| 5173 | chr22 | 47651354 | 47651596 | Smooth Muscle cells | 0.34 | 0.74 | Intergenic | FLI46257 | U |
| 5174 | chr3 | 128440062 | 128440165 | Smooth Muscle cells | 0.34 | 0.73 | Intergenic | RAB7A | U |
| 5175 | chr1 | 37868647 | 37868988 | Smooth Muscle cells | 0.35 | 0.73 | Intergenic | LOC728431 | U |
| 5176 | chr10 | 38802268 | 38802537 | Smooth Muscle cells | 0.35 | 0.72 | Intergenic | LOC399744 | U |
| 5177 | chr2 | 2429578143 | 242958199 | Smooth Muscle cells | 0.36 | 0.73 | Intergenic | LOC728323 | U |
| 5178 | chr9 | 126755520 | 126755782 | Smooth Muscle cells | 0.37 | 0.72 | Intergenic | LHX2 | U |
| 5179 | chr16 | 68767970 | 68768224 | Smooth Muscle cells | 0.37 | 0.87 | Intergenic | CDH1 | U |
| 5180 | chr4 | 38426698 | 38427116 | Smooth Muscle cells | 0.31 | 0.84 | Intergenic | KLF3 | U |
| 5181 | chrX | 90908496 | 90908836 | Smooth Muscle cells | 0.31 | 0.78 | Intergenic | PCDH11X | U |
| 5182 | chr12 | 122206348 | 122206441 | Smooth Muscle cells | 0.17 | 0.87 | intron | TMEM1208 | U |
| 5183 | chr14 | 28514717 | 28514969 | Smooth Muscle cells | 0.36 | 0.81 | Intergenic | LINC00645 | U |
| 5184 | chr7 | 28887244 | 28887569 | Smooth Muscle cells | 0.15 | 0.82 | Intergenic | TRIL | U |
| 5185 | chr9 | 104083380 | 104083851 | Smooth Muscle cells | 0.24 | 0.85 | intron | LPPR1 | U |
| 5186 | chr19 | 10928691 | 10929142 | Smooth Muscle cells | 0.25 | 0.85 | promoter-TSS | MIR199A1 | U |
| 5187 | chr9 | 18012503 | 18012777 | Smooth Muscle cells | 0.26 | 0.85 | Intergenic | SH3GL2 | U |
| 5188 | chr22 | 29589074 | 29589379 | Smooth Muscle cells | 0.28 | 0.86 | Intergenic | EMID1 | U |
| 5189 | chr14 | 36921436 | 36921877 | Smooth Muscle cells | 0.3 | 0.82 | Intergenic | SFTA3 | U |
| 5190 | chr9 | 104450777 | 104451030 | Smooth Muscle cells | 0.3 | 0.8 | intron | GRIN3A | U |
| 5191 | chr14 | 70670452 | 70670892 | Smooth Muscle cells | 0.33 | 0.73 | Intergenic | SLC8A3 | U |
| 5192 | chr8 | 26048065 | 26048282 | Smooth Muscle cells | 0.81 | 0.16 | Intergenic | PPP2R2A | M |
| 5193 | chr8 | 26047813 | 26047895 | Smooth Muscle cells | 0.75 | 0.15 | Intergenic | PPP2R2A | M |
| 5194 | chr8 | 143483475 | 143483622 | Smooth Muscle cells | 0.62 | 0.11 | intron | TSNARE1 | M |
| 5195 | chr8 | 72757629 | 72757788 | Smooth Muscle cells | 0.7 | 0.19 | promoter-TSS | MSC | M |
| 5196 | chr7 | 73242001 | 73242259 | Smooth Muscle cells | 0.68 | 0.19 | Intergenic | CLDN4 | M |
| 5197 | chr22 | 50587574 | 50587895 | Smooth Muscle cells | 0.65 | 0.16 | intron | MOV10L1 | M |
| 5198 | chr2 | 191273996 | 191274078 | Smooth Muscle cells | 0.63 | 0.16 | intron | MFSD6 | M |
| 5199 | chr8 | 98789994 | 98790368 | Smooth Muscle cells | 0.66 | 0.19 | intron | LAPTM4B | M |
| 5200 | chr4 | 105411438 | 105411757 | Smooth Muscle cells | 0.62 | 0.19 | intron | CXXC4 | M |
| 5201 | chr2 | 2204068601 | 220407000 | Smooth Muscle cells | 0.63 | 0.21 | intron | CHPF | M |
| 5202 | chr6 | 32064206 | 32064259 | Smooth Muscle cells | 0.64 | 0.27 | intron | TNXB | M |
| 5203 | chr14 | 104312591 | 104312825 | Smooth Muscle cells | 0.57 | 0.21 | intron | PPP1R13B | M |
| 5204 | chr6 | 32064082 | 32064120 | Smooth Muscle cells | 0.64 | 0.3 | intron | TNXB | M |
| 5205 | chr2 | 74776766 | 74776868 | Smooth Muscle cells | 0.68 | 0.14 | intron | LOXL3 | M |
| 5206 | chr8 | 72916545 | 72916780 | Smooth Muscle cells | 0.69 | 0.21 | intron | LOC100132891 | M |
| 5207 | chr8 | 72758068 | 72758208 | Smooth Muscle cells | 0.66 | 0.21 | intron | LOC100132891 | M |
| 5208 | chr20 | 3653350 | 3653771 | Smooth Muscle cells | 0.73 | 0.11 | intron, exon | ADAM33, ADAM33 | M |
| 5209 | chr19 | 49939989 | 49940086 | Smooth Muscle cells | 0.74 | 0.21 | exon, intron | SLC17A7, SLC17A7 | M |
| 5210 | chr16 | 85206120 | 85206443 | Smooth Muscle cells | 0.71 | 0.19 | Intergenic | LOC400548 | M |
| 5211 | chr20 | 3653926 | 3654003 | Smooth Muscle cells | 0.73 | 0.22 | intron, exon | ADAM33, ADAM33 | M |
| 5212 | chr13 | 28000309 | 28000558 | Smooth Muscle cells | 0.62 | 0.14 | intron | GTF3A | M |
| 5213 | chr13 | 33589940 | 33590003 | Smooth Muscle cells | 0.66 | 0.19 | promoter-TSS | KL | M |
| 5214 | chr6 | 134175377 | 134175508 | Smooth Muscle cells | 0.61 | 0.14 | TTS | MGC34034 | M |
| 5215 | chr19 | 10077107 | 10077444 | Smooth Muscle cells | 0.67 | 0.22 | exon, intron | COL5A3, COL5A3 | M |
| 5216 | chr9 | 71735533 | 71735995 | Smooth Muscle cells | 0.56 | 0.12 | promoter-TSS | TIP2 | M |
| 5217 | chr5 | 77841405 | 77841623 | Thyroid Epithelium | 0.03 | 0.95 | intron | LHFPL2 | U |
| 5218 | chr12 | 111696042 | 111696091 | Thyroid Epithelium | 0.04 | 0.95 | Intron | CUX2 | U |
| 5219 | chr2 | 204339659 | 204339856 | Thyroid Epithelium | 0.04 | 0.95 | intron | RAPH1 | U |
| 5220 | chr6 | 1552781183 | 155278597 | Thyroid Epithelium | 0.03 | 0.93 | Intergenic | TIAM2 | U |
| 5221 | chr17 | 26526466 | 26526640 | Thyroid Epithelium | 0.05 | 0.95 | Intergenic | PYY2 | U |
| 5222 | chr17 | 312918363 | 31291913 | Thyroid Epithelium | 0.05 | 0.94 | Intergenic | SPACA3 | U |
| 5223 | chr12 | 132468369 | 132468606 | Thyroid Epithelium | 0.05 | 0.94 | intron | EP400 | U |
| 5224 | chr3 | 196643735 | 196643991 | Thyroid Epithelium | 0.08 | 0.96 | intron | SENP5 | U |
| 5225 | chr11 | 64524521 | 64524614 | Thyroid Epithelium | 0.07 | 0.94 | intron | PYGM | U |
| 5226 | chr6 | 52807841 | 52808039 | Thyroid Epithelium | 0.08 | 0.93 | Intergenic | GSTA3 | U |
| 5227 | chr5 | 153692596 | 153692856 | Thyroid Epithelium | 0.07 | 0.92 | intron | GALNT10 | U |
| 5228 | chr1 | 226442408 | 226442835 | Thyroid Epithelium | 0.1 | 0.95 | intron | LIN9 | U |
| 5229 | chr1 | 151742357 | 151742418 | Thyroid Epithelium | 0.11 | 0.95 | intron | OAZ3 | U |
| 5230 | chr18 | 60492252 | 60492411 | Thyroid Epithelium | 0.13 | 0.94 | intron | PHLPP1 | U |
| 5231 | chr16 | 87460982 | 87461122 | Thyroid Epithelium | 0.02 | 0.94 | intron | ZCCHC14 | U |
| 5232 | chr12 | 64410229 | 64410506 | Thyroid Epithelium | 0.03 | 0.94 | intron | SRGAPI | U |
| 5233 | chr7 | 110671964 | 110672287 | Thyroid Epithelium | 0.05 | 0.94 | intron | IMMP2L | U |
| 5234 | chr11 | 86500271 | 86500689 | Thyroid Epithelium | 0.03 | 0.91 | Intergenic | PRSS23 | U |
| 5235 | chr1 | 10441602 | 10442072 | Thyroid Epithelium | 0.04 | 0.92 | TTS | KIF1B | U |
| 5236 | chr9 | 132811819 | 132811955 | Thyroid Epithelium | 0.05 | 0.92 | Intergenic | GPR107 | U |
| 5237 | chr10 | 79598984 | 79599214 | Thyroid Epithelium | 0.06 | 0.93 | intron | DLG5 | U |
| 5238 | chr2 | 113489730 | 113490097 | Thyroid Epithelium | 0.02 | 0.89 | Intergenic | CKAP2L | U |
| 5239 | chr8 | 16642556 | 16642729 | Thyroid Epithelium | 0.06 | 0.92 | Intergenic | FGF20 | U |
| 5240 | chr2 | 26854285 | 26854460 | Thyroid Epithelium | 0.04 | 0.9 | intron | CIB4 | U |
| 5241 | chr7 | 68364312 | 68364488 | Thyroid Epithelium | 0.01 | 0.87 | Intergenic | AUTS2 | U |
| 5242 | chr1 | 9373886 | 9374190 | Thyroid Epithelium | 0.07 | 0.93 | intron | SPSB1 | U |
| 5243 | chr8 | 133881917 | 133882091 | Thyroid Epithelium | 0.02 | 0.87 | exon | TG | U |
| 5244 | chr10 | 78833441 | 78833640 | Thyroid Epithelium | 0.05 | 0.9 | intron | KCNMA1 | U |
| 5245 | chr2 | 9471561 | 9471829 | Thyroid Epithelium | 0.06 | 0.91 | intron | ASAP2 | U |
| 5246 | chr9 | 138170740 | 138170805 | Thyroid Epithelium | 0.06 | 0.9 | Intergenic | C9orf62 | U |
| 5247 | chr1 | 18058726 | 18058865 | Thyroid Epithelium | 0.08 | 0.92 | Intergenic | ACTL8 | U |
| 5248 | chr1 | 55372143 | 55372285 | Thyroid Epithelium | 0.06 | 0.9 | Intergenic | DHCR24 | U |
| 5249 | chr9 | 138073725 | 138073927 | Thyroid Epithelium | 0.05 | 0.89 | exon | LOC401557 | U |
| 5250 | chr13 | 53475567 | 53475831 | Thyroid Epithelium | 0.02 | 0.86 | Intergenic | PCDH8 | U |
| 5251 | chr17 | 2944952 | 2945112 | Thyroid Epithelium | 0.03 | 0.86 | Intergenic | OR1D5 | U |
| 5252 | chr15 | 58701798 | 58702038 | Thyroid Epithelium | 0.08 | 0.91 | Intergenic | LIPC | U |
| 5253 | chr1 | 113270906 | 113271168 | Thyroid Epithelium | 0.06 | 0.89 | TTS, Intergenic | FAM19A3, FAM19A3 | U |
| 5254 | chr3 | 184270869 | 184271026 | Thyroid Epithelium | 0.08 | 0.9 | Intergenic | EPHB3 | U |
| 5255 | chr10 | 131658341 | 131658561 | Thyroid Epithelium | 0.07 | 0.89 | intron | EBF3 | U |
| 5256 | chr3 | 42085691 | 42085906 | Thyroid Epithelium | 0.13 | 0.94 | Intergenic | ULK4 | U |
| 5257 | chr17 | 17737018 | 17737272 | Thyroid Epithelium | 0.11 | 0.92 | intron | SREBF1 | U |
| 5258 | chr7 | 1184393 | 1184562 | Thyroid Epithelium | 0.08 | 0.88 | Intergenic | C7orf50 | U |
| 5259 | chr8 | 101059069 | 101059333 | Thyroid Epithelium | 0.06 | 0.86 | intron | RGS22 | U |
| 5260 | chr14 | 97398487 | 97398775 | Thyroid Epithelium | 0.1 | 0.9 | Intergenic | VRK1 | U |
| 5261 | chr10 | 108227291 | 108227365 | Thyroid Epithelium | 0.09 | 0.88 | Intergenic | SORCS1 | U |
| 5262 | chr12 | 1238564801 | 123856657 | Thyroid Epithelium | 0.14 | 0.93 | Intergenic | SETDB | U |
| 5263 | chr2 | 86257018 | 86257382 | Thyroid Epithelium | 0.14 | 0.93 | intron | POLR1A | U |
| 5264 | chr5 | 60620150 | 60620521 | Thyroid Epithelium | 0.16 | 0.95 | Intergenic | ZSWIM6 | U |
| 5265 | chr17 | 38067990 | 38068365 | Thyroid Epithelium | 0.17 | 0.94 | intron | GSDMB | U |
| 5266 | chr8 | 28762393 | 28762890 | Thyroid Epithelium | 0.16 | 0.93 | intron | HMBOX1 | U |
| 5267 | chr19 | 14157259 | 14157464 | Thyroid Epithelium | 0.14 | 0.9 | intron | IL27RA | U |
| 5268 | chr5 | 179103360 | 179103599 | Thyroid Epithelium | 0.12 | 0.88 | Intergenic | CBY3 | U |
| 5269 | chr3 | 183408133 | 183408457 | Thyroid Epithelium | 0.18 | 0.94 | Intergenic | YEATS2 | U |
| 5270 | chr3 | 183972308 | 183972418 | Thyroid Epithelium | 0.13 | 0.88 | intron | ECE2 | U |
| 5271 | chr10 | 123691016 | 123691439 | Thyroid Epithelium | 0.16 | 0.91 | Intergenic | ATE1 | U |
| 5272 | chr15 | 75768694 | 75768952 | Thyroid Epithelium | 0.22 | 0.96 | intron | PTPN9 | U |
| 5273 | chr16 | 73058458 | 73058766 | Thyroid Epithelium | 0.19 | 0.93 | intron | ZFHX3 | U |
| 5274 | chr7 | 75953823 | 75954271 | Thyroid Epithelium | 0.2 | 0.94 | Intergenic | HSPB1 | U |
| 5275 | chr1 | 45581529 | 45581783 | Thyroid Epithelium | 0.21 | 0.94 | intron | ZSWIM5 | U |
| 5276 | chr16 | 19067687 | 19067891 | Thyroid Epithelium | 0.14 | 0.86 | intron | TMC7 | U |
| 5277 | chr6 | 126254856 | 126255172 | Thyroid Epithelium | 0.19 | 0.91 | Intergenic | HINT3 | U |
| 5278 | chr8 | 144617767 | 144618256 | Thyroid Epithelium | 0.22 | 0.93 | exon | ZC3H3 | U |
| 5279 | chr1 | 193160548 | 193160768 | Thyroid Epithelium | 0.26 | 0.96 | intron | CDC73 | U |
| 5280 | chr15 | 89011962 | 89012198 | Thyroid Epithelium | 0.24 | 0.94 | intron | MRPS11 | U |
| 5281 | chr17 | 1318285 | 1318632 | Thyroid Epithelium | 0.24 | 0.93 | Intergenic | YWHAE | U |
| 5282 | chr16 | 30026699 | 30026730 | Thyroid Epithelium | 0.27 | 0.94 | Intergenic | DOC2A | U |
| 5283 | chr19 | 5106165 | 5106472 | Thyroid Epithelium | 0.32 | 0.94 | intron | KDM4B | U |
| 5284 | chr15 | 41363111 | 41363492 | Thyroid Epithelium | 0.33 | 0.95 | intron | INO80 | U |
| 5285 | chr14 | 103375499 | 103375946 | Thyroid Epithelium | 0.19 | 0.93 | exon | TRAF3 | U |
| 5286 | chr10 | 134559550 | 134559866 | Thyroid Epithelium | 0.02 | 0.93 | intron | INPP5A | U |
| 5287 | chr2 | 3456139 | 3456394 | Thyroid Epithelium | 0.04 | 0.93 | intron | TRAPPC12 | U |
| 5288 | chr19 | 4676153 | 4676437 | Thyroid Epithelium | 0.04 | 0.93 | exon | DPP9 | U |
| 5289 | chr9 | 126368280 | 126368708 | Thyroid Epithelium | 0.04 | 0.92 | intron | DENND1A | U |
| 5290 | chr22 | 31522407 | 31522467 | Thyroid Epithelium | 0.08 | 0.94 | exon | INPP5J | U |
| 5291 | chr9 | 128200029 | 128200202 | Thyroid Epithelium | 0.03 | 0.89 | exon | MAPKAP1 | U |
| 5292 | chr19 | 46307986 | 46308452 | Thyroid Epithelium | 0.02 | 0.88 | exon, intron | RSPH6A | U |
| 5293 | chr6 | 139880341 | 13988092 | Thyroid Epithelium | 0.08 | 0.93 | Intergenic | RNF182 | U |
| 5294 | chr8 | 96038416 | 96038674 | Thyroid Epithelium | 0.08 | 0.92 | intron | NDUFAF6 | U |
| 5295 | chr1 | 1491550 | 1491950 | Thyroid Epithelium | 0.1 | 0.93 | intron | SSU72 | U |
| 5296 | chr14 | 21559955 | 21560302 | Thyroid Epithelium | 0.11 | 0.93 | exon | ZNF219 | U |
| 5297 | chr2 | 3449848 | 3450048 | Thyroid Epithelium | 0.05 | 0.95 | intron | TRAPPC12 | U |
| 5298 | chr1 | 1492055 | 1492375 | Thyroid Epithelium | 0.02 | 0.92 | Intron | SSU72 | U |
| 5299 | chr11 | 63562698 | 63562835 | Thyroid Epithelium | 0.04 | 0.93 | Intergenic | C11orf84 | U |
| 5300 | chr13 | 115052291 | 115052573 | Thyroid Epithelium | 0.03 | 0.92 | intron | UPF3A | U |
| 5301 | chr16 | 27509934 | 27510352 | Thyroid Epithelium | 0.03 | 0.92 | intron | GTF3C1 | U |
| 5302 | chr17 | 7076025 | 7076444 | Thyroid Epithelium | 0.02 | 0.91 | TTS | ASGR1 | U |
| 5303 | chr6 | 159044831 | 159045276 | Thyroid Epithelium | 0.04 | 0.93 | intron | TMEM181 | U |
| 5304 | chr2 | 236897052 | 236897538 | Thyroid Epithelium | 0.04 | 0.93 | intron | AGAP1 | U |
| 5305 | chr20 | 23969053 | 23969266 | Thyroid Epithelium | 0.04 | 0.92 | intron, exon | GGTLC1, GGTLC1 | U |
| 5306 | chr2 | 3266591 | 3267010 | Thyroid Epithelium | 0.07 | 0.95 | intron | TSSC1 | U |
| 5307 | chr20 | 9393796 | 9393983 | Thyroid Epithelium | 0.05 | 0.91 | intron | PLC84 | U |
| 5308 | chr16 | 16018823 | 16019143 | Thyroid Epithelium | 0.05 | 0.91 | Intergenic | ABCC1 | U |
| 5309 | chr19 | 30129869 | 30130034 | Thyroid Epithelium | 0.02 | 0.87 | Intergenic | PLEKHF1 | U |
| 5310 | chr13 | 22786818 | 22786991 | Thyroid Epithelium | 0.06 | 0.91 | Intergenic | LINC00424 | U |
| 5311 | chr14 | 21969885 | 21970111 | Thyroid Epithelium | 0.07 | 0.92 | intron | METTL3 | U |
| 5312 | chr2 | 130919013 | 130919124 | Thyroid Epithelium | 0.02 | 0.86 | intron | SMPD4 | U |
| 5313 | chr19 | 12701924 | 12702204 | Thyroid Epithelium | 0.09 | 0.93 | intron | ZNF490 | U |
| 5314 | chr2 | 208331846 | 208332302 | Thyroid Epithelium | 0.07 | 0.91 | Intergenic | CREB1 | U |
| 5315 | chr19 | 4676417 | 4676565 | Thyroid Epithelium | 0.03 | 0.86 | exon | DPP9 | U |
| 5316 | chr2 | 74848024 | 74848231 | Thyroid Epithelium | 0.09 | 0.92 | intron | M1AP | U |
| 5317 | chr1 | 154931253 | 154931637 | Thyroid Epithelium | 0.04 | 0.87 | exon | PYGO2 | U |
| 5318 | chr20 | 62242039 | 62242246 | Thyroid Epithelium | 0.04 | 0.86 | intron | GMEB2 | U |
| 5319 | chr2 | 240298350 | 240298596 | Thyroid Epithelium | 0.08 | 0.9 | intron | HDAC4 | U |
| 5320 | chr14 | 58194229 | 68194554 | Thyroid Epithelium | 0.11 | 0.93 | intron | RDH12 | U |
| 5321 | chr1 | 57046407 | 57046901 | Thyroid Epithelium | 0.1 | 0.92 | Intergenic | PPAP2B | U |
| 5322 | chr13 | 113488301 | 113488591 | Thyroid Epithelium | 0.1 | 0.91 | intron | ATP11A | U |
| 5323 | chr2 | 206605235 | 206605573 | Thyroid Epithelium | 0.11 | 0.92 | exon, intron, intron | NRP2, NRP2, NRP2 | U |
| 5324 | chr9 | 1004311281 | 100431526 | Thyroid Epithelium | 0.09 | 0.9 | intron | NCBP1 | U |
| 5325 | chr16 | 1676814 | 1677233 | Thyroid Epithelium | 0.13 | 0.94 | intron | CRAMP1L | U |
| 5326 | chr15 | 65241739 | 65242202 | Thyroid Epithelium | 0.13 | 0.93 | intron | ANKDD1A | U |
| 5327 | chr14 | 33392213 | 33392681 | Thyroid Epithelium | 0.12 | 0.92 | Intergenic | NPAS3 | U |
| 5328 | chr3 | 195709678 | 195709900 | Thyroid Epithelium | 0.16 | 0.95 | intron | SDHAP1 | U |
| 5329 | chr21 | 44441320 | 44441550 | Thyroid Epithelium | 0.11 | 0.9 | exon, intron, intron | PKNOX1, PKNOX1, PKN [symbol] | U |
| 5330 | chr2 | 60986229 | 60986557 | Thyroid Epithelium | 0.16 | 0.95 | intron | PAPOLG | U |
| 5331 | chr14 | 73391680 | 73391869 | Thyroid Epithelium | 0.16 | 0.93 | Intergenic | DCAF4 | U |
| 5332 | chr20 | 54330073 | 5433358 | Thyroid Epithelium | 0.15 | 0.92 | Intergenic | LINC00658 | U |
| 5333 | chr9 | 139134458 | 139134679 | Thyroid Epithelium | 0.1 | 0.86 | intron | QSOX2 | U |
| 5334 | chr12 | 121756173 | 121756406 | Thyroid Epithelium | 0.19 | 0.94 | intron | ANAPC5 | U |
| 5335 | chr20 | 23968631 | 23968979 | Thyroid Epithelium | 0.16 | 0.91 | promoter-TSS, intro [symbol] | GGTLC1, GGTLC1 | U |
| 5336 | chr20 | 33903471 | 33903868 | Thyroid Epithelium | 0.18 | 0.93 | intron | UQCC | U |
| 5337 | chr22 | 31522899 | 31523087 | Thyroid Epithelium | 0.17 | 0.91 | intron | INPP5J | U |
| 5338 | chr11 | 72146423 | 72146633 | Thyroid Epithelium | 0.19 | 0.91 | promoter-TSS | CLPB | U |
| 5339 | chr2 | 231530504 | 231530900 | Thyroid Epithelium | 0.19 | 0.91 | Intergeni | LOC151475 | U |
| 5340 | chr6 | 3070673 | 3070765 | Thyroid Epithelium | 0.23 | 0.94 | Intergenic | RIPK1 | U |
| 5341 | chr4 | 1738884 | 1739194 | Thyroid Epithelium | 0.27 | 0.96 | exon | TACC3 | U |
| 5342 | chr15 | 91268331 | 91268748 | Thyroid Epithelium | 0.28 | 0.95 | intron | BLM | U |
| 5343 | chr9 | 127120341 | 127120762 | Thyroid Epithelium | 0.25 | 0.92 | exon | LOC100129034 | U |
| 5344 | chr13 | 109567908 | 109568303 | Thyroid Epithelium | 0.87 | 0.14 | intron | MYO16 | M |
| 5345 | chr4 | 140476076 | 140476258 | Thyroid Epithelium | 0.75 | 0.06 | intron | SETD7 | M |
| 5346 | chr3 | 150479084 | 150479479 | Thyroid Epithelium | 0.79 | 0.13 | intron | SIAH2 | M |
| 5347 | chr11 | 113648895 | 113649142 | Thyroid Epithelium | 0.76 | 0.11 | Intergenic | ICLDN25 | M |
| 5348 | chr4 | 186316500 | 186316842 | Thyroid Epithelium | 0.72 | 0.07 | Intergenic | ANKRD37 | M |
| 5349 | chr2 | 64370060 | 64370441 | Thyroid Epithelium | 0.71 | 0.06 | intron | PELI1 | M |
| 5350 | chr10 | 7527240 | 7527385 | Thyroid Epithelium | 0.82 | 0.18 | Intergenic | SFMBT2 | M |
| 5351 | chr19 | 1258902 | 1259109 | Thyroid Epithelium | 0.8 | 0.17 | exon, TTS | MIDN, MIDN | M |
| 5352 | chr6 | 128839793 | 128840033 | Thyroid Epithelium | 0.74 | 0.12 | intron | PTPRK | M |
| 5353 | chr15 | 96883151 | 96883546 | Thyroid Epithelium | 0.7 | 0.08 | exon | NR2F2 | M |
| 5354 | chr14 | 81462751 | 81463004 | Thyroid Epithelium | 0.67 | 0.06 | intron | TSHR | M |
| 5355 | chr1 | 1493336411 | 149333733 | Thyroid Epithelium | 0.68 | 0.08 | Intergenic | FCGR1C | M |
| 5356 | chr1 | 1493337401 | 149333805 | Thyroid Epithelium | 0.68 | 0.12 | Intergenic | FCGR1C | M |
| 5357 | chr14 | 90865037 | 90865362 | Thyroid Epithelium | 0.61 | 0.05 | intron | CALM1 | M |
| 5358 | chr11 | 128377113 | 128377421 | Thyroid Epithelium | 0.58 | 0.04 | intron | ETS1 | M |
| 5359 | chr10 | 8102090 | 8102352 | Thyroid Epithelium | 0.88 | 0.15 | intron | GATA3 | M |
| 5360 | chr11 | 57244279 | 57244587 | Thyroid Epithelium | 0.86 | 0.08 | TTS | RTN4RL2 | M |
| 5361 | chr10 | 88023129 | 88023186 | Thyroid Epithelium | 0.93 | 0.17 | intron | GRID1 | M |
| 5362 | chr11 | 46582020 | 46582513 | Thyroid Epithelium | 0.75 | 0.04 | intron | AMBRA1 | M |
| 5363 | chr9 | 1005038723 | 100504016 | Thyroid Epithelium | 0.8 | 0.12 | Intergenic | EXPA | M |
| 5364 | chr13 | 459911221 | 45991446 | Thyroid Epithelium | 0.81 | 0.13 | intron | SLC25A30 | M |
| 5365 | chr3 | 44039086 | 44039290 | Thyroid Epithelium | 0.75 | 0.08 | Intergenic | MIR138-1 | M |
| 5366 | chr7 | 150784966 | 150785108 | Thyroid Epithelium | 0.61 | 0.06 | exon, intron | AGAP3, AGAP3 | M |
| 5367 | chr14 | 75413103 | 75413361 | Thyroid Epithelium | 0.6 | 0.06 | intron | PGF | M |
| 5368 | chr8 | 37595216 | 37595411 | Thyroid Epithelium | 0.57 | 0.06 | intron | ERLIN2 | M |
| 5369 | chr7 | 134849833 | 134850162 | Adipocytes | 0.17 | 0.83 | TTS | C7orf49 | U |
| 5370 | chr11 | 27502491 | 27502645 | Adipocytes | 0.29 | 0.92 | Intergenic | LGR4 | U |
| 5371 | chr11 | 62304487 | 62304526 | Adipocytes | 0.27 | 0.9 | intron | AHNAK | U |
| 5372 | chr1 | 110426640 | 110427129 | Adipocytes | 0.3 | 0.9 | Intergenic | CSF1 | U |
| 5373 | chr12 | 1095953711 | 109595608 | Adipocytes | 0.27 | 0.86 | intron | ACACB | U |
| 5374 | chr5 | 79945953 | 79946334 | Adipocytes | 0.25 | 0.84 | exon | MTRNR2L2 | U |
| 5375 | chr5 | 9388792 | 99388843 | Adipocytes | 0.22 | 0.8 | Intergenic | LOC100133050 | U |
| 5376 | chr11 | 75537042 | 75537263 | Adipocytes | 0.3 | 0.88 | intron | UVRAG | U |
| 5377 | chr6 | 155357994 | 155358379 | Adipocytes | 0.3 | 0.88 | Intergenic | TIAM2 | U |
| 5378 | chr5 | 99388999 | 99389072 | Adipocytes | 0.24 | 0.82 | Intergenic | LOC100133050 | U |
| 5379 | chr17 | 47692960 | 47693459 | Adipocytes | 0.29 | 0.85 | intron | SPOP | U |
| 5380 | chr19 | 5714972 | 5715185 | Adipocytes | 0.33 | 0.88 | intron | LONP1 | U |
| 5381 | chr10 | 71232978 | 71233197 | Adipocytes | 0.35 | 0.9 | intron | TSPAN15 | U |
| 5382 | chr12 | 125111263 | 125111660 | Adipocytes | 0.34 | 0.89 | Intergenic | NCOR2 | U |
| 5383 | chr6 | 62284239 | 62284318 | Adipocytes | 0.33 | 0.87 | Intergenic | KHDRBS2 | U |
| 5384 | chr7 | 95237088 | 95237447 | Adipocytes | 0.31 | 0.85 | Intergenic | PDK4 | U |
| 5385 | chr5 | 134261080 | 134261365 | Adipocytes | 0.3 | 0.83 | intron | PCBD2 | U |
| 5386 | chr15 | 73988788 | 73988963 | Adipocytes | 0.35 | 0.87 | intron | CD276 | U |
| 5387 | chr11 | 93266034 | 93266360 | Adipocytes | 0.32 | 0.84 | intron | C11orf75 | U |
| 5388 | chr17 | 80024096 | 80024157 | Adipocytes | 0.33 | 0.84 | promoter-TSS | DUS1L | U |
| 5389 | chr18 | 71452236 | 71452389 | Adipocytes | 0.32 | 0.83 | Intergenic | FBXO15 | U |
| 5390 | chr2 | 127878592 | 127878832 | Adipocytes | 0.22 | 0.88 | Intergenic | BIN1 | U |
| 5391 | chr17 | 51183100 | 51183164 | Adipocytes | 0.18 | 0.81 | Intergenic | C17orf112 | U |
| 5392 | chr3 | 1793882113 | 179388365 | Adipocytes | 0.25 | 0.86 | intron | USP13 | U |
| 5393 | chr11 | 10530619 | 10530845 | Adipocytes | 0.21 | 0.82 | promoter-TSS | MTRNR2L8 | U |
| 5394 | chr5 | 134259017 | 134259287 | Adipocytes | 0.19 | 0.8 | intron | PCBD2 | U |
| 5395 | chr17 | 41004636 | 41004930 | Adipocytes | 0.27 | 0.88 | exon | AOC3 | U |
| 5396 | chr5 | 79946939 | 79947087 | Adipocytes | 0.2 | 0.8 | promoter-TSS | MTRNR2L2 | U |
| 5397 | chr17 | 1378763 | 1378921 | Adipocytes | 0.31 | 0.91 | intron | MYO1C | U |
| 5398 | chr12 | 109595409 | 109595609 | Adipocytes | 0.24 | 0.83 | intron | ACACB | U |
| 5399 | chr17 | 51183274 | 51183341 | Adipocytes | 0.18 | 0.76 | Intergenic | C17orf112 | U |
| 5400 | chr17 | 41004345 | 41004548 | Adipocytes | 0.27 | 0.85 | exon | AOC3 | U |
| 5401 | chr12 | 115682865 | 115683070 | Adipocytes | 0.28 | 0.86 | Intergenic | TBX3 | U |
| 5402 | chr9 | 133811283 | 133811331 | Adipocytes | 0.29 | 0.86 | intron | FIBCD1 | U |
| 5403 | chr9 | 130660439 | 130660604 | Adipocytes | 0.25 | 0.82 | intron | ST6GALNAC6 | U |
| 5404 | chr13 | 1071152608 | 107115475 | Adipocytes | 0.28 | 0.85 | Intergenic | EFNB2 | U |
| 5405 | chr10 | 71891102 | 71891451 | Adipocytes | 0.28 | 0.85 | intron | AIFM2 | U |
| 5406 | chr11 | 10530073 | 10530501 | Adipocytes | 0.23 | 0.8 | promoter-TSS | MIR4485 | U |
| 5407 | chr19 | 48219990 | 48220176 | Adipocytes | 0.28 | 0.84 | exon | EHD2 | U |
| 5408 | chr13 | 110896068 | 110896287 | Adipocytes | 0.31 | 0.87 | intron | COL4A1 | U |
| 5409 | chr12 | 117088493 | 117088772 | Adipocytes | 0.28 | 0.84 | Intergenic | C12orf49 | U |
| 5410 | chr2 | 10955156 | 10955471 | Adipocytes | 0.32 | 0.88 | Intergenic | PDIA6 | U |
| 5411 | chr17 | 40577387 | 40577762 | Adipocytes | 0.24 | 0.8 | Intergenic | PTRF | U |
| 5412 | chr21 | 35171461 | 35171860 | Adipocytes | 0.33 | 0.89 | intron | ITSN1 | U |
| 5413 | chr8 | 23244277 | 23244404 | Adipocytes | 0.34 | 0.89 | intron | LOXL2 | U |
| 5414 | chr5 | 99384926 | 99385065 | Adipocytes | 0.21 | 0.76 | Intergenic | LOC100133050 | U |
| 5415 | chr5 | 134262993 | 134263324 | Adipocytes | 0.28 | 0.83 | promoter-TSS | MIR4461 | U |
| 5416 | chr9 | 129882759 | 129883094 | Adipocytes | 0.31 | 0.86 | intron | ANGPTL2 | U |
| 5417 | chr2 | 242517608 | 242518105 | Adipocytes | 0.33 | 0.87 | Intergenic | BOK-AS1 | U |
| 5418 | chr12 | 1903818 | 1903870 | Adipocytes | 0.36 | 0.89 | intron | CACNA2D4 | U |
| 5419 | chr8 | 10576848 | 10576922 | Adipocytes | 0.35 | 0.88 | Intergenic | SOX7 | U |
| 5420 | chr17 | 62011700 | 62011798 | Adipocytes | 0.27 | 0.8 | Intergenic | CD79B | U |
| 5421 | chr11 | 18994018 | 18994128 | Adipocytes | 0.32 | 0.85 | Intergenic | MRGPRX1 | U |
| 5422 | chr5 | 99386958 | 99387077 | Adipocytes | 0.25 | 0.78 | Intergenic | LOC100133050 | U |
| 5423 | chr7 | 1096422 | 1096548 | Adipocytes | 0.3 | 0.83 | promoter-TSS | GPR146 | U |
| 5424 | chr4 | 144203887 | 144204237 | Adipocytes | 0.34 | 0.87 | Intergenic | GAB1 | U |
| 5425 | chr5 | 99386389 | 99386813 | Adipocytes | 0.23 | 0.76 | Intergenic | LOC100133050 | U |
| 5426 | chr5 | 93905847 | 93906089 | Adipocytes | 0.25 | 0.77 | intron | KIAA0825 | U |
| 5427 | chr6 | 1518572563 | 151857511 | Adipocytes | 0.35 | 0.87 | intron | CCDC170 | U |
| 5428 | chr2 | 44463142 | 44463413 | Adipocytes | 0.33 | 0.85 | Intergenic | SLC3A1 | U |
| 5429 | chr12 | 125114610 | 125114926 | Adipocytes | 0.35 | 0.87 | Intergenic | NCOR2 | U |
| 5430 | chr20 | 60782586 | 60782684 | Adipocytes | 0.3 | 0.81 | Intergenic | HRH3 | U |
| 5431 | chr2 | 109942715 | 109942956 | Adipocytes | 0.34 | 0.85 | intron | GH3RF3 | U |
| 5432 | chr12 | 94389336 | 94389633 | Adipocytes | 0.32 | 0.83 | Intergenic | PLXNC1 | U |
| 5433 | chr2 | 17182671 | 1718569 | Adipocytes | 0.33 | 0.84 | intron | PXDN | U |
| 5434 | chr10 | 4674820 | 4675298 | Adipocytes | 0.34 | 0.85 | Intergenic | LINC00705 | U |
| 5435 | chr12 | 2037717 | 2037873 | Adipocytes | 0.35 | 0.85 | TTS | LOC100271702 | U |
| 5436 | chr14 | 95948245 | 95948497 | Adipocytes | 0.35 | 0.85 | Intergenic | SYNE3 | U |
| 5437 | chr8 | 99009173 | 99009498 | Adipocytes | 0.37 | 0.87 | intron | MATN2 | U |
| 5438 | chr16 | 48565470 | 48565564 | Adipocytes | 0.37 | 0.86 | Intergenic | N4BP1 | U |
| 5439 | chr1 | 96991151 | 96991596 | Adipocytes | 0.36 | 0.85 | Intergenic | PTBP2 | U |
| 5440 | chr4 | 8188123 | 8188193 | Adipocytes | 0.35 | 0.83 | Intergenic | SH3TC1 | U |
| 5441 | chr5 | 178296635 | 178296851 | Adipocytes | 0.36 | 0.84 | intron | ZNF354B | U |
| 5442 | chr8 | 62322984 | 62323287 | Adipocytes | 0.36 | 0.83 | intron | CLVS1 | U |
| 5443 | chr20 | 599201551 | 59920394 | Adipocytes | 0.36 | 0.82 | intron | CDH4 | U |
| 5444 | chr17 | 41722916 | 41723060 | Adipocytes | 0.36 | 0.79 | intron | MEOX1 | U |
| 5445 | chr14 | 90274328 | 90274554 | Adipocytes | 0.39 | 0.79 | intron | EFCAB11 | U |
| 5446 | chr19 | 57125150 | 57125480 | Adipocytes | 0.31 | 0.9 | intron | ZNF71 | U |
| 5447 | chr9 | 111944902 | 111945063 | Adipocytes | 0.35 | 0.83 | intron | EPB41L4B | U |
| 5448 | chr22 | 38051826 | 38052316 | Adipocytes | 0.36 | 0.82 | TTS, exon | SH3BP1 | U |
| 5449 | chr22 | 39664962 | 39665253 | Adipocytes | 0.39 | 0.83 | Intergenic | PDGFB | U |
| 5450 | chr11 | 10529463 | 10529717 | Adipocytes | 0.22 | 0.8 | TTS | AMPD3 | U |
| 5451 | chr5 | 99389410 | 99389822 | Adipocytes | 0.28 | 0.83 | Intergenic | LOC100133050 | U |
| 5452 | chr9 | 134195865 | 134195923 | Adipocytes | 0.35 | 0.89 | Intergenic | PPAPDC3 | U |
| 5453 | chr9 | 19129150 | 19129252 | Adipocytes | 0.3 | 0.82 | Intergenic | PLIN2 | U |
| 5454 | chr17 | 46693343 | 46693444 | Adipocytes | 0.64 | 0.14 | Intergenic | HOXB8 | M |
| 5455 | chr17 | 46694698 | 46694750 | Adipocytes | 0.63 | 0.16 | Intergenic | HOXB8 | M |
| 5456 | chr5 | 135313253 | 135313315 | Adipocytes | 0.61 | 0.16 | Intergenic | LECT2 | M |
| 5457 | chr17 | 46693078 | 45693229 | Adipocytes | 0.57 | 0.12 | promoter-TSS | HOXB8 | M |
| 5458 | chr8 | 98789994 | 98790368 | Adipocytes | 0.64 | 0.19 | intron | LAPTM4B | M |
| 5459 | chr17 | 46692963 | 46693003 | Adipocytes | 0.6 | 0.2 | promoter-TSS | HOXB8 | M |
| 5460 | chr4 | 139786227 | 139786583 | Adipocytes | 0.53 | 0.13 | Intergenic | CCRN4L | M |
| 5461 | chr17 | 46692823 | 46692893 | Adipocytes | 0.53 | 0.14 | promoter-TSS | HOXB8 | M |
| 5462 | chr10 | 6622900 | 6623212 | Adipocytes | 0.54 | 0.15 | promoter-TSS | PRKCQ | M |
| 5463 | chr9 | 138944784 | 138945185 | Adipocytes | 0.85 | 0.56 | intron | NACC2 | M |
| 5464 | chr7 | 27225772 | 27225898 | Adipocytes | 0.54 | 0.18 | promoter-TSS | HOXA11 | M |
| 5465 | chr14 | 62035107 | 62035599 | Adipocytes | 0.58 | 0.09 | Intergenic | FLI22447 | M |
| 5466 | chr11 | 850093 | 850248 | Adipocytes | 0.55 | 0.12 | intron | TSPAN4 | M |
| 5467 | chr6 | 85476296 | 85476447 | Adipocytes | 0.55 | 0.14 | Intergenic | TBX18 | M |
| 5468 | chr9 | 790752743 | 79075498 | Adipocytes | 0.53 | 0.15 | intron | GCNT1 | M |
| 5469 | chr11 | 44325473 | 44325888 | Adipocytes | 0.54 | 0.16 | intron | ALX4 | M |
| 5470 | chr14 | 95237828 | 95237939 | Adipocytes | 0.54 | 0.21 | Intergenic | GSC | M |
| 5471 | chr1 | 229476664 | 229476935 | Neuron CNS | 0.14 | 0.93 | intron | CCSAP | U |
| 5472 | chr2 | 210526620 | 210527068 | Neuron CNS | 0.15 | 0.91 | intron | MAP2 | U |
| 5473 | chr20 | 61812020 | 61812096 | Neuron CNS | 0.18 | 0.92 | Intergenic | MIR124-3 | U |
| 5474 | chr1 | 156388230 | 156388343 | Neuron CNS | 0.2 | 0.94 | intron | C1orf61 | U |
| 5475 | chr19 | 14314665 | 14314864 | Neuron CNS | 0.18 | 0.92 | intron | LPHN1 | U |
| 5476 | chr15 | 70699828 | 70699859 | Neuron CNS | 0.18 | 0.9 | Intergenic | TLE3 | U |
| 5477 | chr2 | 51254072 | 51254313 | Neuron CNS | 0.22 | 0.92 | intron | NRXN1 | U |
| 5478 | chr1 | 1510348693 | 151035128 | Neuron CNS | 0.29 | 0.95 | intron | MLLT11 | U |
| 5479 | chr17 | 431772141 | 43177273 | Neuron CNS | 0.31 | 0.96 | intron | NMT1 | U |
| 5480 | chr7 | 44427912 | 44428238 | Neuron CNS | 0.29 | 0.93 | intron | NUDCD3 | U |
| 5481 | chr16 | 15223252 | 15223657 | Neuron CNS | 0.29 | 0.93 | Intergenic | MIR3180-4 | U |
| 5482 | chr11 | 1301635 | 1301925 | Neuron CNS | 0.28 | 0.92 | intron | TOLLIP | U |
| 5483 | chr4 | 2417547 | 2417899 | Neuron CNS | 0.25 | 0.89 | intron | ZFYVE28 | U |
| 5484 | chr18 | 13374254 | 13374751 | Neuron CNS | 0.28 | 0.92 | intron | LDLRAD4 | U |
| 5485 | chr12 | 133306612 | 133307002 | Neuron CNS | 0.3 | 0.94 | exon | ANKLE2 | U |
| 5486 | chr5 | 145986293 | 145986487 | Neuron CNS | 0.3 | 0.91 | intron | PPP2R2B | U |
| 5487 | chr1 | 19517091 | 1951897 | Neuron CNS | 0.23 | 0.77 | intron | GABRD | U |
| 5488 | chr22 | 45343200 | 45343314 | Neuron CNS | 0.36 | 0.88 | intron | PHF21B | U |
| 5489 | chr11 | 63451294 | 63451377 | Neuron CNS | 0.15 | 0.93 | intron | RTN3 | U |
| 5490 | chr19 | 18313277 | 18313355 | Neuron CNS | 0.14 | 0.9 | intron, exon | RAB3A, RAB3A | U |
| 5491 | chr20 | 60638378 | 60638717 | Neuron CNS | 0.08 | 0.84 | intron | TAF4 | U |
| 5492 | chr2 | 39895425 | 39895781 | Neuron CNS | 0.15 | 0.91 | intron | TMEM178A | U |
| 5493 | chr16 | 11773368 | 11773555 | Neuron CNS | 0.15 | 0.9 | TTS | SNN | U |
| 5494 | chr2 | 512537281 | 51254055 | Neuron CNS | 0.12 | 0.86 | intron | NRXN1 | U |
| 5495 | chr11 | 7841361 | 784317 | Neuron CNS | 0.17 | 0.9 | Intergenic | NS3BP | U |
| 5496 | chr1 | 241518958 | 241519216 | Neuron CNS | 0.14 | 0.87 | exon | RGS7 | U |
| 5497 | chr10 | 11321389 | 11321464 | Neuron CNS | 0.2 | 0.91 | intron | CELF2 | U |
| 5498 | chr1 | 151684072 | 151684272 | Neuron CNS | 0.16 | 0.87 | intron | CELF3 | U |
| 5499 | chr1 | 9912213 | 9912434 | Neuron CNS | 0.16 | 0.86 | intron | CTNNBIP1 | U |
| 5500 | chr13 | 113747701 | 113747990 | Neuron CNS | 0.19 | 0.88 | intron | MCF2L | U |
| 5501 | chr11 | 123397344 | 123397706 | Neuron CNS | 0.18 | 0.87 | intron | GRAMD1B | U |
| 5502 | chr12 | 41087794 | 41088289 | Neuron CNS | 0.19 | 0.88 | intron | CNTN1 | U |
| 5503 | chr4 | 153023924 | 153024013 | Neuron CNS | 0.2 | 0.88 | Intergenic | PET112 | U |
| 5504 | chr14 | 105783388 | 105783537 | Neuron CNS | 0.19 | 0.87 | intron | PACS2 | U |
| 5505 | chr8 | 74679595 | 74679948 | Neuron CNS | 0.22 | 0.9 | Intergenic | STAU2 | U |
| 5506 | chr16 | 30428390 | 30428599 | Neuron CNS | 0.22 | 0.89 | intron | ZNF771 | U |
| 5507 | chr15 | 83377031 | 83377529 | Neuron CNS | 0.15 | 0.82 | intron | AP3B2 | U |
| 5508 | chr16 | 752506 | 752557 | Neuron CNS | 0.2 | 0.86 | intron | FBXL16 | U |
| 5509 | chr1 | 111144600 | 111144789 | Neuron CNS | 0.25 | 0.91 | exon | KCNA2 | U |
| 5510 | chr9 | 137981452 | 137981515 | Neuron CNS | 0.12 | 0.77 | Intron | OLFM1 | U |
| 5511 | chr12 | 19473611 | 1947431 | Neuron CNS | 0.25 | 0.9 | intron | CACNA2D4 | U |
| 5512 | chr14 | 102464020 | 102464276 | Neuron CNS | 0.22 | 0.87 | intron | DYNC1H1 | U |
| 5513 | chr3 | 184057683 | 184058084 | Neuron CNS | 0.22 | 0.87 | intron | FAM131A | U |
| 5514 | chr5 | 140903584 | 140904045 | Neuron CNS | 0.22 | 0.87 | intron | DIAPH1 | U |
| 5515 | chr16 | 752640 | 752702 | Neuron CNS | 0.25 | 0.89 | intron | FBXL16 | U |
| 5516 | chr11 | 64402890 | 64403123 | Neuron CNS | 0.25 | 0.89 | intron | NRXN2 | U |
| 5517 | chr11 | 117741663 | 117741992 | Neuron CNS | 0.23 | 0.87 | intron | FXYD6 | U |
| 5518 | chr11 | 123433332 | 123433827 | Neuron CNS | 0.26 | 0.9 | intron | GRAMD1B | U |
| 5519 | chr1 | 183388184 | 183388241 | Neuron CNS | 0.23 | 0.86 | promoter-TSS | NMNAT2 | U |
| 5520 | chr4 | 6344599 | 6344673 | Neuron CNS | 0.26 | 0.89 | intron | PPP2R2C | U |
| 5521 | chr11 | 64400262 | 64400339 | Neuron CNS | 0.28 | 0.91 | intron | NRXN2 | U |
| 5522 | chr16 | 255465 | 255750 | Neuron CNS | 0.26 | 0.89 | intron | LUC7L | U |
| 5523 | chr8 | 41751840 | 41752192 | Neuron CNS | 0.28 | 0.91 | intron | ANK1 | U |
| 5524 | chr2 | 26202681 | 26203068 | Neuron CNS | 0.28 | 0.91 | intron | KIF3C | U |
| 5525 | chr17 | 2712162 | 2712631 | Neuron CNS | 0.26 | 0.89 | intron | RAPIGAP2 | U |
| 5526 | chr19 | 58236184 | 58236661 | Neuron CNS | 0.31 | 0.94 | intron | ZNF671 | U |
| 5527 | chr9 | 138910662 | 138910708 | Neuron CNS | 0.23 | 0.85 | intron | NACC2 | U |
| 5528 | chr15 | 792025153 | 79202722 | Neuron CNS | 0.24 | 0.86 | Intergenic | CTSH | U |
| 5529 | chr2 | 85658853 | 85659138 | Neuron CNS | 0.23 | 0.85 | Intergenic | SH2D6 | U |
| 5530 | chr11 | 47605869 | 47606088 | Neuron CNS | 0.27 | 0.88 | exon | NDUFS3 | U |
| 5531 | chr1 | 209796880 | 209797298 | Neuron CNS | 0.3 | 0.91 | promoter-TSS | MIR4260 | U |
| 5532 | chr16 | 85452473 | 85452688 | Neuron CNS | 0.33 | 0.93 | Intergenic | MIR5093 | U |
| 5533 | chr7 | 44316367 | 44316847 | Neuron CNS | 0.3 | 0.9 | intron | CAMK2B | U |
| 5534 | chr17 | 29038739 | 29038972 | Neuron CNS | 0.35 | 0.94 | intron | SUZ12P1 | U |
| 5535 | chr7 | 150789017 | 150789270 | Neuron CNS | 0.32 | 0.91 | intron | AGAP3 | U |
| 5536 | chr12 | 1215923881 | 121592620 | Neuron CNS | 0.31 | 0.89 | intron | P2RX7 | U |
| 5537 | chr19 | 51045764 | 51046205 | Neuron CNS | 0.26 | 0.84 | intron | LRRC4B | U |
| 5538 | chr4 | 2357948 | 2358138 | Neuron CNS | 0.28 | 0.85 | intron | ZFYVE28 | U |
| 5539 | chr20 | 1900281 | 1900598 | Neuron CNS | 0.26 | 0.83 | intron | SIRPA | U |
| 5540 | chr3 | 13094209 | 13094541 | Neuron CNS | 0.32 | 0.89 | intron | IQSEC1 | U |
| 5541 | chr12 | 123425582 | 123425943 | Neuron CNS | 0.33 | 0.9 | intron | ABCBS | U |
| 5542 | chr9 | 140035658 | 140036053 | Neuron CNS | 0.17 | 0.74 | intron | GRIN1 | U |
| 5543 | chr17 | 56166789 | 56167198 | Neuron CNS | 0.32 | 0.89 | exon, TTS | DYNLL2, DYNLL2 | U |
| 5544 | chr9 | 141008005 | 141008490 | Neuron CNS | 0.29 | 0.86 | intron | CACNA1B | U |
| 5545 | chr19 | 501955401 | 50195619 | Neuron CNS | 0.26 | 0.82 | exon | CPT1C | U |
| 5546 | chr7 | 97668445 | 97668629 | Neuron CNS | 0.28 | 0.83 | Intergenic | OCM2 | U |
| 5547 | chr4 | 3531996 | 3532367 | Neuron CNS | 0.32 | 0.87 | intron | LRPAP1 | U |
| 5548 | chr9 | 137994537 | 137994881 | Neuron CNS | 0.31 | 0.85 | intron | OLFM1 | U |
| 5549 | chr15 | 31596905 | 31597283 | Neuron CNS | 0.36 | 0.9 | Intergenic | KLF13 | U |
| 5550 | chr2 | 241756926 | 241757324 | Neuron CNS | 0.33 | 0.87 | intron | KIF1A | U |
| 5551 | chr5 | 141263876 | 141263978 | Neuron CNS | 0.21 | 0.74 | Intergenic | PCDH1 | U |
| 5552 | chr7 | 71912358 | 71912501 | Neuron CNS | 0.22 | 0.75 | Intergenic | CALN1 | U |
| 5553 | chr4 | 951231 | 951461 | Neuron CNS | 0.33 | 0.86 | intron | TMEM175 | U |
| 5554 | chr9 | 140993938 | 140994227 | Neuron CNS | 0.38 | 0.91 | intron | CACNA1B | U |
| 5555 | chr10 | 125426324 | 125426383 | Neuron CNS | 0.25 | 0.76 | exon | GPR26 | U |
| 5556 | chr11 | 29077961 | 29078058 | Neuron CNS | 0.36 | 0.86 | intron | LOC646278 | U |
| 5557 | chr11 | 17786781 | 17786852 | Neuron CNS | 0.09 | 0.85 | intron | KCNC1 | U |
| 5558 | chr11 | 177610121 | 17761372 | Neuron CNS | 0.15 | 0.85 | intron | KCNC1 | U |
| 5559 | chr16 | 87728212 | 87728541 | Neuron CNS | 0.26 | 0.93 | intron | UPH3 | U |
| 5560 | chr7 | 127670469 | 127670634 | Neuron CNS | 0.08 | 0.93 | exon | LRRC4 | U |
| 5561 | chr7 | 5391292 | 5391419 | Neuron CNS | 0.21 | 0.94 | intron | TNRC18 | U |
| 5562 | chr7 | 1276701701 | 127670461 | Neuron CNS | 0.25 | 0.96 | exon | LRRCA | U |
| 5563 | chr2 | 241757494 | 241757743 | Neuron CNS | 0.12 | 0.82 | intron | KIF1A | U |
| 5564 | chr20 | 34997369 | 34997568 | Neuron CNS | 0.15 | 0.82 | intron | DLGAP4 | U |
| 5565 | chr22 | 26847942 | 26847959 | Neuron CNS | 0.27 | 0.89 | exon | HPS4 | U |
| 5566 | chr3 | 16371412 | 16371683 | Neuron CNS | 0.27 | 0.87 | intron | RFTN1 | U |
| 5567 | chr11 | 62474735 | 62475079 | Neuron CNS | 0.07 | 0.86 | promoter-TSS | GNG3 | U |
| 5568 | chr19 | 18313493 | 18313542 | Neuron CNS | 0.11 | 0.84 | exon | RAB3A | U |
| 5569 | chr14 | 69157866 | 69158048 | Neuron CNS | 0.17 | 0.89 | Intergenic | ZFP36L1 | U |
| 5570 | chr22 | 32021249 | 32021583 | Neuron CNS | 0.16 | 0.87 | intron | PISD | U |
| 5571 | chr22 | 32020002 | 32020487 | Neuron CNS | 0.16 | 0.86 | intron | PISD | U |
| 5572 | chr19 | 51046227 | 51046366 | Neuron CNS | 0.15 | 0.83 | intron | LRRC4B | U |
| 5573 | chr10 | 11343686 | 11343857 | Neuron CNS | 0.27 | 0.95 | intron | CELF2 | U |
| 5574 | chr11 | 1442511 | 1442732 | Neuron CNS | 0.21 | 0.88 | intron | BRSK2 | U |
| 5575 | chr20 | 4875680 | 4875959 | Neuron CNS | 0.17 | 0.84 | intron | SLC23A2 | U |
| 5576 | chr3 | 10541056 | 10541270 | Neuron CNS | 0.2 | 0.86 | intron | ATP282 | U |
| 5577 | chr22 | 50764436 | 50764729 | Neuron CNS | 0.16 | 0.82 | intron | DENND6B | U |
| 5578 | chr17 | 30821925 | 30822252 | Neuron CNS | 0.25 | 0.91 | exon, intron | MYO1D, MYO1D | U |
| 5579 | chr12 | 122839918 | 122840368 | Neuron CNS | 0.26 | 0.92 | intron | CLIP1 | U |
| 5580 | chr7 | 158045060 | 158045188 | Neuron CNS | 0.19 | 0.84 | intron | PTPRN2 | U |
| 5581 | chr8 | 417522643 | 41752432 | Neuron CNS | 0.18 | 0.83 | intron | ANK1 | U |
| 5582 | chr19 | 19391733 | 19391933 | Neuron CNS | 0.25 | 0.9 | intron | SUGP1 | U |
| 5583 | chr4 | 3531816 | 3531988 | Neuron CNS | 0.19 | 0.83 | intron | LRPAP1 | U |
| 5584 | chr12 | 1948026 | 1948146 | Neuron CNS | 0.23 | 0.86 | intron | CACNA2D4 | U |
| 5585 | chr16 | 89531912 | 89532036 | Neuron CNS | 0.24 | 0.87 | intron | ANKRD11 | U |
| 5586 | chr10 | 126694723 | 126694905 | Neuron CNS | 0.32 | 0.92 | intron | CTBP2 | U |
| 5587 | chr4 | 745666 | 745966 | Neuron CNS | 0.25 | 0.85 | intron | PCGF3 | U |
| 5588 | chr17 | 8380266 | 8380434 | Neuron CNS | 0.34 | 0.93 | intron, exon | MYH10, MYH10 | U |
| 5589 | chr10 | 1266945171 | 126694669 | Neuron CNS | 0.37 | 0.94 | intron | CTBP2 | U |
| 5590 | chr1 | 3695942 | 3696334 | Neuron CNS | 0.33 | 0.9 | TTS | LRRC47 | U |
| 5591 | chr3 | 133610529 | 133610997 | Neuron CNS | 0.35 | 0.91 | intron | RAB6B | U |
| 5592 | chr19 | 591318 | 591352 | Neuron CNS | 0.23 | 0.77 | intron | HCN2 | U |
| 5593 | chr9 | 35831106 | 35831443 | Neuron CNS | 0.28 | 0.82 | intron | TMEM8B | U |
| 5594 | chr16 | 255823 | 256318 | Neuron CNS | 0.36 | 0.9 | exon | LUC7L | U |
| 5595 | chr4 | 48130075 | 48130182 | Neuron CNS | 0.83 | 0.08 | intron | TXK | M |
| 5596 | chr3 | 49941216 | 49941255 | Neuron CNS | 0.87 | 0.14 | promoter-TSS | MST1R | M |
| 5597 | chr2 | 58274587 | 58274650 | Neuron CNS | 0.77 | 0.06 | intron | VRK2 | M |
| 5598 | chr17 | 78193304 | 78193679 | Neuron CNS | 0.77 | 0.06 | promoter-TSS | SLC26A11 | M |
| 5599 | chr16 | 26963425 | 26963518 | Neuron CNS | 0.79 | 0.1 | Intergenic | C16orf82 | M |
| 5600 | chr16 | 4250130 | 4250420 | Neuron CNS | 0.75 | 0.07 | intron | SRL | M |
| 5601 | chr19 | 10541834 | 10542021 | Neuron CNS | 0.77 | 0.1 | intron | PDE4A | M |
| 5602 | chr1 | 5720367 | 5720614 | Neuron CNS | 0.79 | 0.13 | Intergenic | MIR4417 | M |
| 5603 | chr20 | 61805264 | 61805657 | Neuron CNS | 0.78 | 0.12 | Intergenic | MIR124-3 | M |
| 5604 | chr8 | 112410169 | 112410632 | Neuron CNS | 0.86 | 0.22 | Intergenic | MIR2053 | M |
| 5605 | chr3 | 129047663 | 129047724 | Neuron CNS | 0.83 | 0.21 | Intergenic | H1FX | M |
| 5606 | chr4 | 3786115 | 3786290 | Neuron CNS | 0.81 | 0.19 | Intergenic | ADRA2C | M |
| 5607 | chr5 | 141132842 | 141133060 | Neuron CNS | 0.76 | 0.16 | Intergenic | ARAP3 | M |
| 5608 | chr10 | 16479398 | 16479508 | Neuron CNS | 0.75 | 0.17 | exon | PTER | M |
| 5609 | chr17 | 75911013 | 75911051 | Neuron CNS | 0.68 | 0.11 | Intergenic | FLI45079 | M |
| 5610 | chr7 | 1373114061 | 137311605 | Neuron CNS | 0.66 | 0.09 | intron | DGKI | M |
| 5611 | chr15 | 45722312 | 45722352 | Neuron CNS | 0.77 | 0.21 | promoter-TSS | C15orf48 | M |
| 5612 | chr13 | 304982441 | 30498499 | Neuron CNS | 0.62 | 0.07 | Intergenic | LINC00544 | M |
| 5613 | chr5 | 122180341 | 122180456 | Neuron CNS | 0.59 | 0.05 | promoter-TSS | SNX24 | M |
| 5614 | chr14 | 24457825 | 24458119 | Neuron CNS | 0.84 | 0.03 | promoter-TSS | DHRS4L2 | M |
| 5615 | chr15 | 89962708 | 89962940 | Neuron CNS | 0.8 | 0.06 | Intergenic | LOC254559 | M |
| 5616 | chr7 | 140103734 | 140104223 | Neuron CNS | 0.73 | 0.05 | promoter-TSS | RAB19 | M |
| 5617 | chr6 | 26088238 | 26088422 | Neuron CNS | 0.72 | 0.12 | intron | HFE | M |
| 5618 | chr22 | 35626962 | 35627117 | Neuron CNS | 0.81 | 0.28 | Intergenic | HMGX84 | M |
| 5619 | chr3 | 499412631 | 49941579 | Neuron CNS | 0.57 | 0.05 | promoter-TSS | MST1R | M |
| 5620 | chr10 | 102692483 | 102692493 | Oligodendrocytes | 0.08 | 0.96 | intron | FAM178A | U |
| 5621 | chr18 | 8639631 | 8639795 | Oligodendrocytes | 0.09 | 0.97 | TTS | RAB12 | U |
| 5622 | chr4 | 2877658 | 2877778 | Oligodendrocytes | 0.07 | 0.95 | exon | ADD1 | U |
| 5623 | chr17 | 4012880 | 4013162 | Oligodendrocytes | 0.07 | 0.95 | intron | ZZEF1 | U |
| 5624 | chr16 | 50830354 | 50830509 | Oligodendrocytes | 0.07 | 0.93 | exon | CYLD | U |
| 5625 | chr4 | 185707763 | 185707950 | Oligodendrocytes | 0.08 | 0.94 | intron | ACSL1 | U |
| 5626 | chr9 | 129167537 | 129167628 | Oligodendrocytes | 0.08 | 0.93 | intron | MVB12B | U |
| 5627 | chr13 | 41148403 | 41148627 | Oligodendrocytes | 0.05 | 0.89 | intron | FOXO1 | U |
| 5628 | chr16 | 72460443 | 2460715 | Oligodendrocytes | 0.1 | 0.94 | Intergenic | PMFBP1 | U |
| 5629 | chr18 | 53014425 | 53014712 | Oligodendrocytes | 0.05 | 0.89 | intron | TCF4 | U |
| 5630 | chr6 | 109153205 | 109153450 | Oligodendrocytes | 0.08 | 0.91 | Intergenic | ARMC2 | U |
| 5631 | chr12 | 125474255 | 125474586 | Oligodendrocytes | 0.11 | 0.93 | promoter-TSS | DHX37 | U |
| 5632 | chr18 | 77113101 | 77113386 | Oligodendrocytes | 0.12 | 0.94 | intron | ATP98 | U |
| 5633 | chr7 | 638594 | 639011 | Oligodendrocytes | 0.13 | 0.95 | intron | PRKAR1B | U |
| 5634 | chr15 | 45068518 | 45068593 | Oligodendrocytes | 0.11 | 0.92 | Intergenic | TRIM69 | U |
| 5635 | chr1 | 2006859 | 2007310 | Oligodendrocytes | 0.1 | 0.91 | intron | PRKCZ | U |
| 5636 | chr17 | 11973045 | 11973493 | Oligodendrocytes | 0.13 | 0.93 | intron | MAP2K4 | U |
| 5637 | chr1 | 243633926 | 243634391 | Oligodendrocytes | 0.12 | 0.92 | intron | SDCCAG8 | U |
| 5638 | chr18 | 74710903 | 74711313 | Oligodendrocytes | 0.14 | 0.93 | intron | MBP | U |
| 5639 | chr6 | 137027578 | 137027797 | Oligodendrocytes | 0.12 | 0.9 | intron | MAP3KS | U |
| 5640 | chr8 | 140889295 | 140889564 | Oligodendrocytes | 0.15 | 0.91 | intron | TRAPPC9 | U |
| 5641 | chr18 | 74713115 | 74713577 | Oligodendrocytes | 0.17 | 0.93 | intron | MBP | U |
| 5642 | chr8 | 26445968 | 26446351 | Oligodendrocytes | 0.17 | 0.91 | intron | DPYSL2 | U |
| 5643 | chr1 | 155842984 | 155843210 | Oligodendrocytes | 0.19 | 0.9 | intron | SYT11 | U |
| 5644 | chr15 | 43811799 | 43812296 | Oligodendrocytes | 0.18 | 0.89 | intron | MAP1A | U |
| 5645 | chr13 | 25743968 | 25744147 | Oligodendrocytes | 0.2 | 0.9 | exon | AMER2 | U |
| 5646 | chr8 | 26454586 | 26455026 | Oligodendrocytes | 0.26 | 0.93 | intron | DPYSL2 | U |
| 5647 | chr6 | 161677637 | 161677997 | Oligodendrocytes | 0.28 | 0.93 | intron | AGPAT4 | U |
| 5648 | chr4 | 153153323 | 153153793 | Oligodendrocytes | 0.22 | 0.86 | Intergenic | MIR3140 | U |
| 5649 | chr8 | 26438745 | 26439132 | Oligodendrocytes | 0.28 | 0.91 | intron | DPYSL2 | U |
| 5650 | chr5 | 173293925 | 173294107 | Oligodendrocytes | 0.06 | 0.95 | Intergenic | CPEB4 | U |
| 5651 | chr9 | 126391558 | 126391765 | Oligodendrocytes | 0.05 | 0.93 | intron | DENND1A | U |
| 5652 | chr3 | 93611888 | 93611944 | Oligodendrocytes | 0.08 | 0.95 | intron | PROS1 | U |
| 5653 | chr15 | 23066819 | 23066894 | Oligodendrocytes | 0.07 | 0.94 | intron | NIPA1 | U |
| 5654 | chr21 | 38223581 | 38223730 | Oligodendrocytes | 0.03 | 0.9 | intron | HLCS | U |
| 5655 | chr4 | 154011119 | 154011294 | Oligodendrocytes | 0.05 | 0.92 | Intergenic | TRIM2 | U |
| 5656 | chr3 | 1390903701 | 139090576 | Oligodendrocytes | 0.06 | 0.93 | intron | COPB2 | U |
| 5657 | chr | 731582 | 731790 | Oligodendrocytes | 0.05 | 0.92 | intron | KANK1 | U |
| 5658 | chr1 | 25580876 | 25581030 | Oligodendrocytes | 0.07 | 0.93 | Intergenic | C1orf63 | U |
| 5659 | chr7 | 660458613 | 66046015 | Oligodendrocytes | 0.08 | 0.94 | Intergenic | LOC493754 | U |
| 5660 | chr1 | 32793778 | 32794083 | Oligodendrocytes | 0.06 | 0.92 | intron | HDAC1 | U |
| 5661 | chr11 | 6421632 | 6422026 | Oligodendrocytes | 0.09 | 0.95 | TTS | APBB1 | U |
| 5662 | chr10 | 115069451 | 115069850 | Oligodendrocytes | 0.06 | 0.92 | Intergenic | HABP2 | U |
| 5663 | chr10 | 31070570 | 31070750 | Oligodendrocytes | 0.02 | 0.87 | Intergenic | LYZL2 | U |
| 5664 | chr9 | 117110058 | 117110260 | Oligodendrocytes | 0.05 | 0.9 | exon | AKNA | U |
| 5665 | chr3 | 85626381 | 85626587 | Oligodendrocytes | 0.06 | 0.91 | intron | CADM2 | U |
| 5666 | chr7 | 39500433 | 3950279 | Oligodendrocytes | 0.07 | 0.92 | intron | SDK1 | U |
| 5667 | chr18 | 44614183 | 44614525 | Oligodendrocytes | 0.05 | 0.9 | intron | KATNAL2 | U |
| 5668 | chr8 | 29039468 | 29039860 | Oligodendrocytes | 0.09 | 0.94 | intron | KIF138 | U |
| 5669 | chr2 | 111407869 | 111408368 | Oligodendrocytes | 0.1 | 0.95 | exon | BUB1 | U |
| 5670 | chr8 | 99034900 | 99035054 | Oligodendrocytes | 0.07 | 0.91 | intron | MATN2 | U |
| 5671 | chr5 | 112683322 | 112683509 | Oligodendrocytes | 0.07 | 0.91 | Intergenic | RFPL4B | U |
| 5672 | chr1 | 25981415 | 25981669 | Oligodendrocytes | 0.07 | 0.91 | intron | MANIC1 | U |
| 5673 | chr21 | 34050957 | 34051234 | Oligodendrocytes | 0.1 | 0.94 | intron | SYNJ1 | U |
| 5674 | chr19 | 12771697 | 12772078 | Oligodendrocytes | 0.1 | 0.94 | intron, exon | MAN2B1, MAN2B1 | U |
| 5675 | chr8 | 1408465493 | 140847025 | Oligodendrocytes | 0.08 | 0.92 | intron | TRAPPC9 | U |
| 5676 | chr11 | 34200124 | 34200210 | Oligodendrocytes | 0.1 | 0.93 | intron | ABTB2 | U |
| 5677 | chr7 | 47852597 | 47852706 | Oligodendrocytes | 0.09 | 0.92 | intron | PKD1L1 | U |
| 5678 | chr7 | 45722501 | 45722746 | Oligodendrocytes | 0.05 | 0.88 | intron | ADCY1 | U |
| 5679 | chr2 | 241279723 | 241279990 | Oligodendrocytes | 0.06 | 0.89 | Intergenic | GPC1 | U |
| 5680 | chr16 | 19884310 | 19884614 | Oligodendrocytes | 0.04 | 0.87 | intron | GPRC5B | U |
| 5681 | chr5 | 156882998 | 156883325 | Oligodendrocytes | 0.08 | 0.91 | Intergenic | NIPAL4 | U |
| 5682 | chr13 | 25766851 | 25767213 | Oligodendrocytes | 0.04 | 0.87 | Intergenic | AMER2 | U |
| 5683 | chr6 | 110996079 | 110996470 | Oligodendrocytes | 0.12 | 0.95 | intron | CDK19 | U |
| 5684 | chr18 | 74703472 | 74703970 | Oligodendrocytes | 0.1 | 0.93 | intron | MBP | U |
| 5685 | chr4 | 124219474 | 124219592 | Oligodendrocytes | 0.12 | 0.94 | intron | SPATA5 | U |
| 5686 | chr10 | 71002953 | 71003078 | Oligodendrocytes | 0.04 | 0.86 | exon | HKDC1 | U |
| 5687 | chr7 | 61652 | 61846 | Oligodendrocytes | 0.06 | 0.88 | Intergenic | FAM20C | U |
| 5688 | chr12 | 111930410 | 111930725 | Oligodendrocytes | 0.12 | 0.94 | intron | ATXN2 | U |
| 5689 | chr3 | 54952905 | 54953270 | Oligodendrocytes | 0.08 | 0.9 | exon | LRTM1 | U |
| 5690 | chr18 | 72201352 | 72201786 | Oligodendrocytes | 0.08 | 0.9 | promoter-TSS | CNDP1 | U |
| 5691 | chr18 | 5969627 | 5969695 | Oligodendrocytes | 0.11 | 0.92 | exon, intron | L3MBTL4, L3MBTL4 | U |
| 5692 | chr10 | 1145347101 | 114535051 | Oligodendrocytes | 0.11 | 0.92 | intron | VTI1A | U |
| 5693 | chr18 | 74721088 | 74721495 | Oligodendrocytes | 0.07 | 0.88 | intron | MBP | U |
| 5694 | chr13 | 67730620 | 67731037 | Oligodendrocytes | 0.07 | 0.88 | intron | PCDH9 | U |
| 5695 | chr14 | 103504564 | 103504989 | Oligodendrocytes | 0.14 | 0.95 | intron | CDC42BPB | U |
| 5696 | chr1 | 51417651 | 51418121 | Oligodendrocytes | 0.15 | 0.96 | intron | FAF1 | U |
| 5697 | chr8 | 41474391 | 41474862 | Oligodendrocytes | 0.12 | 0.93 | intron | AGPAT6 | U |
| 5698 | chr18 | 13635908 | 13636384 | Oligodendrocytes | 0.08 | 0.89 | intron | LDLRAD4 | U |
| 5699 | chr19 | 47179636 | 47179986 | Oligodendrocytes | 0.09 | 0.89 | intron | PRKD2 | U |
| 5700 | chr5 | 38678704 | 38679161 | Oligodendrocytes | 0.11 | 0.91 | Intergenic | LIFR | U |
| 5701 | chr2 | 71773925 | 71774038 | Oligodendrocytes | 0.13 | 0.92 | intron | DYSF | U |
| 5702 | chr6 | 151054734 | 151054902 | Oligodendrocytes | 0.15 | 0.94 | exon | PLEKHG1 | U |
| 5703 | chr13 | 27566274 | 27566503 | Oligodendrocytes | 0.12 | 0.91 | Intergenic | USP12 | U |
| 5704 | chr20 | 403897 | 404129 | Oligodendrocytes | 0.14 | 0.93 | intron | RBCK1 | U |
| 5705 | chr6 | 144335615 | 144335871 | Oligodendrocytes | 0.09 | 0.88 | intron | PLAGLI | U |
| 5706 | chr17 | 31192037 | 31192355 | Oligodendrocytes | 0.17 | 0.96 | intron | MYO1D | U |
| 5707 | chr18 | 74710513 | 74710710 | Oligodendrocytes | 0.11 | 0.89 | intron | MBP | U |
| 5708 | chr8 | 140804332 | 140804788 | Oligodendrocytes | 0.15 | 0.93 | intron | TRAPPC9 | U |
| 5709 | chr13 | 113404881 | 113405378 | Oligodendrocytes | 0.12 | 0.9 | intron | ATP11A | U |
| 5710 | chr3 | 183517689 | 183517916 | Oligodendrocytes | 0.17 | 0.94 | intron | YEATS2 | U |
| 5711 | chr1 | 36658407 | 36658705 | Oligodendrocytes | 0.15 | 0.92 | Intergenic | THRAP3 | U |
| 5712 | chr21 | 45644734 | 45645108 | Oligodendrocytes | 0.14 | 0.91 | Intergenic | ICOSLG | U |
| 5713 | chr19 | 55799672 | 55799913 | Oligodendrocytes | 0.12 | 0.88 | intron | BRSK1 | U |
| 5714 | chr2 | 55186307 | 55186637 | Oligodendrocytes | 0.18 | 0.94 | intron | EML6 | U |
| 5715 | chr16 | 75332090 | 75332557 | Oligodendrocytes | 0.11 | 0.87 | intron | CFDP1 | U |
| 5716 | chr1 | 54584079 | 54584345 | Oligodendrocytes | 0.13 | 0.85 | Intergenic | CDCP2 | U |
| 5717 | chr20 | 52711064 | 52711192 | Oligodendrocytes | 0.18 | 0.92 | Intergenic | BCAS1 | U |
| 5718 | chr18 | 10442102 | 10442261 | Oligodendrocytes | 0.2 | 0.94 | Intergenic | APCDD1 | U |
| 5719 | chr12 | 121282907 | 121283256 | Oligodendrocytes | 0.21 | 0.94 | intron | SPPL3 | U |
| 5720 | chr18 | 77137458 | 77137866 | Oligodendrocytes | 0.17 | 0.9 | exon | ATP9B | U |
| 5721 | chr21 | 45650440 | 45650910 | Oligodendrocytes | 0.18 | 0.9 | intron | ICOSLG | U |
| 5722 | chr16 | 74782126 | 74782286 | Oligodendrocytes | 0.05 | 0.88 | intron | FA2H | U |
| 5723 | chr4 | 55127142 | 55127488 | Oligodendrocytes | 0.06 | 0.88 | intron | PDGFRA | U |
| 5724 | chr3 | 194109864 | 194110213 | Oligodendrocytes | 0.13 | 0.91 | Intergenic | GP5 | U |
| 5725 | chr20 | 37138022 | 37138098 | Oligodendrocytes | 0.05 | 0.96 | intron | RALGAPB | U |
| 5726 | chr12 | 123332891 | 12333035 | Oligodendrocytes | 0.03 | 0.91 | intron | HIP1R | U |
| 5727 | chr9 | 115509635 | 115509918 | Oligodendrocytes | 0.05 | 0.93 | Intergenic | SNX30 | U |
| 5728 | chr6 | 17839739 | 17840026 | Oligodendrocytes | 0.06 | 0.93 | intron | KIF13A | U |
| 5729 | chr14 | 52657938 | 52658001 | Oligodendrocytes | 0.05 | 0.92 | Intergenic | PTGDR | U |
| 5730 | chr18 | 74721776 | 74721930 | Oligodendrocytes | 0.08 | 0.94 | intron | MBP | U |
| 5731 | chr3 | 42190918 | 42191192 | Oligodendrocytes | 0.03 | 0.88 | exon | TRAK1 | U |
| 5732 | chr12 | 120951809 | 120952170 | Oligodendrocytes | 0.05 | 0.9 | intron | COQ5 | U |
| 5733 | chr14 | 34257319 | 34257708 | Oligodendrocytes | 0.07 | 0.91 | intron | NPAS3 | U |
| 5734 | chr11 | 604874 | 605237 | Oligodendrocytes | 0.12 | 0.94 | exon, intron | PHRF1 | U |
| 5735 | chr17 | 30821748 | 30821863 | Oligodendrocytes | 0.09 | 0.89 | exon | MYO1D | U |
| 5736 | chr8 | 77316589 | 77316860 | Oligodendrocytes | 0.07 | 0.87 | Intergenic | ZFHX4 | U |
| 5737 | chr8 | 25542884 | 25542961 | Oligodendrocytes | 0.11 | 0.9 | Intergenic | CDCA2 | U |
| 5738 | chr19 | 36267294 | 36267628 | Oligodendrocytes | 0.11 | 0.9 | intron | ARHGAP33 | U |
| 5739 | chr2 | 160087061 | 160087497 | Oligodendrocytes | 0.15 | 0.94 | exon | TANC1 | U |
| 5740 | chr10 | 131694675 | 131694772 | Oligodendrocytes | 0.13 | 0.89 | intron | EBF3 | U |
| 5741 | chr7 | 158044788 | 158045029 | Oligodendrocytes | 0.09 | 0.85 | intron | PTPRN2 | U |
| 5742 | chr8 | 25543136 | 25543236 | Oligodendrocytes | 0.13 | 0.88 | Intergenic | COCA2 | U |
| 5743 | chr22 | 31091742 | 31092169 | Oligodendrocytes | 0.21 | 0.91 | intron | OSBP2 | U |
| 5744 | chr9 | 73231641 | 73231771 | Oligodendrocytes | 0.22 | 0.91 | intron | TRPM3 | U |
| 5745 | chr19 | 58447249 | 58447435 | Oligodendrocytes | 0.04 | 0.94 | promoter-TSS | ZNF418 | U |
| 5746 | chr17 | 76455195 | 76455319 | Oligodendrocytes | 0.03 | 0.92 | exon | DNAH17 | U |
| 5747 | chr7 | 27591588 | 27591670 | Oligodendrocytes | 0.05 | 0.93 | intron | HIBADH | U |
| 5748 | chr9 | 92051265 | 92051357 | Oligodendrocytes | 0.07 | 0.95 | intron | SEMA4D | U |
| 5749 | chr16 | 75129190 | 75129361 | Oligodendrocytes | 0.05 | 0.93 | intron | ZNRF1 | U |
| 5750 | chr18 | 74728663 | 74729022 | Oligodendrocytes | 0.04 | 0.92 | exon | MBP | U |
| 5751 | chr12 | 12397259 | 12397688 | Oligodendrocytes | 0.06 | 0.94 | intron | LRP6 | U |
| 5752 | chr9 | 134836851 | 134837236 | Oligodendrocytes | 0.08 | 0.95 | intron | MED27 | U |
| 5753 | chr18 | 74721791 | 74721931 | Oligodendrocytes | 0.08 | 0.94 | intron | MBP | U |
| 5754 | chr7 | 129565080 | 129565368 | Oligodendrocytes | 0.04 | 0.9 | intron | UBE2H | U |
| 5755 | chr6 | 3441986 | 3442479 | Oligodendrocytes | 0.08 | 0.94 | intron | SLC22A23 | U |
| 5756 | chr20 | 34807783 | 34808023 | Oligodendrocytes | 0.07 | 0.92 | intron | EPB41L1 | U |
| 5757 | chr16 | 69833813 | 69834127 | Oligodendrocytes | 0.07 | 0.92 | intron | WWP2 | U |
| 5758 | chr5 | 20096860 | 20097330 | Oligodendrocytes | 0.06 | 0.91 | Intergenic | MBOAT1 | U |
| 5759 | chr2 | 101181112 | 101181337 | Oligodendrocytes | 0.09 | 0.93 | intron | PDCL3 | U |
| 5760 | chr11 | 63818827 | 63819149 | Oligodendrocytes | 0.1 | 0.94 | intron | MACROD1 | U |
| 5761 | chr9 | 100769817 | 100769975 | Oligodendrocytes | 0.08 | 0.9 | intron | ANP328 | U |
| 5762 | chr12 | 110487715 | 110487908 | Oligodendrocytes | 0.1 | 0.92 | intron | C12orf76 | U |
| 5763 | chr22 | 38479240 | 38479487 | Oligodendrocytes | 0.09 | 0.91 | promoter-TSS | SLC16A8 | U |
| 5764 | chr19 | 7917329 | 7917550 | Oligodendrocytes | 0.08 | 0.89 | intron | EVI5L | U |
| 5765 | chr20 | 47354006 | 47354417 | Oligodendrocytes | 0.09 | 0.89 | intron | PREX1 | U |
| 5766 | chr20 | 36502306 | 36502753 | Oligodendrocytes | 0.16 | 0.93 | Intergenic | VSTM2L | U |
| 5767 | chr20 | 37008012 | 37008338 | Oligodendrocytes | 0.12 | 0.88 | Intergenic | LBP | U |
| 5768 | chr19 | 7916744 | 7917217 | Oligodendrocytes | 0.12 | 0.88 | intron | EVI5L | U |
| 5769 | chr6 | 15212742 | 15213225 | Oligodendrocytes | 0.2 | 0.93 | Intergenic | JARID2 | U |
| 5770 | chr2 | 3498878 | 3499194 | Oligodendrocytes | 0.19 | 0.91 | Intergenic | ADI1 | U |
| 5771 | chr10 | 134549977 | 134550161 | Oligodendrocytes | 0.23 | 0.92 | intron | INPP5A | U |
| 5772 | chr8 | 1765444 | 1765558 | Oligodendrocytes | 0.87 | 0.12 | TTS | MIR596 | M |
| 5773 | chr8 | 1765080 | 1765430 | Oligodendrocytes | 0.81 | 0.06 | promoter-TSS | MIR596 | M |
| 5774 | chr11 | 126455766 | 126456053 | Oligodendrocytes | 0.75 | 0.03 | intron | KIRREL3 | M |
| 5775 | chr1 | 37945273 | 37945559 | Oligodendrocytes | 0.76 | 0.05 | intron | ZC3H12A | M |
| 5776 | chr4 | 41219007 | 41219224 | Oligodendrocytes | 0.77 | 0.09 | Intergenic | APBB2 | M |
| 5777 | chrX | 25040201 | 25040398 | Oligodendrocytes | 0.88 | 0.23 | Intergenic | ARX | M |
| 5778 | chr3 | 50638378 | 50638841 | Oligodendrocytes | 0.67 | 0.02 | Intergenic | CISH | M |
| 5779 | chr6 | 43423853 | 43424084 | Oligodendrocytes | 0.76 | 0.15 | promoter-TSS | DLK2 | M |
| 5780 | chr9 | 135039351 | 135039635 | Oligodendrocytes | 0.65 | 0.06 | intron | NTNG2 | M |
| 5781 | chr10 | 88471584 | 88472060 | Oligodendrocytes | 0.59 | 0.01 | intron | LDB3 | M |
| 5782 | chr6 | 35997057 | 35997540 | Oligodendrocytes | 0.57 | 0.03 | intron | MAPK14 | M |
| 5783 | chr11 | 31831226 | 31831349 | Oligodendrocytes | 0.91 | 0.17 | intron | PAX6 | M |
| 5784 | chr11 | 31829278 | 31829432 | Oligodendrocytes | 0.93 | 0.14 | intron | PAX6 | M |
| 5785 | chr8 | 65291068 | 65291430 | Oligodendrocytes | 0.88 | 0.1 | promoter-TSS | MIR124-2 | M |
| 5786 | chr11 | 31825751 | 31825834 | Oligodendrocytes | 0.88 | 0.16 | intron | PAX6 | M |
| 5787 | chr4 | 8868932 | 8869286 | Oligodendrocytes | 0.8 | 0.08 | TTS, exon | HMX1, HMX1 | M |
| 5788 | chr11 | 31824170 | 31824375 | Oligodendrocytes | 0.83 | 0.13 | intron | PAX6 | M |
| 5789 | chr11 | 31826068 | 31826108 | Oligodendrocytes | 0.87 | 0.18 | intron | PAX6 | M |
| 5790 | chr8 | 65292442 | 65292662 | Oligodendrocytes | 0.74 | 0.06 | TTS | MIR124-2 | M |
| 5791 | chr8 | 55292680 | 65292939 | Oligodendrocytes | 0.81 | 0.13 | TTS, Intergenic | MIR124-2, MIR124-2 | M |
| 5792 | chr20 | 21498239 | 21498692 | Oligodendrocytes | 0.77 | 0.11 | Intergenic | NKX2-2 | M |
| 5793 | chr20 | 21497889 | 21498176 | Oligodendrocytes | 0.72 | 0.07 | Intergenic | NKX2-2 | M |
| 5794 | chr11 | 31824580 | 31825034 | Oligodendrocytes | 0.76 | 0.11 | intron | PAX6 | M |
| 5795 | chr4 | 8870018 | 3870241 | Oligodendrocytes | 0.73 | 0.1 | intron | HMX1 | M |
| 5796 | chr20 | 21500838 | 21501256 | Oligodendrocytes | 0.56 | 0.1 | Intergenic | NKX2-2 | M |
| 5797 | chr18 | 52721860 | 52722004 | Neurons + Oligodendrocytes | 0.08 | 0.89 | Intergenic | CCDC68 | U |
| 5798 | chr | 70367594 | 70367840 | Neurons + Oligodendrocytes | 0.08 | 0.88 | exon | NLGN3 | U |
| 5799 | chr7 | 158159035 | 158159135 | Neurons + Oligodendrocytes | 0.11 | 0.88 | intron | PTPRN2 | U |
| 5800 | chr8 | 9260354 | 9260504 | Neurons + Oligodendrocytes | 0.06 | 0.83 | Intergenic | LOC157273 | U |
| 5801 | chr | 2006365 | 2006616 | Neurons + Oligodendrocytes | 0.06 | 0.83 | intron | PRKCZ | U |
| 5802 | chr4 | 184829257 | 184829322 | Neurons + Oligodendrocytes | 0.11 | 0.87 | intron | STOX2 | U |
| 5803 | chr17 | 27909733 | 27910182 | Neurons + Oligodendrocytes | 0.13 | 0.89 | intron, exon | GIT1, GIT1 | U |
| 5804 | chr19 | 51052053 | 51052114 | Neurons + Oligodendrocytes | 0.06 | 0.81 | exon | LRRC4B | U |
| 5805 | chr9 | 27603240 | 27603332 | Neurons + Oligodendrocytes | 0.18 | 0.93 | intron | CCDC25 | U |
| 5806 | chr9 | 124846277 | 124846678 | Neurons + Oligodendrocytes | 0.12 | 0.87 | intron | TTLL11 | U |
| 5807 | chr12 | 20025836 | 20025925 | Neurons + Oligodendrocytes | 0.19 | 0.93 | Intergenic | LOC100506393 | U |
| 5808 | chr13 | 113698606 | 113698822 | Neurons + Oligodendrocytes | 0.07 | 0.81 | intron | MCF2L | U |
| 5809 | chr19 | 4357207 | 4357406 | Neurons + Oligodendrocytes | 0.17 | 0.9 | exon | MPND | U |
| 5810 | chr1 | 160062107 | 160062378 | Neurons + Oligodendrocytes | 0.2 | 0.93 | intron | IGSF8 | U |
| 5811 | chr10 | 77211693 | 77212130 | Neurons + Oligodendrocytes | 0.11 | 0.84 | Intergenic | ZNF503-AS2 | U |
| 5812 | chr2 | 74612706 | 74613160 | Neurons + Oligodendrocytes | 0.12 | 0.85 | promoter-TSS | DCTN1-AS1 | U |
| 5813 | chr15 | 22996654 | 22996878 | Neurons + Oligodendrocytes | 0.19 | 0.91 | intron | CYFIP1 | U |
| 5814 | chr8 | 26446533 | 26446811 | Neurons + Oligodendrocytes | 0.15 | 0.87 | intron | DPYSL2 | U |
| 5815 | chr12 | 49578469 | 49578945 | Neurons + Oligodendrocytes | 0.08 | 0.8 | exon | TUBA1A | U |
| 5816 | chr5 | 179711246 | 179711444 | Neurons + Oligodendrocytes | 0.16 | 0.87 | intron | MAPK9 | U |
| 5817 | chr11 | 63831218 | 63831535 | Neurons + Oligodendrocytes | 0.2 | 0.91 | intron | MACROD1 | U |
| 5818 | chr19 | 2633340 | 2633399 | Neurons + Oligodendrocytes | 0.15 | 0.85 | intron | GNG7 | U |
| 5819 | chr11 | 63451515 | 63451644 | Neurons + Oligodendrocytes | 0.2 | 0.9 | intron | RTN3 | U |
| 5820 | chr4 | 29793183 | 2979501 | Neurons + Oligodendrocytes | 0.15 | 0.85 | intron | GRK4 | U |
| 5821 | chrX | 70368045 | 70368367 | Neurons + Oligodendrocytes | 0.1 | 0.8 | intron | NLGN3 | U |
| 5822 | chr22 | 45605441 | 45605504 | Neurons + Oligodendrocytes | 0.15 | 0.84 | intron | KIAA0930 | U |
| 5823 | chr18 | 55532983 | 56533120 | Neurons + Oligodendrocytes | 0.14 | 0.83 | intron | ZNF532 | U |
| 5824 | chr11 | 45923416 | 45923589 | Neurons + Oligodendrocytes | 0.16 | 0.85 | intron | MAPK8IP1 | U |
| 5825 | chr2 | 74232167 | 74232425 | Neurons + Oligodendrocytes | 0.18 | 0.87 | Intergenic | TET3 | U |
| 5826 | chr16 | 1762773 | 1763090 | Neurons + Oligodendrocytes | 0.12 | 0.81 | intron | MAPK8IP3 | U |
| 5827 | chr11 | 20782466 | 20782532 | Neurons + Oligodendrocytes | 0.21 | 0.89 | intron | NELL1 | U |
| 5828 | chr13 | 25744404 | 25744495 | Neurons + Oligodendrocyte: | 0.08 | 0.76 | exon | AMER2 | U |
| 5829 | chr14 | 97129256 | 97129453 | Neurons + Oligodendrocytes | 0.2 | 0.88 | Intergenic | VRK1 | U |
| 5830 | chr16 | 73363089 | 73363306 | Neurons + Oligodendrocytes | 0.14 | 0.82 | Intergenic | LOC100506172 | U |
| 5831 | chr4 | 176732188 | 176732527 | Neurons + Oligodendrocytes | 0.19 | 0.87 | intron | GPM6A | U |
| 5832 | chr5 | 87951971 | 87952356 | Neurons + Oligodendrocytes | 0.1 | 0.78 | intron | LINC00461 | U |
| 5833 | chr17 | 64949606 | 64949705 | Neurons + Oligodendrocytes | 0.21 | 0.88 | Intergenic | CACNG4 | U |
| 5834 | chr18 | 34887267 | 34887534 | Neurons + Oligodendrocytes | 0.2 | 0.87 | intron | CELF4 | U |
| 5835 | chr11 | 6435640 | 6435942 | Neurons + Oligodendrocytes | 0.2 | 0.87 | intron | APBB1 | U |
| 5836 | chr4 | 176728591 | 176728931 | Neurons + Oligodendrocytes | 0.15 | 0.82 | intron | GPM6A | U |
| 5837 | chr11 | 19887608 | 19888049 | Neurons + Oligodendrocytes | 0.18 | 0.85 | intron | NAV2 | U |
| 5838 | chr7 | 138603863 | 138604108 | Neurons + Oligodendrocytes | 0.26 | 0.92 | exon | KIAA1549 | U |
| 5839 | chr6 | 157493920 | 157494198 | Neurons + Oligodendrocytes | 0.24 | 0.9 | intron | ARID1B | U |
| 5840 | chr19 | 26334521 | 2633481 | Neurons + Oligodendrocytes | 0.22 | 0.87 | intron | GNG7 | U |
| 5841 | chr4 | 58050932 | 58051071 | Neurons + Oligodendrocytes | 0.24 | 0.89 | intron | LOC255130 | U |
| 5842 | chr10 | 68686999 | 68687216 | Neurons + Oligodendrocytes | 0.16 | 0.81 | exon | LRRTM3 | U |
| 5843 | chr6 | 161687426 | 161687894 | Neurons + Oligodendrocytes | 0.27 | 0.92 | intron | AGPAT4 | U |
| 5844 | chr19 | 11090675 | 11090775 | Neurons + Oligodendrocytes | 0.23 | 0.83 | intron | SMARCA4 | U |
| 5845 | chr5 | 61028699 | 61028855 | Neurons + Oligodendrocytes | 0.19 | 0.82 | Intergenic | C5orf64 | U |
| 5846 | chr2 | 120473894 | 120474110 | Neurons + Oligodendrocytes | 0.21 | 0.84 | Intergenic | TMEM177 | U |
| 5847 | chr1 | 116929944 | 116930168 | Neurons + Oligodendrocytes | 0.26 | 0.89 | exon | ATP1A1 | U |
| 5848 | chr16 | 19276956 | 19277219 | Neurons + Oligodendrocytes | 0.21 | 0.84 | intron | SYT17 | U |
| 5849 | chr2 | 32702591 | 3270658 | Neurons + Oligodendrocytes | 0.24 | 0.87 | intron | TSSC1 | U |
| 5850 | chr19 | 33028433 | 33028585 | Neurons + Oligodendrocytes | 0.24 | 0.86 | Intergenic | PDCD5 | U |
| 5851 | chr2 | 241736359 | 241736733 | Neurons + Oligodendrocytes | 0.24 | 0.86 | intron | KIF1A | U |
| 5852 | chr8 | 63602731 | 63602856 | Neurons + Oligodendrocytes | 0.2 | 0.81 | intron | NKAIN3 | U |
| 5853 | chr15 | 292846501 | 29284812 | Neurons + Oligodendrocytes | 0.18 | 0.79 | intron | APBA2 | U |
| 5854 | chr16 | 11773368 | 11773555 | Neurons + Oligodendrocytes | 0.3 | 0.91 | TTS | SNN | U |
| 5855 | chr19 | 47999880 | 48000219 | Neurons + Oligodendrocytes | 0.25 | 0.86 | intron | NAPA | U |
| 5856 | chr1 | 26229961 | 26230278 | Neurons + Oligodendrocytes | 0.28 | 0.88 | intron, exon | STMN1, STMN1 | U |
| 5857 | chr4 | 185706178 | 185706627 | Neurons + Oligodendrocytes | 0.3 | 0.9 | intron | ACSL1 | U |
| 5858 | chr1 | 11543075 | 11543165 | Neurons + Oligodendrocytes | 0.22 | 0.81 | intron | PTCHD2 | U |
| 5859 | chr14 | 1050116503 | 105011772 | Neurons + Oligodendrocytes | 0.23 | 0.82 | Intergenic | C14orf180 | U |
| 5860 | chr8 | 30889770 | 30889896 | Neurons + Oligodendrocytes | 0.22 | 0.81 | promoter-TSS | WRN | U |
| 5861 | chr19 | 510516421 | 51051708 | Neurons + Oligodendrocytes | 0.23 | 0.81 | intron | LRRC4B | U |
| 5862 | chr11 | 1591878 | 1592102 | Neurons + Oligodendrocytes | 0.2 | 0.78 | intron | DUSP8 | U |
| 5863 | chr14 | 105783388 | 105783537 | Neurons + Oligodendrocytes | 0.31 | 0.88 | intron | PACS2 | U |
| 5864 | chr15 | 97118141 | 97118417 | Neurons + Oligodendrocytes | 0.29 | 0.85 | Intergenic | SPATA8 | U |
| 5865 | chr3 | 92734601 | 9273804 | Neurons + Oligodendrocytes | 0.32 | 0.88 | intron | SRGAP3 | U |
| 5866 | chr4 | 5860051 | 5860231 | Neurons + Oligodendrocytes | 0.28 | 0.83 | intron | CRMP1 | U |
| 5867 | chr3 | 119450493 | 119450905 | Neurons + Oligodendrocytes | 0.34 | 0.88 | intron | MAATS1 | U |
| 5868 | chr | 101517703 | 10151976 | Neurons + Oligodendrocytes | 0.22 | 0.75 | intron | CLCN4 | U |
| 5869 | chr8 | 48102533 | 48102819 | Neurons + Oligodendrocytes | 0.32 | 0.82 | exon | LOC100287846 | U |
| 5870 | chr5 | 141263876 | 141263978 | Neurons + Oligodendrocytes | 0.28 | 0.75 | Intergenic | PCDH1 | U |
| 5871 | chr10 | 3283867 | 3283912 | Neurons + Oligodendrocytes | 0.04 | 0.86 | Intergenic | PITRM1 | U |
| 5872 | chr13 | 101302863 | 101303067 | Neurons + Oligodendrocytes | 0.08 | 0.9 | intron | TMTC4 | U |
| 5873 | chr1 | 2005852 | 2006068 | Neurons + Oligodendrocytes | 0.04 | 0.86 | intron | PRKCZ | U |
| 5874 | chr9 | 96846792 | 96847041 | Neurons + Oligodendrocytes | 0.08 | 0.86 | exon | PTPDC1 | U |
| 5875 | chr13 | 113698901 | 113699209 | Neurons + Oligodendrocytes | 0.07 | 0.85 | intron | MCF2L | U |
| 5876 | chr18 | 530746281 | 53075071 | Neurons + Oligodendrocytes | 0.12 | 0.9 | intron | TCF4 | U |
| 5877 | chr20 | 24959344 | 24959581 | Neurons + Oligodendrocytes | 0.16 | 0.92 | exon | APMAP | U |
| 5878 | chr1 | 14113094 | 14113343 | Neurons + Oligodendrocytes | 0.18 | 0.94 | exon | PRDM2 | U |
| 5879 | chr16 | 88677591 | 88677848 | Neurons + Oligodendrocytes | 0.12 | 0.88 | exon, intron | ZC3H18, ZC3H18 | U |
| 5880 | chr8 | 139613769 | 139613819 | Neurons + Oligodendrocytes | 0.12 | 0.86 | intron | COL22A1 | U |
| 5881 | chr5 | 11564974 | 11565144 | Neurons + Oligodendrocytes | 0.14 | 0.88 | exon | CTNND2 | U |
| 5882 | chr10 | 131694516 | 131694773 | Neurons + Oligodendrocytes | 0.11 | 0.85 | intron | EBF3 | U |
| 5883 | chr15 | 82042494 | 82042715 | Neurons + Oligodendrocytes | 0.15 | 0.88 | Intergenic | MEX3B | U |
| 5884 | chr16 | 50897241 | 50897299 | Neurons + Oligodendrocytes | 0.24 | 0.94 | Intergenic | CYLD | U |
| 5885 | chr3 | 51731038 | 51731232 | Neurons + Oligodendrocytes | 0.22 | 0.91 | intron | TEX264 | U |
| 5886 | chr22 | 32020786 | 32021184 | Neurons + Oligodendrocytes | 0.2 | 0.88 | intron | PISD | U |
| 5887 | chr10 | 3283414 | 3283766 | Neurons + Oligodendrocytes | 0.24 | 0.91 | Intergenic | PITRM1 | U |
| 5888 | chr7 | 2815153 | 2815546 | Neurons + Oligodendrocytes | 0.24 | 0.91 | intron | GNA12 | U |
| 5889 | chr8 | 10001036 | 10001524 | Neurons + Oligodendrocytes | 0.22 | 0.89 | intron | MSRA | U |
| 5890 | chr12 | 50296224 | 50296444 | Neurons + Oligodendrocytes | 0.3 | 0.94 | intron | FAIM2 | U |
| 5891 | chr10 | 15000265 | 15000756 | Neurons + Oligodendrocytes | 0.26 | 0.9 | Intergenic, promote [symbol] ; | MEIG1, MEIG1 | U |
| 5892 | chr11 | 1420702 | 1420823 | Neurons + Oligodendrocytes | 0.15 | 0.78 | intron | BRSK2 | U |
| 5893 | chr19 | 51046227 | 51046366 | Neurons + Oligodendrocytes | 0.21 | 0.84 | intron | LRRC4B | U |
| 5894 | chr14 | 51559477 | 51559756 | Neurons + Oligodendrocytes | 0.23 | 0.86 | intron | TRIM9 | U |
| 5895 | chr14 | 69157866 | 69158048 | Neurons + Oligodendrocytes | 0.28 | 0.9 | Intergenic | ZFP36L1 | U |
| 5896 | chr16 | 88677852 | 88677939 | Neurons + Oligodendrocytes | 0.18 | 0.79 | exon | ZC3H18 | U |
| 897 | chr2 | 240320293 | 240320511 | Neurons + Oligodendrocytes | 0.26 | 0.84 | intron | HDAC4 | U |
| 5898 | chr22 | 27680331 | 27680730 | Neurons + Oligodendrocytes | 0.32 | 0.9 | Intergenic | MN1 | U |
| 5899 | chr1 | 48035596 | 48035785 | Neurons + Oligodendrocytes | 0.88 | 0.12 | Intergenic | FOXD2 | M |
| 5900 | chr12 | 124247229 | 124247359 | Neurons + Oligodendrocytes | 0.82 | 0.1 | TTS | ATP6V0A2 | M |
| 5901 | chr18 | 76529112 | 76529190 | Neurons + Oligodendrocytes | 0.86 | 0.15 | Intergenic | SALL3 | M |
| 5902 | chr19 | 46017956 | 46018119 | Neurons + Oligodendrocytes | 0.83 | 0.14 | intron | VASP | M |
| 5903 | chr14 | 94425764 | 94425928 | Neurons + Oligodendrocytes | 0.82 | 0.14 | intron | ASB2 | M |
| 5904 | chr1 | 37176500 | 37176889 | Neurons + Oligodendrocytes | 0.78 | 0.13 | Intergenic | CSF3R | M |
| 5905 | chr17 | 47563495 | 47563672 | Neurons + Oligodendrocytes | 0.86 | 0.24 | Intergenic | NGFR | M |
| 5906 | chr17 | 72353695 | 72353736 | Neurons + Oligodendrocytes | 0.78 | 0.19 | exon | BTBD17 | M |
| 5907 | chr19 | 13828284 | 13828420 | Neurons + Oligodendrocytes | 0.78 | 0.2 | Intergenic | CCDC130 | M |
| 5908 | chr4 | 3730359 | 3730506 | Neurons + Oligodendrocytes | 0.76 | 0.18 | Intergenic | ADRA2C | M |
| 5909 | chr3 | 53107216 | 53107541 | Neurons + Oligodendrocytes | 0.63 | 0.07 | Intergenic | SFMBT1 | M |
| 5910 | chr19 | 5430397 | 5430550 | Neurons + Oligodendrocytes | 0.75 | 0.2 | Intergenic | ZNRF4 | M |
| 5911 | chr19 | 46142858 | 46143018 | Neurons + Oligodendrocytes | 0.68 | 0.13 | promoter-TSS | EML2 | M |
| 5912 | chr8 | 41180988 | 41181399 | Neurons + Oligodendrocytes | 0.8 | 0.13 | Intergenic | SFRP1 | M |
| 5913 | chr14 | 70038634 | 70039091 | Neurons + Oligodendrocytes | 0.88 | 0.02 | exon | CCDC177 | M |
| 5914 | chr14 | 70039093 | 70039265 | Neurons + Oligodendrocytes | 0.86 | 0.04 | exon | CCDC177 | M |
| 5915 | chr12 | 49659174 | 49659537 | Neurons + Oligodendrocytes | 0.8 | 0.05 | intron | TUBA1C | M |
| 5916 | chr22 | 39437295 | 39437591 | Neurons + Oligodendrocytes | 0.88 | 0.16 | exon, intron | APOBEC3F, APOBEC3 [symbol] | M |
| 5917 | chr11 | 31840808 | 31840967 | Neurons + Oligodendrocytes | 0.89 | 0.18 | intron | DKFZp686K1684 | M |
| 5918 | chr14 | 24458196 | 24458283 | Neurons + Oligodendrocytes | 0.78 | 0.08 | exon | DHRS4L2 | M |
| 5919 | chr2 | 25354646 | 25354707 | Neurons + Oligodendrocytes | 0.84 | 0.17 | exon | EFR3B | M |
| 5920 | chr2 | 25354716 | 25355064 | Neurons + Oligodendrocytes | 0.76 | 0.09 | intron | EFR38 | M |
| 5921 | chr17 | 47563733 | 47563830 | Neurons + Oligodendrocytes | 0.76 | 0.11 | Intergenic | NGFR | M |
| 5922 | chr19 | 39898186 | 39898552 | Neurons + Oligodendrocytes | 0.67 | 0.02 | intron, exon | ZFP36, 2FP36 | M |
| 5923 | chr12 | 124246303 | 124246510 | Neurons + Oligodendrocytes | 0.63 | 0.06 | promoter-TSS | DNAH10 | M |
| 5924 | chr1 | 11174802 | 11175183 | Pancreatic Alpha + Beta + Delta cells | 0.01 | 0.93 | intron | MTOR | U |
| 5925 | chr18 | 39584405 | 39584730 | Pancreatic Alpha + Beta + Delta cells | 0.03 | 0.95 | intron | PIK3C3 | U |
| 5926 | chr15 | 73547092 | 73547378 | Pancreatic Alpha + Beta + Delta cells | 0.01 | 0.92 | intron | NEO1 | U |
| 5927 | chr1 | 65144855 | 65145174 | Pancreatic Alpha + Beta + Delta cells | 0.03 | 0.93 | intron | CACHD1 | U |
| 5928 | chr4 | 31066890 | 31067290 | Pancreatic Alpha + Beta + Delta cells | 0.01 | 0.91 | intron | PCDH7 | U |
| 5929 | chr4 | 71762250 | 71762512 | Pancreatic Alpha + Beta + Delta cells | 0.04 | 0.91 | Intergenic | MOB1B | U |
| 5930 | chr11 | 11409294 | 11409415 | Pancreatic Alpha + Beta + Delta cells | 0.05 | 0.91 | intron | GALNT18 | U |
| 5931 | chr8 | 30917044 | 30917399 | Pancreatic Alpha + Beta + Delta cells | 0.11 | 0.96 | intron | WRN | U |
| 5932 | chr17 | 17393032 | 17393515 | Pancreatic Alpha + Beta + Delta cells | 0.09 | 0.93 | intron | MED9 | U |
| 5933 | chr6 | 37954346 | 37954445 | Pancreatic Alpha + Beta + Delta cells | 0.11 | 0.95 | intron | ZFAND3 | U |
| 5934 | chr8 | 134312641 | 134312941 | Pancreatic Alpha + Beta + Delta cells | 0.1 | 0.93 | Intergenic | NDRG1 | U |
| 5935 | chr10 | 135144629 | 135144743 | Pancreatic Alpha + Beta + Delta cells | 0.04 | 0.83 | intron | CALY | U |
| 5936 | chr1 | 54317669 | 54317816 | Pancreatic Alpha + Beta + Delta cells | 0.01 | 0.94 | exon | YIPF1 | U |
| 5937 | chr21 | 48072653 | 48072887 | Pancreatic Alpha + Beta + Delta cells | 0.01 | 0.94 | exon | PRMT2 | U |
| 5938 | chr18 | 7994337 | 7994541 | Pancreatic Alpha + Beta + Delta cells | 0.02 | 0.94 | intron | PTPRM | U |
| 5939 | chr1 | 64259663 | 64259887 | Pancreatic Alpha + Beta + Delta cells | 0.01 | 0.93 | intron | ROR1 | U |
| 5940 | chr10 | 114737328 | 114737592 | Pancreatic Alpha + Beta + Delta cells | 0.02 | 0.92 | Intron | TCF7L2 | U |
| 5941 | chr7 | 40132678 | 40132835 | Pancreatic Alpha + Beta + Delta cells | 0.06 | 0.95 | exon | CDK13 | U |
| 5942 | chr2 | 170359492 | 170359676 | Pancreatic Alpha + Beta + Delta cells | 0.04 | 0.93 | intron | BBS5 | U |
| 5943 | chr11 | 66005140 | 66005425 | Pancreatic Alpha + Beta + Delta cells | 0.02 | 0.91 | intron | PACS1 | U |
| 5944 | chr19 | 19123447 | 19123596 | Pancreatic Alpha + Beta + Delta cells | 0.03 | 0.91 | intron | SUGP2 | U |
| 5945 | chr2 | 205584910 | 205585063 | Pancreatic Alpha + Beta + Delta cells | 0.02 | 0.9 | intron | PARD3B | U |
| 5946 | chr13 | 26322725 | 26322920 | Pancreatic Alpha + Beta + Delta cells | 0.01 | 0.89 | intron | ATP8A2 | U |
| 5947 | chr4 | 186297020 | 186297240 | Pancreatic Alpha + Beta + Delta cells | 0.05 | 0.93 | intron | LRP2BP | U |
| 5948 | chr12 | 114336393 | 114336715 | Pancreatic Alpha + Beta + Delta cells | 0.02 | 0.9 | intron | RBM19 | U |
| 5949 | chr3 | 45508353 | 45508521 | Pancreatic Alpha + Beta + Delta cells | 0.03 | 0.9 | intron | LARS2 | U |
| 5950 | chr1 | 12333781 | 12334137 | Pancreatic Alpha + Beta + Delta cells | 0.06 | 0.93 | intron | VPS13D | U |
| 5951 | chr7 | 158165892 | 158165912 | Pancreatic Alpha + Beta + Delta cells | 0.04 | 0.9 | intron | PTPRN2 | U |
| 5952 | chr4 | 78121467 | 78121701 | Pancreatic Alpha + Beta + Delta cells | 0.05 | 0.91 | Intergenic | CCNG2 | U |
| 5953 | chr19 | 5940287 | 5940525 | Pancreatic Alpha + Beta + Delta cells | 0.05 | 0.91 | intron | RANBP3 | U |
| 5954 | chr16 | 20792346 | 20792608 | Pancreatic Alpha + Beta + Delta cells | 0.01 | 0.87 | intron | ACSM3 | U |
| 5955 | chr5 | 126422538 | 126422885 | Pancreatic Alpha + Beta + Delta cells | 0.06 | 0.92 | Intergenic | C5orf63 | U |
| 5956 | chr11 | 1341139341 | 134114344 | Pancreatic Alpha + Beta + Delta cells | 0.05 | 0.91 | intron | VPS26B | U |
| 5957 | chr10 | 34587539 | 34587644 | Pancreatic Alpha + Beta + Delta cells | 0.08 | 0.93 | intron | PARD3 | U |
| 5958 | chr5 | 42828307 | 42828443 | Pancreatic Alpha + Beta + Delta cells | 0.07 | 0.92 | intron | GLTSCR1L | U |
| 5959 | chr2 | 240192453 | 240192609 | Pancreatic Alpha + Beta + Delta cells | 0.02 | 0.87 | intron | HDAC4 | U |
| 5960 | chr16 | 421807 | 421999 | Pancreatic Alpha + Beta + Delta cells | 0.02 | 0.87 | exon | TMEM8A | U |
| 5961 | chr1 | 28178026 | 28178380 | Pancreatic Alpha + Beta + Delta cells | 0.07 | 0.92 | TTS | PPP1R8 | U |
| 5962 | chr5 | 58168362 | 58168815 | Pancreatic Alpha + Beta + Delta cells | 0.04 | 0.89 | Intergenic | RAB3C | U |
| 5963 | chr12 | 84198025 | 84198479 | Pancreatic Alpha + Beta + Delta cells | 0.04 | 0.89 | Intergenic | SLC6A15 | U |
| 5964 | chr12 | 20492456 | 20492590 | Pancreatic Alpha + Beta + Delta cells | 0.03 | 0.87 | Intergenic | PDE3A | U |
| 5965 | chr16 | 16833433 | 1683497 | Pancreatic Alpha + Beta + Delta cells | 0.08 | 0.92 | intron | CRAMP1L | U |
| 5966 | chr12 | 131280340 | 131280618 | Pancreatic Alpha + Beta + Delta cells | 0.04 | 0.88 | intron | STX2 | U |
| 5967 | chr6 | 1178678383 | 117868143 | Pancreatic Alpha + Beta + Delta cells | 0.02 | 0.86 | intron | DCBLD1 | U |
| 5968 | chr2 | 118705617 | 118706081 | Pancreatic Alpha + Beta + Delta cells | 0.1 | 0.94 | intron | CCDC92 | U |
| 5969 | chr3 | 1307961593 | 130796346 | Pancreatic Alpha + Beta + Delta cells | 0.03 | 0.86 | intron | NEK11 | U |
| 5970 | chr8 | 17181976 | 17182233 | Pancreatic Alpha + Beta + Delta cells | 0.09 | 0.92 | intron | MTMR7 | U |
| 5971 | chr18 | 54594071 | 54594535 | Pancreatic Alpha + Beta + Delta cells | 0.05 | 0.88 | intron | WDR7 | U |
| 5972 | chr20 | 1155772 | 1155870 | Pancreatic Alpha + Beta + Delta cells | 0.1 | 0.92 | Intergenic | TMEM74B | U |
| 5973 | chr10 | 1099540631 | 109954170 | Pancreatic Alpha + Beta + Delta cells | 0.02 | 0.84 | Intergenic | RNU6-53 | U |
| 5974 | chr21 | 480694033 | 48069616 | Pancreatic Alpha + Beta + Delta cells | 0.11 | 0.93 | intron, exon | PRMT2, PRMT2 | U |
| 5975 | chr3 | 42157546 | 42157789 | Pancreatic Alpha + Beta + Delta cells | 0.09 | 0.91 | intron | TRAK1 | U |
| 5976 | chr17 | 28537689 | 28537933 | Pancreatic Alpha + Beta + Delta cells | 0.06 | 0.88 | exon, intron | SLC6A4.SLC6A4 | U |
| 5977 | chr15 | 52962514 | 52962777 | Pancreatic Alpha + Beta + Delta cells | 0.07 | 0.89 | intron | FAM214A | U |
| 5978 | chr15 | 89086735 | 89087031 | Pancreatic Alpha + Beta + Delta cells | 0.07 | 0.89 | intron | DET1 | U |
| 5979 | chr2 | 131483184 | 131483493 | Pancreatic Alpha + Beta + Delta cells | 0.02 | 0.84 | Intergenic | GPR148 | U |
| 5980 | chr14 | 1039215493 | 103921880 | Pancreatic Alpha + Beta + Delta cells | 0.1 | 0.92 | intron | MARK3 | U |
| 5981 | chr4 | 261326491 | 26133010 | Pancreatic Alpha + Beta + Delta cells | 0.05 | 0.87 | Intergenic | RBPJ | U |
| 5982 | chr1 | 55549922 | 55550082 | Pancreatic Alpha + Beta + Delta cells | 0.14 | 0.95 | intron | USP24 | U |
| 5983 | chr5 | 133135556 | 133135720 | Pancreatic Alpha + Beta + Delta cells | 0 | 0.81 | Intergenic | C5orf15 | U |
| 5984 | chr10 | 32399766 | 32399985 | Pancreatic Alpha + Beta + Delta cells | 0.1 | 0.91 | Intergenic | KIF58 | U |
| 5985 | chr17 | 43090995 | 43091250 | Pancreatic Alpha + Beta + Delta cells | 0.02 | 0.83 | Intergenic | C1QL1 | U |
| 5986 | chr2 | 192584628 | 192584964 | Pancreatic Alpha + Beta + Delta cells | 0.11 | 0.92 | Intergenic | NABP1 | U |
| 5987 | chr8 | 141166206 | 141166703 | Pancreatic Alpha + Beta + Delta cells | 0.11 | 0.92 | intron | TRAPPC9 | U |
| 5988 | chr17 | 57483062 | 57483164 | Pancreatic Alpha + Beta + Delta cells | 0.12 | 0.92 | Intergenic | MIR4729 | U |
| 5989 | chr10 | 5676954 | 5677161 | Pancreatic Alpha + Beta + Delta cells | 0.04 | 0.84 | Intergenic | ASB13 | U |
| 5990 | chr10 | 97043316 | 97043625 | Pancreatic Alpha + Beta + Delta cells | 0.11 | 0.91 | intron | PDLIM1 | U |
| 5991 | chr5 | 179044384 | 179044640 | Pancreatic Alpha + Beta + Delta cells | 0.14 | 0.93 | intron | HNRNPH1 | U |
| 5992 | chr5 | 176357690 | 176357984 | Pancreatic Alpha + Beta + Delta cells | 0.07 | 0.86 | intron | UIMC1 | U |
| 5993 | chr4 | 79747213 | 79747251 | Pancreatic Alpha + Beta + Delta cells | 0.18 | 0.96 | exon | BMP2K | U |
| 5994 | chr10 | 135144559 | 135144744 | Pancreatic Alpha + Beta + Delta cells | 0.06 | 0.84 | intron | CALY | U |
| 5995 | chr15 | 393237461 | 39323965 | Pancreatic Alpha + Beta + Delta cells | 0.02 | 0.8 | Intergenic | C15orf54 | U |
| 5996 | chr19 | 137110813 | 13711310 | Pancreatic Alpha + Beta + Delta cells | 0.04 | 0.82 | Intergenic | CACNA1A | U |
| 5997 | chr19 | 13710721 | 13710987 | Pancreatic Alpha + Beta + Delta cells | 0.02 | 0.8 | Intergenic | CACNA1A | U |
| 5998 | chr8 | 141339511 | 141339794 | Pancreatic Alpha + Beta + Delta cells | 0.15 | 0.93 | intron | TRAPPC9 | U |
| 5999 | chr1 | 2331407811 | 233141129 | Pancreatic Alpha + Beta + Delta cells | 0.14 | 0.92 | intron | PCNXL2 | U |
| 6000 | chr1 | 96295091 | 9629893 | Pancreatic Alpha + Beta + Delta cells | 0.12 | 0.9 | intron | SLC25A33 | U |
| 6001 | chr1 | 90181842 | 90182263 | Pancreatic Alpha + Beta + Delta cells | 0.16 | 0.94 | exon | LRRC8C | U |
| 6002 | chr3 | 4482756 | 4482874 | Pancreatic Alpha + Beta + Delta cells | 0.1 | 0.87 | intron | SUMF1 | U |
| 6003 | chr10 | 1042817581 | 104281988 | Pancreatic Alpha + Beta + Delta cells | 0.18 | 0.94 | intron | SUFU | U |
| 6004 | chr7 | 1877468 | 1877625 | Pancreatic Alpha + Beta + Delta cells | 0.19 | 0.94 | intron | MAD1L1 | U |
| 6005 | chr7 | 4175336 | 4175436 | Pancreatic Alpha + Beta + Delta cells | 0.03 | 0.77 | intron | SDK1 | U |
| 6006 | chr3 | 731878763 | 73188112 | Pancreatic Alpha + Beta + Delta cells | 0.15 | 0.89 | Intergenic | EBLN2 | U |
| 6007 | chr9 | 5655518 | 5655756 | Pancreatic Alpha + Beta + Delta cells | 0.21 | 0.94 | intron | KIAA1432 | U |
| 6008 | chr3 | 169880832 | 169881092 | Pancreatic Alpha + Beta + Delta cells | 0.24 | 0.95 | intron | PHC3 | U |
| 6009 | chr4 | 156609240 | 156609367 | Pancreatic Alpha + Beta + Delta cells | 0.23 | 0.93 | intron | GUCY1A3 | U |
| 6010 | chr2 | 73534707 | 73534951 | Pancreatic Alpha + Beta + Delta cells | 0.14 | 0.83 | Intergenic | EGR4 | U |
| 6011 | chr4 | 245450701 | 24545323 | Pancreatic Alpha + Beta + Delta cells | 0.26 | 0.92 | intron | DHX15 | U |
| 6012 | chr6 | 1516099523 | 151610147 | Pancreatic Alpha + Beta + Delta cells | 0.01 | 0.91 | intron | AKAP12 | U |
| 6013 | chr7 | 38479445 | 38479649 | Pancreatic Alpha + Beta + Delta cells | 0.02 | 0.88 | intron | AMPH | U |
| 6014 | chr7 | 37149874 | 37150285 | Pancreatic Alpha + Beta + Delta cells | 0.08 | 0.85 | intron | ELMO1 | U |
| 6015 | chr18 | 77076138 | 77076400 | Pancreatic Alpha + Beta + Delta cells | 0.02 | 0.96 | intron | ATP9B | U |
| 6016 | chr4 | 184205408 | 184205523 | Pancreatic Alpha + Beta + Delta cells | 0.02 | 0.93 | exon | WWC2 | U |
| 6017 | chr14 | 102467285 | 102467421 | Pancreatic Alpha + Beta + Delta cells | 0.02 | 0.93 | exon | DYNC1H1 | U |
| 6018 | chr6 | 35196350 | 35196500 | Pancreatic Alpha + Beta + Delta cells | 0.03 | 0.94 | exon | SCUBE3 | U |
| 6019 | chr19 | 5080780 | 5080861 | Pancreatic Alpha + Beta + Delta cells | 0.02 | 0.92 | intron | KDM48 | U |
| 6020 | chr2 | 3425344 | 3425499 | Pancreatic Alpha + Beta + Delta cells | 0.05 | 0.94 | intron | TRAPPC12 | U |
| 6021 | chr17 | 29669584 | 29670054 | Pancreatic Alpha + Beta + Delta cells | 0.06 | 0.95 | intron | NF1 | U |
| 6022 | chr19 | 50424333 | 50424506 | Pancreatic Alpha + Beta + Delta cells | 0.07 | 0.92 | intron | NUP62 | U |
| 6023 | chr1 | 110560854 | 110561213 | Pancreatic Alpha + Beta + Delta cells | 0.09 | 0.94 | exon | AHCYL1 | U |
| 6024 | chr6 | 7565596 | 7565819 | Pancreatic Alpha + Beta + Delta cells | 0.11 | 0.92 | exon | DSP | U |
| 6025 | chr6 | 26863547 | 26863775 | Pancreatic Alpha + Beta + Delta cells | 0.12 | 0.92 | intron | GUSBP2 | U |
| 6026 | chr14 | 77171592 | 77172087 | Pancreatic Alpha + Beta + Delta cells | 0.09 | 0.89 | Intergenic | VASH1 | U |
| 6027 | chr18 | 43450431 | 43450905 | Pancreatic Alpha + Beta + Delta cells | 0.03 | 0.93 | intron | EPG5 | U |
| 6028 | chr19 | 14092942 | 14093277 | Pancreatic Alpha + Beta + Delta cells | 0.04 | 0.93 | intron | RFX1 | U |
| 6029 | chr14 | 66533815 | 66533930 | Pancreatic Alpha + Beta + Delta cells | 0.06 | 0.94 | Intergenic | LINC00238 | U |
| 6030 | chr20 | 48446527 | 48446742 | Pancreatic Alpha + Beta + Delta cells | 0.06 | 0.94 | intron | SLC9A8 | U |
| 6031 | chr10 | 77358893 | 77359172 | Pancreatic Alpha + Beta + Delta cells | 0.02 | 0.9 | Intergenic | C10orf11 | U |
| 6032 | chr9 | 97939019 | 97939398 | Pancreatic Alpha + Beta + Delta cells | 0.05 | 0.93 | intron | FANCC | U |
| 6033 | chr20 | 5819299 | 5819411 | Pancreatic Alpha + Beta + Delta cells | 0.04 | 0.91 | intron | C20orf196 | U |
| 6034 | chr11 | 36297713 | 36298011 | Pancreatic Alpha + Beta + Delta cells | 0.09 | 0.94 | intron | COMMD9 | U |
| 6035 | chr15 | 99340557 | 99340966 | Pancreatic Alpha + Beta + Delta cells | 0.03 | 0.88 | intron | IGFIR | U |
| 6036 | chr4 | 7035875 | 7035989 | Pancreatic Alpha + Beta + Delta cells | 0.07 | 0.91 | intron | LOC100129931 | U |
| 6037 | chr14 | 495159821 | 49516171 | Pancreatic Alpha + Beta + Delta cells | 0.01 | 0.85 | Intergenic | RPS29 | U |
| 6038 | chr2 | 537435303 | 53743727 | Pancreatic Alpha + Beta + Delta cells | 0.05 | 0.89 | Intergenic | CHAC2 | U |
| 6039 | chr6 | 15358643 | 15359092 | Pancreatic Alpha + Beta + Delta cells | 0.06 | 0.89 | intron | JARID2 | U |
| 6040 | chr12 | 114318713 | 114319202 | Pancreatic Alpha + Beta + Delta cells | 0.04 | 0.86 | intron | RBM19 | U |
| 6041 | chr14 | 69160412 | 69160600 | Pancreatic Alpha + Beta + Delta cells | 0.08 | 0.89 | Intergenic | ZFP36L1 | U |
| 6042 | chr6 | 7463279 | 7463590 | Pancreatic Alpha + Beta + Delta cells | 0.11. | 0.92 | Intergenic | RIOK1 | U |
| 6043 | chr14 | 57896917 | 57897246 | Pancreatic Alpha + Beta + Delta cells | 0.07 | 0.88 | Intergenic | NAA30 | U |
| 6044 | chr7 | 5316237 | 5316354 | Pancreatic Alpha + Beta + Delta cells | 0.02 | 0.81 | Intergenic | SLC29A4 | U |
| 6045 | chr9 | 16527607 | 16527950 | Pancreatic Alpha + Beta + Delta cells | 0.08 | 0.87 | intron | BNC2 | U |
| 6046 | chr14 | 56759745 | 56760150 | Pancreatic Alpha + Beta + Delta cells | 0.11 | 0.9 | intron | PELI2 | U |
| 6047 | chr19 | 50423947 | 50424127 | Pancreatic Alpha + Beta + Delta cells | 0.21 | 0.95 | intron | NUP62 | U |
| 6048 | chr6 | 43749236 | 43749716 | Pancreatic Alpha + Beta + Delta cells | 0.19 | 0.91 | intron | VEGFA | U |
| 6049 | chr11 | 68210149 | 68210383 | Pancreatic Alpha + Beta + Delta cells | 0.2 | 0.9 | intron | LRP5 | U |
| 6050 | chr12 | 132504671 | 132505052 | Pancreatic Alpha + Beta + Delta cells | 0.32 | 0.96 | exon, intron | EP400, EP400 | U |
| 6051 | chr1 | 1563844301 | 156384531 | Pancreatic Alpha + Beta + Delta cells | 0.89 | 0.09 | exon | C1orf61 | M |
| 6052 | chr17 | 27331275 | 27331446 | Pancreatic Alpha + Beta + Delta cells | 0.98 | 0.19 | intron | SEZ6 | M |
| 6053 | chr7 | 1568160663 | 156816343 | Pancreatic Alpha + Beta + Delta cells | 0.89 | 0.12 | Intergenic | LOC645249 | M |
| 6054 | chr14 | 93369148 | 93369285 | Pancreatic Alpha + Beta + Delta cells | 0.87 | 0.12 | Intergenic | CHGA | M |
| 6055 | chr17 | 48642299 | 48642486 | Pancreatic Alpha + Beta + Delta cells | 0.91 | 0.17 | intron | CACNA1G | M |
| 6056 | chr17 | 48610850 | 48611055 | Pancreatic Alpha + Beta + Delta cells | 0.81 | 0.14 | exon, intron | EPN3, EPN3 | M |
| 6057 | chr14 | 93369380 | 93369468 | Pancreatic Alpha + Beta + Delta cells | 0.78 | 0.16 | Intergenic | CHGA | M |
| 6058 | chr2 | 2201965303 | 220196662 | Pancreatic Alpha + Beta + Delta cells | 0.94 | 0.09 | intron | RESP18 | M |
| 6059 | chr2 | 220196370 | 220196475 | Pancreatic Alpha + Beta + Delta cells | 0.83 | 0.04 | intron | RESP18 | M |
| 6060 | chr7 | 1568154783 | 156815807 | Pancreatic Alpha + Beta + Delta cells | 0.87 | 0.09 | Intergenic | LOC645249 | M |
| 6061 | chr7 | 127808701 | 127808805 | Pancreatic Alpha + Beta + Delta cells | 0.83 | 0.06 | Intergenic | MIR129-1 | M |
| 6062 | chr13 | 28541256 | 28541563 | Pancreatic Alpha + Beta + Delta cells | 0.88 | 0.11 | intron | CDX2 | M |
| 6063 | chr6 | 41472431 | 41472728 | Pancreatic Alpha + Beta + Delta cells | 0.84 | 0.08 | Intergenic | FOXP4 | M |
| 6064 | chr19 | 13618495 | 13618839 | Pancreatic Alpha + Beta + Delta cells | 0.86 | 0.1 | promoter-TSS, Interg [symbol] ; | CACNA1A, CACNA1A | M |
| 6065 | chr19 | 591536 | 591781 | Pancreatic Alpha + Beta + Delta cells | 0.78 | 0.03 | intron | HON2 | M |
| 6066 | chr13 | 28541611 | 28542053 | Pancreatic Alpha + Beta + Delta cells | 0.85 | 0.1 | intron | CDX2 | M |
| 6067 | chr2 | 73518221 | 73518240 | Pancreatic Alpha + Beta + Delta cells | 0.95 | 0.23 | exon | EGR4 | M |
| 6068 | chr6 | 414720321 | 41472207 | Pancreatic Alpha + Beta + Delta cells | 0.8 | 0.11 | Intergenic | FOXP4 | M |
| 6069 | chr10 | 71336088 | 71336385 | Pancreatic Alpha + Beta + Delta cells | 0.75 | 0.06 | Intergenic | NEUROG3 | M |
| 6070 | chr16 | 89988197 | 89988547 | Pancreatic Alpha + Beta + Delta cells | 0.72 | 0.05 | promoter-TSS | TUBB3 | M |
| 6071 | chr8 | 54790614 | 54790842 | Pancreatic Alpha + Beta + Delta cells | 0.7 | 0.05 | intron | RGS20 | M |
| 6072 | chr2 | 73519827 | 73519905 | Pancreatic Alpha + Beta + Delta cells | 0.78 | 0.15 | exon | EGR4 | M |
| 6073 | chr11 | 68607274 | 68607623 | Pancreatic Alpha + Beta + Delta cells | 0.6 | 0.04 | intron | CPT1A | M |
| 6074 | chr2 | 73518277 | 73518558 | Pancreatic Alpha + Beta + Delta cells | 0.57 | 0.02 | exon | EGR4 | M |
| 6075 | chr19 | 13388075 | 13388264 | Pancreatic Alpha + Beta + Delta cells | 0.6 | 0.08 | intron | CACNA1A | M |
| 6076 | chr12 | 279488583 | 27949119 | Breast Basal + Luminal Epithelium | 0.06 | 0.88 | intron | KLHL42 | U |
| 6077 | chr3 | 150491825 | 150491964 | Breast Basal + Luminal Epithelium | 0.12 | 0.94 | Intergenic | SIAH2 | U |
| 6078 | chr8 | 47144675 | 47144709 | Breast Basal + Luminal Epithelium | 0.06 | 0.86 | Intergenic | LINC00293 | U |
| 6079 | chr16 | 1478098 | 1478339 | Breast Basal + Luminal Epithelium | 0.09 | 0.88 | Intergenic | C16orf91 | U |
| 6080 | chr2 | 127240232 | 127240497 | Breast Basal + Luminal Epithelium | 0.13 | 0.92 | Intergenic | GYPC | U |
| 6081 | chr3 | 126775127 | 126775296 | Breast Basal + Luminal Epithelium | 0.14 | 0.92 | Intergenic | PLXNA1 | U |
| 6082 | chr11 | 224125191 | 22412746 | Breast Basal + Luminal Epithelium | 0.07 | 0.85 | Intergenic | SLC17A6 | U |
| 6083 | chr10 | 1193148941 | 119314952 | Breast Basal + Luminal Epithelium | 0.04 | 0.82 | Intergenic | EMX2OS | U |
| 6084 | chr20 | 60395236 | 60395387 | Breast Basal + Luminal Epithelium | 0.07 | 0.84 | intron | CDH4 | U |
| 6085 | chr10 | 19443233 | 19443502 | Breast Basal + Luminal Epithelium | 0.11 | 0.88 | Intergenic | ARL5B | U |
| 6086 | chr13 | 39540888 | 39541095 | Breast Basal + Luminal Epithelium | 0.14 | 0.9 | exon | STOML3 | U |
| 6087 | chr18 | 57090982 | 57091074 | Breast Basal + Luminal Epithelium | 0.15 | 0.9 | Intergenic | LMAN1 | U |
| 6088 | chr8 | 47145602 | 47145697 | Breast Basal + Luminal Epithelium | 0.16 | 0.88 | Intergenic | LINC00293 | U |
| 6089 | chr19 | 200562943 | 20056492 | Breast Basal + Luminal Epithelium | 0.22 | 0.93 | Intergenic | ZNF93 | U |
| 6090 | chr1 | 204406713 | 204407056 | Breast Basal + Luminal Epithelium | 0.15 | 0.86 | intron | PIK3C2B | U |
| 6091 | chr10 | 109305382 | 109305724 | Breast Basal + Luminal Epithelium | 0.1 | 0.93 | Intergenic | SORCS1 | U |
| 6092 | chr1 | 2832006 | 2832144 | Breast Basal + Luminal Epithelium | 0.06 | 0.85 | Intergenic | ACTRT2 | U |
| 6093 | chr2 | 236055974 | 236056170 | Breast Basal + Luminal Epithelium | 0.11 | 0.9 | Intergenic | SH3BP4 | U |
| 6094 | chr7 | 477868833 | 47786991 | Breast Basal + Luminal Epithelium | 0.09 | 0.87 | Intergenic | LINC00525 | U |
| 6095 | chr6 | 777457 | 777756 | Breast Basal + Luminal Epithelium | 0.11 | 0.89 | Intergenic | EXOC2 | U |
| 6096 | chr18 | 76079910 | 76079962 | Breast Basal + Luminal Epithelium | 0.08 | 0.85 | Intergenic | SALL3 | U |
| 6097 | chr14 | 96013460 | 96013940 | Breast Basal + Luminal Epithelium | 0.12 | 0.89 | Intergenic | GLRX5 | U |
| 6098 | chr19 | 28351260 | 28351437 | Breast Basal + Luminal Epithelium | 0.1 | 0.85 | Intergenic | LINC00662 | U |
| 6099 | chr10 | 2271089 | 2271521 | Breast Basal + Luminal Epithelium | 0.06 | 0.81 | Intergenic | LINC00701 | U |
| 6100 | chr2 | 116372189 | 116372271 | Breast Basal + Luminal Epithelium | 0.16 | 0.9 | intron | DPP10 | U |
| 6101 | chr20 | 62012031 | 62012139 | Breast Basal + Luminal Epithelium | 0.06 | 0.8 | Intergenic | CHRNA4 | U |
| 6102 | chr16 | 1477888 | 1478047 | Breast Basal + Luminal Epithelium | 0.12 | 0.86 | Intergenic | C16orf91 | U |
| 6103 | chr1 | 41889792 | 41889967 | Breast Basal + Luminal Epithelium | 0.13 | 0.87 | Intergenic | EDN2 | U |
| 6104 | chr2 | 9289261 | 9289498 | Breast Basal + Luminal Epithelium | 0.17 | 0.91 | Intergenic | ASAP2 | U |
| 6105 | chr2 | 16362594 | 16362687 | Breast Basal + Luminal Epithelium | 0.16 | 0.89 | Intergen | MYCNOS | U |
| 6106 | chr16 | 881470333 | 88147160 | Breast Basal + Luminal Epithelium | 0.15 | 0.88 | Intergenic | BANP | U |
| 6107 | chr11 | 1197923341 | 119792556 | Breast Basal + Luminal Epithelium | 0.12 | 0.85 | Intergenic | PVRL1 | U |
| 6108 | chr5 | 24295521 | 24295713 | Breast Basal + Luminal Epithelium | 0.15 | 0.87 | Intergenic | CDH10 | U |
| 6109 | chr14 | 95462015 | 95462278 | Breast Basal + Luminal Epithelium | 0.12 | 0.84 | Intergenic | MIR3173 | U |
| 6110 | chr16 | 1478441 | 1478505 | Breast Basal + Luminal Epithelium | 0.1 | 0.81 | Intergenic | C16orf91 | U |
| 6111 | chr12 | 132984025 | 132984098 | Breast Basal + Luminal Epithelium | 0.1 | 0.81 | Intergenic | FBRSL1 | U |
| 6112 | chr2 | 118134453 | 118134531 | Breast Basal + Luminal Epithelium | 0.18 | 0.89 | Intergenic | DDX18 | U |
| 6113 | chr5 | 4340164 | 4340279 | Breast Basal + Luminal Epithelium | 0.12 | 0.83 | Intergenic | LOC340094 | U |
| 6114 | chr5 | 177513083 | 177513285 | Breast Basal + Luminal Epithelium | 0.12 | 0.83 | Intergenic | N4BP3 | U |
| 6115 | chr18 | 76080046 | 76080295 | Breast Basal + Luminal Epithelium | 0.12 | 0.83 | Intergenic | SALL3 | U |
| 6116 | chr8 | 23227916 | 23228187 | Breast Basal + Luminal Epithelium | 0.18 | 0.89 | intron | LOXL2 | U |
| 6117 | chr11 | 117928221 | 117928533 | Breast Basal + Luminal Epithelium | 0.12 | 0.83 | intron | TMPRSS4-AS1 | U |
| 6118 | chr9 | 9559677 | 9560036 | Breast Basal + Luminal Epithelium | 0.17 | 0.88 | intron | PTPRD | U |
| 6119 | chr8 | 1443181701 | 144318316 | Breast Basal + Luminal Epithelium | 0.18 | 0.88 | Intergenic | ZFP41 | U |
| 6120 | chr6 | 120792972 | 120793264 | Breast Basal + Luminal Epithelium | 0.2 | 0.9 | Intergenic | C6orf170 | U |
| 6121 | chr20 | 620448241 | 62044927 | Breast Basal + Luminal Epithelium | 0.12 | 0.81 | exon | KCNQ2 | U |
| 6122 | chr20 | 55277556 | 55277677 | Breast Basal + Luminal Epithelium | 0.1 | 0.79 | Intergenic | TFAP2C | U |
| 6123 | chr10 | 129333736 | 129334007 | Breast Basal + Luminal Epithelium | 0.15 | 0.84 | Intergenic | NPS | U |
| 6124 | chr13 | 45956569 | 45956926 | Breast Basal + Luminal Epithelium | 0.17 | 0.85 | intron | TPT1-AS1 | U |
| 6125 | chr1 | 187261133 | 187261541 | Breast Basal + Luminal Epithelium | 0.18 | 0.86 | Intergenic | PLA2G4A | U |
| 6126 | chr8 | 60347041 | 60347495 | Breast Basal + Luminal Epithelium | 0.18 | 0.86 | Intergenic | TOX | U |
| 6127 | chr8 | 144209697 | 144209937 | Breast Basal + Luminal Epithelium | 0.16 | 0.83 | Intergenic | LY6H | U |
| 6128 | chr4 | 7158963 | 7159206 | Breast Basal + Luminal Epithelium | 0.22 | 0.89 | Intergenic | SORCS2 | U |
| 6129 | chr16 | 30635481 | 30635748 | Breast Basal + Luminal Epithelium | 0.22 | 0.89 | Intergenic | ZNF689 | U |
| 6130 | chr1 | 4177851 | 4177902 | Breast Basal + Luminal Epithelium | 0.16 | 0.82 | Intergenic | LOC728716 | U |
| 6131 | chrX | 69873831 | 6987528 | Breast Basal + Luminal Epithelium | 0.22 | 0.88 | intron | HDHD1 | U |
| 6132 | chr1 | 224638084 | 224638508 | Breast Basal + Luminal Epithelium | 0.22 | 0.88 | Intergenic | WDR26 | U |
| 6133 | chr20 | 547817211 | 54781848 | Breast Basal + Luminal Epithelium | 0.21 | 0.86 | Intergenic | MC3R | U |
| 6134 | chr1 | 5897580 | 5897790 | Breast Basal + Luminal Epithelium | 0.22 | 0.87 | Intergenic | MIR4689 | U |
| 6135 | chr19 | 13363864 | 13364081 | Breast Basal + Luminal Epithelium | 0.16 | 0.81 | exon, intron | CACNA1A, CACNA1A | U |
| 6136 | chr4 | 6973417 | 6973673 | Breast Basal + Luminal Epithelium | 0.25 | 0.9 | intron | TBC1D14 | U |
| 6137 | chr12 | 118210555 | 118210833 | Breast Basal + Luminal Epithelium | 0.16 | 0.81 | intron | KSR2 | U |
| 6138 | chr4 | 3739508 | 3739600 | Breast Basal + Luminal Epithelium | 0.16 | 0.79 | Intergenic | ADRA2C | U |
| 6139 | chr19 | 469682741 | 46968393 | Breast Basal + Luminal Epithelium | 0.22 | 0.85 | Intergenic | PNMAL1 | U |
| 6140 | chr16 | 3723608 | 3723868 | Breast Basal + Luminal Epithelium | 0.26 | 0.89 | intron | TRAP1 | U |
| 6141 | chr10 | 12148206 | 121482349 | Breast Basal + Luminal Epithelium | 0.22 | 0.85 | Intergenic | INPP5F | U |
| 6142 | chr10 | 1301205791 | 130120877 | Breast Basal + Luminal Epithelium | 0.18 | 0.81 | Intergenic | MKI67 | U |
| 6143 | chr13 | 95204863 | 95205265 | Breast Basal + Luminal Epithelium | 0.28 | 0.91 | Intergenic | TGDS | U |
| 6144 | chr12 | 123211652 | 123212092 | Breast Basal + Luminal Epithelium | 0.25 | 0.88 | TTS | HCAR1 | U |
| 6145 | chr10 | 132777726 | 132777845 | Breast Basal + Luminal Epithelium | 0.3 | 0.92 | Intergenic | MIR378C | U |
| 6146 | chr9 | 137721879 | 137722012 | Breast Basal + Luminal Epithelium | 0.26 | 0.88 | intron | COLSA1 | U |
| 6147 | chr8 | 1443183381 | 144318534 | Breast Basal + Luminal Epithelium | 0.17 | 0.79 | Intergenic | ZFP41 | U |
| 6148 | chr13 | 221998703 | 22200074 | Breast Basal + Luminal Epithelium | 0.18 | 0.8 | Intergenic | EFHA1 | U |
| 6149 | chr10 | 134955754 | 134955800 | Breast Basal + Luminal Epithelium | 0.22 | 0.82 | Intergenic | KNDC1 | U |
| 6150 | chr5 | 177943384 | 177943499 | Breast Basal + Luminal Epithelium | 0.24 | 0.83 | intron | COL23A1 | U |
| 6151 | chr13 | 112298627 | 112298747 | Breast Basal + Luminal Epithelium | 0.24 | 0.83 | Intergenic | TEX29 | U |
| 6152 | chr12 | 124362406 | 124362551 | Breast Basal + Luminal Epithelium | 0.22 | 0.81 | intron | DNAH10 | U |
| 6153 | chr10 | 126955448 | 126955719 | Breast Basal + Luminal Epithelium | 0.24 | 0.81 | Intergenic | MIR4296 | U |
| 6154 | chr4 | 42110492 | 42110914 | Breast Basal + Luminal Epithelium | 0.26 | 0.83 | Intergenic | BEND4 | U |
| 6155 | chr16 | 1166174 | 1166448 | Breast Basal + Luminal Epithelium | 0.24 | 0.8 | Intergenic | C1QTNF8 | U |
| 6156 | chr8 | 142949835 | 142949969 | Breast Basal + Luminal Epithelium | 0.24 | 0.78 | Intergenic | MIR4472-1 | U |
| 6157 | chr20 | 61320511 | 61320683 | Breast Basal + Luminal Epithelium | 0.32 | 0.86 | Intergenic | NTSR1 | U |
| 6158 | chr4 | 127123265 | 127123416 | Breast Basal + Luminal Epithelium | 0.26 | 0.79 | Intergenic | MIR2054 | U |
| 6159 | chr16 | 1164680 | 1164798 | Breast Basal + Luminal Epithelium | 0.32 | 0.84 | Intergenic | C1QTNF8 | U |
| 6160 | chr7 | 37152662 | 37152918 | Breast Basal + Luminal Epithelium | 0.03 | 0.9 | intron | ELMO1 | U |
| 6161 | chr9 | 122025916 | 122026182 | Breast Basal + Luminal Epithelium | 0.26 | 0.88 | intron | DBC1 | U |
| 6162 | chr10 | 8111648 | 8112126 | Breast Basal + Luminal Epithelium | 0.19 | 0.8 | intron | GATA3 | U |
| 6163 | chr22 | 23801402 | 23801638 | Breast Basal + Luminal Epithelium | 0.03 | 0.92 | Intergenic | ZDHHC8P1 | U |
| 6164 | chr2 | 36668427 | 36668651 | Breast Basal + Luminal Epithelium | 0.06 | 0.89 | exon | CRIM1 | U |
| 6165 | chr1 | 228083415 | 228083606 | Breast Basal + Luminal Epithelium | 0.08 | 0.88 | Intergenic | MIR5008 | U |
| 6166 | chr11 | 232603 | 233048 | Breast Basal + Luminal Epithelium | 0.18 | 0.94 | intron | SIRT3 | U |
| 6167 | chr2 | 265246883 | 26524871 | Breast Basal + Luminal Epithelium | 0.19 | 0.94 | Intergenic | EPT1 | U |
| 6168 | chr11 | 233160 | 233418 | Breast Basal + Luminal Epithelium | 0.14 | 0.89 | intron | SIRT3 | U |
| 6169 | chr16 | 4787695 | 4787972 | Breast Basal + Luminal Epithelium | 0.11 | 0.83 | exon, intron | C16orf71 | U |
| 6170 | chr2 | 242757513 | 242757606 | Breast Basal + Luminal Epithelium | 0.22 | 0.91 | exon | NEU4 | U |
| 6171 | chr5 | 159776351 | 159776480 | Breast Basal + Luminal Epithelium | 0.27 | 0.94 | exon | C1QTNF2 | U |
| 6172 | chr12 | 4737521 | 4737961 | Breast Basal + Luminal Epithelium | 0.09 | 0.88 | exon | AKAP3 | U |
| 6173 | chr14 | 416136201 | 41613685 | Breast Basal + Luminal Epithelium | 0.16 | 0.92 | Intergenic | LRFN5 | U |
| 6174 | chr9 | 78432781 | 78433095 | Breast Basal + Luminal Epithelium | 0.06 | 0.82 | Intergenic | PCSK5 | U |
| 6175 | chr17 | 2278727 | 2279131 | Breast Basal + Luminal Epithelium | 0.14 | 0.9 | exon, intron | SG5M2, SGSM2 | U |
| 6176 | chr5 | 5571530 | 5571829 | Breast Basal + Luminal Epithelium | 0.12 | 0.86 | Intergenic | KIAA0947 | U |
| 6177 | chr5 | 177525862 | 177525915 | Breast Basal + Luminal Epithelium | 0.17 | 0.89 | Intergenic | N4BP3 | U |
| 6178 | chr20 | 62011905 | 62012017 | Breast Basal + Luminal Epithelium | 0.18 | 0.9 | Intergenic | CHRNA4 | U |
| 6179 | chr14 | 28626361 | 28626746 | Breast Basal + Luminal Epithelium | 0.16 | 0.87 | Intergenic | LINC00645 | U |
| 6180 | chr2 | 242757430 | 242757494 | Breast Basal + Luminal Epithelium | 0.14 | 0.84 | exon | NEU4 | U |
| 6181 | chr9 | 126154260 | 126154352 | Breast Basal + Luminal Epithelium | 0.14 | 0.84 | intron | DENND1A | U |
| 6182 | chr2 | 44497562 | 44497826 | Breast Basal + Luminal Epithelium | 0.24 | 0.94 | Intergenic | SLC3A1 | U |
| 6183 | chr6 | 169641078 | 169641365 | Breast Basal + Luminal Epithelium | 0.19 | 0.89 | intron | THBS2 | U |
| 6184 | chr9 | 126154361 | 126154758 | Breast Basal + Luminal Epithelium | 0.2 | 0.9 | intron | DENND1A | U |
| 6185 | chr21 | 46886593 | 46886690 | Breast Basal + Luminal Epithelium | 0.22 | 0.89 | intron | COL18A1 | U |
| 6186 | chr14 | 41888904 | 41889153 | Breast Basal + Luminal Epithelium | 0.15 | 0.82 | Intergenic | LRFN5 | U |
| 6187 | chr8 | 144209496 | 144209612 | Breast Basal + Luminal Epithelium | 0.11 | 0.77 | Intergenic | LY6H | U |
| 6188 | chr3 | 185565216 | 185565377 | Breast Basal + Luminal Epithelium | 0.24 | 0.89 | Intergenic | IGF28PZ | U |
| 6189 | chr22 | 34573021 | 34573101 | Breast Basal + Luminal Epithelium | 0.26 | 0.89 | Intergenic | LARGE | U |
| 6190 | chr20 | 31144203 | 31144462 | Breast Basal + Luminal Epithelium | 0.25 | 0.87 | intron | C20orf112 | U |
| 6191 | chr1 | 6133736 | 6134181 | Breast Basal + Luminal Epithelium | 0.26 | 0.88 | intron | KCNAB2 | U |
| 6192 | chr12 | 124788301 | 124788723 | Breast Basal + Luminal Epithelium | 0.28 | 0.89 | intron | FAM101A | U |
| 6193 | chr8 | 143334441 | 143334602 | Breast Basal + Luminal Epithelium | 0.23 | 0.83 | intron | TSNARE1 | U |
| 6194 | chr1 | 2811624 | 2811803 | Breast Basal + Luminal Epithelium | 0.3 | 0.9 | Intergenic | TTC34 | U |
| 6195 | chr7 | 502956 | 503264 | Breast Basal + Luminal Epithelium | 0.32 | 0.92 | Intergenic | PDGFA | U |
| 6196 | chr22 | 49580759 | 49580874 | Breast Basal + Luminal Epithelium | 0.28 | 0.87 | Intergenic | LOC100128946 | U |
| 6197 | chr20 | 19407815 | 19408159 | Breast Basal + Luminal Epithelium | 0.24 | 0.83 | intron | SLC24A3 | U |
| 6198 | chr10 | 134795381 | 134795424 | Breast Basal + Luminal Epithelium | 0.31 | 0.88 | Intergenic | LOC399829 | U |
| 6199 | chr8 | 58105962 | 58106069 | Breast Basal + Luminal Epithelium | 0.3 | 0.87 | Intergenic | LOC100507651 | U |
| 6200 | chr22 | 17337857 | 17337932 | Breast Basal + Luminal Epithelium | 0.23 | 0.78 | Intergenic | HSFY1P1 | U |
| 6201 | chr2 | 241074519 | 241074658 | Breast Basal + Luminal Epithelium | 0.25 | 0.76 | Intron | MYEOV2 | U |
| 6202 | chr12 | 54433551 | 54433688 | Breast Basal + Luminal Epithelium | 0.86 | 0.1 | intron | HOXC4 | M |
| 6203 | chr3 | 180462104 | 180462290 | Breast Basal + Luminal Epithelium | 0.9 | 0.18 | Intergenic | CCDC39 | M |
| 6204 | chr7 | 87935935 | 87935985 | Breast Basal + Luminal Epithelium | 0.64 | 0.09 | intron | STEAP4 | M |
| 6205 | chr19 | 46580060 | 46580218 | Breast Basal + Luminal Epithelium | 0.68 | 0.13 | Intergenic | IGFL4 | M |
| 6206 | chrX | 103812854 | 103813216 | Breast Basal + Luminal Epithelium | 0.83 | 0.29 | intron | IL1RAPL2 | M |
| 6207 | chr11 | 61062962 | 61063044 | Breast Basal + Luminal Epithelium | 0.92 | 0.1 | promoter-TSS | VWCE | M |
| 6208 | chr5 | 187552 | 1875940 | Breast Basal + Luminal Epithelium | 0.88 | 0.09 | Intergenic | IRX4 | M |
| 6209 | chr2 | 133428731 | 133428800 | Breast Basal + Luminal Epithelium | 0.93 | 0.18 | promoter-TSS | LYPD1 | M |
| 6210 | chr12 | 16757947 | 16758268 | Breast Basal + Luminal Epithelium | 0.82 | 0.08 | exon, promoter-TSS | LMO3, LMO3 | M |
| 6211 | chr3 | 9904307 | 9904634 | Breast Basal + Luminal Epithelium | 0.8 | 0.06 | Intergenic | CIDEC | M |
| 6212 | chr12 | 54408233 | 54408284 | Breast Basal + Luminal Epithelium | 0.82 | 0.09 | Intergenic | HOXC6 | M |
| 6213 | chr12 | 16757837 | 16757945 | Breast Basal + Luminal Epithelium | 0.94 | 0.22 | exon | LMO3 | M |
| 6214 | chr4 | 102712216 | 102712398 | Breast Basal + Luminal Epithelium | 0.8 | 0.1 | intron | BANK1 | M |
| 6215 | chr11 | 61062685 | 61062936 | Breast Basal + Luminal Epithelium | 0.72 | 0.02 | promoter-TSS | VWCE | M |
| 6216 | chr10 | 98479658 | 98479744 | Breast Basal + Luminal Epithelium | 0.82 | 0.13 | intron | PIK3AP1 | M |
| 6217 | chr6 | 3053739 | 3053881 | Breast Basal + Luminal Epithelium | 0.8 | 0.11 | Intergenic | RIPK1 | M |
| 6218 | chr12 | 49390678 | 49391080 | Breast Basal + Luminal Epithelium | 0.74 | 0.05 | exon | DDN | M |
| 6219 | chr18 | 12253405 | 12253640 | Breast Basal + Luminal Epithelium | 0.82 | 0.14 | promoter-TSS | CIDEA | M |
| 6220 | chr9 | 129373287 | 129373573 | Breast Basal + Luminal Epithelium | 0.74 | 0.06 | Intergenic | LMX1B | M |
| 6221 | chr11 | 17497362 | 17497547 | Breast Basal + Luminal Epithelium | 0.78 | 0.12 | intron | ABCC8 | M |
| 6222 | chr6 | 50818692 | 50819121 | Breast Basal + Luminal Epithelium | 0.74 | 0.09 | Intergenic | TFAP2B | M |
| 6223 | chr2 | 220378996 | 220379372 | Breast Basal + Luminal Epithelium | 0.68 | 0.04 | exor | ASIC4 | M |
| 6224 | chr18 | 56939245 | 56939552 | Breast Basal + Luminal Epithelium | 0.73 | 0.1 | intron, exon | RAX, RAX | M |
| 6225 | chr3 | 16554239 | 16554620 | Breast Basal + Luminal Epithelium | 0.64 | 0.03 | intron | RFTN1 | M |
| 6226 | chr1 | 215255164 | 215255506 | Breast Basal + Luminal Epithelium | 0.62 | 0.11 | intron | KCNK2 | M |
| 6227 | chr2 | 232113287 | 232113348 | Lung Alveolar + Bronchial cells | 0.07 | 0.94 | intron | ARMC9 | U |
| 6228 | chr9 | 125983841 | 125984259 | Lung Alveolar + Bronchial cells | 0.05 | 0.91 | intron | STRBP | U |
| 6229 | chr14 | 87899146 | 87899412 | Lung Alveolar + Bronchial cells | 0.09 | 0.91 | Intergenic | LOC283585 | U |
| 6230 | chr1 | 71656617 | 71656873 | Lung Alveolar + Bronchial cells | 0.07 | 0.87 | intron | ZRAN82-AS2 | U |
| 6231 | chr6 | 107532762 | 107532925 | Lung Alveolar + Bronchial cells | 0.15 | 0.94 | intron | POSS2 | U |
| 6232 | chr11 | 75948297 | 75948528 | Lung Alveolar + Bronchial cells | 0.14 | 0.9 | Intergenic | WNT11 | U |
| 6233 | chr4 | 813142 | 813319 | Lung Alveolar + Bronchial cells | 0.09 | 0.82 | intron | CPLX1 | U |
| 6234 | chr5 | 44490688 | 44491054 | Lung Alveolar + Bronchial cells | 0.08 | 0.8 | Intergenic | FGF10 | U |
| 6235 | chr15 | 65519245 | 65519449 | Lung Alveolar + Bronchial cells | 0.1 | 0.82 | Intergenic | CILP | U |
| 6236 | chr3 | 53161967 | 53162111 | Lung Alveolar + Bronchial cells | 0.23 | 0.94 | intron | RFT1 | U |
| 6237 | chr3 | 125617768 | 125618203 | Lung Alveolar + Bronchial cells | 0.21 | 0.89 | Intergenic | FAMB6JP | U |
| 6238 | chr15 | 72470213 | 72470368 | Lung Alveolar + Bronchial cells | 0.23 | 0.9 | intron | GRAMD2 | U |
| 6239 | chr2 | 179044777 | 179045001 | Lung Alveolar + Bronchial cells | 0.26 | 0.9 | Intergenic | RBM45 | U |
| 6240 | chr7 | 66074579 | 66074813 | Lung Alveolar + Bronchial cells | 0.24 | 0.88 | Intergenic | KCTD7 | U |
| 6241 | chr3 | 127724452 | 127724726 | Lung Alveolar + Bronchial cells | 0.16 | 0.8 | Intergenic | SEC61A1 | U |
| 6242 | chr7 | 155189643 | 155189743 | Lung Alveolar + Bronchial cells | 0.28 | 0.86 | Intergenic | EN2 | U |
| 6243 | chr14 | 81469419 | 81469846 | Lung Alveolar + Bronchial cells | 0.33 | 0.89 | intron | TSHR | U |
| 6244 | chr3 | 183485515 | 183485601 | Lung Alveolar + Bronchial cells | 0.03 | 0.9 | intron | YEATS2 | U |
| 6245 | chr8 | 429506 | 429633 | Lung Alveolar + Bronchial cells | 0.05 | 0.89 | Intergenic | C8orf42 | U |
| 6246 | chr2 | 114113839 | 114114244 | Lung Alveolar + Bronchial cells | 0.04 | 0.86 | Intergenic | PAX8 | U |
| 6247 | chr19 | 51593003 | 51593206 | Lung Alveolar + Bronchial cells | 0.09 | 0.9 | Intergenic | KLK14 | U |
| 6248 | chr2 | 230139684 | 230139721 | Lung Alveolar + Bronchial cells | 0.13 | 0.93 | Intergenic | PID1 | U |
| 6249 | chr8 | 48474333 | 48474714 | Lung Alveolar + Bronchial cells | 0.1 | 0.9 | intron | KIAA0146 | U |
| 6250 | chr9 | 948548 | 948854 | Lung Alveolar + Bronchial cells | 0.03 | 0.8 | intron | DMRT1 | U |
| 6251 | chr7 | 50595652 | 50595696 | Lung Alveolar + Bronchial cells | 0.16 | 0.92 | intron | DDC | U |
| 6252 | chr5 | 125859310 | 125859464 | Lung Alveolar + Bronchial cells | 0.14 | 0.9 | Intergenic | ALDH741 | U |
| 6253 | chr2 | 207790148 | 207790370 | Lung Alveolar + Bronchial cells | 0.14 | 0.9 | Intergenic | CPO | U |
| 6254 | chr17 | 19796075 | 19796424 | Lung Alveolar + Bronchial cells | 0.08 | 0.84 | Intergenic | ULK2 | U |
| 6255 | chr1 | 48750621 | 48750695 | Lung Alveolar + Bronchial cells | 0.05 | 0.8 | Intergenic | SLC5A9 | U |
| 6256 | chr6 | 75919914 | 75920126 | Lung Alveolar + Bronchial cells | 0.08 | 0.83 | Intergenic | COL12A1 | U |
| 6257 | chr10 | 129791109 | 129791381 | Lung Alveolar + Bronchial cells | 0.18 | 0.91 | intron | PTPRE | U |
| 6258 | chr3 | 100988813 | 100989001 | Lung Alveolar + Bronchial cells | 0.2 | 0.92 | intron | IMPG2 | U |
| 6259 | chr4 | 3617771 | 3618005 | Lung Alveolar + Bronchial cells | 0.12 | 0.84 | Intergenic | FLI35424 | U |
| 6260 | chr14 | 85435653 | 85435836 | Lung Alveolar + Bronchial cells | 0.12 | 0.83 | Intergenic | FLRT2 | U |
| 6261 | chr6 | 121423085 | 121423311 | Lung Alveolar + Bronchial cells | 0.22 | 0.93 | intron | C6orf170 | U |
| 6262 | chr13 | 106988723 | 106988955 | Lung Alveolar + Bronchial cells | 0.14 | 0.85 | Intergenic | LINC00460 | U |
| 6263 | chr1 | 61509550 | 61509709 | Lung Alveolar + Bronchial cells | 0.13 | 0.83 | Intergenic | NFIA | U |
| 6264 | chr5 | 73367049 | 73367301 | Lung Alveolar + Bronchial cells | 0.2 | 0.9 | Intergenic | ARHGEF28 | U |
| 6265 | chr14 | 95541336 | 95541520 | Lung Alveolar + Bronchial cells | 0.15 | 0.84 | Intergenic | MIR3173 | U |
| 6266 | chr12 | 118298749 | 118298820 | Lung Alveolar + Bronchial cells | 0.24 | 0.92 | intron | KSR2 | U |
| 6267 | chr4 | 4156493 | 4156568 | Lung Alveolar + Bronchial cells | 0.15 | 0.83 | Intergenic | OTOP1 | U |
| 6268 | chr1 | 26214209 | 26214398 | Lung Alveolar + Bronchial cells | 0.2 | 0.88 | intron | STMN1 | U |
| 6269 | chr5 | 180254663 | 180254867 | Lung Alveolar + Bronchial cells | 0.22 | 0.9 | Intergenic | LINC00847 | U |
| 6270 | chr1 | 240077042 | 240077180 | Lung Alveolar + Bronchial cells | 0.23 | 0.89 | Intergenic | RPS7P5 | U |
| 6271 | chr2 | 103454245 | 103454608 | Lung Alveolar + Bronchial cells | 0.15 | 0.81 | Intergenic | TMEM182 | U |
| 6272 | chr11 | 40977506 | 40977873 | Lung Alveolar + Bronchial cells | 0.18 | 0.84 | intron | RRC4C | U |
| 6273 | chr2 | 172855891 | 172856268 | Lung Alveolar + Bronchial cells | 0.2 | 0.86 | Intergenic | METAP1D | U |
| 6274 | chr3 | 27317025 | 27317459 | Lung Alveolar + Bronchial cells | 0.23 | 0.89 | intron | NEK10 | U |
| 6275 | chr16 | 11402006 | 11402119 | Lung Alveolar + Bronchial cells | 0.23 | 0.88 | Intergenic | PRM1 | U |
| 6276 | chr1 | 10560776 | 10560924 | Lung Alveolar + Bronchial cells | 0.24 | 0.89 | intron | PEX14 | U |
| 6277 | chr7 | 71070144 | 71070339 | Lung Alveolar + Bronchial cells | 0.18 | 0.83 | intron | WBSCR17 | U |
| 6278 | chr7 | 3450257 | 3450462 | Lung Alveolar + Bronchial cells | 0.24 | 0.89 | intron | SDK1 | U |
| 6279 | chr21 | 47928925 | 47929342 | Lung Alveolar + Bronchial cells | 0.22 | 0.87 | intron | DIP2A | U |
| 6280 | chr1 | 22762726 | 22762801 | Lung Alveolar + Bronchial cells | 0.24 | 0.88 | Intergenic | ZBTB40 | U |
| 6281 | chr7 | 92042225 | 92042332 | Lung Alveolar + Bronchial cells | 0.14 | 0.78 | Intergenic | GATAD1 | U |
| 6282 | chr1 | 202001636 | 202001794 | Lung Alveolar + Bronchial cells | 0.28 | 0.92 | Intergenic | ELF3 | U |
| 6283 | chr10 | 115875121 | 115875408 | Lung Alveolar + Bronchial cells | 0.2 | 0.84 | Intergenic | MIR2110 | U |
| 6284 | chr2 | 111498715 | 111499057 | Lung Alveolar + Bronchial cells | 0.2 | 0.84 | intron | ACOXL | U |
| 6285 | chr13 | 54890942 | 54891327 | Lung Alveolar + Bronchial cells | 0.22 | 0.86 | Intergenic | MIR1297 | U |
| 6286 | chr1 | 10560188 | 10560258 | Lung Alveolar + Bronchial cells | 0.27 | 0.9 | intron | PEX14 | U |
| 6287 | chr19 | 38548317 | 38548412 | Lung Alveolar + Bronchial cells | 0.2 | 0.82 | intron | SIPA1L3 | U |
| 6288 | chr1 | 46786373 | 46786567 | Lung Alveolar + Bronchial cells | 0.16 | 0.78 | Intergenic | UQCRH | U |
| 6289 | chr16 | 8826332 | 8826534 | Lung Alveolar + Bronchial cells | 0.24 | 0.86 | intron | ABAT | U |
| 6290 | chr15 | 67674267 | 67674507 | Lung Alveolar + Bronchial cells | 0.24 | 0.86 | intron | QCH | U |
| 6291 | chr3 | 127131170 | 127131537 | Lung Alveolar + Bronchial cells | 0.19 | 0.81 | Intergenic | TPRA1 | U |
| 6292 | chr15 | 63244269 | 63244342 | Lung Alveolar + Bronchial cells | 0.29 | 0.9 | Intergenic | TPM1 | U |
| 6293 | chr17 | 76793232 | 76793330 | Lung Alveolar + Bronchial cells | 0.28 | 0.89 | TTS, exon | USP36, USP36 | U |
| 6294 | chr4 | 35107603 | 35107731 | Lung Alveolar + Bronchial cells | 0.27 | 0.88 | Intergenic | ARAP2 | U |
| 6295 | chr18 | 59640487 | 59640653 | Lung Alveolar + Bronchial cells | 0.29 | 0.9 | Intergenic | RNF152 | U |
| 6296 | chr10 | 1136810473 | 113681214 | Lung Alveolar + Bronchial cells | 0.21 | 0.82 | Intergenic | GPAM | U |
| 6297 | chr1 | 99397142 | 99397348 | Lung Alveolar + Bronchial cells | 0.22 | 0.83 | intron | LPPR5 | U |
| 6298 | chr4 | 4263169 | 4263397 | Lung Alveolar + Bronchial cells | 0.23 | 0.84 | Intergenic | TMEM128 | U |
| 6299 | chr5 | 133260671 | 133260929 | Lung Alveolar + Bronchial cells | 0.21 | 0.82 | Intergenic | C5orf15 | U |
| 6300 | chr17 | 15795454 | 15795779 | Lung Alveolar + Bronchial cells | 0.26 | 0.87 | Intergenic | ADORA2B | U |
| 6301 | chr3 | 157003040 | 157003420 | Lung Alveolar + Bronchial cells | 0.22 | 0.83 | intron | VEPH1 | U |
| 6302 | chr12 | 1058728953 | 105873112 | Lung Alveolar + Bronchial cells | 0.22 | 0.82 | Intergenic | C12orf75 | U |
| 6303 | chr10 | 106544867 | 106545102 | Lung Alveolar + Bronchial cells | 0.22 | 0.82 | intron | SORCS3 | U |
| 6304 | chr4 | 8953961 | 8954061 | Lung Alveolar + Bronchial cells | 0.24 | 0.83 | Intergenic | LOC650293 | U |
| 6305 | chr10 | 65836171 | 65836504 | Lung Alveolar + Bronchial cells | 0.28 | 0.87 | Intergenic | REEP3 | U |
| 6306 | chr1 | 65037436 | 65037857 | Lung Alveolar + Bronchial cells | 0.34 | 0.93 | intron | CACHD1 | U |
| 6307 | chr7 | 1569038001 | 156903917 | Lung Alveolar + Bronchial cells | 0.26 | 0.84 | Intergenic | UBE3C | U |
| 6308 | chr19 | 46963970 | 46964187 | Lung Alveolar + Bronchial cells | 0.32 | 0.9 | Intergenic | PNMAL1 | U |
| 6309 | chr4 | 150770095 | 150770431 | Lung Alveolar + Bronchial cells | 0.28 | 0.86 | Intergenic | DCLK2 | U |
| 6310 | chr1 | 18301849 | 18302082 | Lung Alveolar + Bronchial cells | 0.21 | 0.78 | Intergenic | IGSF21 | U |
| 6311 | chr11 | 60166518 | 60166885 | Lung Alveolar + Bronchial cells | 0.28 | 0.85 | intron | MS4A14 | U |
| 6312 | chr5 | 176532975 | 176533169 | Lung Alveolar + Bronchial cells | 0.24 | 0.8 | Intergenic | FGFR4 | U |
| 6313 | chr11 | 1239940043 | 123994267 | Lung Alveolar + Bronchial cells | 0.3 | 0.85 | intron | VWA5A | U |
| 6314 | chr7 | 27546756 | 27547052 | Lung Alveolar + Bronchial cells | 0.31 | 0.86 | Intergenic | HIBADH | U |
| 6315 | chr5 | 158243769 | 158244060 | Lung Alveolar + Bronchial cells | 0.3 | 0.84 | intron | EBF1 | U |
| 6316 | chr1 | 1624360813 | 162436468 | Lung Alveolar + Bronchial cells | 0.32 | 0.86 | Intergenic | UHMK1 | U |
| 6317 | chr3 | 180857211 | 180857631 | Lung Alveolar + Bronchial cells | 0.28 | 0.82 | intron | SOX2-OT | U |
| 6318 | chr7 | 1549610461 | 154961365 | Lung Alveolar + Bronchial cells | 0.26 | 0.79 | Intergenic | LOC100128264 | U |
| 6319 | chr16 | 89361007 | 89361170 | Lung Alveolar + Bronchial cells | 0.34 | 0.86 | intron | ANKRD11 | U |
| 6320 | chr20 | 59700988 | 59701148 | Lung Alveolar + Bronchial cells | 0.34 | 0.85 | Intergenic | CDH4 | U |
| 6321 | chr7 | 1412878 | 1412994 | Lung Alveolar + Bronchial cells | 0.23 | 0.73 | Intergenic | MICALL2 | U |
| 6322 | chr10 | 50374944 | 50375062 | Lung Alveolar + Bronchial cells | 0.29 | 0.79 | exon | C10orf128 | U |
| 6323 | chr19 | 10394627 | 10394792 | Lung Alveolar + Bronchial cells | 0.32 | 0.82 | intron, exon | ICAM1, ICAM1 | U |
| 6324 | chr12 | 48107264 | 48107498 | Lung Alveolar + Bronchial cells | 0.29 | 0.79 | intron | ENDOU | U |
| 6325 | chr11 | 46918967 | 46919454 | Lung Alveolar + Bronchial cells | 0.34 | 0.84 | intron | LRP4 | U |
| 6326 | chr2 | 114344227 | 114344537 | Lung Alveolar + Bronchial cells | 0.33 | 0.78 | intron | WASH2P | U |
| 6327 | chr8 | 111833914 | 111834223 | Lung Alveolar + Bronchial cells | 0.1 | 0.91 | Intergenic | KCNV1 | U |
| 6328 | chr20 | 51000919 | 51001078 | Lung Alveolar + Bronchial cells | 0.08 | 0.85 | Intergenic | ZFP64 | U |
| 6329 | chr3 | 61378641 | 61378874 | Lung Alveolar + Bronchial cells | 0.2 | 0.84 | Intergenic | FHIT | U |
| 6330 | chr14 | 64369053 | 64369469 | Lung Alveolar + Bronchial cells | 0.05 | 0.86 | intron | SYNE2 | U |
| 6331 | chr20 | 60485351 | 60485444 | Lung Alveolar + Bronchial cells | 0.07 | 0.86 | exon, intron | CDH4 | U |
| 6332 | chr9 | 88836212 | 88836389 | Lung Alveolar + Bronchial cells | 0.07 | 0.84 | exon | C9orf153 | U |
| 6333 | chr20 | 23283452 | 23283591 | Lung Alveolar + Bronchial cells | 0.12 | 0.88 | Intergenic | NXT1 | U |
| 6334 | chr1 | 28854250 | 28854589 | Lung Alveolar + Bronchial cells | 0.18 | 0.94 | intron | RCC1 | U |
| 6335 | chr8 | 134602104 | 134602203 | Lung Alveolar + Bronchial cells | 0.16 | 0.91 | Intergenic | ST3GALI | U |
| 6336 | chr9 | 31633242 | 31633446 | Lung Alveolar + Bronchial cells | 0.08 | 0.79 | Intergenic | ACO1 | U |
| 6337 | chr9 | 95771178 | 95771313 | Lung Alveolar + Bronchial cells | 0.12 | 0.92 | intron | FGD3 | U |
| 6338 | chr15 | 91584200 | 91584329 | Lung Alveolar + Bronchial cells | 0.06 | 0.82 | Intergenic | VPS33B | U |
| 6339 | chr22 | 29130426 | 29130713 | Lung Alveolar + Bronchial cells | 0.16 | 0.9 | exon, intron | CHEK2, CHEK2 | U |
| 6340 | chr20 | 60856661 | 60857041 | Lung Alveolar + Bronchial cells | 0.23 | 0.92 | intron | OSBPL2 | U |
| 6341 | chr14 | 72265353 | 72265520 | Lung Alveolar + Bronchial cells | 0.17 | 0.85 | Intergenic | RGS6 | U |
| 6342 | chr21 | 45895657 | 45895854 | Lung Alveolar + Bronchial cells | 0.21 | 0.89 | Intergenic | LRRC3 | U |
| 6343 | chr9 | 78556526 | 78556801 | Lung Alveolar + Bronchial cells | 0.18 | 0.86 | intron | PCSK5 | U |
| 6344 | chr22 | 24210757 | 24210990 | Lung Alveolar + Bronchial cells | 0.22 | 0.87 | exon, intron | SLC2A11, SLC2A11 | U |
| 6345 | chr21 | 37780765 | 37781175 | Lung Alveolar + Bronchial cells | 0.2 | 0.85 | intron | CHAF1B | U |
| 6346 | chr22 | 25317089 | 25317310 | Lung Alveolar + Bronchial cells | 0.24 | 0.87 | intron | SGSM1 | U |
| 6347 | chr3 | 66053848 | 66054080 | Lung Alveolar + Bronchial cells | 0.2 | 0.83 | Intergenic | MAGI1 | U |
| 6348 | chr1 | 1986186 | 1986259 | Lung Alveolar + Bronchial cells | 0.22 | 0.83 | intron | PRKCZ | U |
| 6349 | chr20 | 26272462 | 26272801 | Lung Alveolar + Bronchial cells | 0.27 | 0.87 | Intergenic | LOC284801 | U |
| 6350 | chr22 | 47486098 | 47486245 | Lung Alveolar + Bronchial cells | 0.26 | 0.82 | intron | TBC1D22A | U |
| 6351 | chr22 | 25093141 | 25093496 | Lung Alveolar + Bronchial cells | 0.32 | 0.87 | Intergenic | POM121L108 | U |
| 6352 | chr22 | 19874916 | 19875088 | Lung Alveolar + Bronchial cells | 0.36 | 0.86 | intron | TXNRD2 | U |
| 6353 | chr19 | 10404606 | 10404687 | Lung Alveolar + Bronchial cells | 0.66 | 0.23 | intron | ICAM5 | M |
| 6354 | chr5 | 3602272 | 3602460 | Lung Alveolar + Bronchial cells | 0.82 | 0.15 | TTS | IRX1 | M |
| 6355 | chr5 | 3606284 | 3606496 | Lung Alveolar + Bronchial cells | 0.82 | 0.19 | Intergenic | IRX1 | M |
| 6356 | chr5 | 3602539 | 3602826 | Lung Alveolar + Bronchial cells | 0.71 | 0.15 | Intergenic | IRX1 | M |
| 6357 | chr5 | 3594139 | 3594432 | Lung Alveolar + Bronchial cells | 0.66 | 0.13 | Intergenic | IRX1 | M |
| 6358 | chr5 | 3606587 | 3607009 | Lung Alveolar + Bronchial cells | 0.65 | 0.13 | Intergenic | IRX1 | M |
| 6359 | chr5 | 3600389 | 3600587 | Lung Alveolar + Bronchial cells | 0.7 | 0.2 | intron | IRX1 | M |
| 6360 | chr7 | 113722561 | 113722722 | Lung Alveolar + Bronchial cells | 0.68 | 0.23 | Intergenic | PPP1R3A | M |
| 6361 | chr5 | 43039669 | 43039962 | Lung Alveolar + Bronchial cells | 0.6 | 0.18 | exon | ANXA2R | M |
| 6362 | chr6 | 10416561 | 10416738 | Lung Alveolar + Bronchial cells | 0.66 | 0.25 | TTS | OC100130275 | M |
| 6363 | chr19 | 18715633 | 18715811 | Lung Alveolar + Bronchial cells | 0.63 | 0.26 | intron | CRLF1 | M |
| 6364 | chr19 | 18715870 | 18716183 | Lung Alveolar + Bronchial cells | 0.57 | 0.24 | intron | CRLF1 | M |
| 6365 | chr14 | 61655239 | 61655414 | Lung Alveolar + Bronchial cells | 0.55 | 0.26 | Intergenic | TMEM30B | M |
| 6366 | chr1 | 28726744 | 28726838 | Fallopian + Ovary Epithelium | 0.06 | 0.95 | intron | PHACTR4 | U |
| 6367 | chr4 | 186845917 | 186846165 | Fallopian + Ovary Epithelium | 0.05 | 0.92 | intron | SORBS2 | U |
| 6368 | chr2 | 238519236 | 238519649 | Fallopian + Ovary Epithelium | 0.07 | 0.93 | Intergenic | RAB17 | U |
| 6369 | chr10 | 114144318 | 114144465 | Fallopian + Ovary Epithelium | 0.08 | 0.94 | intron | ACSL5 | U |
| 6370 | chr19 | 36531822 | 36532041 | Fallopian + Ovary Epithelium | 0.07 | 0.92 | intron | THAP8 | U |
| 6371 | chr7 | 150006090 | 150006391 | Fallopian + Ovary Epithelium | 0.07 | 0.92 | intron | ACTR3C | U |
| 6372 | chr13 | 46444682 | 46445045 | Fallopian + Ovary Epithelium | 0.07 | 0.92 | Intergenic | SIAH3 | U |
| 6373 | chr10 | 29819520 | 29819649 | Fallopian + Ovary Epithelium | 0.03 | 0.88 | exon | SVIL | U |
| 6374 | chr2 | 11652968 | 11653250 | Fallopian + Ovary Epithelium | 0.05 | 0.9 | Intergenic | GREB1 | U |
| 6375 | chr4 | 1913187 | 1913522 | Fallopian + Ovary Epithelium | 0.03 | 0.88 | intron | WHSC1 | U |
| 6376 | chr7 | 148907974 | 148908417 | Fallopian + Ovary Epithelium | 0.04 | 0.89 | intron | ZNF282 | U |
| 6377 | chr9 | 131955855 | 131955975 | Fallopian + Ovary Epithelium | 0.04 | 0.88 | Intergenic | ER5L | U |
| 6378 | chr11 | 65438546 | 65438787 | Fallopian + Ovary Epithelium | 0.09 | 0.92 | Intergenic | RELA | U |
| 6379 | chr2 | 227885834 | 227885961 | Fallopian + Ovary Epithelium | 0.12 | 0.92 | intron | COL4A4 | U |
| 6380 | chr17 | 41407341 | 41407473 | Fallopian + Ovary Epithelium | 0.1 | 0.9 | Intergenic | LINC00854 | U |
| 6381 | chr22 | 47227516 | 47227745 | Fallopian + Ovary Epithelium | 0.11 | 0.9 | intron | TBC1D22A | U |
| 6382 | chr2 | 239473028 | 239473083 | Fallopian + Ovary Epithelium | 0.08 | 0.86 | Intergenic | LOC151171 | U |
| 6383 | chr16 | 55418550 | 55418663 | Fallopian + Ovary Epithelium | 0.08 | 0.86 | Intergenic | IRX6 | U |
| 6384 | chr7 | 54901102 | 54901214 | Fallopian + Ovary Epithelium | 0.12 | 0.89 | Intergenic | SEC61G | U |
| 6385 | chr1 | 168194169 | 168194524 | Fallopian + Ovary Epithelium | 0.13 | 0.9 | promoter-TSS | SFT2D2 | U |
| 6386 | chr4 | 47608721 | 4761052 | Fallopian + Ovary Epithelium | 0.17 | 0.92 | Intergenic | MSX1 | U |
| 6387 | chr16 | 89769968 | 89770108 | Fallopian + Ovary Epithelium | 0.19 | 0.92 | Intergenic | SPATA2L | U |
| 6388 | chr4 | 3948578 | 3948902 | Fallopian + Ovary Epithelium | 0.19 | 0.92 | exon, intron | FAM86EP | U |
| 6389 | chr16 | 56828732 | 56828826 | Fallopian + Ovary Epithelium | 0.16 | 0.88 | intron | NUP93 | U |
| 6390 | chr18 | 71680167 | 71680348 | Fallopian + Ovary Epithelium | 0.13 | 0.85 | Intergenic | FBXO15 | U |
| 6391 | chr4 | 837076703 | 83707932 | Fallopian + Ovary Epithelium | 0.19 | 0.91 | intron | SCD5 | U |
| 6392 | chr5 | 16981676 | 16981794 | Fallopian + Ovary Epithelium | 0.24 | 0.91 | Intergenic | MYO10 | U |
| 6393 | chr10 | 3023582 | 3023764 | Fallopian + Ovary Epithelium | 0.18 | 0.85 | Intergenic | PFKP | U |
| 6394 | chr3 | 125643874 | 125643978 | Fallopian + Ovary Epithelium | 0.24 | 0.88 | exon | FAM86JP | U |
| 6395 | chr8 | 41555375 | 41555478 | Fallopian + Ovary Epithelium | 0.25 | 0.88 | intron | ANK1 | U |
| 6396 | chr14 | 93942499 | 93942654 | Fallopian + Ovary Epithelium | 0.21 | 0.84 | intron | UNC79 | U |
| 6397 | chr18 | 3363758 | 3363955 | Fallopian + Ovary Epithelium | 0.26 | 0.89 | Intergenic | TGIF1 | U |
| 6398 | chr22 | 50015331 | 50015414 | Fallopian + Ovary Epithelium | 0.26 | 0.86 | intron | C22orf34 | U |
| 6399 | chr10 | 49794755 | 49795053 | Fallopian + Ovary Epithelium | 0.3 | 0.86 | intron | ARHGAP22 | U |
| 6400 | chr3 | 54879942 | 54880015 | Fallopian + Ovary Epithelium | 0.04 | 0.89 | intron | CACNA2D3 | U |
| 6401 | chr1 | 60271893 | 60271987 | Fallopian + Ovary Epithelium | 0.06 | 0.91 | Intergenic | HOOK1 | U |
| 6402 | chr1 | 28727151 | 28727248 | Fallopian + Ovary Epithelium | 0.11 | 0.96 | intron | PHACTR4 | U |
| 6403 | chr1 | 28727848 | 28727979 | Fallopian + Ovary Epithelium | 0.06 | 0.91 | intron | PHACTR4 | U |
| 6404 | chr17 | 67420643 | 67420803 | Fallopian + Ovary Epithelium | 0.08 | 0.93 | intron | MAP2K6 | U |
| 6405 | chr7 | 120527575 | 120527758 | Fallopian + Ovary Epithelium | 0.04 | 0.88 | Intergenic | TSPAN12 | U |
| 6406 | chr2 | 73987714 | 73988039 | Fallopian + Ovary Epithelium | 0.08 | 0.92 | Intergenic | DUSP11 | U |
| 6407 | chr12 | 97092957 | 97093119 | Fallopian + Ovary Epithelium | 0.05 | 0.88 | Intergenic | NEDD1 | U |
| 6408 | chr19 | 14369505 | 14369811 | Fallopian + Ovary Epithelium | 0.04 | 0.87 | Intergenic | LPHN1 | U |
| 6409 | chr2 | 237233447 | 237233837 | Fallopian + Ovary Epithelium | 0.03 | 0.86 | intron | IQCA1 | U |
| 6410 | chr14 | 104024102 | 104024245 | Fallopian + Ovary Epithelium | 0.08 | 0.9 | exon | BAG5 | U |
| 6411 | chr5 | 88219993 | 88220272 | Fallopian + Ovary Epithelium | 0.05 | 0.87 | Intergenic | MEF2C | U |
| 6412 | chr1 | 64949730 | 64950193 | Fallopian + Ovary Epithelium | 0.09 | 0.91 | intron | CACHD1 | U |
| 6413 | chr17 | 8453016 | 8453251 | Fallopian + Ovary Epithelium | 0.13 | 0.94 | intron | MYH10 | U |
| 6414 | chr4 | 153664211 | 153664573 | Fallopian + Ovary Epithelium | 0.11 | 0.92 | Intergenic | TIGD4 | U |
| 6415 | chr4 | 109633949 | 109634363 | Fallopian + Ovary Epithelium | 0.08 | 0.89 | Intergenic | AGXT2L1 | U |
| 6416 | chr1 | 9980646 | 9981111 | Fallopian + Ovary Epithelium | 0.09 | 0.9 | Intergenic | CTNNBIP1 | U |
| 6417 | chr21 | 46081315 | 46081476 | Fallopian + Ovary Epithelium | 0.07 | 0.87 | lintron | TSPEAR | U |
| 6418 | chr6 | 111611322 | 111611724 | Fallopian + Ovary Epithelium | 0.1 | 0.9 | Intergenic | KIAA1919 | U |
| 6419 | chr2 | 8778679 | 8778785 | Fallopian + Ovary Epithelium | 0.1 | 0.89 | Intergenic | ID2 | U |
| 6420 | chr18 | 45840495 | 45840661 | Fallopian + Ovary Epithelium | 0.12 | 0.91 | Intergenic | ZBTB7C | U |
| 6421 | chr19 | 20061790 | 20062023 | Fallopian + Ovary Epithelium | 0.12 | 0.91 | Intergenic | ZNF93 | U |
| 6422 | chr2 | 120469972 | 120470243 | Fallopian + Ovary Epithelium | 0.08 | 0.87 | Intergenic | TMEM177 | U |
| 6423 | chr1 | 155462172 | 155462510 | Fallopian + Ovary Epithelium | 0.12 | 0.91 | intron | ASH1L | U |
| 6424 | chr19 | 13019339 | 13019434 | Fallopian + Ovary Epithelium | 0.09 | 0.87 | intron | SYCE2 | U |
| 6425 | chr2 | 680602 | 680725 | Fallopian + Ovary Epithelium | 0.06 | 0.84 | Intergenic | TMEM18 | U |
| 6426 | chr5 | 137859050 | 137859180 | Fallopian + Ovary Epithelium | 0.12 | 0.9 | intron | ETF1 | U |
| 6427 | chr10 | 61553339 | 61553474 | Fallopian + Ovary Epithelium | 0.16 | 0.94 | intron | CCDC6 | U |
| 6428 | chr16 | 29645054 | 29645430 | Fallopian + Ovary Epithelium | 0.12 | 0.9 | Intergenic | SLC7A5P1 | U |
| 6429 | chr2 | 71479137 | 71479556 | Fallopian + Ovary Epithelium | 0.06 | 0.84 | Intergenic | PAIP28 | U |
| 6430 | chr2 | 233240148 | 233240277 | Fallopian + Ovary Epithelium | 0.04 | 0.81 | Intergenic | ALPP | U |
| 6431 | chr19 | 3581545 | 3581723 | Fallopian + Ovary Epithelium | 0.06 | 0.83 | Intergenic | GIPC3 | U |
| 6432 | chr18 | 76683099 | 76683177 | Fallopian + Ovary Epithelium | 0.12 | 0.88 | Intergenic | SALL3 | U |
| 6433 | chr11 | 67564256 | 67564379 | Fallopian + Ovary Epithelium | 0.08 | 0.84 | intron | FAM86C2P | U |
| 6434 | chr6 | 168624884 | 168625205 | Fallopian + Ovary Epithelium | 0.13 | 0.89 | Intergenic | DACT2 | U |
| 6435 | chr19 | 49643282 | 49643669 | Fallopian + Ovary Epithelium | 0.06 | 0.82 | exon, intron | PPFIA3, PPFIA3 | U |
| 6436 | chr19 | 11264642 | 11264745 | Fallopian + Ovary Epithelium | 0.14 | 0.89 | intron | SPC24 | U |
| 6437 | chr2 | 206701896 | 206702101 | Fallopian + Ovary Epithelium | 0.18 | 0.93 | Intergenic | NRP2 | U |
| 6438 | chr11 | 68130480 | 68130721 | Fallopian + Ovary Epithelium | 0.05 | 0.8 | intron | LRP5 | U |
| 6439 | chr7 | 106245661 | 106245923 | Fallopian + Ovary Epithelium | 0.16 | 0.91 | Intergenic | CCDC71L | U |
| 6440 | chr7 | 43245855 | 43246154 | Fallopian + Ovary Epithelium | 0.08 | 0.83 | intron | HECW1 | U |
| 6441 | chr1 | 36059437 | 36059775 | Fallopian + Ovary Epithelium | 0.1 | 0.85 | intron | TFAP2E | U |
| 6442 | chr3 | 39620969 | 39621383 | Fallopian + Ovary Epithelium | 0.12 | 0.87 | Intergenic | MOBP | U |
| 6443 | chr1 | 175777363 | 175777412 | Fallopian + Ovary Epithelium | 0.16 | 0.9 | Intergenic | TNR | U |
| 6444 | chr12 | 13149855 | 131498748 | Fallopian + Ovary Epithelium | 0.12 | 0.86 | intron | GPR133 | U |
| 6445 | chr8 | 60160268 | 60160473 | Fallopian + Ovary Epithelium | 0.04 | 0.78 | Intergenic | TOX | U |
| 6446 | chr13 | 96202235 | 96202449 | Fallopian + Ovary Epithelium | 0.15 | 0.89 | intron | CLDN10 | U |
| 6447 | chr3 | 184824922 | 184825195 | Fallopian + Ovary Epithelium | 0.16 | 0.88 | intron | C3orf70 | U |
| 6448 | chr1 | 18916289 | 18916329 | Fallopian + Ovary Epithelium | 0.18 | 0.88 | Intergenic | PAX7 | U |
| 6449 | chr16 | 84066952 | 84067047 | Fallopian + Ovary Epithelium | 0.12 | 0.82 | exon | SLC38A8 | U |
| 6450 | chr11 | 71506971 | 71507101 | Fallopian + Ovary Epithelium | 0.2 | 0.89 | TTS, exon | ALG1L9P, FAM86C1 | U |
| 6451 | chr6 | 37537563 | 37537707 | Fallopian + Ovary Epithelium | 0.17 | 0.86 | Intergenic | MIR4462 | U |
| 6452 | chr16 | 88194681 | 88194754 | Fallopian + Ovary Epithelium | 0.2 | 0.88 | Intergenic | BANP | U |
| 6453 | chr11 | 61264069 | 61264257 | Fallopian + Ovary Epithelium | 0.21 | 0.89 | Intergenic | MIR4488 | U |
| 6454 | chr5 | 138910053 | 138910392 | Fallopian + Ovary Epithelium | 0.26 | 0.94 | Intergenic | UBE2D2 | U |
| 6455 | chr19 | 46302021 | 46302084 | Fallopian + Ovary Epithelium | 0.19 | 0.86 | intron | RSPH6A | U |
| 6456 | chr21 | 47256526 | 47256617 | Fallopian + Ovary Epithelium | 0.22 | 0.89 | promoter-TSS | LOC100129027 | U |
| 6457 | chr9 | 138912737 | 138912911 | Fallopian + Ovary Epithelium | 0.24 | 0.91 | intron | NACC2 | U |
| 6458 | chr9 | 1403229253 | 140323153 | Fallopian + Ovary Epithelium | 0.1 | 0.77 | intron | NOXA1 | U |
| 6459 | chr5 | 138902796 | 138903153 | Fallopian + Ovary Epithelium | 0.22 | 0.89 | Intergenic | UBE2D2 | U |
| 6460 | chr11 | 36501472 | 36501671 | Fallopian + Ovary Epithelium | 0.18 | 0.83 | Intergenic | TRAF6 | U |
| 6461 | chr9 | 135749839 | 135750061 | Fallopian + Ovary Epithelium | 0.26 | 0.91 | intron | AK8 | U |
| 6462 | chr2 | 55498546 | 55498796 | Fallopian + Ovary Epithelium | 0.28 | 0.93 | Intergenic | MTIF2 | U |
| 6463 | chr3 | 710009411 | 71001302 | Fallopian + Ovary Epithelium | 0.19 | 0.84 | Intergenic | MIR1284 | U |
| 6464 | chr8 | 94685763 | 94686193 | Fallopian + Ovary Epithelium | 0.24 | 0.89 | intron | LINC00535 | U |
| 6465 | chrX | 43923373 | 43923659 | Fallopian + Ovary Epithelium | 0.11 | 0.75 | Intergenic | NDP | U |
| 6466 | chr11 | 68130181 | 68130435 | Fallopian + Ovary Epithelium | 0.25 | 0.88 | intron | LRP5 | U |
| 6467 | chr11 | 73654734 | 73655118 | Fallopian + Ovary Epithelium | 0.26 | 0.89 | Intergenic | DNAJB13 | U |
| 6468 | chr1 | 213240300 | 213240636 | Fallopian + Ovary Epithelium | 0.32 | 0.91 | intron | RPS6KC1 | U |
| 6469 | chr4 | 19457447 | 19457733 | Fallopian + Ovary Epithelium | 0.1 | 0.91 | Intergenic | SLIT2 | U |
| 6470 | chr5 | 152127502 | 152127822 | Fallopian + Ovary Epithelium | 0.04 | 0.82 | promoter-TSS | ESR1 | U |
| 6471 | chr21 | 33202023 | 33202411 | Fallopian + Ovary Epithelium | 0.03 | 0.81 | Intergenic | HUNK | U |
| 6472 | chr4 | 19457853 | 19458286 | Fallopian + Ovary Epithelium | 0.08 | 0.86 | Intergenic | SLIT2 | U |
| 6473 | chr6 | 41434943 | 41435059 | Fallopian + Ovary Epithelium | 0.05 | 0.82 | Intergenic | FOXP4 | U |
| 6474 | chr8 | 55222361 | 55222748 | Fallopian + Ovary Epithelium | 0.18 | 0.82 | Intergenic | SOX17 | U |
| 6475 | chr1 | 31506114 | 31506570 | Fallopian + Ovary Epithelium | 0.32 | 0.94 | intron | PUM1 | U |
| 6476 | chr14 | 105688093 | 105688234 | Fallopian + Ovary Epithelium | 0.05 | 0.93 | exon | BRF1 | U |
| 6477 | chr22 | 41092705 | 41092855 | Fallopian + Ovary Epithelium | 0.05 | 0.93 | Intergenic | MCHR1 | U |
| 6478 | chr8 | 101891130 | 101891242 | Fallopian + Ovary Epithelium | 0.07 | 0.95 | Intergenic | YWHAZ | U |
| 6479 | chr20 | 23427139 | 23427226 | Fallopian + Ovary Epithelium | 0.05 | 0.91 | Intergenic | CST11 | U |
| 6480 | chr17 | 59161841 | 59162243 | Fallopian + Ovary Epithelium | 0.1 | 0.95 | intron | BCAS3 | U |
| 6481 | chr13 | 1137976543 | 113797982 | Fallopian + Ovary Epithelium | 0.08 | 0.92 | intron | F10 | U |
| 6482 | chr10 | 11405274 | 11405488 | Fallopian + Ovary Epithelium | 0.06 | 0.89 | Intergenic | USPSNI | U |
| 6483 | chr19 | 30324602 | 30324850 | Fallopian + Ovary Epithelium | 0.09 | 0.88 | Intergenic | CONE1 | U |
| 6484 | chr6 | 37033614 | 37034071 | Fallopian + Ovary Epithelium | 0.14 | 0.91 | Intergenic | FGD2 | U |
| 6485 | chr10 | 131647377 | 131647543 | Fallopian + Ovary Epithelium | 0.13 | 0.89 | intron | EBF3 | U |
| 6486 | chr7 | 148901541 | 148901717 | Fallopian + Ovary Epithelium | 0.15 | 0.9 | intron | ZNF282 | U |
| 6487 | chr10 | 130652036 | 130652285 | Fallopian + Ovary Epithelium | 0.11 | 0.86 | Intergenic | MGMT | U |
| 6488 | chr10 | 131647595 | 131647853 | Fallopian + Ovary Epithelium | 0.15 | 0.89 | intron | EBF3 | U |
| 6489 | chr9 | 132633613 | 132633908 | Fallopian + Ovary Epithelium | 0.23 | 0.95 | intron | USP20 | U |
| 6490 | chr9 | 90086305 | 90086558 | Fallopian + Ovary Epithelium | 0.27 | 0.91 | Intergenic | DAPK1 | U |
| 6491 | chr22 | 29155544 | 29155729 | Fallopian + Ovary Epithelium | 0.2 | 0.83 | Intergenic, TTS | CCDC117, HSCB | U |
| 6492 | chr18 | 74419723 | 74419877 | Fallopian + Ovary Epithelium | 0.02 | 0.88 | Intergenic | LOC100131655 | U |
| 6493 | chr1 | 46963395 | 469634851 | Fallopian + Ovary Epithelium | 0.09 | 0.94 | Intergenic | DMBX1 | U |
| 6494 | chr1 | 54009680 | 54010061 | Fallopian + Ovary Epithelium | 0.03 | 0.87 | intron | GLIS1 | U |
| 6495 | chr1 | 61913481 | 61913963 | Fallopian + Ovary Epithelium | 0.05 | 0.89 | intron | NFIA | U |
| 6496 | chr22 | 47441209 | 47441515 | Fallopian + Ovary Epithelium | 0.06 | 0.89 | intron | TBC1D22A | U |
| 6497 | chr15 | 101464434 | 101464934 | Fallopian + Ovary Epithelium | 0.06 | 0.89 | intron, exon | LRRK1, LRRK1 | U |
| 6498 | chr6 | 152125965 | 152126107 | Fallopian + Ovary Epithelium | 0.02 | 0.84 | promoter-TSS | ESR1 | U |
| 6499 | chr14 | 105688243 | 105688658 | Fallopian + Ovary Epithelium | 0.03 | 0.85 | intron | BRF1 | U |
| 6500 | chr19 | 36531417 | 36531743 | Fallopian + Ovary Epithelium | 0.09 | 0.9 | intron | THAP8 | U |
| 6501 | chr18 | 74167957 | 74168295 | Fallopian + Ovary Epithelium | 0.08 | 0.87 | intron | ZNF516 | U |
| 6502 | chr11 | 1123706373 | 112370778 | Fallopian + Ovary Epithelium | 0.12 | 0.89 | Intergenic | C11orf34 | U |
| 6503 | chr6 | 2867896 | 2868364 | Fallopian + Ovary Epithelium | 0.06 | 0.83 | intron | MGC39372 | U |
| 6504 | chr20 | 395421223 | 39542312 | Fallopian + Ovary Epithelium | 0.09 | 0.84 | Intergenic | TOP1 | U |
| 6505 | chr9 | 90928169 | 90928398 | Fallopian + Ovary Epithelium | 0.06 | 0.81 | Intergenic | SPIN1 | U |
| 6506 | chr14 | 30383284 | 30383478 | Fallopian + Ovary Epithelium | 0.18 | 0.92 | intron | PRKD1 | U |
| 6507 | chr22 | 29586131 | 29586424 | Fallopian + Ovary Epithelium | 0.16 | 0.89 | Intergenic | EMID1 | U |
| 6508 | chr14 | 75363159 | 75363611 | Fallopian + Ovary Epithelium | 0.2 | 0.93 | intron | DLST | U |
| 6509 | chr22 | 39432912 | 39433066 | Fallopian + Ovary Epithelium | 0.2 | 0.9 | Intergenic | APOBEC3F | U |
| 6510 | chr12 | 131615178 | 131615311 | Fallopian + Ovary Epithelium | 0.22 | 0.91 | intron | GPR133 | U |
| 6511 | chr9 | 884909513 | 88491143 | Fallopian + Ovary Epithelium | 0.24 | 0.93 | Intergenic | NAA35 | U |
| 6512 | chr10 | 80232442 | 80232854 | Fallopian + Ovary Epithelium | 0.18 | 0.84 | Intergenic | LINC00595 | U |
| 6513 | chr19 | 418507 | 418743 | Fallopian + Ovary Epithelium | 0.26 | 0.9 | intron | SHC2 | U |
| 6514 | chr20 | 36990773 | 36990862 | Fallopian + Ovary Epithelium | 0.3 | 0.92 | intron | LBP | U |
| 6515 | chr21 | 33897933 | 33898194 | Fallopian + Ovary Epithelium | 0.34 | 0.9 | Intergenic | TCP10L | U |
| 6516 | chr1 | 42357334 | 42357610 | Fallopian + Ovary Epithelium | 0.84 | 0.14 | intron | HIVEP3 | M |
| 6517 | chr2 | 233246379 | 233246595 | Fallopian + Ovary Epithelium | 0.76 | 0.1 | exon | ALPP | M |
| 6518 | chr10 | 22725538 | 22725642 | Fallopian + Ovary Epithelium | 0.77 | 0.22 | exon | LOC100499489 | M |
| 6519 | chr5 | 148521594 | 148521741 | Fallopian + Ovary Epithelium | 0.7 | 0.18 | exon | ABLIM3 | M |
| 6520 | chr2 | 164205032 | 164205324 | Fallopian + Ovary Epithelium | 0.67 | 0.15 | Intergenic | FIGN | M |
| 6521 | chr5 | 124071085 | 124071125 | Fallopian + Ovary Epithelium | 0.62 | 0.15 | intron | ZNF60B | M |
| 6522 | chr5 | 87066677 | 87066817 | Fallopian + Ovary Epithelium | 0.64 | 0.2 | Intergenic | CCNH | M |
| 6523 | chr10 | 62761559 | 62761642 | Fallopian + Ovary Epithelium | 0.62 | 0.26 | promoter-TSS | RHOBTB1 | M |
| 6524 | chr19 | 49112138 | 49112279 | Fallopian + Ovary Epithelium | 0.62 | 0.27 | intron | FAM83E | M |
| 6525 | chrX | 129306199 | 129306382 | Fallopian + Ovary Epithelium | 0.6 | 0.29 | exon | RAB33A | M |
| 6526 | chr7 | 94023466 | 94023568 | Fallopian + Ovary Epithelium | 0.51 | 0.22 | promoter-TSS | COL1A2 | M |
| 6527 | chr8 | 16801894 | 16801959 | Fallopian + Ovary Epithelium | 0.54 | 0.27 | Intergenic | FGF20 | M |
| 6528 | chr5 | 92935126 | 92935269 | Fallopian + Ovary Epithelium | 0.87 | 0.16 | intron | MIR548AO | M |
| 6529 | chr5 | 92938149 | 92938233 | Fallopian + Ovary Epithelium | 0.85 | 0.2 | intron | MIR548AO | M |
| 6530 | chr2 | 2332843191 | 233284634 | Fallopian + Ovary Epithelium | 0.74 | 0.11 | Intergenic | ALPPL2 | M |
| 6531 | chr5 | 92906434 | 42906508 | Fallopian + Ovary Epithelium | 0.82 | 0.23 | promoter-TSS | FLI42709 | M |
| 6532 | chr5 | 138923135 | 138923219 | Fallopian + Ovary Epithelium | 0.68 | 0.09 | Intergenic | UBE2D2 | M |
| 6533 | chr2 | 233284129 | 233284309 | Fallopian + Ovary Epithelium | 0.66 | 0.08 | Intergenic | ALPPL2 | M |
| 6534 | chr2 | 54798129 | 54798348 | Fallopian + Ovary Epithelium | 0.64 | 0.08 | intron | SPTBN1 | M |
| 6535 | chr2 | 233284661 | 233284790 | Fallopian + Ovary Epithelium | 0.7 | 0.16 | Intergenic | ALPPL2 | M |
| 6536 | chr12 | 85671785 | 85671911 | Fallopian + Ovary Epithelium | 0.7 | 0.18 | Intergenic | ALX1 | M |
| 6537 | chr7 | 28995391 | 28995418 | Fallopian + Ovary Epithelium | 0.73 | 0.24 | exon | TRIL | M |
| 6538 | chr12 | 34261382 | 34261570 | Fallopian + Ovary Epithelium | 0.66 | 0.23 | Intergenic | ALG10 | M |
| 6539 | chr3 | 151985697 | 151985919 | Fallopian + Ovary Epithelium | 0.58 | 0.15 | promoter-TSS | MBNL1 | M |
| 6540 | chrX | 21676306 | 21676404 | Fallopian + Ovary Epithelium | 0.64 | 0.27 | promoter-TSS, exon | KLHL34, KLHL34 | M |
| 6541 | chr17 | 10704453 | 10704606 | Gastric + Small Intes. + Colon Epithelium | 0.03 | 0.93 | intron | LINC00675 | U |
| 6542 | chr3 | 18664732 | 18665034 | Gastric + Small Intes. + Colon Epithelium | 0.02 | 0.89 | Intergenic | SATB1 | U |
| 6543 | chr5 | 98112561 | 98112785 | Gastric + Small Intes. + Colon Epithelium | 0.06 | 0.92 | intron | RGMB | U |
| 6544 | chr19 | 19691202 | 19691615 | Gastric + Small Intes. + Colon Epithelium | 0.04 | 0.9 | intron | PBX4 | U |
| 6545 | chr8 | 128582449 | 128582939 | Gastric + Small Intes. + Colon Epithelium | 0.02 | 0.88 | Intergenic | LOC727677 | U |
| 6546 | chr19 | 50680078 | 50680329 | Gastric + Small Intes. + Colon Epithelium | 0.06 | 0.91 | Intergenic | IZUMO2 | U |
| 6547 | chr12 | 33051893 | 33052278 | Gastric + Small Intes. + Colon Epithelium | 0.03 | 0.88 | Intergenic | PKP2 | U |
| 6548 | chr3 | 23550224 | 23550488 | Gastric + Small Intes. + Colon Epithelium | 0.08 | 0.92 | intron | UBE2E2 | U |
| 6549 | chr11 | 4129491 | 4129655 | Gastric + Small Intes. + Colon Epithelium | 0.12 | 0.96 | intron | RRM1 | U |
| 6550 | chr18 | 2639105 | 2639190 | Gastric + Small Intes. + Colon Epithelium | 0.07 | 0.89 | Intergenic | CBX3P2 | U |
| 6551 | chr2 | 58008344 | 58008717 | Gastric + Small Intes. + Colon Epithelium | 0.11 | 0.91 | Intergenic | VRK2 | U |
| 6552 | chr8 | 8733962 | 8734060 | Gastric + Small Intes. + Colon Epithelium | 0.14 | 0.94 | intron | MFHAS1 | U |
| 6553 | chr2 | 1319261423 | 131926444 | Gastric + Small Intes. + Colon Epithelium | 0.05 | 0.84 | Intergenic | POTEE | U |
| 6554 | chr12 | 124723205 | 124723337 | Gastric + Small Intes. + Colon Epithelium | 0.12 | 0.87 | intron | ZNF664-FAM101A | U |
| 6555 | chr2 | 233459533 | 233459843 | Gastric + Small Intes. + Colon Epithelium | 0.15 | 0.88 | Intergenic | EFHD1 | U |
| 6556 | chr1 | 23028593 | 23028919 | Gastric + Small Intes. + Colon Epithelium | 0.03 | 0.75 | Intergenic | EPHB2 | U |
| 6557 | chr4 | 38540553 | 38540632 | Gastric + Small Intes. + Colon Epithelium | 0.07 | 0.96 | Intergenic | KLF3 | U |
| 6558 | chr14 | 78141056 | 78141550 | Gastric + Small Intes. + Colon Epithelium | 0.02 | 0.93 | intron | ALKBH1 | U |
| 6559 | chr13 | 30707879 | 30707974 | Gastric + Small Intes. + Colon Epithelium | 0.01 | 0.91 | Intergenic | KATNAL1 | U |
| 6560 | chr17 | 70409454 | 70409817 | Gastric + Small Intes. + Colon Epithelium | 0.02 | 0.91 | intron | LINC00673 | U |
| 6561 | chr13 | 30707459 | 30707772 | Gastric + Small Intes. + Colon Epithelium | 0.05 | 0.94 | Intergenic | KATNAL1 | U |
| 6562 | chr3 | 71580226 | 71580368 | Gastric + Small Intes. + Colon Epithelium | 0.02 | 0.88 | intron | FOXP1 | U |
| 6563 | chr12 | 124723891 | 124724056 | Gastric + Small Intes. + Colon Epithelium | 0.09 | 0.93 | intron | ZNF664-FAM101A | U |
| 6564 | chr17 | 15855461 | 15855854 | Gastric + Small Intes. + Colon Epithelium | 0.06 | 0.85 | intron | ADORA2B | U |
| 6565 | chr1 | 16525041 | 1652792 | Gastric + Small Intes. + Colon Epithelium | 0.14 | 0.92 | intron | CDK11A | U |
| 6566 | chr2 | 174111136 | 174111588 | Gastric + Small Intes. + Colon Epithelium | 0.02 | 0.91 | intron | ZAK | U |
| 6567 | chr8 | 126371226 | 126371457 | Gastric + Small Intes. + Colon Epithelium | 0.08 | 0.96 | intron | NSMCE2 | U |
| 6568 | chr12 | 117400776 | 117401265 | Gastric + Small Intes. + Colon Epithelium | 0.06 | 0.93 | intron | FBXW8 | U |
| 6569 | chr15 | 59860677 | 59860817 | Gastric + Small Intes. + Colon Epithelium | 0.04 | 0.89 | Intergenic | GCNT3 | U |
| 6570 | chr12 | 98968977 | 98969435 | Gastric + Small Intes. + Colon Epithelium | 0.05 | 0.88 | Intergenic | SLC25A3 | U |
| 6571 | chr16 | 31034362 | 31034406 | Gastric + Small Intes. + Colon Epithelium | 0.05 | 0.87 | Intergenic | STX4 | U |
| 6572 | chr11 | 670910571 | 67091248 | Gastric + Small Intes. + Colon Epithelium | 0.08 | 0.89 | intron | LOC100130987 | U |
| 6573 | chr7 | 103033055 | 103033110 | Gastric + Small Intes. + Colon Epithelium | 0.1 | 0.89 | Intron | SLC26A5 | U |
| 6574 | chr6 | 132596447 | 132596560 | Gastric + Small Intes. + Colon Epithelium | 0.01 | 0.8 | Intergenic | MOXD1 | U |
| 6575 | chr12 | 120131739 | 120131941 | Gastric + Small Intes. + Colon Epithelium | 0.06 | 0.84 | intron | CIT | U |
| 6576 | chr7 | 106659628 | 106659758 | Gastric + Small Intes. + Colon Epithelium | 0.05 | 0.82 | Intergenic | PRKAR2B | U |
| 6577 | chr10 | 123809806 | 123809984 | Gastric + Small Intes. + Colon Epithelium | 0.13 | 0.89 | exon, intron | TACC2 | U |
| 6578 | chr6 | 126312588 | 126312738 | Gastric + Small Intes. + Colon Epithelium | 0.13 | 0.88 | intron | TRMT11 | U |
| 6579 | chr5 | 1165489 | 1165743 | Gastric + Small Intes. + Colon Epithelium | 0.07 | 0.8 | Intergenic | SLC6A19 | U |
| 6580 | chr16 | 29263424 | 29263670 | Gastric + Small Intes. + Colon Epithelium | 0.19 | 0.91 | Intergenic | SNX29P2 | U |
| 6581 | chr8 | 41673482 | 41673863 | Gastric + Small Intes. + Colon Epithelium | 0.21 | 0.91 | intron | ANK1 | U |
| 6582 | chr12 | 76342313 | 76342367 | Gastric + Small Intes. + Colon Epithelium | 0.25 | 0.93 | Intergenic | PHLDA1 | U |
| 6583 | chr5 | 55076926 | 55077411 | Gastric + Small Intes. + Colon Epithelium | 0.21 | 0.88 | intron | DDX4 | U |
| 6584 | chr3 | 175546376 | 175546628 | Gastric + Small Intes. + Colon Epithelium | 0.18 | 0.82 | Intergenic | MIR4789 | U |
| 6585 | chr6 | 141181297 | 141181343 | Gastric + Small Intes. + Colon Epithelium | 0.27 | 0.9 | Intergenic | MIR4465 | U |
| 6586 | chr1 | 28803742 | 28803838 | Gastric + Small Intes. + Colon Epithelium | 0.31 | 0.94 | intron | PHACTR4 | U |
| 6587 | chr17 | 7178011 | 7178055 | Gastric + Small Intes. + Colon Epithelium | 0.25 | 0.87 | Intergenic | SLC2A4 | U |
| 6588 | chr18 | 54641748 | 54642012 | Gastric + Small Intes. + Colon Epithelium | 0.32 | 0.9 | intron | WDR7 | U |
| 6589 | chr2 | 159719993 | 159720281 | Gastric + Small Intes. + Colon Epithelium | 0.33 | 0.9 | Intergenic | DAPL1 | U |
| 6590 | chr13 | 24720631 | 24720999 | Gastric + Small Intes. + Colon Epithelium | 0.04 | 0.88 | Intergenic | SPATA13 | U |
| 6591 | chr12 | 52740967 | 52741076 | Gastric + Small Intes. + Colon Epithelium | 0.02 | 0.84 | Intergenic | KRT85 | U |
| 6592 | chr7 | 100877035 | 100877313 | Gastric + Small Intes. + Colon Epithelium | 0.03 | 0.85 | intron | CLDN15 | U |
| 6593 | chr5 | 148983296 | 148983454 | Gastric + Small Intes. + Colon Epithelium | 0.08 | 0.89 | intron | ARHGEF37 | U |
| 6594 | chr11 | 129283909 | 129284042 | Gastric + Small Intes. + Colon Epithelium | 0.09 | 0.89 | intron | BARX2 | U |
| 6595 | chr7 | 1395170083 | 139517151 | Gastric + Small Intes. + Colon Epithelium | 0.09 | 0.89 | intron | TEXAS1 | U |
| 6596 | chr1 | 230397581 | 230397743 | Gastric + Small Intes. + Colon Epithelium | 0.08 | 0.88 | intron | GALNT2 | U |
| 6597 | chr6 | 1478792401 | 147879592 | Gastric + Small Intes. + Colon Epithelium | 0.06 | 0.86 | intron | SAMD5 | U |
| 6598 | chr4 | 31125721 | 31126053 | Gastric + Small Intes. + Colon Epithelium | 0.02 | 0.81 | intron | PCDH7 | U |
| 6599 | chr3 | 141660918 | 141661299 | Gastric + Small Intes. + Colon Epithelium | 0.07 | 0.86 | Intergenic | ATP183 | U |
| 6600 | chr4 | 142599879 | 142600049 | Gastric + Small Intes. + Colon Epithelium | 0.09 | 0.87 | intron | IL15 | U |
| 6601 | chr17 | 76988813 | 76989063 | Gastric + Small Intes. + Colon Epithelium | 0.14 | 0.92 | exon | CANT1 | U |
| 6602 | chr7 | 66418219 | 66418377 | Gastric + Small Intes. + Colon Epithelium | 0.12 | 0.87 | exon | TMEM248 | U |
| 6603 | chr10 | 108257664 | 108257878 | Gastric + Small Intes. + Colon Epithelium | 0.09 | 0.84 | Intergenic | SORCS1 | U |
| 6604 | chr6 | 138300458 | 138300682 | Gastric + Small Intes. + Colon Epithelium | 0.16 | 0.91 | Intergenic | LOC100130476 | U |
| 6605 | chr4 | 68625812 | 68626218 | Gastric + Small Intes. + Colon Epithelium | 0.1 | 0.85 | Intergenic | GNRHR | U |
| 6606 | chr17 | 73379651 | 73379752 | Gastric + Small Intes. + Colon Epithelium | 0.17 | 0.91 | intron | GRB2 | U |
| 6607 | chr15 | 51133407 | 51133464 | Gastric + Small Intes. + Colon Epithelium | 0.15 | 0.88 | Intergenic | AP4E1 | U |
| 6608 | chr7 | 123677859 | 123677930 | Gastric + Small Intes. + Colon Epithelium | 0.16 | 0.89 | Intergenic | TMEM229A | U |
| 6609 | chr2 | 74690813 | 74690992 | Gastric + Small Intes. + Colon Epithelium | 0.19 | 0.92 | intron | MOGS | U |
| 6610 | chr12 | 125095292 | 125095366 | Gastric + Small Intes. + Colon Epithelium | 0.08 | 0.79 | Intergenic | NCOR2 | U |
| 6611 | chr8 | 22218191 | 22218378 | Gastric + Small Intes. + Colon Epithelium | 0.14 | 0.85 | Intergenic | SLC39A14 | U |
| 6612 | chr8 | 142199816 | 142200027 | Gastric + Small Intes. + Colon Epithelium | 0.15 | 0.85 | intron | DENND3 | U |
| 6613 | chr21 | 40981788 | 40982005 | Gastric + Small Intes. + Colon Epithelium | 0.16 | 0.86 | intron | C21orf88 | U |
| 6614 | chr5 | 139522630 | 139522751 | Gastric + Small Intes. + Colon Epithelium | 0.12 | 0.81 | Intergenic | IGIP | U |
| 6615 | chr17 | 62118078 | 62118302 | Gastric + Small Intes. + Colon Epithelium | 0.22 | 0.91 | Intergenic | ICAM2 | U |
| 6616 | chr1 | 244865982 | 244866367 | Gastric + Small Intes. + Colon Epithelium | 0.26 | 0.95 | intron | DESI2 | U |
| 6617 | chr2 | 64480705 | 64480842 | Gastric + Small Intes. + Colon Epithelium | 0.15 | 0.83 | Intergenic | LINC00309 | U |
| 6618 | chr11 | 129747565 | 129747747 | Gastric + Small Intes. + Colon Epithelium | 0.2 | 0.88 | intron | NFRKB | U |
| 6619 | chr9 | 1324457363 | 132445781 | Gastric + Small Intes. + Colon Epithelium | 0.24 | 0.91 | intron | PRRX2 | U |
| 6620 | chr11 | 110303295 | 110303473 | Gastric + Small Intes. + Colon Epithelium | 0.26 | 0.92 | intron | FDX1 | U |
| 6621 | chr21 | 42874221 | 42874513 | Gastric + Small Intes. + Colon Epithelium | 0.18 | 0.84 | intron | TMPRSS2 | U |
| 6622 | chr3 | 177003438 | 177003633 | Gastric + Small Intes. + Colon Epithelium | 0.27 | 0.92 | Intergenic | TBL1XR1 | U |
| 6623 | chr12 | 125095370 | 125095615 | Gastric + Small Intes. + Colon Epithelium | 0.19 | 0.84 | Intergenic | INCOR2 | U |
| 6624 | chr11 | 125048827 | 125048888 | Gastric + Small Intes. + Colon Epithelium | 0.24 | 0.88 | intron | PKNOX2 | U |
| 6625 | chr3 | 39196897 | 39196974 | Gastric + Small Intes. + Colon Epithelium | 0.28 | 0.92 | Intergenic | CSRNP1 | U |
| 6626 | chr13 | 114312460 | 114312578 | Gastric + Small Intes. + Colon Epithelium | 0.16 | 0.8 | promoter-TSS | ATP4B | U |
| 6627 | chr7 | 104639370 | 104639559 | Gastric + Small Intes. + Colon Epithelium | 0.24 | 0.88 | Intergenic | LOC100216546 | U |
| 6628 | chr10 | 121489841 | 121489918 | Gastric + Small Intes. + Colon Epithelium | 0.28 | 0.91 | intron | INPP5F | U |
| 6629 | chr8 | 11407620 | 11407735 | Gastric + Small Intes. + Colon Epithelium | 0.17 | 0.8 | exon | BLK | U |
| 6630 | chr9 | 131838134 | 131838274 | Gastric + Small Intes. + Colon Epithelium | 0.25 | 0.88 | Intergenic | DOLPP1 | U |
| 6631 | chr5 | 22095854 | 22096016 | Gastric + Small Intes. + Colon Epithelium | 0.23 | 0.86 | intron | CDH12 | U |
| 6632 | chr2 | 67365757 | 67366230 | Gastric + Small Intes. + Colon Epithelium | 0.26 | 0.89 | intron | LOC644838 | U |
| 6633 | chr13 | 49945486 | 49945601 | Gastric + Small Intes. + Colon Epithelium | 0.28 | 0.89 | intron | CAB39L | U |
| 6634 | chr8 | 140787482 | 140787844 | Gastric + Small Intes. + Colon Epithelium | 0.28 | 0.89 | intron | TRAPPC9 | U |
| 6635 | chr5 | 37703053 | 37703464 | Gastric + Small Intes. + Colon Epithelium | 0.24 | 0.85 | Intergenic | MDGA1 | U |
| 6636 | chr17 | 9851673 | 9851768 | Gastric + Small Intes. + Colon Epithelium | 0.24 | 0.84 | intron | GAS7 | U |
| 6637 | chr17 | 46028254 | 46028421 | Gastric + Small Intes. + Colon Epithelium | 0.3 | 0.9 | Intergenic, TTS | PRR15L, PRR15L | U |
| 6638 | chr2 | 235886360 | 235886533 | Gastric + Small Intes. + Colon Epithelium | 0.29 | 0.89 | intron | SH38P4 | U |
| 6639 | chr1 | 29534755 | 29534960 | Gastric + Small Intes. + Colon Epithelium | 0.3 | 0.9 | intron | MECR | U |
| 6640 | chr14 | 90164823 | 90165193 | Gastric + Small Intes. + Colon Epithelium | 0.27 | 0.87 | Intergenic | FOXN3-AS2 | U |
| 6641 | chr5 | 67613688 | 67614145 | Gastric + Small Intes. + Colon Epithelium | 0.28 | 0.88 | Intergenic | PIK3R1 | U |
| 6642 | chr2 | 40228745 | 40228795 | Gastric + Small Intes. + Colon Epithelium | 0.31 | 0.9 | intron | SLC8A1-AS1 | U |
| 6643 | chr1 | 60955862 | 60956009 | Gastric + Small Intes. + Colon Epithelium | 0.3 | 0.89 | Intergenic | C1orf87 | U |
| 6644 | chr4 | 7211949 | 7212134 | Gastric + Small Intes. + Colon Epithelium | 0.28 | 0.86 | intron | SORCS2 | U |
| 6645 | chr3 | 33098511 | 33098712 | Gastric + Small Intes. + Colon Epithelium | 0.32 | 0.9 | intron | GLB1 | U |
| 6646 | chr8 | 124537847 | 124538054 | Gastric + Small Intes. + Colon Epithelium | 0.29 | 0.87 | intron | FBXO32 | U |
| 6647 | chr5 | 1319823 | 1320209 | Gastric + Small Intes. + Colon Epithelium | 0.31 | 0.89 | intron | CLPTM1L | U |
| 6648 | chr7 | 36119355 | 36119648 | Gastric + Small Intes. + Colon Epithelium | 0.3 | 0.86 | Intergenic | EEPD1 | U |
| 6649 | chr4 | 57163146 | 57163247 | Gastric + Small Intes. + Colon Epithelium | 0.32 | 0.87 | intron | KIAA1211 | U |
| 6650 | chr2 | 165235177 | 165235373 | Gastric + Small Intes. + Colon Epithelium | 0.29 | 0.84 | Intergenic | GRB14 | U |
| 6651 | chr2 | 106226918 | 106227135 | Gastric + Small Intes. + Colon Epithelium | 0.28 | 0.83 | promoter-TSS | LOC285000 | U |
| 6652 | chr1 | 60956073 | 60956144 | Gastric + Small Intes. + Colon Epithelium | 0.28 | 0.82 | Intergenic | C1orf87 | U |
| 6653 | chr8 | 1133848003 | 113384877 | Gastric + Small Intes. + Colon Epithelium | 0.3 | 0.84 | intron | CSMD3 | U |
| 6654 | chr9 | 139469784 | 139469879 | Gastric + Small Intes. + Colon Epithelium | 0.34 | 0.88 | Intergenic | MIR4674 | U |
| 6655 | chr12 | 1109136903 | 110913931 | Gastric + Small Intes. + Colon Epithelium | 0.4 | 0.94 | intron | FAM216A | U |
| 6656 | chr13 | 42004907 | 42005262 | Gastric + Small Intes. + Colon Epithelium | 0.32 | 0.86 | Intergenic | OR7E37P | U |
| 6657 | chr6 | 43610802 | 43610931 | Gastric + Small Intes. + Colon Epithelium | 0.32 | 0.85 | Intergenic | RSPH9 | U |
| 6658 | chr13 | 110857417 | 110857907 | Gastric + Small Intes. + Colon Epithelium | 0.36 | 0.89 | intron | COL4A1 | U |
| 6659 | chr5 | 273394 | 273541 | Gastric + Small Intes. + Colon Epithelium | 0.3 | 0.82 | intron | PDCD6 | U |
| 6660 | chr19 | 45695965 | 45696130 | Gastric + Small Intes. + Colon Epithelium | 0.32 | 0.84 | Intergenic | BLOC1S3 | U |
| 6661 | chr17 | 71369565 | 71369751 | Gastric + Small Intes. + Colon Epithelium | 0.36 | 0.88 | intron | SDK2 | U |
| 6662 | chr17 | 79824280 | 79824466 | Gastric + Small Intes. + Colon Epithelium | 0.3 | 0.82 | Intergenic | ARHGDIA | U |
| 6663 | chr16 | 9002983 | 9003175 | Gastric + Small Intes. + Colon Epithelium | 0.38 | 0.9 | intron | USP7 | U |
| 6664 | chr11 | 126073383 | 126073607 | Gastric + Small Intes. + Colon Epithelium | 0.42 | 0.92 | exon, intron | RPUSD4, RPUSD4 | U |
| 6665 | chr1 | 1377044 | 1377106 | Gastric + Small Intes. + Colon Epithelium | 0.37 | 0.86 | Intergenic | LOC255512 | U |
| 6666 | chr17 | 70452771 | 70452885 | Gastric + Small Intes. + Colon Epithelium | 0.36 | 0.85 | intron | LINC00673 | U |
| 6667 | chr6 | 108170278 | 108170479 | Gastric + Small Intes. + Colon Epithelium | 0.34 | 0.82 | Intergenic | SCMLA | U |
| 6668 | chr16 | 85963633 | 85963905 | Gastric + Small Intes. + Colon Epithelium | 0.34 | 0.82 | Intergenic | IRF8 | U |
| 6669 | chr7 | 98764851 | 98764999 | Gastric + Small Intes. + Colon Epithelium | 0.34 | 0.81 | Intergenic | SMURF1 | U |
| 6670 | chr15 | 77867751 | 77867993 | Gastric + Small Intes. + Colon Epithelium | 0.36 | 0.82 | Intergenic | LINGO1 | U |
| 6671 | chr5 | 13524633 | 13524946 | Gastric + Small Intes. + Colon Epithelium | 0.37 | 0.82 | Intergenic | DNAH5 | U |
| 6672 | chr19 | 48106478 | 48106559 | Gastric + Small Intes. + Colon Epithelium | 0.36 | 0.8 | Intergenic | GLTSCR1 | U |
| 6673 | chr4 | 134189379 | 134189523 | Gastric + Small Intes. + Colon Epithelium | 0.32 | 0.8 | Intergenic | PCDH10 | U |
| 6674 | chr9 | 113028863 | 113028918 | Gastric + Small Intes. + Colon Epithelium | 0.11 | 0.89 | Intergenic | TXN | U |
| 6675 | chr1 | 19711383 | 19711578 | Gastric + Small Intes. + Colon Epithelium | 0.04 | 0.9 | intron | CAPZB | U |
| 6676 | chr20 | 9361360 | 9361544 | Gastric + Small Intes. + Colon Epithelium | 0.02 | 0.86 | intron | PLCB4 | U |
| 6677 | chr15 | 41842836 | 41842996 | Gastric + Small Intes. + Colon Epithelium | 0.11 | 0.9 | Intergenic | RPAP1 | U |
| 6678 | chr1 | 207182723 | 207182777 | Gastric + Small Intes. + Colon Epithelium | 0.12 | 0.9 | Intergenic | C1orf116 | U |
| 6679 | chr17 | 4144976 | 4145151 | Gastric + Small Intes. + Colon Epithelium | 0.09 | 0.87 | intron | ANKFY1 | U |
| 6680 | chr1 | 168116137 | 168116200 | Gastric + Small Intes. + Colon Epithelium | 0.14 | 0.85 | Intergenic | GPR161 | U |
| 6681 | chr9 | 34050582 | 34050733 | Gastric + Small Intes. + Colon Epithelium | 0.18 | 0.89 | Intergenic | UBAP2 | U |
| 6682 | chr14 | 74029365 | 74029432 | Gastric + Small Intes. + Colon Epithelium | 0.15 | 0.82 | Intergenic | HEATR4 | U |
| 6683 | chr14 | 77437547 | 77437695 | Gastric + Small Intes. + Colon Epithelium | 0.22 | 0.89 | Intergenic | IRF2BPL | U |
| 6684 | chr17 | 372114961450 | 37211875 | Gastric + Small Intes. + Colon Epithelium | 0.18 | 0.84 | Intergenic | LOC100131347 | U |
| 6685 | chr17 | 38844775 | 38844988 | Gastric + Small Intes. + Colon Epithelium | 0.22 | 0.86 | Intergenic | KRT24 | U |
| 6686 | chr20 | 516121 | 516341 | Gastric + Small Intes. + Colon Epithelium | 0.28 | 0.91 | intron | CSNK2A1 | U |
| 6687 | chr9 | 19336284 | 19336508 | Gastric + Small Intes. + Colon Epithelium | 0.36 | 0.93 | intron | DENND4C | U |
| 6688 | chr1 | 2157452091 | 215745274 | Gastric + Small Intes. + Colon Epithelium | 0.38 | 0.94 | intron | KCTD3 | U |
| 6689 | chr18 | 60675645 | 60675810 | Gastric + Small Intes. + Colon Epithelium | 0.3 | 0.86 | Intergenic | DHLPP1 | U |
| 6690 | chr9 | 45746113 | 45746368 | Gastric + Small Intes. + Colon Epithelium | 0.28 | 0.76 | Intergenic | FAM27A | U |
| 6691 | chr8 | 11553274 | 11553514 | Gastric + Small Intes. + Colon Epithelium | 0.59 | 0.14 | Intergenic | GATA4 | M |
| 6692 | chr5 | 7395230 | 7395525 | Gastric + Small Intes. + Colon Epithelium | 0.69 | 0.19 | promoter-TSS, Interg [symbol] | ADCY2, ADCY2 | M |
| 6693 | chr11 | 46317357 | 46317804 | Gastric + Small Intes. + Colon Epithelium | 0.56 | 0.06 | intron | CREB3L1 | M |
| 6694 | chr8 | 11554732 | 11555107 | Gastric + Small Intes. + Colon Epithelium | 0.58 | 0.12 | Intergenic | GATA4 | M |
| 6695 | chr16 | 87489775 | 87489952 | Small Intes. + Colon Epithelium | 0.01 | 0.94 | intron | ZCCHC14 | U |
| 6696 | chr21 | 45513359 | 45513531 | Small Intes. + Colon Epithelium | 0.03 | 0.95 | intron | TRAPPC10 | U |
| 6697 | chr11 | 75859077 | 75859219 | Small Intes. + Colon Epithelium | 0.04 | 0.94 | Intergenic | WNT11 | U |
| 6698 | chr18 | 21882532 | 21882889 | Small Intes. + Colon Epithelium | 0.04 | 0.94 | intron | OSBPL1A | U |
| 6699 | chr2 | 47595738 | 47595810 | Small Intes. + Colon Epithelium | 0.04 | 0.92 | promoter-TSS | EPCAM | U |
| 6700 | chr4 | 718410 | 718626 | Small Intes. + Colon Epithelium | 0.08 | 0.96 | intron | PCGF3 | U |
| 6701 | chr15 | 34371984 | 34372158 | Small Intes. + Colon Epithelium | 0.06 | 0.94 | Intergenic | EMC7 | U |
| 6702 | chr8 | 30633125 | 30633491 | Small Intes. + Colon Epithelium | 0.08 | 0.94 | Intergenic | UBXN8 | U |
| 6703 | chr3 | 1423223581 | 142322485 | Small Intes. + Colon Epithelium | 0.01 | 0.95 | intron | PLS1 | U |
| 6704 | chr2 | 200806812 | 200807037 | Small Intes. + Colon Epithelium | 0.02 | 0.94 | intron | TYWS | U |
| 6705 | chr7 | 11119454 | 19928 | Small Intes. + Colon Epithelium | 0.02 | 0.94 | intron | PHF14 | U |
| 6706 | chr3 | 67749797 | 67750071 | Small Intes. + Colon Epithelium | 0.02 | 0.93 | Intergenic | SUCLG2 | U |
| 6707 | chr21 | 290774031 | 29077476 | Small Intes. + Colon Epithelium | 0.02 | 0.92 | intron | MIR5009 | U |
| 6708 | chr17 | 26125232 | 26125407 | Small Intes. + Colon Epithelium | 0.02 | 0.92 | intron | NOS | U |
| 6709 | chr5 | 116183774 | 116183996 | Small Intes. + Colon Epithelium | 0.02 | 0.91 | Intergenic | SEMA6A | U |
| 6710 | chr13 | 22906573 | 22906832 | Small Intes. + Colon Epithelium | 0 | 0.89 | Intergenic | LINC00424 | U |
| 6711 | chr17 | 57813499 | 57813788 | Small Intes. + Colon Epithelium | 0.04 | 0.93 | intron | VMP1 | U |
| 6712 | chr11 | 128295328 | 128295628 | Small Intes. + Colon Epithelium | 0.04 | 0.93 | Intergenic | ETS1 | U |
| 6713 | chr5 | 160109768 | 160110199 | Small Intes. + Colon Epithelium | 0.01 | 0.9 | intron | ATP10B | U |
| 6714 | chr13 | 80016175 | 80016256 | Small Intes. + Colon Epithelium | 0.02 | 0.9 | Intergenic | RBM26-AS1 | U |
| 6715 | chr6 | 134689461 | 134689735 | Small Intes. + Colon Epithelium | 0.04 | 0.92 | Intergenic | LOC154092 | U |
| 6716 | chr15 | 83459321 | 83459397 | Small Intes. + Colon Epithelium | 0.02 | 0.89 | intron | FSDZ | U |
| 6717 | chr16 | 5113797 | 5113894 | Small Intes. + Colon Epithelium | 0.02 | 0.89 | intron | C16orf89 | U |
| 6718 | chr18 | 47040451 | 47040573 | Small Intes. + Colon Epithelium | 0.04 | 0.91 | Intergenic | RPL17-C18orf32 | U |
| 6719 | chr12 | 71547960 | 71548145 | Small Intes. + Colon Epithelium | 0.03 | 0.9 | intron | TSPAN8 | U |
| 6720 | chr1 | 207120022 | 207120270 | Small Intes. + Colon Epithelium | 0.04 | 0.91 | promoter-TSS | PIGR | U |
| 6721 | chr16 | 81606499 | 81606778 | Small Intes. + Colon Epithelium | 0.05 | 0.92 | intron | CMIP | U |
| 6722 | chr12 | 94464329 | 94464633 | Small Intes. + Colon Epithelium | 0.01 | 0.88 | Intergenic | PLXNC1 | U |
| 6723 | chr10 | 1304003261 | 130400612 | Small Intes. + Colon Epithelium | 0.02 | 0.88 | Intergenic | MKI67 | U |
| 6724 | chr2 | 122101306 | 122101610 | Small Intes. + Colon Epithelium | 0.07 | 0.93 | intron | CLASP1 | U |
| 6725 | chr12 | 14848427 | 14848820 | Small Intes. + Colon Epithelium | 0.02 | 0.88 | intron | GUCY2C | U |
| 6726 | chr17 | 2345980 | 2346376 | Small Intes. + Colon Epithelium | 0.07 | 0.93 | intron | METTL16 | U |
| 6727 | chr13 | 100339324 | 100339757 | Small Intes. + Colon Epithelium | 0.02 | 0.88 | intron | CLYBL | U |
| 6728 | chr19 | 2305151 | 2305259 | Small Intes. + Colon Epithelium | 0.02 | 0.87 | intron | LINGO3 | U |
| 6729 | chr4 | 27058679 | 27058847 | Small Intes. + Colon Epithelium | 0.01 | 0.86 | Intergenic | STIM2 | U |
| 6730 | chr2 | 47587863 | 47588077 | Small Intes. + Colon Epithelium | 0.06 | 0.91 | Intergenic | EPCAM | U |
| 6731 | chr10 | 12482435 | 12482701 | Small Intes. + Colon Epithelium | 0.1 | 0.95 | intron | CAMK1D | U |
| 6732 | chr5 | 177768752 | 177769022 | Small Intes. + Colon Epithelium | 0.02 | 0.87 | Intron | COL23A1 | U |
| 6733 | chr4 | 148614055 | 148614327 | Small Intes. + Colon Epithelium | 0.04 | 0.89 | Intergenic | PRMT10 | U |
| 6734 | chr7 | 101344576 | 101344950 | Small Intes. + Colon Epithelium | 0.04 | 0.89 | Intergenic | MYL10 | U |
| 6735 | chr2 | 169486471 | 169486750 | Small Intes. + Colon Epithelium | 0.09 | 0.93 | intron | CERS6 | U |
| 6736 | chr7 | 30296022 | 30296314 | Small Intes. + Colon Epithelium | 0.1 | 0.94 | Intergenic | ZNRF2 | U |
| 6737 | chr17 | 4948401 | 4948849 | Small Intes. + Colon Epithelium | 0.08 | 0.92 | Intergenic | SLC52A1 | U |
| 6738 | chr7 | 98844527 | 98844620 | Small Intes. + Colon Epithelium | 0.01 | 0.84 | Intergenic | MYH16 | U |
| 6739 | chr10 | 13379633 | 13379831 | Small Intes. + Colon Epithelium | 0.1 | 0.93 | intron | SEPHS1 | U |
| 6740 | chr10 | 59934716 | 59934921 | Small Intes. + Colon Epithelium | 0.02 | 0.85 | Intergenic | IPMK | U |
| 6741 | chr1 | 95082540 | 95082803 | Small Intes. + Colon Epithelium | 0.04 | 0.87 | Intergenic | F3 | U |
| 6742 | chr16 | 58349438 | 58349859 | Small Intes. + Colon Epithelium | 0.08 | 0.91 | Intergenic | PRSSS4 | U |
| 6743 | chr9 | 136837801 | 136837894 | Small Intes. + Colon Epithelium | 0.04 | 0.86 | intron | VAV2 | U |
| 6744 | chr17 | 79523884 | 79524201 | Small Intes. + Colon Epithelium | 0.06 | 0.88 | TTS | NPLOC4 | U |
| 6745 | chr4 | 175330079 | 175330561 | Small Intes. + Colon Epithelium | 0.04 | 0.86 | Intergenic | MIR4276 | U |
| 6746 | chr2 | 232768944 | 232769094 | Small Intes. + Colon Epithelium | 0.04 | 0.85 | Intergenic | MIR1471 | U |
| 6747 | chr21 | 43521772 | 43521926 | Small Intes. + Colon Epithelium | 0.08 | 0.89 | TTS | C21orf128 | U |
| 6748 | chr20 | 524553483 | 52455607 | Small Intes. + Colon Epithelium | 0.1 | 0.91 | Intergenic | SUMO1P1 | U |
| 6749 | chr19 | 47718897 | 47719372 | Small Intes. + Colon Epithelium | 0.1 | 0.91 | Intergenic | MIR3190 | U |
| 6750 | chr6 | 150253324 | 150253374 | Small Intes. + Colon Epithelium | 0.08 | 0.88 | Intergenic | RAET1G | U |
| 6751 | chr1 | 26503371 | 26503425 | Small Intes. + Colon Epithelium | 0.12 | 0.92 | promoter-TSS | CNKSR1 | U |
| 6752 | chr17 | 47060475 | 47060748 | Small Intes. + Colon Epithelium | 0.02 | 0.82 | Intergenic, Intergeni [symbol] ; | IGF28P1, GIP | U |
| 6753 | chr16 | 70318163 | 70318437 | Small Intes. + Colon Epithelium | 0.12 | 0.92 | Intron | AARS | U |
| 6754 | chr7 | 6406310 | 6406622 | Small Intes. + Colon Epithelium | 0.06 | 0.86 | Intergenic | RAC1 | U |
| 6755 | chr15 | 62870563 | 62870988 | Small Intes. + Colon Epithelium | 0.12 | 0.92 | Intergenic | MGC15885 | U |
| 6756 | chr10 | 30847753 | 30848064 | Small Intes. + Colon Epithelium | 0.12 | 0.9 | Intergenic | LYZL2 | U |
| 6757 | chr12 | 122590823 | 122591264 | Small Intes. + Colon Epithelium | 0.14 | 0.91 | intron | MLXIP | U |
| 6758 | chr11 | 118724393 | 118724487 | Small Intes. + Colon Epithelium | 0.18 | 0.93 | Intergenic | CXCR5 | U |
| 6759 | chr2 | 232532581 | 232532956 | Small Intes. + Colon Epithelium | 0.19 | 0.94 | Intergenic | PTMA | U |
| 6760 | chr22 | 46587735 | 46588099 | Small Intes. + Colon Epithelium | 0.26 | 0.95 | intron | PPARA | U |
| 6761 | chr10 | 99481763 | 99481814 | Small Intes. + Colon Epithelium | 0.01 | 0.95 | Intergenic | MARVELD1 | U |
| 6762 | chr19 | 2278616 | 2278708 | Small Intes. + Colon Epithelium | 0.01 | 0.94 | exon | C19orf35 | U |
| 6763 | chr14 | 55668352 | 55668536 | Small Intes. + Colon Epithelium | 0.01 | 0.93 | Intergenic | DLGAP5 | U |
| 6764 | chr19 | 39305863 | 39306273 | Small Intes. + Colon Epithelium | 0.01 | 0.93 | TTS, exon | ECH1 | U |
| 6765 | chr9 | 139497804 | 139498020 | Small Intes. + Colon Epithelium | 0.02 | 0.94 | Intergenic | EGFL7 | U |
| 6766 | chr6 | 2309359 | 2309763 | Small Intes. + Colon Epithelium | 0.03 | 0.95 | intron | LOC100508120 | U |
| 6767 | chr3 | 43655182 | 43655641 | Small Intes. + Colon Epithelium | 0.02 | 0.93 | intron | ANO10 | U |
| 6768 | chr17 | 80535107 | 80535364 | Small Intes. + Colon Epithelium | 0.06 | 0.96 | intron | FOXK2 | U |
| 6769 | chr17 | 80535398 | 80535833 | Small Intes. + Colon Epithelium | 0.05 | 0.95 | intron | FOXK2 | U |
| 6770 | chr20 | 57009379 | 57009561 | Small Intes. + Colon Epithelium | 0.04 | 0.93 | intron | VAPB | U |
| 6771 | chr10 | 1166110 | 1166313 | Small Intes. + Colon Epithelium | 0.07 | 0.96 | intron | WDR37 | U |
| 6772 | chr11 | 61148275 | 61148746 | Small Intes. + Colon Epithelium | 0.06 | 0.94 | Intergenic | TMEM216 | U |
| 6773 | chr1 | 53164855 | 53164931 | Small Intes. + Colon Epithelium | 0.06 | 0.93 | promoter-TSS | SELRC1 | U |
| 6774 | chr22 | 31062373 | 31062593 | Small Intes. + Colon Epithelium | 0.06 | 0.93 | intron | DUSP18 | U |
| 6775 | chr22 | 31076221 | 31076480 | Small Intes. + Colon Epithelium | 0.04 | 0.9 | Intergenic | DUSP18 | U |
| 6776 | chr11 | 6398940 | 6399034 | Small Intes. + Colon Epithelium | 0.09 | 0.93 | Intergenic | SMPD1 | U |
| 6777 | chr14 | 24611688 | 24611865 | Small Intes. + Colon Epithelium | 0.09 | 0.92 | promoter-TSS | EMC9 | U |
| 6778 | chr1 | 78458500 | 78458704 | Small Intes. + Colon Epithelium | 0.03 | 0.95 | Intergenic | DNAJB4 | U |
| 6779 | chr2 | 8849893 | 8850067 | Small Intes. + Colon Epithelium | 0.01 | 0.92 | Intergenic | ID2 | U |
| 6780 | chr2 | 47587206 | 47587387 | Small Intes. + Colon Epithelium | 0.02 | 0.92 | Intergenic | EPCAM | U |
| 6781 | chr22 | 20857395 | 20857653 | Small Intes. + Colon Epithelium | 0.03 | 0.93 | Intergenic | MED15 | U |
| 6782 | chr15 | 40645207 | 40645581 | Small Intes. + Colon Epithelium | 0.01 | 0.91 | intron | PHGR1 | U |
| 6783 | chr2 | 97427379 | 97427487 | Small Intes. + Colon Epithelium | 0.01 | 0.9 | exon | CNNM4 | U |
| 6784 | chr2 | 106959820 | 106960122 | Small Intes. + Colon Epithelium | 0.01 | 0.9 | Intergenic | PLGLA | U |
| 6785 | chr5 | 151251315 | 151251432 | Small Intes. + Colon Epithelium | 0.03 | 0.91 | intron | GLRA1 | U |
| 6786 | chr17 | 17466693 | 17467012 | Small Intes. + Colon Epithelium | 0.06 | 0.94 | intron | PEMT | U |
| 6787 | chr14 | 73238101 | 73238561 | Small Intes. + Colon Epithelium | 0.02 | 0.9 | intron | DPF3 | U |
| 6788 | chr20 | 42852813 | 42852870 | Small Intes. + Colon Epithelium | 0.04 | 0.91 | intron | LOC100505783 | U |
| 6789 | chr2 | 28718664 | 28718829 | Small Intes. + Colon Epithelium | 0.03 | 0.9 | promoter-TSS | PLB1 | U |
| 6790 | chr9 | 112069228 | 112069552 | Small Intes. + Colon Epithelium | 0.03 | 0.9 | intron | EPB41L4B | U |
| 6791 | chr17 | 73613196 | 73613594 | Small Intes. + Colon Epithelium | 0.02 | 0.89 | intron | MYO158 | U |
| 6792 | chr17 | 77074568 | 77075062 | Small Intes. + Colon Epithelium | 0.04 | 0.91 | intron | ENGASE | U |
| 6793 | chr9 | 18683283 | 18683451 | Small Intes. + Colon Epithelium | 0.04 | 0.9 | intron | ADAMTSL1 | U |
| 6794 | chr6 | 12262875 | 12263062 | Small Intes. + Colon Epithelium | 0.03 | 0.89 | Intergenic | EDN1 | U |
| 6795 | chr4 | 2038234 | 2038431 | Small Intes. + Colon Epithelium | 0.01 | 0.87 | Intergenic | C4orf48 | U |
| 6796 | chr20 | 52285405 | 52285721 | Small Intes. + Colon Epithelium | 0.03 | 0.89 | Intergenic | ZNF217 | U |
| 6797 | chr2 | 239320905 | 239321299 | Small Intes. + Colon Epithelium | 0.08 | 0.94 | Intergenic | ASB1 | U |
| 6798 | chr9 | 79345539 | 79345600 | Small Intes. + Colon Epithelium | 0.02 | 0.87 | intron | PRUNE2 | U |
| 6799 | chr11 | 6398960 | 6399035 | Small Intes. + Colon Epithelium | 0.08 | 0.93 | Intergenic | SMPD1 | U |
| 6800 | chr20 | 42982934 | 42983084 | Small Intes. + Colon Epithelium | 0.02 | 0.87 | Intergenic | R3HDML | U |
| 6801 | chr20 | 38304946 | 38305151 | Small Intes. + Colon Epithelium | 0.02 | 0.87 | Intergenic | LOC339568 | U |
| 6802 | chr1 | 3431025 | 3431253 | Small Intes. + Colon Epithelium | 0.04 | 0.89 | intron, exon | MEGF6, MEGF6 | U |
| 6803 | chr9 | 110368576 | 110368851 | Small Intes. + Colon Epithelium | 0.02 | 0.87 | Intergenic | KLF4 | U |
| 6804 | chr1 | 6422485 | 6422838 | Small Intes. + Colon Epithelium | 0.05 | 0.9 | intron | ACOT7 | U |
| 6805 | chr19 | 39306298 | 39306385 | Small Intes. + Colon Epithelium | 0.02 | 0.86 | exon, intron | ECH1, ECH1 | U |
| 6806 | chr10 | 97322759 | 97322853 | Small Intes. + Colon Epithelium | 0.01 | 0.85 | Intergenic | SORBS1 | U |
| 6807 | chr20 | 49969364 | 49969486 | Small Intes. + Colon Epithelium | 0.09 | 0.93 | Intergenic | MIR3194 | U |
| 6808 | chr9 | 114247470 | 114247605 | Small Intes. + Colon Epithelium | 0.09 | 0.93 | promoter-TSS | KIAA0368 | U |
| 6809 | chr19 | 4054373 | 4054680 | Small Intes. + Colon Epithelium | 0.09 | 0.93 | exon | ZBTB7A | U |
| 6810 | chr5 | 149547488 | 149547864 | Small Intes. + Colon Epithelium | 0.01 | 0.85 | intron | CDX1 | U |
| 6811 | chr22 | 25324641 | 25324754 | Small Intes. + Colon Epithelium | 0.02 | 0.85 | Intergenic | TMEM211 | U |
| 6812 | chr19 | 552942 | 553082 | Small Intes. + Colon Epithelium | 0.02 | 0.85 | Intergenic | GZMM | U |
| 6813 | chr4 | 965124 | 965325 | Small Intes. + Colon Epithelium | 0.08 | 0.9 | intron | DGKQ | U |
| 6814 | chr7 | 1563550 | 1563709 | Small Intes. + Colon Epithelium | 0.02 | 0.82 | Intergenic | MAFK | U |
| 6815 | chr14 | 105723681 | 105723909 | Small Intes. + Colon Epithelium | 0.14 | 0.94 | intron | BRF1 | U |
| 6816 | chr4 | 1015911 | 1016203 | Small Intes. + Colon Epithelium | 0.14 | 0.94 | exon, intron | FGFRL1, FGFRL1 | U |
| 6817 | chr11 | 864528 | 864847 | Small Intes. + Colon Epithelium | 0.1 | 0.9 | intron | TSPAN4 | U |
| 6818 | chr20 | 42982573 | 42982873 | Small Intes. + Colon Epithelium | 0.02 | 0.81 | Intergenic | R3HDMI | U |
| 6819 | chr10 | 74451042 | 74451160 | Small Intes. + Colon Epithelium | 0.12 | 0.9 | promoter-TSS | MCU | U |
| 6820 | chr6 | 71121859 | 71122005 | Small Intes. + Colon Epithelium | 0.16 | 0.94 | Intergenic | FAM135A | U |
| 6821 | chr6 | 42521871 | 42521982 | Small Intes. + Colon Epithelium | 0.96 | 0.15 | Intergenic | UBR2 | M |
| 6822 | chr10 | 112838797 | 112838831 | Small Intes. + Colon Epithelium | 0.96 | 0.19 | exon | ADRA2A | M |
| 6823 | chr2 | 202900483 | 202900532 | Small Intes. + Colon Epithelium | 0.92 | 0.21 | exon | FZD7 | M |
| 6824 | chr9 | 140189496 | 140189574 | Small Intes. + Colon Epithelium | 0.78 | 0.07 | Intergenic | NRARP | M |
| 6825 | chr19 | 13813350 | 13813427 | Small Intes. + Colon Epithelium | 0.85 | 0.2 | Intergenic | CCDC130 | M |
| 6826 | chr4 | 94755859 | 94755934 | Small Intes. + Colon Epithelium | 0.96 | 0.08 | Intergenic | ATOH1 | M |
| 6827 | chr2 | 114034961 | 114035252 | Small Intes. + Colon Epithelium | 0.93 | 0.08 | intron | PAX8 | M |
| 6828 | chr1 | 226814277 | 226814420 | Small Intes. + Colon Epithelium | 0.87 | 0.03 | Intergenic | C1orf95 | M |
| 6829 | chr4 | 94755553 | 94755790 | Small Intes. + Colon Epithelium | 0.96 | 0.12 | Intergenic | ATOH1 | M |
| 6830 | chr10 | 112838336 | 112838406 | Small Intes. + Colon Epithelium | 0.96 | 0.13 | exon | ADRAZA | M |
| 6831 | chr6 | 26017646 | 26018119 | Small Intes. + Colon Epithelium | 0.93 | 0.1 | exon | HIST1H1A | M |
| 6832 | chr2 | 114035273 | 114035466 | Small Intes. + Colon Epithelium | 0.94 | 0.13 | intron | PAX8 | M |
| 6833 | chr2 | 114034646 | 114034958 | Small Intes. + Colon Epithelium | 0.92 | 0.11 | intron | PAX8 | M |
| 6834 | chr3 | 194118116 | 194118190 | Small Intes. + Colon Epithelium | 0.92 | 0.12 | exon | GP5 | M |
| 6835 | chr10 | 112838475 | 112838642 | Small Intes. + Colon Epithelium | 0.96 | 0.16 | exon | ADRA2A | M |
| 6836 | chr2 | 25500163 | 25500287 | Small Intes. + Colon Epithelium | 0.92 | 0.13 | intron | DNMT3A | M |
| 6837 | chr8 | 27449792 | 27450108 | Small Intes. + Colon Epithelium | 0.84 | 0.05 | Intergenic | CLU | M |
| 6838 | chr2 | 233793224 | 233793418 | Small Intes. + Colon Epithelium | 0.92 | 0.15 | promoter-TSS | NGEF | M |
| 6839 | chr7 | 329232 | 329477 | Small Intes. + Colon Epithelium | 0.93 | 0.16 | promoter-TSS | LOC100288524 | M |
| 6840 | chr18 | 45058273 | 45058297 | Small Intes. + Colon Epithelium | 0.9 | 0.16 | Intergenic | IER3IP1 | M |
| 6841 | chr10 | 112838267 | 112838334 | Small Intes. + Colon Epithelium | 0.96 | 0.22 | exon | ADRA2ZA | M |
| 6842 | chr14 | 21094173 | 21094366 | Small Intes. + Colon Epithelium | 0.84 | 0.12 | Intergenic | OR6S31 | M |
| 6843 | chr6 | 27473456 | 27473634 | Small Intes. + Colon Epithelium | 0.82 | 0.11 | Intergenic | ZNF184 | M |
| 6844 | chr19 | 37096487 | 37096817 | Small Intes. + Colon Epithelium | 0.74 | 0.03 | promoter-TSS, intro [symbol] | ZNF529, ZNF382 | M |
| 6845 | chr12 | 62585454 | 62585504 | Small Intes. + Colon Epithelium | 0.76 | 0.1 | exon | FAM19A2 | M |
| 6846 | chr13 | 108206339 | 108206532 | Colon + Heart Fibroblasts | 0.23 | 0.85 | intron | FAM155A | U |
| 6847 | chr2 | 75765726 | 75766101 | Colon + Heart Fibroblasts | 0.27 | 0.86 | intron | EVA1A | U |
| 6848 | chr1 | 67873294 | 67873605 | Colon + Heart Fibroblasts | 0.31 | 0.89 | exon | SERBP1 | U |
| 6849 | chr1 | 213887598 | 213887905 | Colon + Heart Fibroblasts | 0.31 | 0.87 | Intergenic | LINC00538 | U |
| 6850 | chr13 | 113185690 | 113185779 | Colon + Heart Fibroblasts | 0.36 | 0.91 | intron | TUBGCP3 | U |
| 6851 | chr7 | 40940368 | 90940824 | Colon + Heart Fibroblasts | 0.25 | 0.8 | Intergenic | FZD1 | U |
| 6852 | chr15 | 68705786 | 68706249 | Colon + Heart Fibroblasts | 0.33 | 0.88 | intron | ITGA11 | U |
| 6853 | chr8 | 28302585 | 28302736 | Colon + Heart Fibroblasts | 0.34 | 0.88 | intron | FBXO16 | U |
| 6854 | chr2 | 8110088 | 8110287 | Colon + Heart Fibroblasts | 0.31 | 0.85 | intron | LOC339788 | U |
| 6855 | chr4 | 70391691 | 70391750 | Colon + Heart Fibroblasts | 0.34 | 0.86 | Intergenic | UGT284 | U |
| 6856 | chr6 | 101175196 | 101175306 | Colon + Heart Fibroblasts | 0.38 | 0.9 | intron | ASCC3 | U |
| 6857 | chr11 | 8378249 | 8378404 | Colon + Heart Fibroblasts | 0.31 | 0.83 | Intergenic | LMO1 | U |
| 6858 | chr16 | 88953123 | 88953235 | Colon + Heart Fibroblasts | 0.35 | 0.86 | intron | CBFA2T3 | U |
| 6859 | chr10 | 1090408171 | 109041072 | Colon + Heart Fibroblasts | 0.31 | 0.82 | Intergenic | SORCS1 | U |
| 6860 | chr10 | 72989131 | 72989570 | Colon + Heart Fibroblasts | 0.34 | 0.84 | intron | UNC5B | U |
| 6861 | chr11 | 12816156 | 12816415 | Colon + Heart Fibroblasts | 0.37 | 0.85 | intron | TEAD1 | U |
| 6862 | chr5 | 39380163 | 39380582 | Colon + Heart Fibroblasts | 0.37 | 0.83 | Intron | DAB2 | U |
| 6863 | chr | 68415027 | 68415155 | Colon + Heart Fibroblasts | 0.35 | 0.8 | Intergenic | PIA1 | U |
| 6864 | chr14 | 96701161 | 96701223 | Colon + Heart Fibroblasts | 0.28 | 0.88 | intron | BDKRB2 | U |
| 6865 | chr2 | 33453062 | 33453168 | Colon + Heart Fibroblasts | 0.36 | 0.88 | intron | LTBP1 | U |
| 6866 | chr10 | 34370079 | 34370308 | Colon + Heart Fibroblasts | 0.38 | 0.88 | Intergenic | LINC00838 | U |
| 6867 | chr3 | 10997594 | 10997775 | Colon + Heart Fibroblasts | 0.32 | 0.79 | Intergenic | SLC6A | U |
| 6868 | chr20 | 59234431 | 59234489 | Colon + Heart Fibroblasts | 0.39 | 0.85 | Intergenic | MIR4533 | U |
| 6869 | chr5 | 3269626 | 3269743 | Colon + Heart Fibroblasts | 0.43 | 0.8 | Intergenic | LOC285577 | U |
| 6870 | chr5 | 38059911 | 38060133 | Colon + Heart Fibroblasts | 0.24 | 0.87 | Intergenic | GDNF | U |
| 6871 | chr21 | 46994499 | 46994773 | Colon + Heart Fibroblasts | 0.3 | 0.84 | Intergenic | SLC19A1 | U |
| 6872 | chr7 | 134136965 | 134137121 | Colon + Heart Fibroblasts | 0.34 | 0.87 | intron | AKR181 | U |
| 6873 | chr14 | 39474369 | 39474677 | Colon + Heart Fibroblasts | 0.24 | 0.89 | Intergenic | LINC00639 | U |
| 6874 | chr6 | 14865485 | 14865639 | Colon + Heart Fibroblasts | 0.24 | 0.88 | Intergenic | JARID2 | U |
| 6875 | chr20 | 31198437 | 31198668 | Colon + Heart Fibroblasts | 0.28 | 0.85 | Intergenic | LOC149950 | U |
| 6876 | chr1 | 54818464 | 54818653 | Colon + Heart Fibroblasts | 0.31 | 0.87 | intron | SSBP3 | U |
| 6877 | chr1 | 235973132 | 235973209 | Colon + Heart Fibroblasts | 0.32 | 0.88 | exon | LYST | U |
| 6878 | chr7 | 4119888 | 4120145 | Colon + Heart Fibroblasts | 0.39 | 0.85 | intron | SDK1 | U |
| 6879 | chr9 | 137393746 | 137393832 | Colon + Heart Fibroblasts | 0.65 | 0.16 | Intergenic | MIR4669 | M |
| 6880 | chr4 | 174437547 | 174437671 | Colon + Heart Fibroblasts | 0.71 | 0.24 | Intergenic | HAND2 | M |
| 6881 | chr6 | 32063895 | 32063950 | Colon + Heart Fibroblasts | 0.72 | 0.29 | intron | TNXB | M |
| 6882 | chr3 | 1340940441 | 134094236 | Colon + Heart Fibroblasts | 0.58 | 0.15 | promoter-TSS | AMOTL2 | M |
| 6883 | chr1 | 1289240 | 1289556 | Colon + Heart Fibroblasts | 0.62 | 0.21 | intron | MXRA8 | M |
| 6884 | chr6 | 32064206 | 32064259 | Colon + Heart Fibroblasts | 0.63 | 0.25 | intron | TNXB | M |
| 6885 | chr9 | 137393398 | 137393625 | Colon + Heart Fibroblasts | 0.6 | 0.23 | Intergenic | MIR4669 | M |
| 6886 | chr1 | 233751029 | 233751089 | Colon + Heart Fibroblasts | 0.55 | 0.19 | intron | KCNK1 | M |
| 6887 | chr6 | 32064082 | 32064120 | Colon + Heart Fibroblasts | 0.62 | 0.28 | intron | TNXB | M |
| 6888 | chr22 | 45148085 | 45148197 | Colon + Heart Fibroblasts | 0.57 | 0.23 | promoter-TSS | ARHGAP8 | M |
| 6889 | chr2 | 220406860 | 220407000 | Colon + Heart Fibroblasts | 0.53 | 0.2 | intron | CHPP | M |
| 6890 | chr14 | 95757675 | 95757926 | Colon + Heart Fibroblasts | 0.56 | 0.23 | intron | CLMN | M |
| 6891 | chr21 | 46331292 | 46331607 | Colon + Heart Fibroblasts | 0.62 | 0.13 | intron | ITGB2 | M |
| 6892 | chr8 | 102505384 | 102505561 | Colon + Heart Fibroblasts | 0.6 | 0.16 | intron | GRHL2 | M |
| 6893 | chr19 | 31847840 | 31848086 | Colon + Heart Fibroblasts | 0.57 | 0.15 | Intergenic | TSHZ3 | M |
| 6894 | chr22 | 29400655 | 29400917 | Colon + Heart Fibroblasts | 0.59 | 0.17 | intron | ZNRF3 | M |
| 6895 | chr14 | 100126575 | 100126712 | Colon + Heart Fibroblasts | 0.61 | 0.21 | exon | HHIPL1 | M |
| 6896 | chr5 | 122422278 | 122422527 | Colon + Heart Fibroblasts | 0.53 | 0.18 | Intergenic | PRDM6 | M |
| 6897 | chr19 | 10077107 | 10077444 | Colon + Heart Fibroblasts | 0.56 | 0.21 | exon, intron | COLSA3, COL5A3 | M |
| 6898 | chr5 | 122434244 | 122434305 | Colon + Heart Fibroblasts | 0.53 | 0.22 | intron | PRDM6 | M |
| 6899 | chr13 | 103353210 | 103353268 | Cardiomyocytes + Skeletal + Smooth muscle cells | 0.21 | 0.89 | Intergenic | METTL21C | U |
| 6900 | chr7 | 139596699 | 139596859 | Cardiomyocytes + Skeletal + Smooth muscle cells | 0.19 | 0.85 | intron | TBXAS1 | U |
| 6901 | chr12 | 109182411 | 109182583 | Cardiomyocytes + Skeletal + Smooth muscle cells | 0.23 | 0.88 | exon | SSH1 | U |
| 6902 | chr3 | 194577074 | 194577478 | Cardiomyocytes + Skeletal + Smooth muscle cells | 0.23 | 0.87 | Intergenic | LOC100507391 | U |
| 6903 | chr6 | 154931253 | 154931684 | Cardiomyocytes + Skeletal + Smooth muscle cells | 0.25 | 0.89 | Intergenic | CNKSR3 | U |
| 6904 | chr3 | 75428327 | 75428518 | Cardiomyocytes + Skeletal + Smooth muscle cells | 0.2 | 0.81 | Intergenic | FAM86DP | U |
| 6905 | chr1 | 6125551 | 6125711 | Cardiomyocytes + Skeletal + Smooth muscle cells | 0.26 | 0.85 | intron | KCNAB2 | U |
| 6906 | chr1 | 208568164 | 208568368 | Cardiomyocytes + Skeletal + Smooth muscle cells | 0.25 | 0.82 | Intergenic | PLXNA2 | U |
| 6907 | chr12 | 94659279 | 94659540 | Cardiomyocytes + Skeletal + Smooth muscle cells | 0.33 | 0.82 | intron | PLXNC1 | U |
| 6908 | chr3 | 14564094 | 14564245 | Cardiomyocytes + Skeletal + Smooth muscle cells | 0.2 | 0.85 | intron | GRIP2 | U |
| 6909 | chr4 | 169561224 | 169561408 | Cardiomyocytes + Skeletal + Smooth muscle cells | 0.34 | 0.91 | intron | PALLD | U |
| 6910 | chr1 | 210407630 | 210407821 | Cardiomyocytes + Skeletal + Smooth muscle cells | 0.59 | 0.11 | promoter-TSS | SERTAD4-AS1 | U |
| 6911 | chr1 | 109104511 | 109104644 | Cardiomyocytes + Skeletal + Smooth muscle cells | 0.59 | 0.16 | intron | FAM102B | U |
| 6912 | chr17 | 65517833 | 65517989 | Skeletal + Smooth muscle cells | 0.21 | 0.87 | intron | PITPNC1 | U |
| 6913 | chr4 | 129315804 | 129316237 | Skeletal + Smooth muscle cells | 0.29 | 0.87 | Intergenic | PGRMC2 | U |
| 6914 | chr11 | 39346878 | 39347309 | Skeletal + Smooth muscle cells | 0.24 | 0.82 | Intergenic | LRRC4C | U |
| 6915 | chr12 | 124611762 | 124611965 | Skeletal + Smooth muscle cells | 0.35 | 0.91 | intron | ZNF664-FAM101A | U |
| 6916 | chr7 | 36254259 | 36254475 | Skeletal + Smooth muscle cells | 0.33 | 0.88 | intron | EEPD1 | U |
| 6917 | chr12 | 65100782 | 65101169 | Skeletal + Smooth muscle cells | 0.35 | 0.9 | Intergenic | IGNS | U |
| 6918 | chr17 | 80357575 | 80357722 | Skeletal + Smooth muscle cells | 0.28 | 0.83 | intron | OGFOD3 | U |
| 6919 | chrX | 9644602 | 9644654 | Skeletal + Smooth muscle cells | 0.37 | 0.9 | intron | TBL1X | U |
| 6920 | chr8 | 77690804 | 77691189 | Skeletal + Smooth muscle cells | 0.34 | 0.87 | intron | ZFHX4 | U |
| 6921 | chr7 | 33540721 | 33541122 | Skeletal + Smooth muscle cells | 0.37 | 0.89 | intron | BB59 | U |
| 6922 | chr7 | 139226844 | 139226943 | Skeletal + Smooth muscle cells | 0.27 | 0.78 | intron | CLEC2L | U |
| 6923 | chr2 | 51530026 | 51530321 | Skeletal + Smooth muscle cells | 0.34 | 0.84 | Intergenic | NRXN1 | U |
| 6924 | chr3 | 129817943 | 129818176 | Skeletal + Smooth muscle cells | 0.35 | 0.84 | TTS | ALG1L2 | U |
| 6925 | chr1 | 183701573 | 183701994 | Skeletal + Smooth muscle cells | 0.36 | 0.85 | intron | RGL1 | U |
| 6926 | chr2 | 240228774 | 240228845 | Skeletal + Smooth muscle cells | 0.4 | 0.88 | intron | HDAC4 | U |
| 6927 | chr11 | 132582808 | 132582929 | Skeletal + Smooth muscle cells | 0.38 | 0.86 | Intron | OPCML | U |
| 6928 | chr1 | 114525871 | 114526074 | Skeletal + Smooth muscle cells | 0.34 | 0.8 | Intergenic | OLFML3 | U |
| 6929 | chr7 | 74245167 | 74245481 | Skeletal + Smooth muscle cells | 0.34 | 0.6 | intron | GTF2IRD2 | U |
| 6930 | chr7 | 68683058 | 68683273 | Skeletal + Smooth muscle cells | 0.28 | 0.81 | Intergenic | AUTS2 | U |
| 6931 | chr20 | 24763072 | 24763358 | Skeletal + Smooth muscle cells | 0.29 | 0.83 | Intergenic | CST7 | U |
| 6932 | chr8 | 26048065 | 26048282 | Skeletal + Smooth muscle cells | 0.69 | 0.15 | Intergenic | PPP2R2A | M |
| 6933 | chr6 | 75794646 | 75795088 | Skeletal + Smooth muscle cells | 0.63 | 0.13 | exon | COL12A1 | M |
| 6934 | chr20 | 3654323 | 3654392 | Skeletal + Smooth muscle cells | 0.66 | 0.23 | intron, exon | ADAM33, ADAM33 | M |
| 6935 | chr9 | 137393398 | 137393625 | Skeletal + Smooth muscle cells | 0.65 | 0.22 | Intergenic | MIR4669 | M |
| 6936 | chr2 | 220406860 | 220407000 | Skeletal + Smooth muscle cells | 0.6 | 0.2 | intron | CHPF | M |
| 6937 | chr20 | 3653191 | 3653331 | Skeletal + Smooth muscle cells | 0.72 | 0.13 | exon | ADAM33 | M |
| 6938 | chr20 | 3653350 | 3653771 | Skeletal + Smooth muscle cells | 0.62 | 0.1 | intron, exon | ADAM33, ADAM33 | M |
| 6939 | chr20 | 3653926 | 3654003 | Skeletal + Smooth muscle cells | 0.64 | 0.21 | intron, exon | ADAM33, ADAM33 | M |
| 6940 | chr12 | 124692480 | 124692529 | Heart Cardiomyocytes + Fibroblasts | 0.04 | 0.95 | intron | ZNF664 [symbol] | U |
| 6941 | chr2 | 204995100 | 204995147 | Heart Cardiomyocytes + Fibroblasts | 0.09 | 0.94 | Intergenic | ICOS | U |
| 6942 | chr18 | 6143914 | 6144023 | Heart Cardiomyocytes + Fibroblasts | 0.09 | 0.93 | intron | L3MBTL4 | U |
| 6943 | chr2 | 233839348 | 233839401 | Heart Cardiomyocytes + Fibroblasts | 0.06 | 0.89 | exon | NGEF | U |
| 6944 | chr13 | 30098260 | 30098504 | Heart Cardiomyocytes + Fibroblasts | 0.1 | 0.93 | exon | ISLC7A1 | U |
| 6945 | chr10 | 52440841 | 52441024 | Heart Cardiomyocytes + Fibroblasts | 0.06 | 0.88 | Intergenic | SGMS1 | U |
| 6946 | chr11 | 116728737 | 116729029 | Heart Cardiomyocytes + Fibroblasts | 0.06 | 0.86 | exon | SIK3 | U |
| 6947 | chr7 | 150489478 | 150489834 | Heart Cardiomyocytes + Fibroblasts | 0.08 | 0.88 | intron | TMEM176B | U |
| 6948 | chr1 | 205811634 | 205811974 | Heart Cardiomyocytes + Fibroblasts | 0.09 | 0.88 | exon, intron | PM20D1 | U |
| 6949 | chr8 | 36788587 | 36788945 | Heart Cardiomyocytes + Fibroblasts | 0.12 | 0.9 | intron | KCNU1 | U |
| 6950 | chr6 | 164265488 | 164265690 | Heart Cardiomyocytes + Fibroblasts | 0.15 | 0.91 | Intergenic | QKI | U |
| 6951 | chr17 | 78846018 | 78846244 | Heart Cardiomyocytes + Fibroblasts | 0.11 | 0.86 | intron | RPTOR | U |
| 6952 | chr7 | 26654405 | 26654811 | Heart Cardiomyocytes + Fibroblasts | 0.17 | 0.92 | Intergenic | C7orf71 | U |
| 6953 | chr6 | 164526953 | 164527096 | Heart Cardiomyocytes + Fibroblasts | 0.12 | 0.85 | Intergenic | QKI | U |
| 6954 | chr1 | 44715613 | 44715807 | Heart Cardiomyocytes + Fibroblasts | 0.17 | 0.9 | intron | ERI3 | U |
| 6955 | chr16 | 4014051 | 4014252 | Heart Cardiomyocytes + Fibroblasts | 0.16 | 0.89 | exon | ADCY9 | U |
| 6956 | chr21 | 44738312 | 44738466 | Heart Cardiomyocytes + Fibroblasts | 0.21 | 0.93 | Intergenic | SIK1 | U |
| 6957 | chr6 | 106512194 | 106512445 | Heart Cardiomyocytes + Fibroblasts | 0.23 | 0.94 | Intergenic | PRDM1 | U |
| 6958 | chr17 | 74694601 | 74695045 | Heart Cardiomyocytes + Fibroblasts | 0.22 | 0.91 | intron | MXRA7 | U |
| 6959 | chr4 | 3912014 | 3912191 | Heart Cardiomyocytes + Fibroblasts | 0.17 | 0.86 | Intergenic | FAM86EP | U |
| 6960 | chr10 | 86919042 | 86919080 | Heart Cardiomyocytes + Fibroblasts | 0.1 | 0.92 | Intergenic | GRID1-AS1 | U |
| 6961 | chr12 | 124692706 | 124692822 | Heart Cardiomyocytes + Fibroblasts | 0.04 | 0.86 | intron | ZNF664-FAM101A | U |
| 6962 | chr4 | 183936178 | 183936350 | Heart Cardiomyocytes + Fibroblasts | 0.06 | 0.88 | Intergenic | FAM92A1P2 | U |
| 6963 | chr2 | 204994800 | 204995012 | Heart Cardiomyocytes + Fibroblasts | 0.04 | 0.86 | Intergenic | ICOS | U |
| 6964 | chr10 | 132942326 | 132942369 | Heart Cardiomyocytes + Fibroblasts | 0.06 | 0.87 | intron | TCERG1L | U |
| 6965 | chr8 | 61350445 | 61350879 | Heart Cardiomyocytes + Fibroblasts | 0.1 | 0.88 | Intergenic | RAB2A | U |
| 6966 | chr3 | 64579929 | 64580059 | Heart Cardiomyocytes + Fibroblasts | 0.12 | 0.89 | exon | ADAMTS9 | U |
| 6967 | chr10 | 68943889 | 68944213 | Heart Cardiomyocytes + Fibroblasts | 0.12 | 0.89 | intron | CTNNA3 | U |
| 6968 | chr10 | 132941935 | 132942020 | Heart Cardiomyocytes + Fibroblasts | 0.13 | 0.89 | intron | TCERG1L | U |
| 6969 | chr17 | 74365884 | 74366060 | Heart Cardiomyocytes + Fibroblasts | 0.07 | 0.83 | Intergenic | SPHK1 | U |
| 6970 | chr6 | 74281208 | 74281364 | Heart Cardiomyocytes + Fibroblasts | 0.14 | 0.89 | Intergenic | EEF1A1 | U |
| 6971 | chr6 | 56485141 | 56485569 | Heart Cardiomyocytes + Fibroblasts | 0.15 | 0.89 | exon | DST | U |
| 6972 | chr1 | 30393725 | 30393757 | Heart Cardiomyocytes + Fibroblasts | 0.13 | 0.86 | Intergenic | MATN1-AS1 | U |
| 6973 | chr8 | 57111069 | 57111218 | Heart Cardiomyocytes + Fibroblasts | 0.12 | 0.85 | intron | PLAG1 | U |
| 6974 | chr1 | 19383637 | 19383929 | Heart Cardiomyocytes + Fibroblasts | 0.13 | 0.86 | Intergenic | IFFO2 | U |
| 6975 | chr14 | 96351106 | 96351163 | Heart Cardiomyocytes + Fibroblasts | 0.15 | 0.87 | intron | LINC00617 | U |
| 6976 | chr10 | 77495522 | 77495676 | Heart Cardiomyocytes + Fibroblasts | 0.19 | 0.91 | Intergenic | C10orf11 | U |
| 6977 | chr18 | 46268834 | 46269008 | Heart Cardiomyocytes + Fibroblasts | 0.15 | 0.87 | intron | CTIF | U |
| 6978 | chr1 | 48231156 | 48231353 | Heart Cardiomyocytes + Fibroblasts | 0.15 | 0.87 | exon | TRABD2B | U |
| 6979 | chr6 | 110733693 | 110733896 | Heart Cardiomyocytes + Fibroblasts | 0.12 | 0.84 | intron | DDO | U |
| 6980 | chr3 | 14598605 | 14598779 | Heart Cardiomyocytes + Fibroblasts | 0.17 | 0.88 | Intergenic | GRIP2 | U |
| 6981 | chr17 | 41430132 | 41430356 | Heart Cardiomyocytes + Fibroblasts | 0.14 | 0.85 | Intergenic | LOC100130581 | U |
| 6982 | chr13 | 74557243 | 74557607 | Heart Cardiomyocytes + Fibroblasts | 0.18 | 0.89 | intron | KLF12 | U |
| 6983 | chr5 | 107585052 | 107585456 | Heart Cardiomyocytes + Fibroblasts | 0.18 | 0.89 | intron | FBXL17 | U |
| 6984 | chr3 | 4714755 | 4714902 | Heart Cardiomyocytes + Fibroblasts | 0.16 | 0.86 | exon | ITPR1 | U |
| 6985 | chr10 | 78203058 | 78203213 | Heart Cardiomyocytes + Fibroblasts | 0.24 | 0.94 | intron | C10orf11 | U |
| 6986 | chr1 | 81845626 | 81845783 | Heart Cardiomyocytes + Fibroblasts | 0.16 | 0.86 | Intergenic | LPHN2 | U |
| 6987 | chr5 | 147832067 | 147832514 | Heart Cardiomyocytes + Fibroblasts | 0.2 | 0.9 | intron | HTR4 | U |
| 6988 | chr5 | 124133353 | 124133751 | Heart Cardiomyocytes + Fibroblasts | 0.22 | 0.91 | Intergenic | ZNF608 | U |
| 6989 | chr11 | 131369292 | 131369352 | Heart Cardiomyocytes + Fibroblasts | 0.17 | 0.85 | intron | NTM | U |
| 6990 | chr10 | 88973836 | 88973928 | Heart Cardiomyocytes + Fibroblasts | 0.26 | 0.94 | Intergenic | FAM22A | U |
| 6991 | chr5 | 136617762 | 136617903 | Heart Cardiomyocytes + Fibroblasts | 0.18 | 0.86 | intron | SPOCK1 | U |
| 6992 | chr10 | 112444634 | 112444853 | Heart Cardiomyocytes + Fibroblasts | 0.17 | 0.85 | intron | RBM20 | U |
| 6993 | chr4 | 182193747 | 182194100 | Heart Cardiomyocytes + Fibroblasts | 0.12 | 0.8 | Intergenic | LINC00290 | U |
| 6994 | chr1 | 209815883 | 209815941 | Heart Cardiomyocytes + Fibroblasts | 0.22 | 0.89 | Intron | LAMB3 | U |
| 6995 | chr5 | 1121519 | 1121593 | Heart Cardiomyocytes + Fibroblasts | 0.22 | 0.89 | Intergenic | SLC12A7 | U |
| 6996 | chr2 | 202874350 | 202874621 | Heart Cardiomyocytes + Fibroblasts | 0.2 | 0.87 | Intergenic | FZD7 | U |
| 6997 | chr2 | 108429756 | 108430094 | Heart Cardiomyocytes + Fibroblasts | 0.18 | 0.85 | Intergenic | LOC729121 | U |
| 6998 | chr15 | 76052866 | 760533541 | Heart Cardiomyocytes + Fibroblasts | 0.2 | 0.87 | Intergenic, TTS | MIR4313, MIR4313 | U |
| 6999 | chr15 | 100472896 | 100472939 | Heart Cardiomyocytes + Fibroblasts | 0.22 | 0.88 | Intergenic | DNM1P46 | U |
| 7000 | chr10 | 88973639 | 88973790 | Heart Cardiomyocytes + Fibroblasts | 0.26 | 0.92 | Intergenic | FAM22A | U |
| 7001 | chr1 | 2285565273 | 228556588 | Heart Cardiomyocytes + Fibroblasts | 0.24 | 0.89 | exon | OBSCN | U |
| 7002 | chr1 | 13861838 | 13862135 | Heart Cardiomyocytes + Fibroblasts | 0.18 | 0.83 | Intergenic | LRRC38 | U |
| 7003 | chr3 | 194880273 | 194880583 | Heart Cardiomyocytes + Fibroblasts | 0.24 | 0.89 | intron | XXYLTJ | U |
| 7004 | chr7 | 18095378 | 18095706 | Heart Cardiomyocytes + Fibroblasts | 0.22 | 0.87 | Intergenic | PRPS1LI | U |
| 7005 | chr1 | 9643254 | 9643716 | Heart Cardiomyocytes + Fibroblasts | 0.26 | 0.91 | TTS | SLC25A33 | U |
| 7006 | chr10 | 10954582 | 10954771 | Heart Cardiomyocytes + Fibroblasts | 0.27 | 0.91 | Intergenic | LINC00710 | U |
| 7007 | chr4 | 184747561 | 184747845 | Heart Cardiomyocytes + Fibroblasts | 0.22 | 0.86 | Intergenic | STOX2 | U |
| 7008 | chr17 | 413761 | 414081 | Heart Cardiomyocytes + Fibroblasts | 0.18 | 0.82 | exon | VPS53 | U |
| 7009 | chr5 | 11012629 | 11012972 | Heart Cardiomyocytes + Fibroblasts | 0.21 | 0.85 | intron | CTNND2 | U |
| 7010 | chr20 | 56644429 | 56644576 | Heart Cardiomyocytes + Fibroblasts | 0.24 | 0.87 | Intergenic | C20orf85 | U |
| 7011 | chr10 | 1198278 | 1198475 | Heart Cardiomyocytes + Fibroblasts | 0.26 | 0.89 | Intergenic | LINC00200 | U |
| 7012 | chr1 | 303938083 | 30394055 | Heart Cardiomyocytes + Fibroblasts | 0.12 | 0.75 | Intergenic | MATN1-AS1 | U |
| 7013 | chr16 | 84092508 | 84092811 | Heart Cardiomyocytes + Fibroblasts | 0.26 | 0.89 | intron | MBTPS1 | U |
| 7014 | chr1 | 3706705 | 3706858 | Heart Cardiomyocytes + Fibroblasts | 0.28 | 0.9 | intron | LRRC47 | U |
| 7015 | chr19 | 5876222 | 5876396 | Heart Cardiomyocytes + Fibroblasts | 0.22 | 0.84 | Intergenic | FUT5 | U |
| 7016 | chr21 | 38966582 | 38966781 | Heart Cardiomyocytes + Fibroblasts | 0.19 | 0.81 | Intergenic | DYRK1A | U |
| 7017 | chr9 | 129946857 | 129947147 | Heart Cardiomyocytes + Fibroblasts | 0.26 | 0.88 | intron | RALGPS1 | U |
| 7018 | chr5 | 180207057 | 180207415 | Heart Cardiomyocytes + Fibroblasts | 0.18 | 0.8 | Intergenic | MGAT1 | U |
| 7019 | chr5 | 56412004 | 56412368 | Heart Cardiomyocytes + Fibroblasts | 0.3 | 0.92 | Intergenic | GPBP1 | U |
| 7020 | chr11 | 125551773 | 125552244 | Heart Cardiomyocytes + Fibroblasts | 0.3 | 0.92 | promoter-TSS,Interg [symbol] | ACRV1, ACRV1 | U |
| 7021 | chr17 | 12999196 | 12999266 | Heart Cardiomyocytes + Fibroblasts | 0.26 | 0.87 | Intergenic | ELAC2 | U |
| 7022 | chr13 | 36448833 | 36448912 | Heart Cardiomyocytes + Fibroblasts | 0.25 | 0.86 | intron | DCLK1 | U |
| 7023 | chr1 | 20634795 | 20635032 | Heart Cardiomyocytes + Fibroblasts | 0.24 | 0.85 | intron | VWA5B1 | U |
| 7024 | chr8 | 94029501 | 94029905 | Heart Cardiomyocytes + Fibroblasts | 0.2 | 0.81 | Intergenic | TRIQK | U |
| 7025 | chr2 | 10902655 | 10902720 | Heart Cardiomyocytes + Fibroblasts | 0.27 | 0.87 | intron | ATP6V1C2 | U |
| 7026 | chr2 | 235080572 | 235080772 | Heart Cardiomyocytes + Fibroblasts | 0.31 | 0.91 | Intergenic | SPP2 | U |
| 7027 | chr18 | 12997061 | 12997279 | Heart Cardiomyocytes + Fibroblasts | 0.22 | 0.82 | intron | CEP192 | U |
| 7028 | chr15 | 45232242 | 45232568 | Heart Cardiomyocytes + Fibroblasts | 0.28 | 0.88 | Intergenic | C15orf43 | U |
| 7029 | chr5 | 123964522 | 123964654 | Heart Cardiomyocytes + Fibroblasts | 0.26 | 0.85 | Intergenic | ZNF608 | U |
| 7030 | chr10 | 125971114 | 125971369 | Heart Cardiomyocytes + Fibroblasts | 0.27 | 0.86 | Intergenic | CHST15 | U |
| 7031 | chr7 | 3272911 | 3273316 | Heart Cardiomyocytes + Fibroblasts | 0.27 | 0.86 | Intergenic | SDK1 | U |
| 7032 | chr7 | 91361379 | 91361797 | Heart Cardiomyocytes + Fibroblasts | 0.22 | 0.81 | Intergenic | MTERF | U |
| 7033 | chr8 | 10377668 | 10377892 | Heart Cardiomyocytes + Fibroblasts | 0.29 | 0.87 | Intergenic | PRSS55 | U |
| 7034 | chr12 | 121009925 | 121010027 | Heart Cardiomyocytes + Fibroblasts | 0.32 | 0.88 | intron | RNF10 | U |
| 7035 | chr12 | 52936552 | 52936739 | Heart Cardiomyocytes + Fibroblasts | 0.34 | 0.9 | Intergenic | KRT71 | U |
| 7036 | chr7 | 141088827 | 141089077 | Heart Cardiomyocytes + Fibroblasts | 0.3 | 0.85 | intron | TMEM178B | U |
| 7037 | chr14 | 100566571 | 100566935 | Heart Cardiomyocytes + Fibroblasts | 0.36 | 0.91 | intron | EVL | U |
| 7038 | chr2 | 161231473 | 161231850 | Heart Cardiomyocytes + Fibroblasts | 0.31 | 0.86 | intron | RBMS1 | U |
| 7039 | chr8 | 53475277 | 53475531 | Heart Cardiomyocytes + Fibroblasts | 0.26 | 0.8 | intron | FAM150A | U |
| 7040 | chr2 | 62283634 | 62283937 | Heart Cardiomyocytes + Fibroblasts | 0.32 | 0.86 | intron | COMMD1 | U |
| 7041 | chr10 | 129481743 | 129482151 | Heart Cardiomyocytes + Fibroblasts | 0.28 | 0.82 | Intergenic | FOXI2 | U |
| 7042 | chr3 | 13289021 | 13289445 | Heart Cardiomyocytes + Fibroblasts | 0.31 | 0.85 | Intergenic | NUP210 | U |
| 7043 | chr15 | 1006537901 | 100653967 | Heart Cardiomyocytes + Fibroblasts | 0.34 | 0.87 | intron | ADAMTS17 | U |
| 7044 | chr8 | 26084698 | 26085094 | Heart Cardiomyocytes + Fibroblasts | 0.3 | 0.82 | Intergenic | PPP2R2A | U |
| 7045 | chr4 | 143002457 | 143002854 | Heart Cardiomyocytes + Fibroblasts | 0.34 | 0.86 | intron | INPP4B | U |
| 7046 | chr1 | 165378811 | 165379230 | Heart Cardiomyocytes + Fibroblasts | 0.14 | 0.91 | intron | RXRG | U |
| 7047 | chr8 | 53788177 | 53788274 | Heart Cardiomyocytes + Fibroblasts | 0.16 | 0.86 | Intergenic | NPBWR1 | U |
| 7048 | chr8 | 25435658 | 25435851 | Heart Cardiomyocytes + Fibroblasts | 0.24 | 0.87 | Intergenic | CDCA2 | U |
| 7049 | chr13 | 38521846 | 38522176 | Heart Cardiomyocytes + Fibroblasts | 0.25 | 0.88 | Intergenic | TRPC4 | U |
| 7050 | chr8 | 140847731 | 140848082 | Heart Cardiomyocytes + Fibroblasts | 0.06 | 0.91 | intron | TRAPPC9 | U |
| 7051 | chr1 | 154680603 | 154680768 | Heart Cardiomyocytes + Fibroblasts | 0.11 | 0.91 | exon | KCNN3 | U |
| 7052 | chr6 | 11999385 | 11999805 | Heart Cardiomyocytes + Fibroblasts | 0.11 | 0.91 | Intergenic | HIVEP1 | U |
| 7053 | chr22 | 17620937 | 17621309 | Heart Cardiomyocytes + Fibroblasts | 0.11 | 0.86 | intron | CECRS | U |
| 7054 | chr1 | 154680517 | 154680769 | Heart Cardiomyocytes + Fibroblasts | 0.12 | 0.89 | exon | KCNNS | U |
| 7055 | chr14 | 57418432 | 57418535 | Heart Cardiomyocytes + Fibroblasts | 0.1 | 0.85 | Intergenic | OTX2-AS | U |
| 7056 | chr14 | 71650466 | 71650630 | Heart Cardiomyocytes + Fibroblasts | 0.18 | 0.88 | Intergenic | SNORD56B | U |
| 7057 | chr6 | 7425578 | 7425652 | Heart Cardiomyocytes + Fibroblasts | 0.23 | 0.91 | Intergenic | RIOK1 | U |
| 7058 | chr20 | 25445183 | 25445374 | Heart Cardiomyocytes + Fibroblasts | 0.18 | 0.86 | intron | NINI | U |
| 7059 | chr1 | 243432142 | 243432313 | Heart Cardiomyocytes + Fibroblasts | 0.21 | 0.88 | intron | SDCCAG8 | U |
| 7060 | chr9 | 90424981 | 90425337 | Heart Cardiomyocytes + Fibroblasts | 0.2 | 0.86 | Intergenic | CTSL1P8 | U |
| 7061 | chr9 | 98978744 | 98979120 | Heart Cardiomyocytes + Fibroblasts | 0.26 | 0.91 | Intergenic | HSD1783 | U |
| 7062 | chr9 | 99842251 | 99842674 | Heart Cardiomyocytes + Fibroblasts | 0.22 | 0.85 | intron | LOC340508 | U |
| 7063 | chr11 | 134232343 | 134232613 | Heart Cardiomyocytes + Fibroblasts | 0.26 | 0.87 | intron | GLB1L2 | U |
| 7064 | chr9 | 89251759 | 89251953 | Heart Cardiomyocytes + Fibroblasts | 0.2 | 0.79 | Intergenic | ZCCHC6 | U |
| 7065 | chr9 | 98836406 | 98836569 | Heart Cardiomyocytes + Fibroblasts | 0.26 | 0.84 | intron | LOC158435 | U |
| 7066 | chr5 | 122430084 | 122430236 | Heart Cardiomyocytes + Fibroblasts | 0.86 | 0.23 | intron | PRDM6 | M |
| 7067 | chr3 | 138892681 | 138892934 | Heart Cardiomyocytes + Fibroblasts | 0.66 | 0.08 | Intergenic | PISRT1 | M |
| 7068 | chr17 | 6555695 | 6555783 | Heart Cardiomyocytes + Fibroblasts | 0.67 | 0.1 | promoter-TSS | MED31 | M |
| 7069 | chr2 | 2051800041 | 205180213 | Heart Cardiomyocytes + Fibroblasts | 0.71 | 0.15 | Intergenic | PARD3B | M |
| 7070 | chr5 | 122429499 | 122429732 | Heart Cardiomyocytes + Fibroblasts | 0.76 | 0.22 | Intron | PRDM6 | M |
| 7071 | chr4 | 175133405 | 175133826 | Heart Cardiomyocytes + Fibroblasts | 0.76 | 0.22 | Intergenic | CEP44 | M |
| 7072 | chr16 | 88124298 | 88124437 | Heart Cardiomyocytes + Fibroblasts | 0.72 | 0.21 | Intergenic | BANP | M |
| 7073 | chr9 | 139636813 | 139637044 | Heart Cardiomyocytes + Fibroblasts | 0.64 | 0.16 | intron | CN10 | M |
| 7074 | chr2 | 120436418 | 120436491 | Heart Cardiomyocytes + Fibroblasts | 0.64 | 0.17 | promoter-TSS | TMEM177 | M |
| 7075 | chr5 | 122428966 | 122429450 | Heart Cardiomyocytes + Fibroblasts | 0.65 | 0.18 | intron | PRDM6 | M |
| 7076 | chr15 | 63674449 | 63674484 | Heart Cardiomyocytes + Fibroblasts | 0.62 | 0.16 | promoter-TSS | CA12 | M |
| 7077 | chr5 | 32843436 | 32843583 | Heart Cardiomyocytes + Fibroblasts | 0.59 | 0.15 | Intergenic | LOC340113 | M |
| 7078 | chr11 | 67417821 | 67417974 | Heart Cardiomyocytes + Fibroblasts | 0.66 | 0.25 | intron | ACY3 | M |
| 7079 | chr22 | 51059793 | 51060033 | Heart Cardiomyocytes + Fibroblasts | 0.61 | 0.21 | Intergenic | ARSA | M |
| 7080 | chr14 | 957576751 | 95757926 | Heart Cardiomyocytes + Fibroblasts | 0.63 | 0.23 | intron | CLMN | M |
| 7081 | chr1 | 244504815 | 244505172 | Heart Cardiomyocytes + Fibroblasts | 0.55 | 0.22 | Intergenic | C1orf100 | M |
| 7082 | chr19 | 51069087 | 51069248 | Heart Cardiomyocytes + Fibroblasts | 0.61 | 0.29 | intron | LRRC4B | M |
| 7083 | chr5 | 1224298551 | 122430020 | Heart Cardiomyocytes + Fibroblasts | 0.84 | 0.23 | intron | PRDM6 | M |
| 7084 | chr5 | 1224303261 | 122430510 | Heart Cardiomyocytes + Fibroblasts | 0.86 | 0.26 | intron | PRDM6 | M |
| 7085 | chr5 | 122422553 | 122422913 | Heart Cardiomyocytes + Fibroblasts | 0.7 | 0.19 | Intergenic | PRDM6 | M |
| 7086 | chr5 | 1224343793 | 122434629 | Heart Cardiomyocytes + Fibroblasts | 0.66 | 0.18 | intron | PRDM6 | M |
| 7087 | chr4 | 175138256 | 175138325 | Heart Cardiomyocytes + Fibroblasts | 0.62 | 0.19 | Intergenic | CEP44 | M |
| 7088 | chr15 | 92938493 | 92938521 | Heart Cardiomyocytes + Fibroblasts | 0.57 | 0.17 | intron | ST8SIA2 | M |
| 7089 | chr22 | 39152650 | 39152783 | Heart Cardiomyocytes + Fibroblasts | 0.58 | 0.19 | promoter-TSS | SUN2 | M |
| 7090 | chr5 | 122434244 | 122434305 | Heart Cardiomyocytes + Fibroblasts | 0.6 | 0.22 | intron | PRDMS | M |

[symbol]

indicates data missing or illegible when filed

TABLE C
Example Sequence and A nnotations in Sequence Listing

<210> 2
<211> 283
<212> DMA
<213> Homo sapiens
<220
<221> source
<222> (1) . . . (283)
<223> chr9:119238427-119238709; Gene: ASTN2 (intron)
<220>
<221> misc_feature
<222> (1) . . . (283)
<223> U/M: U (0.05:0.94) in Oral, Larynx and Esophageal epithelium
<400> 2

| | |
|---|---|
| cggatggccc gaggtgttcc ttggcttgag geggcatcac tctaatctca gcctctgtct | 60 |
| tcacatgcct tctttgctct gtcttctcag agcggcatca gtcactgaat taaggaatta | 120 |
| acttaatcca gtattacctc atcttgatcc ttaagtaaat acatctgcaa agatgatttc | 180 |
| caaataaagc cccatcccaa ggtttcaggt agatgtgaat ttttcaagga cactgttcaa | 240 |
| cccactgcaa tccatcctct cacttcctca gaagacttgc agc | 283 |

[0082] In accordance with one embodiment of the present disclosure, a method is provided for identifying that a biological sample includes DNA from an oral, larynx or esophageal epithelial cell. In some embodiments, the method entails detecting the methylation status of a plurality (e.g., 3, 4, 5, 6, 7, 8, 9, 10 or more) of CpG sites of a target DNA fragment in the biological sample, wherein at least one (or at least two, three, four, five, six, seven, eight, nine, ten or all) of the CpG sites is located within, or within 100 bp, 200 bp, 500 bp or 1 kb from, a human genomic sequence selected from SEQ ID NO: 1-15 or 16-90. In some embodiments, the method then identifies the target DNA fragment as being from an oral, larynx or esophageal epithelial cell when no more than 40% of the CpG sites are methylated. In some embodiments, the method identifies the target DNA fragment as being from an oral, larynx or esophageal epithelial cell when no more than 25%, 30%, 35%, 40%, 45%, or 50% of the CpG sites are methylated. Likewise, in some embodiments, the method identifies the target DNA fragment as being from an oral, larynx or esophageal epithelial cell when at least 50%, 55%, 60%, 65%, 70%, 75%, 80%, 85% or 90% of the CpG sites are unmethylated. In some embodiments, the method identifies the target DNA fragment as not being from an oral, larynx or esophageal epithelial cell when at least 50%, 55%, 60%, 65%, 70%, 75%, 80%, 85% or 90% of the CpG sites are methylated. In some embodiments, the method identifies the target DNA fragment as not being from an oral, larynx or esophageal epithelial cell when no more than 25%, 30%, 35%, 40%, 45%, or 50% of the CpG sites are unmethylated.

[0083] In some embodiments, the method entails detecting the methylation status of a plurality (e.g., 3, 4, 5, 6, 7, 8, 9, 10 or more) of CpG sites of a target DNA fragment in the biological sample, wherein at least one (or at least two, three, four, five, six, seven, eight, nine, ten or all) of the CpG sites is located within, or within 100 bp, 200 bp, 500 bp or 1 kb from, a human genomic sequence selected from SEQ ID NO: 126-133. In some embodiments, the method then identifies the target DNA fragment as being from an oral, larynx or esophageal epithelial cell when 50% or more of the CpG sites are methylated. In some embodiments, the method identifies the target DNA fragment as being from an oral, larynx or esophageal epithelial cell when at least 55%, 60%, 65%, 70%, 75%, 80%, 85% or 90% of the CpG sites are methylated. Likewise, in some embodiments, the method identifies the target DNA fragment as being from an oral, larynx or esophageal epithelial cell when no more than 25%, 30%, 35%, 40%, 45%, or 50% of the CpG sites are unmethylated. In some embodiments, the method identifies the target DNA fragment as not being from an oral, larynx or esophageal epithelial cell when no more than 25%, 30%, 35%, 40%16, 45%, or 50% of the CpG sites are methylated. In some embodiments, the method identifies the target DNA fragment as not being from an oral, larynx or esophageal epithelial cell when at least 50%, 55%, 60%, 65%, 70%, 75%, 80%, 85% or 90% of the CpG sites are unmethylated.

[0084] In some embodiments, the methylation status of one or more other DNA fragments is further used in the cell type determination. In some embodiments, the one or more additional (different from the first one) DNA fragment is represented by a genomic sequence of SEQ ID NO: 1-15, 16-90, 91-91, 92-101, 102-125, 126-133, 134-134 or 135-150.

[0085] In some embodiments, the method entails detecting the methylation status of a plurality (e.g., 3, 4, 5, 6, 7, 8, 9, 10 or more) of CpG sites of a target DNA fragment in the biological sample, wherein at least one (or at least two, three, four, five, six, seven, eight, nine, ten or all) of the CpG sites is located within, or within 100 bp, 200 bp, 500 bp or 1 kb from, a human genomic sequence selected from SEQ ID NO: 1-15, 16-90, 91-91, 92-101 or 102-125. In some embodiments, the method then identifies the target DNA fragment as being from an oral, larynx or esophageal epithelial cell when no more than 40% of the CpG sites are methylated. In some embodiments, the method identifies the target DNA fragment as being from an oral, larynx or esophageal epithelial cell when no more than 25%, 30%, 35%, 40%, 45%, or 50% of the CpG sites are methylated. Likewise, in some embodiments, the method identifies the target DNA fragment as being from an oral, larynx or esophageal epithelial cell when at least 50%, 55%, 60%, 65%, 70%, 75%, 80%, 85% or 90% of the CpG sites are unmethylated. In some embodiments, the method identifies the target DNA fragment as not being from an oral, larynx or esophageal epithelial cell when at least 50%, 55%, 60%, 65%, 70%, 75%, 80%, 85% or 90% of the CpG sites are methylated. In some embodiments, the method identifies the target DNA fragment as not being from an oral, larynx or esophageal epithelial cell when no more than 25%, 30%, 35%, 40%, 45%, or 50% of the CpG sites are unmethylated.

[0086] In some embodiments, the method entails detecting the methylation status of a plurality (e.g., 3, 4, 5, 6, 7, 8, 9, 10 or more) of CpG sites of a target DNA fragment in the biological sample, wherein at least one (or at least two, three, four, five, six, seven, eight, nine, ten or all) of the CpG sites is located within, or within 100 bp, 200 bp, 500 bp or 1 kb from, a human genomic sequence selected from SEQ ID NO: 126-133, 134-134 or 135-150. In some embodiments, the method then identifies the target DNA fragment as being from an oral, larynx or esophageal epithelial cell when 50% or more of the CpG sites are methylated. In some embodiments, the method identifies the target DNA fragment as being from an oral, larynx or esophageal epithelial cell when at least 55%, 60%, 65%, 70%, 75%, 80%, 85% or 90% of the CpG sites are methylated. Likewise, in some embodiments, the method identifies the target DNA fragment as being from an oral, larynx or esophageal epithelial cell when no more than 25%, 30%, 35%, 40%, 45%, or 50% of the CpG sites are unmethylated. In some embodiments, the method identifies the target DNA fragment as not being from an oral, larynx or esophageal epithelial cell when no more than 25%, 30%, 35%, 40%, 45%, or 50% of the CpG sites are methylated. In some embodiments, the method identifies the target DNA fragment as not being from an oral, larynx or esophageal epithelial cell when at least 50%, 55%, 60%, 65%, 70%, 75%, 80%, 85% or 90% of the CpG sites are unmethylated.

[0087] In some embodiments, when the prediction from two or more of the above methods agrees with another, the prediction result is further affirmed.

[0088] The cell type identification method can be used to detect disease or condition associated with the cell type. In one embodiment, when a cell-free DNA in a biological sample (e.g., blood, plasma, serum, semen, milk, urine, saliva or cerebral spinal fluid) is identified as being from an oral, larynx or esophageal epithelial cell of a subject, the method indicates that the subject has abnormal cell death and/or a disease relating to the cell. In some embodiments, the disease or condition is injury, inflammation, or cancer of the oral, larynx or esophageal epithelium.

[0089] In some embodiments, when the amount of cell-free DNA identified as being from a particular type of cell or cells, e.g., oral, larynx or esophageal epithelial cells, is decreased, e.g., less at a second time point than at an earlier first time point of measurement, it indicates that the subject is recovering from the disease or condition. In some versions, the methods include making a diagnosis and/or treating a disease or condition accordingly based on the indication of recovery. In some embodiments, when the amount of cell-free DNA identified as being from a particular type of cell or cells, e.g., oral, larynx or esophageal epithelial cells is increased, e.g., more at a second time point than at an earlier first time point of measurement, it indicates that the disease or condition is worsening. In some versions, the methods include making a diagnosis and/or treating a disease or condition accordingly based on the indication of worsening. In some embodiments, between two or more testing, the subject undergoes a treatment, and thus the testing result indicates the treatment effect.

[0090] Also provided, in one embodiment, is a method for determining the cell type of a disease cell, e.g., a cancer cell, the primary origin of the disease, e.g., cancer, cell, or the signal or origin of the disease, e.g., cancer, cell. In some embodiments, a cancer cell has unknown primary origin. In some embodiments, the methods include detecting the methylation status of one or more DNA fragment of the cancer cell and can use the methylation status to determine the cell as an oral, larynx or esophageal epithelial cell, as described above.

[0091] In some instances, a cell-free DNA fragment is released from a cancer cell. The present technology can include determining the cell type of the cancer cell. In some embodiments, a genetic variation may also be present in the DNA fragment, and thus the cell type detection can help associate the genetic variation with the cancer. In some embodiments, the genetic variation includes a mutation. In some embodiments, the genetic variation includes a deletion or insertion. In some embodiments, the genetic variation constitutes microsatellite instability. In some embodiments, the genetic variation constitutes loss of heterozygosity. In some embodiments, the genetic variation interrupts or changes gene splicing. In some embodiments, the genetic variation causes frameshift or generation of premature stop codon.

[0092] Once the primary origin of the cancer is identified, the subject may be treated with appropriate regiments for that cancer type.

### A2. Gastric Epithelium

[0093] Also as provided in Table A, some genomic locations are uniformly under-methylated or over-methylated in gastric epithelial cells as compared to all other cell types in the human.

[0094] In accordance with one embodiment of the present disclosure, a method is provided for identifying that a biological sample includes DNA from a gastric epithelial cell. In some embodiments, the method entails detecting the methylation status of a plurality (e.g., 3, 4, 5, 6, 7, 8, 9, 10 or more) of CpG sites of a target DNA fragment in the biological sample, wherein at least one (or at least two, three, four, five, six, seven, eight, nine, ten or all) of the CpG sites is located within, or within 100 bp, 200 bp, 500 bp or 1 kb from, a human genomic sequence selected from SEQ ID NO: 151-170, 171-330, 331-335, 336-340 or 341-378, or selected from SEQ ID NO: 151-170 or 171-330. In some embodiments, the method then identifies the target DNA fragment as being from a gastric epithelial cell when no more than 40% of the CpG sites are methylated. In some embodiments, the method identifies the target DNA fragment as being from a gastric epithelial cell when no more than 25%, 30%, 35%, 40%, 45%, or 50% of the CpG sites are methylated. Likewise, in some embodiments, the method identifies the target DNA fragment as being from a gastric epithelial cell when at least 50%, 55%, 60%, 65%, 70%, 75%, 80%, 85% or 90% of the CpG sites are unmethylated. In some embodiments, the method identifies the target DNA fragment as not being from a gastric epithelial cell when at least 50%, 55%, 60%, 65%, 70%, 75%, 80%, 85% or 90% of the CpG sites are methylated. In some embodiments, the method identifies the target DNA fragment as not being from a gastric epithelial cell when no more than 25%, 30%, 35%, 40%, 45%, or 50% of the CpG sites are unmethylated.

[0095] In some embodiments, the method entails detecting the methylation status of a plurality (e.g., 3, 4, 5, 6, 7, 8, 9, 10 or more) of CpG sites of a target DNA fragment in the biological sample, wherein at least one (or at least two, three, four, five, six, seven, eight, nine, ten or all) of the CpG sites is located within, or within 100 bp, 200 bp, 500 bp or 1 kb from, a human genomic sequence selected from SEQ ID NO: 379-401, 402-402 or 403-428, or selected from SEQ ID NO: 379-401. In some embodiments, the method then identifies the target DNA fragment as being from a gastric epithelial cell when 50% or more of the CpG sites are methylated. In some embodiments, the method identifies the target DNA fragment as being from a gastric epithelial cell when at least 55%, 60%, 65%, 70%, 75%, 80%, 85% or 90% of the CpG sites are methylated. Likewise, in some embodiments, the method identifies the target DNA fragment as being from a gastric epithelial cell when no more than 25%, 30%, 35%, 40%, 45%, or 50% of the CpG sites are unmethylated. In some embodiments, the method identifies the target DNA fragment as not being from a gastric epithelial cell when no more than 25%, 30%, 35%, 40%, 45%, or 50% of the CpG sites are methylated. In some embodiments, the method identifies the target DNA fragment as not being from a gastric epithelial cell when at least 50%, 55%, 60%, 65%, 70%, 75%, 80%, 85% or 90% of the CpG sites are unmethylated.

[0096] In some embodiments, the methylation status of one or more other DNA fragments is further used in the cell type determination. In some embodiments, the one or more additional (different from the first one) DNA fragment is represented by a genomic sequence of SEQ ID NO: 151-170, 171-330, 331-335, 336-340, 341-378, 379-401, 402-402 or 403-428.

[0097] The cell type identification method can be used to detect disease or condition associated with the cell type. In one embodiment, when a cell-free DNA in a biological sample (e.g., blood, plasma, serum, semen, milk, urine, saliva or cerebral spinal fluid) is identified as being from a gastric epithelial cell of a subject, the method indicates that the subject has abnormal cell death and/or a disease relating to the cell. In some embodiments, the disease or condition is injury, inflammation, or cancer of the gastric epithelium.

[0098] In some embodiments, when the amount of cell-free DNA identified as being from a particular type of cell or cells, e.g., gastric epithelial cells, is decreased, e.g., less at a second time point than at an earlier first time point of measurement, it indicates that the subject is recovering from the disease or condition. In some versions, the methods include making a diagnosis and/or treating a disease or condition accordingly based on the indication of recovery. In some embodiments, when the amount of cell-free DNA identified as being from a particular type of cell or cells, e.g., gastric epithelial cells is increased, e.g., more at a second time point than at an earlier first time point of measurement, it indicates that the disease or condition is worsening. In some versions, the methods include making a diagnosis and/or treating a disease or condition accordingly based on the indication of worsening. In some embodiments, between two or more testing, the subject undergoes a treatment, and thus the testing result indicates the treatment effect.

[0099] Also provided, in one embodiment, is a method for determining the cell type of a disease cell, e.g., a cancer cell, the primary origin of the disease, e.g., cancer, cell, or the signal or origin of the disease, e.g., cancer, cell. In some embodiments, a cancer cell has unknown primary origin. In some embodiments, the methods include detecting the methylation status of one or more DNA fragment of the cancer cell and can use the methylation status to determine the cell as a gastric epithelial cell, as described above.

[0100] In some instances, a cell-free DNA fragment is released from a cancer cell. The present technology can include determining the cell type of the cancer cell. In some embodiments, a genetic variation may also be present in the DNA fragment, and thus the cell type detection can help associate the genetic variation with the cancer. In some embodiments, the genetic variation includes a mutation. In some embodiments, the genetic variation includes a deletion or insertion. In some embodiments, the genetic variation constitutes microsatellite instability. In some embodiments, the genetic variation constitutes loss of heterozygosity. In some embodiments, the genetic variation interrupts or changes gene splicing. In some embodiments, the genetic variation causes frameshift or generation of premature stop codon. Once the primary origin of the cancer is identified, the subject may be treated with appropriate regiments for that cancer type.

### A3. Small Intestine Epithelium

[0101] Also as provided in Table A, some genomic locations are uniformly under-methylated or over-methylated in small intestine epithelial cells as compared to all other cell types in the human.

[0102] In accordance with one embodiment of the present disclosure, a method is provided for identifying that a biological sample includes DNA from a small intestine epithelial cell. In some embodiments, the method entails detecting the methylation status of a plurality (e.g., 3, 4, 5, 6, 7, 8, 9, 10 or more) of CpG sites of a target DNA fragment in the biological sample, wherein at least one (or at least two, three, four, five, six, seven, eight, nine, ten or all) of the CpG sites is located within, or within 100 bp, 200 bp, 500 bp or 1 kb from, a human genomic sequence selected from SEQ ID NO: 429-446, 447-527, 528-529, 530-536 or 537-554, or selected from SEQ ID NO: 429-446 or 447-527. In some embodiments, the method then identifies the target DNA fragment as being from a small intestine epithelial cell when no more than 40% of the CpG sites are methylated. In some embodiments, the method identifies the target DNA fragment as being from a small intestine epithelial cell when no more than 25%, 30%, 35%, 40%, 45%, or 50% of the CpG sites are methylated. Likewise, in some embodiments, the method identifies the target DNA fragment as being from a small intestine epithelial cell when at least 50%, 55%, 60%, 65%, 70%, 75%, 80%, 85% or 90% of the CpG sites are unmethylated. In some embodiments, the method identifies the target DNA fragment as not being from a small intestine epithelial cell when at least 50%, 55%, 60%, 65%, 70%, 75%, 80%, 85% or 90% of the CpG sites are methylated. In some embodiments, the method identifies the target DNA fragment as not being from a small intestine epithelial cell when no more than 25%, 30%, 35%, 40%, 45%, or 50% of the CpG sites are unmethylated.

[0103] In some embodiments, the method entails detecting the methylation status of a plurality (e.g., 3, 4, 5, 6, 7, 8, 9, 10 or more) of CpG sites of a target DNA fragment in the biological sample, wherein at least one (or at least two, three, four, five, six, seven, eight, nine, ten or all) of the CpG sites is located within, or within 100 bp, 200 bp, 500 bp or 1 kb from, a human genomic sequence selected from SEQ ID NO: 555-564, 565-565 or 566-579, or selected from SEQ ID NO: 555-564. In some embodiments, the method then identifies the target DNA fragment as being from a small intestine epithelial cell when 50% or more of the CpG sites are methylated. In some embodiments, the method identifies the target DNA fragment as being from a small intestine epithelial cell when at least 55%, 60%, 65%, 70%, 75%, 80%, 85% or 90% of the CpG sites are methylated. Likewise, in some embodiments, the method identifies the target DNA fragment as being from a small intestine epithelial cell when no more than 25%, 30%, 16, 35%, 40%, 45%, or 50%, 16 of the CpG sites are unmethylated. In some embodiments, the method identifies the target DNA fragment as not being from a small intestine epithelial cell when no more than 25%, 30%, 35%, 40%, 45%, or 50% of the CpG sites are methylated. In some embodiments, the method identifies the target DNA fragment as not being from a small intestine epithelial cell when at least 50% i, 55%, 60%, 65%, 70%, 75%, 80%, 85% or 90% of the CpG sites are unmethylated.

[0104] In some embodiments, the methylation status of one or more other DNA fragments is further used in the cell type determination. In some embodiments, the one or more additional (different from the first one) DNA fragment is represented by a genomic sequence of SEQ ID NO: 429-446, 447-527, 528-529, 530-536, 537-554, 555-564, 565-565 or 566-579.

[0105] The cell type identification method can be used to detect disease or condition associated with the cell type. In one embodiment, when a cell-free DNA in a biological sample (e.g., blood, plasma, serum, semen, milk, urine, saliva or cerebral spinal fluid) is identified as being from a small intestine epithelial cell of a subject, the method indicates that the subject has abnormal cell death and/or a disease relating to the cell. In some embodiments, the disease or condition is injury, inflammation, or cancer of the small intestine epithelium.

[0106] In some embodiments, when the amount of cell-free DNA identified as being from a particular type of cell or cells, e.g., small intestine epithelial cells, is decreased, e.g., less at a second time point than at an earlier first time point of measurement, it indicates that the subject is recovering from the disease or condition. In some versions, the methods include making a diagnosis and/or treating a disease or condition accordingly based on the indication of recovery. In some embodiments, when the amount of cell-free DNA identified as being from a particular type of cell or cells, e.g., small intestine epithelial cells is increased, e.g., more at a second time point than at an earlier first time point of measurement, it indicates that the disease or condition is worsening. In some versions, the methods include making a diagnosis and/or treating a disease or condition accordingly based on the indication of worsening. In some embodiments, between two or more testing, the subject undergoes a treatment, and thus the testing result indicates the treatment effect.

[0107] Also provided, in one embodiment, is a method for determining the cell type of a disease cell, e.g., a cancer cell, the primary origin of the disease, e.g., cancer, cell, or the signal or origin of the disease, e.g., cancer, cell. In some embodiments, a cancer cell has unknown primary origin. In some embodiments, the methods include detecting the methylation status of one or more DNA fragment of the cancer cell and can use the methylation status to determine the cell as a small intestine epithelial cell, as described above.

[0108] In some instances, a cell-free DNA fragment is released from a cancer cell. The present technology can include determining the cell type of the cancer cell. In some embodiments, a genetic variation may also be present in the DNA fragment, and thus the cell type detection can help associate the genetic variation with the cancer. In some embodiments, the genetic variation includes a mutation. In some embodiments, the genetic variation includes a deletion or insertion. In some embodiments, the genetic variation constitutes microsatellite instability. In some embodiments, the genetic variation constitutes loss of heterozygosity. In some embodiments, the genetic variation interrupts or changes gene splicing. In some embodiments, the genetic variation causes frameshift or generation of premature stop codon. Once the primary origin of the cancer is identified, the subject may be treated with appropriate regiments for that cancer type.

### A4. Colon Epithelium

[0109] Also as provided in Table A, some genomic locations are uniformly under-methylated or over-methylated in colon epithelial cells as compared to all other cell types in the human.

[0110] In accordance with one embodiment of the present disclosure, a method is provided for identifying that a biological sample includes DNA from a colon epithelial cell. In some embodiments, the method entails detecting the methylation status of a plurality (e.g., 3, 4, 5, 6, 7, 8, 9, 10 or more) of CpG sites of a target DNA fragment in the biological sample, wherein at least one (or at least two, three, four, five, six, seven, eight, nine, ten or all) of the CpG sites is located within, or within 100 bp, 200 bp, 500 bp or 1 kb from, a human genomic sequence selected from SEQ ID NO: 580-596, 597-657, 658-660, 661-668 or 669-704, or selected from SEQ ID NO: 580-596 or 597-657. In some embodiments, the method then identifies the target DNA fragment as being from a colon epithelial cell when no more than 40% of the CpG sites are methylated. In some embodiments, the method identifies the target DNA fragment as being from a colon epithelial cell when no more than 25%, 30%, 35%, 40%, 45%, or 50% of the CpG sites are methylated. Likewise, in some embodiments, the method identifies the target DNA fragment as being from a colon epithelial cell when at least 50%, 55%, 60%, 65%, 70%, 75%, 80%, 85% or 90% of the CpG sites are unmethylated. In some embodiments, the method identifies the target DNA fragment as not being from a colon epithelial cell when at least 50%, 55%, 60%, 65%, 70%, 75%, 80%, 85% or 90% of the CpG sites are methylated. In some embodiments, the method identifies the target DNA fragment as not being from a colon epithelial cell when no more than 25%, 30%, 35%, 40%, 45%, or 50% of the CpG sites are unmethylated.

[0111] In some embodiments, the method entails detecting the methylation status of a plurality (e.g., 3, 4, 5, 6, 7, 8, 9, 10 or more) of CpG sites of a target DNA fragment in the biological sample, wherein at least one (or at least two, three, four, five, six, seven, eight, nine, ten or all) of the CpG sites is located within, or within 100 bp, 200 bp, 500 bp or 1 kb from, a human genomic sequence selected from SEQ ID NO: 705-715 or 716-729, or selected from SEQ ID NO: 705-715. In some embodiments, the method then identifies the target DNA fragment as being from a colon epithelial cell when 50% or more of the CpG sites are methylated. In some embodiments, the method identifies the target DNA fragment as being from a colon epithelial cell when at least 55%, 60%, 65%, 70%, 75%, 80%, 85% or 90% of the CpG sites are methylated. Likewise, in some embodiments, the method identifies the target DNA fragment as being from a colon epithelial cell when no more than 25%, 30%, 35%, 40%, 45%, or 50% of the CpG sites are unmethylated. In some embodiments, the method identifies the target DNA fragment as not being from a colon epithelial cell when no more than 25%, 30%, 35%, 40%, 45%, or 50% of the CpG sites are methylated. In some embodiments, the method identifies the target DNA fragment as not being from a colon epithelial cell when at least 50%, 55%, 60%, 65%, 70%, 75%, 80%, 85% or 90/a of the CpG sites are unmethylated.

[0112] In some embodiments, the methylation status of one or more other DNA fragments is further used in the cell type determination. In some embodiments, the one or more additional (different from the first one) DNA fragment is represented by a genomic sequence of SEQ ID NO: 580-596, 597-657, 658-660, 661-668, 669-704, 705-715 or 716-729.

[0113] The cell type identification method can be used to detect disease or condition associated with the cell type. In one embodiment, when a cell-free DNA in a biological sample (e.g., blood, plasma, serum, semen, milk, urine, saliva or cerebral spinal fluid) is identified as being from a colon epithelial cell of a subject, the method indicates that the subject has abnormal cell death and/or a disease relating to the cell. In some embodiments, the disease or condition is injury, inflammation, or cancer of the colon epithelium.

[0114] In some embodiments, when the amount of cell-free DNA identified as being from a particular type of cell or cells, e.g., colon epithelial cells, is decreased, e.g., less at a second time point than at an earlier first time point of measurement, it indicates that the subject is recovering from the disease or condition. In some versions, the methods include making a diagnosis and/or treating a disease or condition accordingly based on the indication of recovery. In some embodiments, when the amount of cell-free DNA identified as being from a particular type of cell or cells, e.g., colon epithelial cells is increased, e.g., more at a second time point than at an earlier first time point of measurement, it indicates that the disease or condition is worsening. In some versions, the methods include making a diagnosis and/or treating a disease or condition accordingly based on the indication of worsening. In some embodiments, between two or more testing, the subject undergoes a treatment, and thus the testing result indicates the treatment effect.

[0115] Also provided, in one embodiment, is a method for determining the cell type of a disease cell, e.g., a cancer cell, the primary origin of the disease, e.g., cancer, cell, or the signal or origin of the disease, e.g., cancer, cell. In some embodiments, a cancer cell has unknown primary origin. In some embodiments, the methods include detecting the methylation status of one or more DNA fragment of the cancer cell and can use the methylation status to determine the cell as a colon epithelial cell, as described above.

[0116] In some instances, a cell-free DNA fragment is released from a cancer cell. The present technology can include determining the cell type of the cancer cell. In some embodiments, a genetic variation may also be present in the DNA fragment, and thus the cell type detection can help associate the genetic variation with the cancer. In some embodiments, the genetic variation includes a mutation. In some embodiments, the genetic variation includes a deletion or insertion. In some embodiments, the genetic variation constitutes microsatellite instability. In some embodiments, the genetic variation constitutes loss of heterozygosity. In some embodiments, the genetic variation interrupts or changes gene splicing. In some embodiments, the genetic variation causes frameshift or generation of premature stop codon. Once the primary origin of the cancer is identified, the subject may be treated with appropriate regiments for that cancer type.

### A5. Colon Fibroblasts

[0117] Also as provided in Table A, some genomic locations are uniformly under-methylated or over-methylated in colon fibroblast cells as compared to all other cell types in the human.

[0118] In accordance with one embodiment of the present disclosure, a method is provided for identifying that a biological sample includes DNA from a colon fibroblast cell. In some embodiments, the method entails detecting the methylation status of a plurality (e.g., 3, 4, 5, 6, 7, 8, 9, 10 or more) of CpG sites of a target DNA fragment in the biological sample, wherein at least one (or at least two, three, four, five, six, seven, eight, nine, ten or all) of the CpG sites is located within, or within 100 bp, 200 bp, 500 bp or 1 kb from, a human genomic sequence selected from SEQ ID NO: 730-732. In some embodiments, the method then identifies the target DNA fragment as being from a colon fibroblast cell when no more than 40% of the CpG sites are methylated. In some embodiments, the method identifies the target DNA fragment as being from a colon fibroblast cell when no more than 25%, 30%, 35%, 40%, 45%, or 50% of the CpG sites are methylated. Likewise, in some embodiments, the method identifies the target DNA fragment as being from a colon fibroblast cell when at least 50%, 55%, 60%, 65%, 70%, 75%, 80%, 85% or 90% of the CpG sites are unmethylated. In some embodiments, the method identifies the target DNA fragment as not being from a colon fibroblast cell when at least 50%, 55%, 60%, 65%, 70%, 75%, 80%, 85% or 90% of the CpG sites are methylated. In some embodiments, the method identifies the target DNA fragment as not being from a colon fibroblast cell when no more than 25%, 30%, 35%, 40%, 45%, or 50% of the CpG sites are unmethylated.

[0119] In some embodiments, the method entails detecting the methylation status of a plurality (e.g., 3, 4, 5, 6, 7, 8, 9, 10 or more) of CpG sites of a target DNA fragment in the biological sample, wherein at least one (or at least two, three, four, five, six, seven, eight, nine, ten or all) of the CpG sites is located within, or within 100 bp, 200 bp, 500 bp or 1 kb from, a human genomic sequence selected from SEQ ID NO: 733-739 or 740-741, or selected from SEQ ID NO: 733-739. In some embodiments, the method then identifies the target DNA fragment as being from a colon fibroblast cell when 50% or more of the CpG sites are methylated. In some embodiments, the method identifies the target DNA fragment as being from a colon fibroblast cell when at least 55%, 60%, 65%, 70%, 75%, 80%, 85% or 90% of the CpG sites are methylated. Likewise, in some embodiments, the method identifies the target DNA fragment as being from a colon fibroblast cell when no more than 25%, 30%, 35%, 40%, 45%, or 50% of the CpG sites are unmethylated. In some embodiments, the method identifies the target DNA fragment as not being from a colon fibroblast cell when no more than 25%, 30%, 35%, 40%, 45%, or 50% of the CpG sites are methylated. In some embodiments, the method identifies the target DNA fragment as not being from a colon fibroblast cell when at least 50%, 55%, 60%, 65%, 70%, 75%, 80%, 85% or 90% of the CpG sites are unmethylated.

[0120] In some embodiments, the methylation status of one or more other DNA fragments is further used in the cell type determination. In some embodiments, the one or more additional (different from the first one) DNA fragment is represented by a genomic sequence of SEQ ID NO: 730-732, 733-739 or 740-741.

[0121] The cell type identification method can be used to detect disease or condition associated with the cell type. In one embodiment, when a cell-free DNA in a biological sample (e.g., blood, plasma, serum, semen, milk, urine, saliva or cerebral spinal fluid) is identified as being from a colon fibroblast cell of a subject, the method indicates that the subject has abnormal cell death and/or a disease relating to the cell. In some embodiments, the disease or condition is injury, inflammation, or cancer of the colon fibroblast.

[0122] In some embodiments, when the amount of cell-free DNA identified as being from a particular type of cell or cells, e.g., colon fibroblast cells, is decreased, e.g., less at a second time point than at an earlier first time point of measurement, it indicates that the subject is recovering from the disease or condition. In some versions, the methods include making a diagnosis and/or treating a disease or condition accordingly based on the indication of recovery. In some embodiments, when the amount of cell-free DNA identified as being from a particular type of cell or cells, e.g., colon fibroblast cells is increased, e.g., more at a second time point than at an earlier first time point of measurement, it indicates that the disease or condition is worsening. In some versions, the methods include making a diagnosis and/or treating a disease or condition accordingly based on the indication of worsening. In some embodiments, between two or more testing, the subject undergoes a treatment, and thus the testing result indicates the treatment effect.

[0123] Also provided, in one embodiment, is a method for determining the cell type of a disease cell, e.g., a cancer cell, the primary origin of the disease, e.g., cancer, cell, or the signal or origin of the disease, e.g., cancer, cell. In some embodiments, a cancer cell has unknown primary origin. In some embodiments, the methods include detecting the methylation status of one or more DNA fragment of the cancer cell and can use the methylation status to determine the cell as a colon fibroblast cell, as described above.

[0124] In some instances, a cell-free DNA fragment is released from a cancer cell. The present technology can include determining the cell type of the cancer cell. In some embodiments, a genetic variation may also be present in the DNA fragment, and thus the cell type detection can help associate the genetic variation with the cancer. In some embodiments, the genetic variation includes a mutation. In some embodiments, the genetic variation includes a deletion or insertion. In some embodiments, the genetic variation constitutes microsatellite instability. In some embodiments, the genetic variation constitutes loss of heterozygosity. In some embodiments, the genetic variation interrupts or changes gene splicing. In some embodiments, the genetic variation causes frameshift or generation of premature stop codon. Once the primary origin of the cancer is identified, the subject may be treated with appropriate regiments for that cancer type.

### A6. Gallbladder Epithelium

[0125] Also as provided in Table A, some genomic locations are uniformly under-methylated or over-methylated in gallbladder epithelial cells as compared to all other cell types in the human.

[0126] In accordance with one embodiment of the present disclosure, a method is provided for identifying that a biological sample includes DNA from a gallbladder epithelial cell. In some embodiments, the method entails detecting the methylation status of a plurality (e.g., 3, 4, 5, 6, 7, 8, 9, 10 or more) of CpG sites of a target DNA fragment in the biological sample, wherein at least one (or at least two, three, four, five, six, seven, eight, nine, ten or all) of the CpG sites is located within, or within 100 bp, 200 bp, 500 bp or 1 kb from, a human genomic sequence selected from SEQ ID NO: 742-758, 759-829, 830-831, 832-839 or 840-867, or selected from SEQ ID NO: 742-758 or 759-829. In some embodiments, the method then identifies the target DNA fragment as being from a gallbladder epithelial cell when no more than 40% of the CpG sites are methylated. In some embodiments, the method identifies the target DNA fragment as being from a gallbladder epithelial cell when no more than 25%, 30%, 35%, 40%, 45%, or 50% of the CpG sites are methylated. Likewise, in some embodiments, the method identifies the target DNA fragment as being from a gallbladder epithelial cell when at least 50%, 55%, 60%, 65%, 70%, 75%, 80%, 85% or 90% of the CpG sites are unmethylated. In some embodiments, the method identifies the target DNA fragment as not being from a gallbladder epithelial cell when at least 50%, 55%, 60%, 65%, 70%, 75%, 80%, 85% or 90% of the CpG sites are methylated. In some embodiments, the method identifies the target DNA fragment as not being from a gallbladder epithelial cell when no more than 25%, 30%, 35%, 40%, 45%, or 50% of the CpG sites are unmethylated.

[0127] In some embodiments, the method entails detecting the methylation status of a plurality (e.g., 3, 4, 5, 6, 7, 8, 9, 10 or more) of CpG sites of a target DNA fragment in the biological sample, wherein at least one (or at least two, three, four, five, six, seven, eight, nine, ten or all) of the CpG sites is located within, or within 100 bp, 200 bp, 500 bp or 1 kb from, a human genomic sequence selected from SEQ ID NO: 868-875 or 876-876, or selected from SEQ ID NO: 868-875. In some embodiments, the method then identifies the target DNA fragment as being from a gallbladder epithelial cell when 50% or more of the CpG sites are methylated. In some embodiments, the method identifies the target DNA fragment as being from a gallbladder epithelial cell when at least 55%, 60%, 65%, 70%, 75%, 80%, 85% or 90% of the CpG sites are methylated. Likewise, in some embodiments, the method identifies the target DNA fragment as being from a gallbladder epithelial cell when no more than 25%, 30%, 35%, 40%, 45%, or 50% of the CpG sites are unmethylated. In some embodiments, the method identifies the target DNA fragment as not being from a gallbladder epithelial cell when no more than 25%, 30%, 35%, 40%, 45%, or 50%, 60% of the CpG sites are methylated. In some embodiments, the method identifies the target DNA fragment as not being from a gallbladder epithelial cell when at least 50%, 55%, 60%, 65%, 70%, 75%, 80%, 85% or 90% of the CpG sites are unmethylated.

[0128] In some embodiments, the methylation status of one or more other DNA fragments is further used in the cell type determination. In some embodiments, the one or more additional (different from the first one) DNA fragment is represented by a genomic sequence of SEQ ID NO: 742-758, 759-829, 830-831, 832-839, 840-867, 868-875 or 876-876.

[0129] The cell type identification method can be used to detect disease or condition associated with the cell type. In one embodiment, when a cell-free DNA in a biological sample (e.g., blood, plasma, serum, semen, milk, urine, saliva or cerebral spinal fluid) is identified as being from a gallbladder epithelial cell of a subject, the method indicates that the subject has abnormal cell death and/or a disease relating to the cell. In some embodiments, the disease or condition is injury, inflammation, or cancer of the gallbladder epithelium.

[0130] In some embodiments, when the amount of cell-free DNA identified as being from a particular type of cell or cells, e.g., gallbladder epithelial cells, is decreased, e.g., less at a second time point than at an earlier first time point of measurement, it indicates that the subject is recovering from the disease or condition. In some versions, the methods include making a diagnosis and/or treating a disease or condition accordingly based on the indication of recovery. In some embodiments, when the amount of cell-free DNA identified as being from a particular type of cell or cells, e.g., gallbladder epithelial cells is increased, e.g., more at a second time point than at an earlier first time point of measurement, it indicates that the disease or condition is worsening. In some versions, the methods include making a diagnosis and/or treating a disease or condition accordingly based on the indication of worsening. In some embodiments, between two or more testing, the subject undergoes a treatment, and thus the testing result indicates the treatment effect.

[0131] Also provided, in one embodiment, is a method for determining the cell type of a disease cell, e.g., a cancer cell, the primary origin of the disease, e.g., cancer, cell, or the signal or origin of the disease, e.g., cancer, cell. In some embodiments, a cancer cell has unknown primary origin. In some embodiments, the methods include detecting the methylation status of one or more DNA fragment of the cancer cell and can use the methylation status to determine the cell as a gallbladder epithelial cell, as described above.

[0132] In some instances, a cell-free DNA fragment is released from a cancer cell. The present technology can include determining the cell type of the cancer cell. In some embodiments, a genetic variation may also be present in the DNA fragment, and thus the cell type detection can help associate the genetic variation with the cancer. In some embodiments, the genetic variation includes a mutation. In some embodiments, the genetic variation includes a deletion or insertion. In some embodiments, the genetic variation constitutes microsatellite instability. In some embodiments, the genetic variation constitutes loss of heterozygosity. In some embodiments, the genetic variation interrupts or changes gene splicing. In some embodiments, the genetic variation causes frameshift or generation of premature stop codon. Once the primary origin of the cancer is identified, the subject may be treated with appropriate regiments for that cancer type.

### A7. Liver Hepatocytes

[0133] Also as provided in Table A, some genomic locations are uniformly under-methylated or over-methylated in liver hepatocytes as compared to all other cell types in the human.

[0134] In accordance with one embodiment of the present disclosure, a method is provided for identifying that a biological sample includes DNA from a liver hepatocyte. In some embodiments, the method entails detecting the methylation status of a plurality (e.g., 3, 4, 5, 6, 7, 8, 9, 10 or more) of CpG sites of a target DNA fragment in the biological sample, wherein at least one (or at least two, three, four, five, six, seven, eight, nine, ten or all) of the CpG sites is located within, or within 100 bp, 200 bp, 500 bp or 1 kb from, a human genomic sequence selected from SEQ ID NO: 877-896, 897-980, 981-983, 984-986, 987-988 or 989-1002, or selected from SEQ ID NO: 877-896 or 897-980. In some embodiments, the method then identifies the target DNA fragment as being from a liver hepatocyte when no more than 40% of the CpG sites are methylated. In some embodiments, the method identifies the target DNA fragment as being from a liver hepatocyte when no more than 25%, 30%, 35%, 40%, 45%, or 50% of the CpG sites are methylated. Likewise, in some embodiments, the method identifies the target DNA fragment as being from a liver hepatocyte when at least 50%, 55%, 60%, 65%, 70%, 75%, 80%, 85% or 90% of the CpG sites are unmethylated. In some embodiments, the method identifies the target DNA fragment as not being from a liver hepatocyte when at least 50%, 55%, 60%, 65%, 70%, 75%, 80%, 85% or 90% of the CpG sites are methylated. In some embodiments, the method identifies the target DNA fragment as not being from a liver hepatocyte when no more than 25%, 30%, 35%, 40%, 45%, or 50% of the CpG sites are unmethylated.

[0135] In some embodiments, the method entails detecting the methylation status of a plurality (e.g., 3, 4, 5, 6, 7, 8, 9, 10 or more) of CpG sites of a target DNA fragment in the biological sample, wherein at least one (or at least two, three, four, five, six, seven, eight, nine, ten or all) of the CpG sites is located within, or within 100 bp, 200 bp, 500 bp or 1 kb from, a human genomic sequence selected from SEQ ID NO: 1003-1018, 1019-1023 or 1024-1027, or selected from SEQ ID NO: 1003-1018. In some embodiments, the method then identifies the target DNA fragment as being from a liver hepatocyte when 50% or more of the CpG sites are methylated. In some embodiments, the method identifies the target DNA fragment as being from a liver hepatocyte when at least 55%, 60%, 65%, 70%, 75%, 80%, 85% or 90% of the CpG sites are methylated. Likewise, in some embodiments, the method identifies the target DNA fragment as being from a liver hepatocyte when no more than 25%, 30%, 35%, 40%, 45%, or 50% of the CpG sites are unmethylated. In some embodiments, the method identifies the target DNA fragment as not being from a liver hepatocyte when no more than 25%, 30%, 35%, 40%, 45%, or 50% of the CpG sites are methylated. In some embodiments, the method identifies the target DNA fragment as not being from a liver hepatocyte when at least 50%, 55%, 60%, 65%, 70%, 75%, 80%, 85% or 90% of the CpG sites are unmethylated.

[0136] In some embodiments, the methylation status of one or more other DNA fragments is further used in the cell type determination. In some embodiments, the one or more additional (different from the first one) DNA fragment is represented by a genomic sequence of SEQ ID NO: 877-896, 897-980, 981-983, 984-986, 987-988, 989-1002, 1003-1018, 1019-1023 or 1024-1027.

[0137] The cell type identification method can be used to detect disease or condition associated with the cell type. In one embodiment, when a cell-free DNA in a biological sample (e.g., blood, plasma, serum, semen, milk, urine, saliva or cerebral spinal fluid) is identified as being from a liver hepatocyte of a subject, the method indicates that the subject has abnormal cell death and/or a disease relating to the cell. In some embodiments, the disease or condition is injury, inflammation, or cancer of the liver hepatocytes.

[0138] In some embodiments, when the amount of cell-free DNA identified as being from a particular type of cell or cells, e.g., liver hepatocytes, is decreased, e.g., less at a second time point than at an earlier first time point of measurement, it indicates that the subject is recovering from the disease or condition. In some versions, the methods include making a diagnosis and/or treating a disease or condition accordingly based on the indication of recovery. In some embodiments, when the amount of cell-free DNA identified as being from a particular type of cell or cells, e.g., liver hepatocytes is increased, e.g., more at a second time point than at an earlier first time point of measurement, it indicates that the disease or condition is worsening. In some versions, the methods include making a diagnosis and/or treating a disease or condition accordingly based on the indication of worsening. In some embodiments, between two or more testing, the subject undergoes a treatment, and thus the testing result indicates the treatment effect.

[0139] Also provided, in one embodiment, is a method for determining the cell type of a disease cell, e.g., a cancer cell, the primary origin of the disease, e.g., cancer, cell, or the signal or origin of the disease, e.g., cancer, cell. In some embodiments, a cancer cell has unknown primary origin. In some embodiments, the methods include detecting the methylation status of one or more DNA fragment of the cancer cell and can use the methylation status to determine the cell as a liver hepatocyte, as described above.

[0140] In some instances, a cell-free DNA fragment is released from a cancer cell. The present technology can include determining the cell type of the cancer cell. In some embodiments, a genetic variation may also be present in the DNA fragment, and thus the cell type detection can help associate the genetic variation with the cancer. In some embodiments, the genetic variation includes a mutation. In some embodiments, the genetic variation includes a deletion or insertion. In some embodiments, the genetic variation constitutes microsatellite instability. In some embodiments, the genetic variation constitutes loss of heterozygosity. In some embodiments, the genetic variation interrupts or changes gene splicing. In some embodiments, the genetic variation causes frameshift or generation of premature stop codon. Once the primary origin of the cancer is identified, the subject may be treated with appropriate regiments for that cancer type.

### A8. Pancreatic Acinar Cells

[0141] Also as provided in Table A, some genomic locations are uniformly under-methylated or over-methylated in pancreatic acinar cells as compared to all other cell types in the human.

[0142] In accordance with one embodiment of the present disclosure, a method is provided for identifying that a biological sample includes DNA from a pancreatic acinar cell. In some embodiments, the method entails detecting the methylation status of a plurality (e.g., 3, 4, 5, 6, 7, 8, 9, 10 or more) of CpG sites of a target DNA fragment in the biological sample, wherein at least one (or at least two, three, four, five, six, seven, eight, nine, ten or all) of the CpG sites is located within, or within 100 bp, 200 bp, 500 bp or 1 kb from, a human genomic sequence selected from SEQ ID NO: 1028-1041,1042-1112, 1113-1116, 1117-1127 or 1128-1155, or selected from SEQ ID NO: 1028-1041 or 1042-1112. In some embodiments, the method then identifies the target DNA fragment as being from a pancreatic acinar cell when no more than 40% of the CpG sites are methylated. In some embodiments, the method identifies the target DNA fragment as being from a pancreatic acinar cell when no more than 25%, 30%, 35%, 40%, 45%, or 50% of the CpG sites are methylated. Likewise, in some embodiments, the method identifies the target DNA fragment as being from a pancreatic acinar cell when at least 50%, 55%, 60%, 65%, 70%, 75%, 80%, 85% or 90% of the CpG sites are unmethylated. In some embodiments, the method identifies the target DNA fragment as not being from a pancreatic acinar cell when at least 50%, 55%, 60%, 65%, 70%, 75%, 80%, 85% or 90% of the CpG sites are methylated. In some embodiments, the method identifies the target DNA fragment as not being from a pancreatic acinar cell when no more than 25%, 30%, 35%, 40%, 45%, or 50% of the CpG sites are unmethylated.

[0143] In some embodiments, the method entails detecting the methylation status of a plurality (e.g., 3, 4, 5, 6, 7, 8, 9, 10 or more) of CpG sites of a target DNA fragment in the biological sample, wherein at least one (or at least two, three, four, five, six, seven, eight, nine, ten or all) of the CpG sites is located within, or within 100 bp, 200 bp, 500 bp or 1 kb from, a human genomic sequence selected from SEQ ID NO: 1156-1161 or 1162-1180, or selected from SEQ ID NO: 1156-1161. In some embodiments, the method then identifies the target DNA fragment as being from a pancreatic acinar cell when 50% or more of the CpG sites are methylated. In some embodiments, the method identifies the target DNA fragment as being from a pancreatic acinar cell when at least 55%, 60%, 65%, 70%, 75%, 80%, 85% or 90% of the CpG sites are methylated. Likewise, in some embodiments, the method identifies the target DNA fragment as being from a pancreatic acinar cell when no more than 25%, 30%, 35%, 40%, 45%, or 50% of the CpG sites are unmethylated. In some embodiments, the method identifies the target DNA fragment as not being from a pancreatic acinar cell when no more than 25%, 30%, 35%, 40%, 45%, or 50% of the CpG sites are methylated. In some embodiments, the method identifies the target DNA fragment as not being from a pancreatic acinar cell when at least 50%, 55%, 60%, 65%, 70%, 75%, 80%, 85% or 90% of the CpG sites are unmethylated.

[0144] In some embodiments, the methylation status of one or more other DNA fragments is further used in the cell type determination. In some embodiments, the one or more additional (different from the first one) DNA fragment is represented by a genomic sequence of SEQ ID NO: 1028-1041, 1042-1112, 1113-1116, 1117-1127, 1128-1155, 1156-1161 or 1162-1180.

[0145] The cell type identification method can be used to detect disease or condition associated with the cell type. In one embodiment, when a cell-free DNA in a biological sample (e.g., blood, plasma, serum, semen, milk, urine, saliva or cerebral spinal fluid) is identified as being from a pancreatic acinar cell of a subject, the method indicates that the subject has abnormal cell death and/or a disease relating to the cell. In some embodiments, the disease or condition is injury, inflammation, or cancer of the pancreatic acinar cells. In some embodiments, the disease is diabetes.

[0146] In some embodiments, when the amount of cell-free DNA identified as being from a particular type of cell or cells, e.g., pancreatic acinar cells, is decreased, e.g., less at a second time point than at an earlier first time point of measurement, it indicates that the subject is recovering from the disease or condition. In some versions, the methods include making a diagnosis and/or treating a disease or condition accordingly based on the indication of recovery. In some embodiments, when the amount of cell-free DNA identified as being from a particular type of cell or cells, e.g., pancreatic acinar cells is increased, e.g., more at a second time point than at an earlier first time point of measurement, it indicates that the disease or condition is worsening. In some versions, the methods include making a diagnosis and/or treating a disease or condition accordingly based on the indication of worsening. In some embodiments, between two or more testing, the subject undergoes a treatment, and thus the testing result indicates the treatment effect.

[0147] Also provided, in one embodiment, is a method for determining the cell type of a disease cell, e.g., a cancer cell, the primary origin of the disease, e.g., cancer, cell, or the signal or origin of the disease, e.g., cancer, cell. In some embodiments, a cancer cell has unknown primary origin. In some embodiments, the methods include detecting the methylation status of one or more DNA fragment of the cancer cell and can use the methylation status to determine the cell as a pancreatic acinar cell, as described above.

[0148] In some instances, a cell-free DNA fragment is released from a cancer cell. The present technology can include determining the cell type of the cancer cell. In some embodiments, a genetic variation may also be present in the DNA fragment, and thus the cell type detection can help associate the genetic variation with the cancer. In some embodiments, the genetic variation includes a mutation. In some embodiments, the genetic variation includes a deletion or insertion. In some embodiments, the genetic variation constitutes microsatellite instability. In some embodiments, the genetic variation constitutes loss of heterozygosity. In some embodiments, the genetic variation interrupts or changes gene splicing. In some embodiments, the genetic variation causes frameshift or generation of premature stop codon. Once the primary origin of the cancer is identified, the subject may be treated with appropriate regiments for that cancer type.

### A9. Pancreatic Alpha Cells

[0149] Also as provided in Table A, some genomic locations are uniformly under-methylated or over-methylated in pancreatic alpha cells as compared to all other cell types in the human.

[0150] In accordance with one embodiment of the present disclosure, a method is provided for identifying that a biological sample includes DNA from a pancreatic alpha cell. In some embodiments, the method entails detecting the methylation status of a plurality (e.g., 3, 4, 5, 6, 7, 8, 9, 10 or more) of CpG sites of a target DNA fragment in the biological sample, wherein at least one (or at least two, three, four, five, six, seven, eight, nine, ten or all) of the CpG sites is located within, or within 100 bp, 200 bp, 500 bp or 1 kb from, a human genomic sequence selected from SEQ ID NO: 1181-1198, 1199-1282, 1283-1284, 1285-1287, 1288-1292 or 1293-1306, or selected from SEQ ID NO: 1181-1198 or 1199-1282. In some embodiments, the method then identifies the target DNA fragment as being from a pancreatic alpha cell when no more than 40% of the CpG sites are methylated. In some embodiments, the method identifies the target DNA fragment as being from a pancreatic alpha cell when no more than 25%, 30%, 35%, 40%, 45%, or 50% of the CpG sites are methylated. Likewise, in some embodiments, the method identifies the target DNA fragment as being from a pancreatic alpha cell when at least 50%, 55%, 60%, 65%, 70%, 75%, 80%, 85% or 90% of the CpG sites are unmethylated. In some embodiments, the method identifies the target DNA fragment as not being from a pancreatic alpha cell when at least 50%, 55%, 60%, 65%, 70%, 75%, 80%, 85% or 90% of the CpG sites are methylated. In some embodiments, the method identifies the target DNA fragment as not being from a pancreatic alpha cell when no more than 25%, 30%, 35%, 40%, 45%, or 50% of the CpG sites are unmethylated.

[0151] In some embodiments, the method entails detecting the methylation status of a plurality (e.g., 3, 4, 5, 6, 7, 8, 9, 10 or more) of CpG sites of a target DNA fragment in the biological sample, wherein at least one (or at least two, three, four, five, six, seven, eight, nine, ten or all) of the CpG sites is located within, or within 100 bp, 200 bp, 500 bp or 1 kb from, a human genomic sequence selected from SEQ ID NO: 1307-1315, 1316-1316 or 1317-1331, or selected from SEQ ID NO: 1307-1315. In some embodiments, the method then identifies the target DNA fragment as being from a pancreatic alpha cell when 50% or more of the CpG sites are methylated. In some embodiments, the method identifies the target DNA fragment as being from a pancreatic alpha cell when at least 55%, 60%, 65%, 70%, 75%, 80%, 85% or 90% of the CpG sites are methylated. Likewise, in some embodiments, the method identifies the target DNA fragment as being from a pancreatic alpha cell when no more than 25%, 30%, 35%, 40%, 45%, or 50% of the CpG sites are unmethylated. In some embodiments, the method identifies the target DNA fragment as not being from a pancreatic alpha cell when no more than 25%, 30%, 35%, 40%, 45%, or 50% of the CpG sites are methylated. In some embodiments, the method identifies the target DNA fragment as not being from a pancreatic alpha cell when at least 50%, 55%, 60%, 65%, 70%, 75%, 80%, 85% or 90% of the CpG sites are unmethylated.

[0152] In some embodiments, the methylation status of one or more other DNA fragments is further used in the cell type determination. In some embodiments, the one or more additional (different from the first one) DNA fragment is represented by a genomic sequence of SEQ ID NO: 1181-1198, 1199-1282, 1283-1284,1285-1287, 1288-1292,1293-1306, 1307-1315, 1316-1316 or 1317-1331.

[0153] The cell type identification method can be used to detect disease or condition associated with the cell type. In one embodiment, when a cell-free DNA in a biological sample (e.g., blood, plasma, serum, semen, milk, urine, saliva or cerebral spinal fluid) is identified as being from a pancreatic alpha cell of a subject, the method indicates that the subject has abnormal cell death and/or a disease relating to the cell. In some embodiments, the disease or condition is injury, inflammation, or cancer of the pancreatic alpha cells. In some embodiments, the disease is diabetes.

[0154] In some embodiments, when the amount of cell-free DNA identified as being from a particular type of cell or cells, e.g., pancreatic alpha cells, is decreased, e.g., less at a second time point than at an earlier first time point of measurement, it indicates that the subject is recovering from the disease or condition. In some versions, the methods include making a diagnosis and/or treating a disease or condition accordingly based on the indication of recovery. In some embodiments, when the amount of cell-free DNA identified as being from a particular type of cell or cells, e.g., pancreatic alpha cells is increased, e.g., more at a second time point than at an earlier first time point of measurement, it indicates that the disease or condition is worsening. In some versions, the methods include making a diagnosis and/or treating a disease or condition accordingly based on the indication of worsening. In some embodiments, between two or more testing, the subject undergoes a treatment, and thus the testing result indicates the treatment effect.

[0155] Also provided, in one embodiment, is a method for determining the cell type of a disease cell, e.g., a cancer cell, the primary origin of the disease, e.g., cancer, cell, or the signal or origin of the disease, e.g., cancer, cell. In some embodiments, a cancer cell has unknown primary origin. In some embodiments, the methods include detecting the methylation status of one or more DNA fragment of the cancer cell and can use the methylation status to determine the cell as a pancreatic alpha cell, as described above.

[0156] In some instances, a cell-free DNA fragment is released from a cancer cell. The present technology can include determining the cell type of the cancer cell. In some embodiments, a genetic variation may also be present in the DNA fragment, and thus the cell type detection can help associate the genetic variation with the cancer. In some embodiments, the genetic variation includes a mutation. In some embodiments, the genetic variation includes a deletion or insertion. In some embodiments, the genetic variation constitutes microsatellite instability. In some embodiments, the genetic variation constitutes loss of heterozygosity. In some embodiments, the genetic variation interrupts or changes gene splicing. In some embodiments, the genetic variation causes frameshift or generation of premature stop codon. Once the primary origin of the cancer is identified, the subject may be treated with appropriate regiments for that cancer type.

### A10. Pancreatic Beta Cells

[0157] Also as provided in Table A, some genomic locations are uniformly under-methylated or over-methylated in pancreatic beta cells as compared to all other cell types in the human.

[0158] In accordance with one embodiment of the present disclosure, a method is provided for identifying that a biological sample includes DNA from a pancreatic beta cell. In some embodiments, the method entails detecting the methylation status of a plurality (e.g., 3, 4, 5, 6, 7, 8, 9, 10 or more) of CpG sites of a target DNA fragment in the biological sample, wherein at least one (or at least two, three, four, five, six, seven, eight, nine, ten or all) of the CpG sites is located within, or within 100 bp, 200 bp, 500 bp or 1 kb from, a human genomic sequence selected from SEQ ID NO: 1332-1351, 1352-1440, 1441-1445 or 1446-1460, or selected from SEQ ID NO: 1332-1351 or 1352-1440. In some embodiments, the method then identifies the target DNA fragment as being from a pancreatic beta cell when no more than 40% of the CpG sites are methylated. In some embodiments, the method identifies the target DNA fragment as being from a pancreatic beta cell when no more than 25%, 30%, 35%, 40%, 45%, or 50% of the CpG sites are methylated. Likewise, in some embodiments, the method identifies the target DNA fragment as being from a pancreatic beta cell when at least 50%, 55%, 60%, 65%, 70%, 75%, 80%, 85% or 90% of the CpG sites are unmethylated. In some embodiments, the method identifies the target DNA fragment as not being from a pancreatic beta cell when at least 50%, 55%, 60%, 65%, 70%, 75%, 80%, 85% or 90% of the CpG sites are methylated. In some embodiments, the method identifies the target DNA fragment as not being from a pancreatic beta cell when no more than 25%, 30%, 35%, 40%, 45%, or 50% of the CpG sites are unmethylated.

[0159] In some embodiments, the method entails detecting the methylation status of a plurality (e.g., 3, 4, 5, 6, 7, 8, 9, 10 or more) of CpG sites of a target DNA fragment in the biological sample, wherein at least one (or at least two, three, four, five, six, seven, eight, nine, ten or all) of the CpG sites is located within, or within 100 bp, 200 bp, 500 bp or 1 kb from, a human genomic sequence selected from SEQ ID NO: 1461-1471 or 1472-1485, or selected from SEQ ID NO: 1461-1471. In some embodiments, the method then identifies the target DNA fragment as being from a pancreatic beta cell when 50% or more of the CpG sites are methylated. In some embodiments, the method identifies the target DNA fragment as being from a pancreatic beta cell when at least 55%, 60%, 65%, 70%, 75%, 80%, 85% or 90% of the CpG sites are methylated. Likewise, in some embodiments, the method identifies the target DNA fragment as being from a pancreatic beta cell when no more than 25%, 30%, 35%, 40%, 45%, or 50% of the CpG sites are unmethylated. In some embodiments, the method identifies the target DNA fragment as not being from a pancreatic beta cell when no more than 25%, 30%, 35%, 40%, 45%, or 50% of the CpG sites are methylated. In some embodiments, the method identifies the target DNA fragment as not being from a pancreatic beta cell when at least 50%, 55%, 60%, 65%, 70%, 75%, 80%, 85% or 90% of the CpG sites are unmethylated.

[0160] In some embodiments, the methylation status of one or more other DNA fragments is further used in the cell type determination. In some embodiments, the one or more additional (different from the first one) DNA fragment is represented by a genomic sequence of SEQ ID NO: 1332-1351, 1352-1440, 1441-1445, 1446-1460, 1461-1471 or 1472-1485.

[0161] The cell type identification method can be used to detect disease or condition associated with the cell type. In one embodiment, when a cell-free DNA in a biological sample (e.g., blood, plasma, serum, semen, milk, urine, saliva or cerebral spinal fluid) is identified as being from a pancreatic beta cell of a subject, the method indicates that the subject has abnormal cell death and/or a disease relating to the cell. In some embodiments, the disease or condition is injury, inflammation, or cancer of the pancreatic beta cells. In some embodiments, the disease is diabetes.

[0162] In some embodiments, when the amount of cell-free DNA identified as being from a particular type of cell or cells, e.g., pancreatic beta cells, is decreased, e.g., less at a second time point than at an earlier first time point of measurement, it indicates that the subject is recovering from the disease or condition. In some versions, the methods include making a diagnosis and/or treating a disease or condition accordingly based on the indication of recovery. In some embodiments, when the amount of cell-free DNA identified as being from a particular type of cell or cells, e.g., pancreatic beta cells is increased, e.g., more at a second time point than at an earlier first time point of measurement, it indicates that the disease or condition is worsening. In some versions, the methods include making a diagnosis and/or treating a disease or condition accordingly based on the indication of worsening. In some embodiments, between two or more testing, the subject undergoes a treatment, and thus the testing result indicates the treatment effect.

[0163] Also provided, in one embodiment, is a method for determining the cell type of a disease cell, e.g., a cancer cell, the primary origin of the disease, e.g., cancer, cell, or the signal or origin of the disease, e.g., cancer, cell. In some embodiments, a cancer cell has unknown primary origin. In some embodiments, the methods include detecting the methylation status of one or more DNA fragment of the cancer cell and can use the methylation status to determine the cell as a pancreatic beta cell, as described above.

[0164] In some instances, a cell-free DNA fragment is released from a cancer cell. The present technology can include determining the cell type of the cancer cell. In some embodiments, a genetic variation may also be present in the DNA fragment, and thus the cell type detection can help associate the genetic variation with the cancer. In some embodiments, the genetic variation includes a mutation. In some embodiments, the genetic variation includes a deletion or insertion. In some embodiments, the genetic variation constitutes microsatellite instability. In some embodiments, the genetic variation constitutes loss of heterozygosity. In some embodiments, the genetic variation interrupts or changes gene splicing. In some embodiments, the genetic variation causes frameshift or generation of premature stop codon. Once the primary origin of the cancer is identified, the subject may be treated with appropriate regiments for that cancer type.

### A11. Pancreatic Delta Cells

[0165] Also as provided in Table A, some genomic locations are uniformly under-methylated or over-methylated in pancreatic delta cells as compared to all other cell types in the human.

[0166] In accordance with one embodiment of the present disclosure, a method is provided for identifying that a biological sample includes DNA from a pancreatic delta cell. In some embodiments, the method entails detecting the methylation status of a plurality (e.g., 3, 4, 5, 6, 7, 8, 9, 10 or more) of CpG sites of a target DNA fragment in the biological sample, wherein at least one (or at least two, three, four, five, six, seven, eight, nine, ten or all) of the CpG sites is located within, or within 100 bp, 200 bp, 500 bp or 1 kb from, a human genomic sequence selected from SEQ ID NO: 1486-1508,1509-1594, 1595-1596, 1597-1598 or 1599-1613, or selected from SEQ ID NO: 1486-1508 or 1509-1594. In some embodiments, the method then identifies the target DNA fragment as being from a pancreatic delta cell when no more than 40% of the CpG sites are methylated. In some embodiments, the method identifies the target DNA fragment as being from a pancreatic delta cell when no more than 25%, 30%, 35%, 40%, 45%, or 50% of the CpG sites are methylated. Likewise, in some embodiments, the method identifies the target DNA fragment as being from a pancreatic delta cell when at least 50%, 55%, 60%, 65%, 70%, 75%, 80%, 85% or 90% of the CpG sites are unmethylated. In some embodiments, the method identifies the target DNA fragment as not being from a pancreatic delta cell when at least 50%, 55%, 60%, 65%, 70%, 75%, 80%, 85% or 90% of the CpG sites are methylated. In some embodiments, the method identifies the target DNA fragment as not being from a pancreatic delta cell when no more than 25%, 30%, 35%, 40%, 45%, or 50% of the CpG sites are unmethylated.

[0167] In some embodiments, the method entails detecting the methylation status of a plurality (e.g., 3, 4, 5, 6, 7, 8, 9, 10 or more) of CpG sites of a target DNA fragment in the biological sample, wherein at least one (or at least two, three, four, five, six, seven, eight, nine, ten or all) of the CpG sites is located within, or within 100 bp, 200 bp, 500 bp or 1 kb from, a human genomic sequence selected from SEQ ID NO: 1614-1624, 1625-1625 or 1626-1638, or selected from SEQ ID NO: 1614-1624. In some embodiments, the method then identifies the target DNA fragment as being from a pancreatic delta cell when 50% or more of the CpG sites are methylated. In some embodiments, the method identifies the target DNA fragment as being from a pancreatic delta cell when at least 55%, 60%, 65%, 70%, 75%, 80%, 85% or 90% of the CpG sites are methylated. Likewise, in some embodiments, the method identifies the target DNA fragment as being from a pancreatic delta cell when no more than 25%, 30%, 35%, 40%, 45%, or 50% of the CpG sites are unmethylated. In some embodiments, the method identifies the target DNA fragment as not being from a pancreatic delta cell when no more than 25%, 30%, 35%, 40%, 45%, or 50%, 16 of the CpG sites are methylated. In some embodiments, the method identifies the target DNA fragment as not being from a pancreatic delta cell when at least 50%, 55%, 60%, 65%, 70%, 75%, 80%, 85% or 90% of the CpG sites are unmethylated.

[0168] In some embodiments, the methylation status of one or more other DNA fragments is further used in the cell type determination. In some embodiments, the one or more additional (different from the first one) DNA fragment is represented by a genomic sequence of SEQ ID NO: 1486-1508, 1509-1594, 1595-1596, 1597-1598, 1599-1613, 1614-1624, 1625-1625 or 1626-1638.

[0169] The cell type identification method can be used to detect disease or condition associated with the cell type. In one embodiment, when a cell-free DNA in a biological sample (e.g., blood, plasma, serum, semen, milk, urine, saliva or cerebral spinal fluid) is identified as being from a pancreatic delta cell of a subject, the method indicates that the subject has abnormal cell death and/or a disease relating to the cell. In some embodiments, the disease or condition is injury, inflammation, or cancer of the pancreatic delta cells. In some embodiments, the disease is diabetes.

[0170] In some embodiments, when the amount of cell-free DNA identified as being from a particular type of cell or cells, e.g., pancreatic delta cells, is decreased, e.g., less at a second time point than at an earlier first time point of measurement, it indicates that the subject is recovering from the disease or condition. In some versions, the methods include making a diagnosis and/or treating a disease or condition accordingly based on the indication of recovery. In some embodiments, when the amount of cell-free DNA identified as being from a particular type of cell or cells, e.g., pancreatic delta cells is increased, e.g., more at a second time point than at an earlier first time point of measurement, it indicates that the disease or condition is worsening. In some versions, the methods include making a diagnosis and/or treating a disease or condition accordingly based on the indication of worsening. In some embodiments, between two or more testing, the subject undergoes a treatment, and thus the testing result indicates the treatment effect.

[0171] Also provided, in one embodiment, is a method for determining the cell type of a disease cell, e.g., a cancer cell, the primary origin of the disease, e.g., cancer, cell, or the signal or origin of the disease, e.g., cancer, cell. In some embodiments, a cancer cell has unknown primary origin. In some embodiments, the methods include detecting the methylation status of one or more DNA fragment of the cancer cell and can use the methylation status to determine the cell as a pancreatic delta cell, as described above.

[0172] In some instances, a cell-free DNA fragment is released from a cancer cell. The present technology can include determining the cell type of the cancer cell. In some embodiments, a genetic variation may also be present in the DNA fragment, and thus the cell type detection can help associate the genetic variation with the cancer. In some embodiments, the genetic variation includes a mutation. In some embodiments, the genetic variation includes a deletion or insertion. In some embodiments, the genetic variation constitutes microsatellite instability. In some embodiments, the genetic variation constitutes loss of heterozygosity. In some embodiments, the genetic variation interrupts or changes gene splicing. In some embodiments, the genetic variation causes frameshift or generation of premature stop codon. Once the primary origin of the cancer is identified, the subject may be treated with appropriate regiments for that cancer type.

### A12. Pancreatic Ductal Cells

[0173] Also as provided in Table A, some genomic locations are uniformly under-methylated or over-methylated in pancreatic ductal cells as compared to all other cell types in the human.

[0174] In accordance with one embodiment of the present disclosure, a method is provided for identifying that a biological sample includes DNA from a pancreatic ductal cell. In some embodiments, the method entails detecting the methylation status of a plurality (e.g., 3, 4, 5, 6, 7, 8, 9, 10 or more) of CpG sites of a target DNA fragment in the biological sample, wherein at least one (or at least two, three, four, five, six, seven, eight, nine, ten or all) of the CpG sites is located within, or within 100 bp, 200 bp, 500 bp or 1 kb from, a human genomic sequence selected from SEQ ID NO: 1639-1658, 1659-1742, 1743-1743, 1744-1747, 1748-1751 or 1752-1767, or selected from SEQ ID NO: 1639-1658 or 1659-1742. In some embodiments, the method then identifies the target DNA fragment as being from a pancreatic ductal cell when no more than 40% of the CpG sites are methylated. In some embodiments, the method identifies the target DNA fragment as being from a pancreatic ductal cell when no more than 25%, 30%, 35%, 40%, 45%, or 50% of the CpG sites are methylated. Likewise, in some embodiments, the method identifies the target DNA fragment as being from a pancreatic ductal cell when at least 50%, 55%, 60%, 65%, 70%, 75%, 80%, 85% or 90% of the CpG sites are unmethylated. In some embodiments, the method identifies the target DNA fragment as not being from a pancreatic ductal cell when at least 50%, 55%, 60%, 65%, 70%, 75%, 80%, 85% or 90% of the CpG sites are methylated. In some embodiments, the method identifies the target DNA fragment as not being from a pancreatic ductal cell when no more than 25%, 30%, 35%, 40%, 45%, or 50% of the CpG sites are unmethylated.

[0175] In some embodiments, the method entails detecting the methylation status of a plurality (e.g., 3, 4, 5, 6, 7, 8, 9, 10 or more) of CpG sites of a target DNA fragment in the biological sample, wherein at least one (or at least two, three, four, five, six, seven, eight, nine, ten or all) of the CpG sites is located within, or within 100 bp, 200 bp, 500 bp or 1 kb from, a human genomic sequence selected from SEQ ID NO: 1768-1779 or 1780-1792, or selected from SEQ ID NO: 1768-1779. In some embodiments, the method then identifies the target DNA fragment as being from a pancreatic ductal cell when 50% or more of the CpG sites are methylated. In some embodiments, the method identifies the target DNA fragment as being from a pancreatic ductal cell when at least 55%, 60%, 65%, 70%, 75%, 80%, 85% or 90% of the CpG sites are methylated. Likewise, in some embodiments, the method identifies the target DNA fragment as being from a pancreatic ductal cell when no more than 25%, 30%, 35%, 40%, 45%, or 50% of the CpG sites are unmethylated. In some embodiments, the method identifies the target DNA fragment as not being from a pancreatic ductal cell when no more than 25%, 30%, 35%, 40%, 45%, or 50% of the CpG sites are methylated. In some embodiments, the method identifies the target DNA fragment as not being from a pancreatic ductal cell when at least 50%, 55%, 60%, 65%, 70%, 75%, 80%, 85% or 90% of the CpG sites are unmethylated.

[0176] In some embodiments, the methylation status of one or more other DNA fragments is further used in the cell type determination. In some embodiments, the one or more additional (different from the first one) DNA fragment is represented by a genomic sequence of SEQ ID NO: 1639-1658, 1659-1742, 1743-1743, 1744-1747, 1748-1751, 1752-1767, 1768-1779 or 1780-1792.

[0177] The cell type identification method can be used to detect disease or condition associated with the cell type. In one embodiment, when a cell-free DNA in a biological sample (e.g., blood, plasma, serum, semen, milk, urine, saliva or cerebral spinal fluid) is identified as being from a pancreatic ductal cell of a subject, the method indicates that the subject has abnormal cell death and/or a disease relating to the cell. In some embodiments, the disease or condition is injury, inflammation, or cancer of the pancreatic ductal cells. In some embodiments, the disease is diabetes.

[0178] In some embodiments, when the amount of cell-free DNA identified as being from a particular type of cell or cells, e.g., pancreatic ductal cells, is decreased, e.g., less at a second time point than at an earlier first time point of measurement, it indicates that the subject is recovering from the disease or condition. In some versions, the methods include making a diagnosis and/or treating a disease or condition accordingly based on the indication of recovery. In some embodiments, when the amount of cell-free DNA identified as being from a particular type of cell or cells, e.g., pancreatic ductal cells is increased, e.g., more at a second time point than at an earlier first time point of measurement, it indicates that the disease or condition is worsening. In some versions, the methods include making a diagnosis and/or treating a disease or condition accordingly based on the indication of worsening. In some embodiments, between two or more testing, the subject undergoes a treatment, and thus the testing result indicates the treatment effect.

[0179] Also provided, in one embodiment, is a method for determining the cell type of a disease cell, e.g., a cancer cell, the primary origin of the disease, e.g., cancer, cell, or the signal or origin of the disease, e.g., cancer, cell. In some embodiments, a cancer cell has unknown primary origin. In some embodiments, the methods include detecting the methylation status of one or more DNA fragment of the cancer cell and can use the methylation status to determine the cell as a pancreatic ductal cell, as described above.

[0180] In some instances, a cell-free DNA fragment is released from a cancer cell. The present technology can include determining the cell type of the cancer cell. In some embodiments, a genetic variation may also be present in the DNA fragment, and thus the cell type detection can help associate the genetic variation with the cancer. In some embodiments, the genetic variation includes a mutation. In some embodiments, the genetic variation includes a deletion or insertion. In some embodiments, the genetic variation constitutes microsatellite instability. In some embodiments, the genetic variation constitutes loss of heterozygosity. In some embodiments, the genetic variation interrupts or changes gene splicing. In some embodiments, the genetic variation causes frameshift or generation of premature stop codon. Once the primary origin of the cancer is identified, the subject may be treated with appropriate regiments for that cancer type.

### Group 1—GI Epithelium (Colon Epithelium & Gastric Epithelium & Small Intestine Epithelium)

[0181] Also as provided in Table A, some genomic locations are uniformly under-methylated or over-methylated in a group of cells, namely colon epithelium & gastric epithelium & small intestine epithelium, as compared to all other cell types in the human.

[0182] In accordance with one embodiment of the present disclosure, a method is provided for identifying that a biological sample includes DNA from a cell selected from colon epithelium & gastric epithelium & small intestine epithelium. In some embodiments, the method entails detecting the methylation status of a plurality (e.g., 3, 4, 5, 6, 7, 8, 9, 10 or more) of CpG sites of a target DNA fragment in the biological sample, wherein at least one (or at least two, three, four, five, six, seven, eight, nine, ten or all) of the CpG sites is located within, or within 100 bp, 200 bp, 500 bp or 1 kb from, a human genomic sequence selected from SEQ ID NO: 6541-6556, 6557-6557 or 6558-6565, or selected from SEQ ID NO: 6541-6556. In some embodiments, the method then identifies the target DNA fragment as being from a cell selected from colon epithelium & gastric epithelium & small intestine epithelium when no more than 40% of the CpG sites are methylated. In some embodiments, the method identifies the target DNA fragment as being from a cell selected from colon epithelium & gastric epithelium & small intestine epithelium when no more than 25%, 30%, 35%, 40%, 45%, or 50% of the CpG sites are methylated. Likewise, in some embodiments, the method identifies the target DNA fragment as being from a cell selected from colon epithelium & gastric epithelium & small intestine epithelium when at least 50%, 55%, 60%, 65%, 70%, 75%, 80%, 85% or 90% of the CpG sites are unmethylated. In some embodiments, the method identifies the target DNA fragment as not being from a cell selected from colon epithelium & gastric epithelium & small intestine epithelium when at least 50%, 55%, 60%, 65%, 70%, 75%, 80%, 85% or 90% of the CpG sites are methylated. In some embodiments, the method identifies the target DNA fragment as not being from a cell selected from colon epithelium & gastric epithelium & small intestine epithelium when no more than 25%, 30%, 35%, 40%, 45%, or 50% of the CpG sites are unmethylated.

[0183] In some embodiments, the methylation status of one or more other DNA fragments is further used in the cell type determination. In some embodiments, the one or more additional (different from the first one) DNA fragment is represented by a genomic sequence of SEQ ID NO: 6541-6556, 6557-6557 or 6558-6565.

[0184] The cell type identification method can be used to detect disease or condition associated with the cell type. In one embodiment, when a cell-free DNA in a biological sample (e.g., blood, plasma, serum, semen, milk, urine, saliva or cerebral spinal fluid) is identified as being from a cell selected from colon epithelium & gastric epithelium & small intestine epithelium of a subject, the method indicates that the subject has abnormal cell death and/or a disease relating to the cell. In some embodiments, the disease or condition is injury, inflammation, or cancer of a cell selected from colon epithelium & gastric epithelium & small intestine epithelium.

[0185] In some embodiments, when the amount of cell-free DNA identified as being from a particular type of cell or cells, e.g., cells selected from colon epithelium & gastric epithelium & small intestine epithelium, is decreased, e.g., less at a second time point than at an earlier first time point of measurement, it indicates that the subject is recovering from the disease or condition. In some versions, the methods include making a diagnosis and/or treating a disease or condition accordingly based on the indication of recovery. In some embodiments, when the amount of cell-free DNA identified as being from a particular type of cell or cells, e.g., cells selected from colon epithelium & gastric epithelium & small intestine epithelium is increased, e.g., more at a second time point than at an earlier first time point of measurement, it indicates that the disease or condition is worsening. In some versions, the methods include making a diagnosis and/or treating a disease or condition accordingly based on the indication of worsening. In some embodiments, between two or more testing, the subject undergoes a treatment, and thus the testing result indicates the treatment effect.

[0186] Also provided, in one embodiment, is a method for determining the cell type of a disease cell, e.g., a cancer cell, the primary origin of the disease, e.g., cancer, cell, or the signal or origin of the disease, e.g., cancer, cell. In some embodiments, a cancer cell has unknown primary origin. In some embodiments, the methods include detecting the methylation status of one or more DNA fragment of the cancer cell and can use the methylation status to determine the cell as a cell selected from colon epithelium & gastric epithelium & small intestine epithelium, as described above.

[0187] In some instances, a cell-free DNA fragment is released from a cancer cell. The present technology can include determining the cell type of the cancer cell. In some embodiments, a genetic variation may also be present in the DNA fragment, and thus the cell type detection can help associate the genetic variation with the cancer. In some embodiments, the genetic variation includes a mutation. In some embodiments, the genetic variation includes a deletion or insertion. In some embodiments, the genetic variation constitutes microsatellite instability. In some embodiments, the genetic variation constitutes loss of heterozygosity. In some embodiments, the genetic variation interrupts or changes gene splicing. In some embodiments, the genetic variation causes frameshift or generation of premature stop codon. Once the primary origin of the cancer is identified, the subject may be treated with appropriate regiments for that cancer type.

### Group 2—Small Intestine Epithelium & Colon Epithelium

[0188] Also as provided in Table A, some genomic locations are uniformly under-methylated or over-methylated in a group of cells, namely small intestine epithelium & colon epithelium, as compared to all other cell types in the human.

[0189] In accordance with one embodiment of the present disclosure, a method is provided for identifying that a biological sample includes DNA from a cell selected from small intestine epithelium & colon epithelium. In some embodiments, the method entails detecting the methylation status of a plurality (e.g., 3, 4, 5, 6, 7, 8, 9, 10 or more) of CpG sites of a target DNA fragment in the biological sample, wherein at least one (or at least two, three, four, five, six, seven, eight, nine, ten or all) of the CpG sites is located within, or within 100 bp, 200 bp, 500 bp or 1 kb from, a human genomic sequence selected from SEQ ID NO: 6695-6702, 6703-6760, 6761-6777 or 6778-6820, or selected from SEQ ID NO: 6695-6702 or 6703-6760. In some embodiments, the method then identifies the target DNA fragment as being from a cell selected from small intestine epithelium & colon epithelium when no more than 40% of the CpG sites are methylated. In some embodiments, the method identifies the target DNA fragment as being from a cell selected from small intestine epithelium & colon epithelium when no more than 25%, 30%, 35%, 40%, 45%, or 50% of the CpG sites are methylated. Likewise, in some embodiments, the method identifies the target DNA fragment as being from a cell selected from small intestine epithelium & colon epithelium when at least 50%, 55%, 60%, 65%, 70%, 75%, 80%, 85% or 90% of the CpG sites are unmethylated. In some embodiments, the method identifies the target DNA fragment as not being from a cell selected from small intestine epithelium & colon epithelium when at least 50%, 55%, 60%, 65%, 70%, 75%, 80%, 85% or 90% of the CpG sites are methylated. In some embodiments, the method identifies the target DNA fragment as not being from a cell selected from small intestine epithelium & colon epithelium when no more than 25%, 30%, 35%, 40%, 45%, or 50% of the CpG sites are unmethylated.

[0190] In some embodiments, the method entails detecting the methylation status of a plurality (e.g., 3, 4, 5, 6, 7, 8, 9, 10 or more) of CpG sites of a target DNA fragment in the biological sample, wherein at least one (or at least two, three, four, five, six, seven, eight, nine, ten or all) of the CpG sites is located within, or within 100 bp, 200 bp, 500 bp or 1 kb from, a human genomic sequence selected from SEQ ID NO: 6821-6825 or 6826-6845, or selected from SEQ ID NO: 6821-6825. In some embodiments, the method then identifies the target DNA fragment as being from a cell selected from small intestine epithelium & colon epithelium when 50% or more of the CpG sites are methylated. In some embodiments, the method identifies the target DNA fragment as being from a cell selected from small intestine epithelium & colon epithelium when at least 55%, 60%, 65%, 70%, 75%, 80%, 85% or 90% of the CpG sites are methylated. Likewise, in some embodiments, the method identifies the target DNA fragment as being from a cell selected from small intestine epithelium & colon epithelium when no more than 25%, 30%, 35%, 40%, 45%, or 50% of the CpG sites are unmethylated. In some embodiments, the method identifies the target DNA fragment as not being from a cell selected from small intestine epithelium & colon epithelium when no more than 25%, 30%, 35%, 40%, 45%, or 50% of the CpG sites are methylated. In some embodiments, the method identifies the target DNA fragment as not being from a cell selected from small intestine epithelium & colon epithelium when at least 50%, 55%, 60%, 65%, 70%, 75%, 80%, 85% or 90% of the CpG sites are unmethylated.

[0191] In some embodiments, the methylation status of one or more other DNA fragments is further used in the cell type determination. In some embodiments, the one or more additional (different from the first one) DNA fragment is represented by a genomic sequence of SEQ ID NO: 6695-6702, 6703-6760, 6761-6777, 6778-6820, 6821-6825 or 6826-6845.

[0192] The cell type identification method can be used to detect disease or condition associated with the cell type. In one embodiment, when a cell-free DNA in a biological sample (e.g., blood, plasma, serum, semen, milk, urine, saliva or cerebral spinal fluid) is identified as being from a cell selected from small intestine epithelium & colon epithelium of a subject, the method indicates that the subject has abnormal cell death and/or a disease relating to the cell. In some embodiments, the disease or condition is injury, inflammation, or cancer of a cell selected from small intestine epithelium & colon epithelium.

[0193] In some embodiments, when the amount of cell-free DNA identified as being from a particular type of cell or cells, e.g., cells selected from small intestine epithelium & colon epithelium, is decreased, e.g., less at a second time point than at an earlier first time point of measurement, it indicates that the subject is recovering from the disease or condition. In some versions, the methods include making a diagnosis and/or treating a disease or condition accordingly based on the indication of recovery. In some embodiments, when the amount of cell-free DNA identified as being from a particular type of cell or cells, e.g., cells selected from small intestine epithelium & colon epithelium is increased, e.g., more at a second time point than at an earlier first time point of measurement, it indicates that the disease or condition is worsening. In some versions, the methods include making a diagnosis and/or treating a disease or condition accordingly based on the indication of worsening. In some embodiments, between two or more testing, the subject undergoes a treatment, and thus the testing result indicates the treatment effect.

[0194] Also provided, in one embodiment, is a method for determining the cell type of a disease cell, e.g., a cancer cell, the primary origin of the disease, e.g., cancer, cell, or the signal or origin of the disease, e.g., cancer, cell. In some embodiments, a cancer cell has unknown primary origin. In some embodiments, the methods include detecting the methylation status of one or more DNA fragment of the cancer cell and can use the methylation status to determine the cell as a cell selected from small intestine epithelium & colon epithelium, as described above.

[0195] In some instances, a cell-free DNA fragment is released from a cancer cell. The present technology can include determining the cell type of the cancer cell. In some embodiments, a genetic variation may also be present in the DNA fragment, and thus the cell type detection can help associate the genetic variation with the cancer. In some embodiments, the genetic variation includes a mutation. In some embodiments, the genetic variation includes a deletion or insertion. In some embodiments, the genetic variation constitutes microsatellite instability. In some embodiments, the genetic variation constitutes loss of heterozygosity. In some embodiments, the genetic variation interrupts or changes gene splicing. In some embodiments, the genetic variation causes frameshift or generation of premature stop codon. Once the primary origin of the cancer is identified, the subject may be treated with appropriate regiments for that cancer type.

### Group 3—Gastric Epithelium & Small Intestine Epithelium

[0196] Also as provided in Table A, some genomic locations are uniformly under-methylated or over-methylated in a group of cells, namely gastric epithelium & small intestine epithelium, as compared to all other cell types in the human.

[0197] In accordance with one embodiment of the present disclosure, a method is provided for identifying that a biological sample includes DNA from a cell selected from gastric epithelium & small intestine epithelium. In some embodiments, the method entails detecting the methylation status of a plurality (e.g., 3, 4, 5, 6, 7, 8, 9, 10 or more) of CpG sites of a target DNA fragment in the biological sample, wherein at least one (or at least two, three, four, five, six, seven, eight, nine, ten or all) of the CpG sites is located within, or within 100 bp, 200 bp, 500 bp or 1 kb from, a human genomic sequence selected from SEQ ID NO: 6566-6589, 6590-6672, 6673-6673, 6674-6674 or 6675-6690, or selected from SEQ ID NO: 6566-6589 or 6590-6672. In some embodiments, the method then identifies the target DNA fragment as being from a cell selected from gastric epithelium & small intestine epithelium when no more than 40% of the CpG sites are methylated. In some embodiments, the method identifies the target DNA fragment as being from a cell selected from gastric epithelium & small intestine epithelium when no more than 25%, 30%, 35%, 40%, 45%, or 50% of the CpG sites are methylated. Likewise, in some embodiments, the method identifies the target DNA fragment as being from a cell selected from gastric epithelium & small intestine epithelium when at least 50%, 55%, 60%, 65%, 70%, 75%, 80%, 85% or 90% of the CpG sites are unmethylated. In some embodiments, the method identifies the target DNA fragment as not being from a cell selected from gastric epithelium & small intestine epithelium when at least 50%, 55%, 60%, 65%, 70%, 75%, 80%, 85% or 90% of the CpG sites are methylated. In some embodiments, the method identifies the target DNA fragment as not being from a cell selected from gastric epithelium & small intestine epithelium when no more than 25%, 30%, 35%, 40%, 45%, or 50% of the CpG sites are unmethylated.

[0198] In some embodiments, the method entails detecting the methylation status of a plurality (e.g., 3, 4, 5, 6, 7, 8, 9, 10 or more) of CpG sites of a target DNA fragment in the biological sample, wherein at least one (or at least two, three, four, five, six, seven, eight, nine, ten or all) of the CpG sites is located within, or within 100 bp, 200 bp, 500 bp or 1 kb from, a human genomic sequence selected from SEQ ID NO: 6691 or 6692-6694, or selected from SEQ ID NO: 6691. In some embodiments, the method then identifies the target DNA fragment as being from a cell selected from gastric epithelium & small intestine epithelium when 50% or more of the CpG sites are methylated. In some embodiments, the method identifies the target DNA fragment as being from a cell selected from gastric epithelium & small intestine epithelium when at least 55%, 60%, 65%, 70%, 75%, 80%, 85% or 90% of the CpG sites are methylated. Likewise, in some embodiments, the method identifies the target DNA fragment as being from a cell selected from gastric epithelium & small intestine epithelium when no more than 25%, 30%, 35%, 40%, 45%, or 50% of the CpG sites are unmethylated. In some embodiments, the method identifies the target DNA fragment as not being from a cell selected from gastric epithelium & small intestine epithelium when no more than 25%, 30%, 35%, 40%, 45%, or 50% of the CpG sites are methylated. In some embodiments, the method identifies the target DNA fragment as not being from a cell selected from gastric epithelium & small intestine epithelium when at least 50%, 55%, 60%, 65%, 70%, 75%, 80%, 85% or 90% of the CpG sites are unmethylated.

[0199] In some embodiments, the methylation status of one or more other DNA fragments is further used in the cell type determination. In some embodiments, the one or more additional (different from the first one) DNA fragment is represented by a genomic sequence of SEQ ID NO: 6566-6589, 6590-6672, 6673-6673, 6674-6674, 6675-6690, 6691 or 6692-6694.

[0200] The cell type identification method can be used to detect disease or condition associated with the cell type. In one embodiment, when a cell-free DNA in a biological sample (e.g., blood, plasma, serum, semen, milk, urine, saliva or cerebral spinal fluid) is identified as being from a cell selected from gastric epithelium & small intestine epithelium of a subject, the method indicates that the subject has abnormal cell death and/or a disease relating to the cell. In some embodiments, the disease or condition is injury, inflammation, or cancer of a cell selected from gastric epithelium & small intestine epithelium.

[0201] In some embodiments, when the amount of cell-free DNA identified as being from a particular type of cell or cells, e.g., cells selected from gastric epithelium & small intestine epithelium, is decreased, e.g., less at a second time point than at an earlier first time point of measurement, it indicates that the subject is recovering from the disease or condition. In some versions, the methods include making a diagnosis and/or treating a disease or condition accordingly based on the indication of recovery. In some embodiments, when the amount of cell-free DNA identified as being from a particular type of cell or cells, e.g., cells selected from gastric epithelium & small intestine epithelium is increased, e.g., more at a second time point than at an earlier first time point of measurement, it indicates that the disease or condition is worsening. In some versions, the methods include making a diagnosis and/or treating a disease or condition accordingly based on the indication of worsening. In some embodiments, between two or more testing, the subject undergoes a treatment, and thus the testing result indicates the treatment effect.

[0202] Also provided, in one embodiment, is a method for determining the cell type of a disease cell, e.g., a cancer cell, the primary origin of the disease, e.g., cancer, cell, or the signal or origin of the disease, e.g., cancer, cell. In some embodiments, a cancer cell has unknown primary origin. In some embodiments, the methods include detecting the methylation status of one or more DNA fragment of the cancer cell and can use the methylation status to determine the cell as a cell selected from gastric epithelium & small intestine epithelium, as described above.

[0203] In some instances, a cell-free DNA fragment is released from a cancer cell. The present technology can include determining the cell type of the cancer cell. In some embodiments, a genetic variation may also be present in the DNA fragment, and thus the cell type detection can help associate the genetic variation with the cancer. In some embodiments, the genetic variation includes a mutation. In some embodiments, the genetic variation includes a deletion or insertion. In some embodiments, the genetic variation constitutes microsatellite instability. In some embodiments, the genetic variation constitutes loss of heterozygosity. In some embodiments, the genetic variation interrupts or changes gene splicing. In some embodiments, the genetic variation causes frameshift or generation of premature stop codon. Once the primary origin of the cancer is identified, the subject may be treated with appropriate regiments for that cancer type.

### Group 4—Colonfibroblasts & Heart Fibroblasts

[0204] Also as provided in Table A, some genomic locations are uniformly under-methylated or over-methylated in a group of cells, namely colon fibroblasts & heart fibroblasts, as compared to all other cell types in the human.

[0205] In accordance with one embodiment of the present disclosure, a method is provided for identifying that a biological sample includes DNA from a cell selected from colon fibroblasts & heart fibroblasts. In some embodiments, the method entails detecting the methylation status of a plurality (e.g., 3, 4, 5, 6, 7, 8, 9, 10 or more) of CpG sites of a target DNA fragment in the biological sample, wherein at least one (or at least two, three, four, five, six, seven, eight, nine, ten or all) of the CpG sites is located within, or within 100 bp, 200 bp, 500 bp or 1 kb from, a human genomic sequence selected from SEQ ID NO: 6846-6863, 6864-6869, 6870-6872, 6873-6876 or 6877-6878, or selected from SEQ ID NO: 6846-6863 or 6864-6869. In some embodiments, the method then identifies the target DNA fragment as being from a cell selected from colon fibroblasts & heart fibroblasts when no more than 40% of the CpG sites are methylated. In some embodiments, the method identifies the target DNA fragment as being from a cell selected from colon fibroblasts & heart fibroblasts when no more than 25%, 30%, 35%, 40%, 45%, or 50% of the CpG sites are methylated. Likewise, in some embodiments, the method identifies the target DNA fragment as being from a cell selected from colon fibroblasts & heart fibroblasts when at least 50%, 55%, 60%, 65%, 70%, 75%, 80%, 85% or 90% of the CpG sites are unmethylated. In some embodiments, the method identifies the target DNA fragment as not being from a cell selected from colon fibroblasts & heart fibroblasts when at least 50%, 55%, 60%, 65%, 70%, 75%, 80%, 85% or 90% of the CpG sites are methylated. In some embodiments, the method identifies the target DNA fragment as not being from a cell selected from colon fibroblasts & heart fibroblasts when no more than 25%, 30%, 35%, 40%, 45%, or 50% of the CpG sites are unmethylated.

[0206] In some embodiments, the method entails detecting the methylation status of a plurality (e.g., 3, 4, 5, 6, 7, 8, 9, 10 or more) of CpG sites of a target DNA fragment in the biological sample, wherein at least one (or at least two, three, four, five, six, seven, eight, nine, ten or all) of the CpG sites is located within, or within 100 bp, 200 bp, 500 bp or 1 kb from, a human genomic sequence selected from SEQ ID NO: 6879-6890 or 6891-6898, or selected from SEQ ID NO: 6879-6890. In some embodiments, the method then identifies the target DNA fragment as being from a cell selected from colon fibroblasts & heart fibroblasts when 50% or more of the CpG sites are methylated. In some embodiments, the method identifies the target DNA fragment as being from a cell selected from colon fibroblasts & heart fibroblasts when at least 55%, 60%, 65%, 70%, 75%, 80%, 85% or 90% of the CpG sites are methylated. Likewise, in some embodiments, the method identifies the target DNA fragment as being from a cell selected from colon fibroblasts & heart fibroblasts when no more than 25%, 30%, 35%, 40%, 45%, or 50% of the CpG sites are unmethylated. In some embodiments, the method identifies the target DNA fragment as not being from a cell selected from colon fibroblasts & heart fibroblasts when no more than 25%, 30%, 35%, 40%, 45%, or 50% of the CpG sites are methylated. In some embodiments, the method identifies the target DNA fragment as not being from a cell selected from colon fibroblasts & heart fibroblasts when at least 50%, 55%, 60%, 65%, 70%, 75%, 80%, 85% or 90% of the CpG sites are unmethylated.

[0207] In some embodiments, the methylation status of one or more other DNA fragments is further used in the cell type determination. In some embodiments, the one or more additional (different from the first one) DNA fragment is represented by a genomic sequence of SEQ ID NO: 6846-6863, 6864-6869, 6870-6872, 6873-6876, 6877-6878, 6879-6890 or 6891-6898.

[0208] The cell type identification method can be used to detect disease or condition associated with the cell type. In one embodiment, when a cell-free DNA in a biological sample (e.g., blood, plasma, serum, semen, milk, urine, saliva or cerebral spinal fluid) is identified as being from a cell selected from colon fibroblasts & heart fibroblasts of a subject, the method indicates that the subject has abnormal cell death and/or a disease relating to the cell. In some embodiments, the disease or condition is injury, inflammation, or cancer of a cell selected from colon fibroblasts & heart fibroblasts.

[0209] In some embodiments, when the amount of cell-free DNA identified as being from a particular type of cell or cells, e.g., cells selected from colon fibroblasts & heart fibroblasts, is decreased, e.g., less at a second time point than at an earlier first time point of measurement, it indicates that the subject is recovering from the disease or condition. In some versions, the methods include making a diagnosis and/or treating a disease or condition accordingly based on the indication of recovery. In some embodiments, when the amount of cell-free DNA identified as being from a particular type of cell or cells, e.g., cells selected from colon fibroblasts & heart fibroblasts is increased, e.g., more at a second time point than at an earlier first time point of measurement, it indicates that the disease or condition is worsening. In some versions, the methods include making a diagnosis and/or treating a disease or condition accordingly based on the indication of worsening. In some embodiments, between two or more testing, the subject undergoes a treatment, and thus the testing result indicates the treatment effect.

[0210] Also provided, in one embodiment, is a method for determining the cell type of a disease cell, e.g., a cancer cell, the primary origin of the disease, e.g., cancer, cell, or the signal or origin of the disease, e.g., cancer, cell. In some embodiments, a cancer cell has unknown primary origin. In some embodiments, the methods include detecting the methylation status of one or more DNA fragment of the cancer cell and can use the methylation status to determine the cell as a cell selected from colon fibroblasts & heart fibroblasts, as described above.

[0211] In some instances, a cell-free DNA fragment is released from a cancer cell. The present technology can include determining the cell type of the cancer cell. In some embodiments, a genetic variation may also be present in the DNA fragment, and thus the cell type detection can help associate the genetic variation with the cancer. In some embodiments, the genetic variation includes a mutation. In some embodiments, the genetic variation includes a deletion or insertion. In some embodiments, the genetic variation constitutes microsatellite instability. In some embodiments, the genetic variation constitutes loss of heterozygosity. In some embodiments, the genetic variation interrupts or changes gene splicing. In some embodiments, the genetic variation causes frameshift or generation of premature stop codon. Once the primary origin of the cancer is identified, the subject may be treated with appropriate regiments for that cancer type.

### Group 5 Pancreatic Alpha & Beta & Delta Cells

[0212] Also as provided in Table A, some genomic locations are uniformly under-methylated or over-methylated in a group of cells, namely pancreatic alpha & beta & delta cells, as compared to all other cell types in the human.

[0213] In accordance with one embodiment of the present disclosure, a method is provided for identifying that a biological sample includes DNA from a cell selected from pancreatic alpha & beta & delta cells. In some embodiments, the method entails detecting the methylation status of a plurality (e.g., 3, 4, 5, 6, 7, 8, 9, 10 or more) of CpG sites of a target DNA fragment in the biological sample, wherein at least one (or at least two, three, four, five, six, seven, eight, nine, ten or all) of the CpG sites is located within, or within 100 bp, 200 bp, 500 bp or 1 kb from, a human genomic sequence selected from SEQ ID NO: 5924-5935, 5936-6011, 6012-6012, 6013-6014, 6015-6026 or 6027-6050, or selected from SEQ ID NO: 5924-5935 or 5936-6011. In some embodiments, the method then identifies the target DNA fragment as being from a cell selected from pancreatic alpha & beta & delta cells when no more than 40% of the CpG sites are methylated. In some embodiments, the method identifies the target DNA fragment as being from a cell selected from pancreatic alpha & beta & delta cells when no more than 25%, 30%, 35%, 40%, 45%, or 50% of the CpG sites are methylated. Likewise, in some embodiments, the method identifies the target DNA fragment as being from a cell selected from pancreatic alpha & beta & delta cells when at least 50%, 55%, 60%, 65%, 70%, 75%, 80%, 85% or 90% of the CpG sites are unmethylated. In some embodiments, the method identifies the target DNA fragment as not being from a cell selected from pancreatic alpha & beta & delta cells when at least 50%, 55%, 60%, 65%, 70%, 75%, 80%, 85% or 90% of the CpG sites are methylated. In some embodiments, the method identifies the target DNA fragment as not being from a cell selected from pancreatic alpha & beta & delta cells when no more than 25%, 30%, 35%, 40%, 45%, or 50% of the CpG sites are unmethylated.

[0214] In some embodiments, the method entails detecting the methylation status of a plurality (e.g., 3, 4, 5, 6, 7, 8, 9, 10 or more) of CpG sites of a target DNA fragment in the biological sample, wherein at least one (or at least two, three, four, five, six, seven, eight, nine, ten or all) of the CpG sites is located within, or within 100 bp, 200 bp, 500 bp or 1 kb from, a human genomic sequence selected from SEQ ID NO: 6051-6057 or 6058-6075, or selected from SEQ ID NO: 6051-6057. In some embodiments, the method then identifies the target DNA fragment as being from a cell selected from pancreatic alpha & beta & delta cells when 50% or more of the CpG sites are methylated. In some embodiments, the method identifies the target DNA fragment as being from a cell selected from pancreatic alpha & beta & delta cells when at least 55%, 60%, 65%, 70%, 75%, 80%, 85% or 90% of the CpG sites are methylated. Likewise, in some embodiments, the method identifies the target DNA fragment as being from a cell selected from pancreatic alpha & beta & delta cells when no more than 25%, 30%, 35%, 40%, 45%, or 50% of the CpG sites are unmethylated. In some embodiments, the method identifies the target DNA fragment as not being from a cell selected from pancreatic alpha & beta & delta cells when no more than 25%, 30%, 35%, 40%, 45%, or 50%, 16 of the CpG sites are methylated. In some embodiments, the method identifies the target DNA fragment as not being from a cell selected from pancreatic alpha & beta & delta cells when at least 50%, 55%, 60%, 65%, 70%, 75%, 80%, 85% or 90% of the CpG sites are unmethylated.

[0215] In some embodiments, the methylation status of one or more other DNA fragments is further used in the cell type determination. In some embodiments, the one or more additional (different from the first one) DNA fragment is represented by a genomic sequence of SEQ ID NO: 5924-5935, 5936-6011, 6012-6012, 6013-6014, 6015-6026, 6027-6050, 6051-6057 or 6058-6075.

[0216] The cell type identification method can be used to detect disease or condition associated with the cell type. In one embodiment, when a cell-free DNA in a biological sample (e.g., blood, plasma, serum, semen, milk, urine, saliva or cerebral spinal fluid) is identified as being from a cell selected from pancreatic alpha & beta & delta cells of a subject, the method indicates that the subject has abnormal cell death and/or a disease relating to the cell. In some embodiments, the disease or condition is injury, inflammation, or cancer of a cell selected from pancreatic alpha & beta & delta cells.

[0217] In some embodiments, when the amount of cell-free DNA identified as being from a particular type of cell or cells, e.g., cells selected from pancreatic alpha & beta & delta cells, is decreased, e.g., less at a second time point than at an earlier first time point of measurement, it indicates that the subject is recovering from the disease or condition. In some versions, the methods include making a diagnosis and/or treating a disease or condition accordingly based on the indication of recovery. In some embodiments, when the amount of cell-free DNA identified as being from a particular type of cell or cells, e.g., cells selected from pancreatic alpha & beta & delta cells is increased, e.g., more at a second time point than at an earlier first time point of measurement, it indicates that the disease or condition is worsening. In some versions, the methods include making a diagnosis and/or treating a disease or condition accordingly based on the indication of worsening. In some embodiments, between two or more testing, the subject undergoes a treatment, and thus the testing result indicates the treatment effect.

[0218] Also provided, in one embodiment, is a method for determining the cell type of a disease cell, e.g., a cancer cell, the primary origin of the disease, e.g., cancer, cell, or the signal or origin of the disease, e.g., cancer, cell. In some embodiments, a cancer cell has unknown primary origin. In some embodiments, the methods include detecting the methylation status of one or more DNA fragment of the cancer cell and can use the methylation status to determine the cell as a cell selected from pancreatic alpha & beta & delta cells, as described above.

[0219] In some instances, a cell-free DNA fragment is released from a cancer cell. The present technology can include determining the cell type of the cancer cell. In some embodiments, a genetic variation may also be present in the DNA fragment, and thus the cell type detection can help associate the genetic variation with the cancer. In some embodiments, the genetic variation includes a mutation. In some embodiments, the genetic variation includes a deletion or insertion. In some embodiments, the genetic variation constitutes microsatellite instability. In some embodiments, the genetic variation constitutes loss of heterozygosity. In some embodiments, the genetic variation interrupts or changes gene splicing. In some embodiments, the genetic variation causes frameshift or generation of premature stop codon. Once the primary origin of the cancer is identified, the subject may be treated with appropriate regiments for that cancer type.

### B. Genito-Urinary Cells

### B1. Endometrium Epithelium

[0220] Also as provided in Table A, some genomic locations are uniformly under-methylated or over-methylated in endometrium epithelial cells as compared to all other cell types in the human.

[0221] In accordance with one embodiment of the present disclosure, a method is provided for identifying that a biological sample includes DNA from an endometrium epithelial cell. In some embodiments, the method entails detecting the methylation status of a plurality (e.g., 3, 4, 5, 6, 7, 8, 9, 10 or more) of CpG sites of a target DNA fragment in the biological sample, wherein at least one (or at least two, three, four, five, six, seven, eight, nine, ten or all) of the CpG sites is located within, or within 100 bp, 200 bp, 500 bp or 1 kb from, a human genomic sequence selected from SEQ ID NO: 1793-1864, 1865-1872 or 1873-1892, or selected from SEQ ID NO: 1793-1864. In some embodiments, the method then identifies the target DNA fragment as being from an endometrium epithelial cell when no more than 40% of the CpG sites are methylated. In some embodiments, the method identifies the target DNA fragment as being from an endometrium epithelial cell when no more than 25%, 30%, 35%, 40%, 45%, or 50% of the CpG sites are methylated. Likewise, in some embodiments, the method identifies the target DNA fragment as being from an endometrium epithelial cell when at least 50%, 55%, 60%, 65%, 70%, 75%, 80%, 85% or 90% of the CpG sites are unmethylated. In some embodiments, the method identifies the target DNA fragment as not being from an endometrium epithelial cell when at least 50%, 55%, 60%, 65%, 70%, 75%, 80%, 85% or 90% of the CpG sites are methylated. In some embodiments, the method identifies the target DNA fragment as not being from an endometrium epithelial cell when no more than 25%, 30%, 35%, 40%, 45%, or 50% of the CpG sites are unmethylated.

[0222] In some embodiments, the method entails detecting the methylation status of a plurality (e.g., 3, 4, 5, 6, 7, 8, 9, 10 or more) of CpG sites of a target DNA fragment in the biological sample, wherein at least one (or at least two, three, four, five, six, seven, eight, nine, ten or all) of the CpG sites is located within, or within 100 bp, 200 bp, 500 bp or 1 kb from, a human genomic sequence selected from SEQ ID NO: 1893-1905 or 1906-1917, or selected from SEQ ID NO: 1893-1905. In some embodiments, the method then identifies the target DNA fragment as being from an endometrium epithelial cell when 50% or more of the CpG sites are methylated. In some embodiments, the method identifies the target DNA fragment as being from an endometrium epithelial cell when at least 55%, 60%, 65%, 70%, 75%, 80%, 85% or 90% of the CpG sites are methylated. Likewise, in some embodiments, the method identifies the target DNA fragment as being from an endometrium epithelial cell when no more than 25%, 30%, 35%, 40%, 45%, or 50% of the CpG sites are unmethylated. In some embodiments, the method identifies the target DNA fragment as not being from an endometrium epithelial cell when no more than 25%, 30%, 35%, 40%, 45%, or 50% of the CpG sites are methylated. In some embodiments, the method identifies the target DNA fragment as not being from an endometrium epithelial cell when at least 50%, 55%, 60%, 65%, 70%, 75%, 80%, 85% or 90% of the CpG sites are unmethylated.

[0223] In some embodiments, the methylation status of one or more other DNA fragments is further used in the cell type determination. In some embodiments, the one or more additional (different from the first one) DNA fragment is represented by a genomic sequence of SEQ ID NO: 1793-1864, 1865-1872, 1873-1892, 1893-1905 or 1906-1917.

[0224] The cell type identification method can be used to detect disease or condition associated with the cell type. In one embodiment, when a cell-free DNA in a biological sample (e.g., blood, plasma, serum, semen, milk, urine, saliva or cerebral spinal fluid) is identified as being from an endometrium epithelial cell of a subject, the method indicates that the subject has abnormal cell death and/or a disease relating to the cell. In some embodiments, the disease or condition is injury, inflammation, or cancer of the endometrium epithelium.

[0225] In some embodiments, when the amount of cell-free DNA identified as being from a particular type of cell or cells, e.g., endometrium epithelial cells, is decreased, e.g., less at a second time point than at an earlier first time point of measurement, it indicates that the subject is recovering from the disease or condition. In some versions, the methods include making a diagnosis and/or treating a disease or condition accordingly based on the indication of recovery. In some embodiments, when the amount of cell-free DNA identified as being from a particular type of cell or cells, e.g., endometrium epithelial cells is increased, e.g., more at a second time point than at an earlier first time point of measurement, it indicates that the disease or condition is worsening. In some versions, the methods include making a diagnosis and/or treating a disease or condition accordingly based on the indication of worsening. In some embodiments, between two or more testing, the subject undergoes a treatment, and thus the testing result indicates the treatment effect.

[0226] Also provided, in one embodiment, is a method for determining the cell type of a disease cell, e.g., a cancer cell, the primary origin of the disease, e.g., cancer, cell, or the signal or origin of the disease, e.g., cancer, cell. In some embodiments, a cancer cell has unknown primary origin. In some embodiments, the methods include detecting the methylation status of one or more DNA fragment of the cancer cell and can use the methylation status to determine the cell as an endometrium epithelial cell, as described above.

[0227] In some instances, a cell-free DNA fragment is released from a cancer cell. The present technology can include determining the cell type of the cancer cell. In some embodiments, a genetic variation may also be present in the DNA fragment, and thus the cell type detection can help associate the genetic variation with the cancer. In some embodiments, the genetic variation includes a mutation. In some embodiments, the genetic variation includes a deletion or insertion. In some embodiments, the genetic variation constitutes microsatellite instability. In some embodiments, the genetic variation constitutes loss of heterozygosity. In some embodiments, the genetic variation interrupts or changes gene splicing. In some embodiments, the genetic variation causes frameshift or generation of premature stop codon. Once the primary origin of the cancer is identified, the subject may be treated with appropriate regiments for that cancer type.

### B2. Fallopian Epithelium

[0228] Also as provided in Table A, some genomic locations are uniformly under-methylated or over-methylated in fallopian epithelial cells as compared to all other cell types in the human.

[0229] In accordance with one embodiment of the present disclosure, a method is provided for identifying that a biological sample includes DNA from a fallopian epithelial cell. In some embodiments, the method entails detecting the methylation status of a plurality (e.g., 3, 4, 5, 6, 7, 8, 9, 10 or more) of CpG sites of a target DNA fragment in the biological sample, wherein at least one (or at least two, three, four, five, six, seven, eight, nine, ten or all) of the CpG sites is located within, or within 100 bp, 200 bp, 500 bp or 1 kb from, a human genomic sequence selected from SEQ ID NO: 1918-1937, 1938-2022, 2023-2024, 2025-2029 or 2030-2042, or selected from SEQ ID NO: 1918-1937 or 1938-2022. In some embodiments, the method then identifies the target DNA fragment as being from a fallopian epithelial cell when no more than 40% of the CpG sites are methylated. In some embodiments, the method identifies the target DNA fragment as being from a fallopian epithelial cell when no more than 25%, 30%, 35%, 40%, 45%, or 50% of the CpG sites are methylated. Likewise, in some embodiments, the method identifies the target DNA fragment as being from a fallopian epithelial cell when at least 50%, 55%, 60%, 65%, 70%, 75%, 80%, 85% or 90% of the CpG sites are unmethylated. In some embodiments, the method identifies the target DNA fragment as not being from a fallopian epithelial cell when at least 50%, 55%, 60%, 65%, 70%, 75%, 80%, 85% or 90% of the CpG sites are methylated. In some embodiments, the method identifies the target DNA fragment as not being from a fallopian epithelial cell when no more than 25%, 30%, 35%, 40%, 45%, or 50% of the CpG sites are unmethylated.

[0230] In some embodiments, the method entails detecting the methylation status of a plurality (e.g., 3, 4, 5, 6, 7, 8, 9, 10 or more) of CpG sites of a target DNA fragment in the biological sample, wherein at least one (or at least two, three, four, five, six, seven, eight, nine, ten or all) of the CpG sites is located within, or within 100 bp, 200 bp, 500 bp or 1 kb from, a human genomic sequence selected from SEQ ID NO: 2043-2061 or 2062-2067, or selected from SEQ ID NO: 2043-2061. In some embodiments, the method then identifies the target DNA fragment as being from a fallopian epithelial cell when 50% or more of the CpG sites are methylated. In some embodiments, the method identifies the target DNA fragment as being from a fallopian epithelial cell when at least 55%, 60%, 65%, 70%, 75%, 80%, 85% or 90% of the CpG sites are methylated. Likewise, in some embodiments, the method identifies the target DNA fragment as being from a fallopian epithelial cell when no more than 25%, 30%, 35%, 40%, 45%, or 50% of the CpG sites are unmethylated. In some embodiments, the method identifies the target DNA fragment as not being from a fallopian epithelial cell when no more than 25%, 30%, 35%, 40%, 45%, or 50% of the CpG sites are methylated. In some embodiments, the method identifies the target DNA fragment as not being from a fallopian epithelial cell when at least 50%, 55%, 60%, 65%, 70%, 75%, 80%, 85% or 90% of the CpG sites are unmethylated.

[0231] In some embodiments, the methylation status of one or more other DNA fragments is further used in the cell type determination. In some embodiments, the one or more additional (different from the first one) DNA fragment is represented by a genomic sequence of SEQ ID NO: 1918-1937, 1938-2022, 2023-2024, 2025-2029, 2030-2042, 2043-2061 or 2062-2067.

[0232] The cell type identification method can be used to detect disease or condition associated with the cell type. In one embodiment, when a cell-free DNA in a biological sample (e.g., blood, plasma, serum, semen, milk, urine, saliva or cerebral spinal fluid) is identified as being from a fallopian epithelial cell of a subject, the method indicates that the subject has abnormal cell death and/or a disease relating to the cell. In some embodiments, the disease or condition is injury, inflammation, or cancer of the fallopian epithelium.

[0233] In some embodiments, when the amount of cell-free DNA identified as being from a particular type of cell or cells, e.g., fallopian epithelial cells, is decreased, e.g., less at a second time point than at an earlier first time point of measurement, it indicates that the subject is recovering from the disease or condition. In some versions, the methods include making a diagnosis and/or treating a disease or condition accordingly based on the indication of recovery. In some embodiments, when the amount of cell-free DNA identified as being from a particular type of cell or cells, e.g., fallopian epithelial cells is increased, e.g., more at a second time point than at an earlier first time point of measurement, it indicates that the disease or condition is worsening. In some versions, the methods include making a diagnosis and/or treating a disease or condition accordingly based on the indication of worsening. In some embodiments, between two or more testing, the subject undergoes a treatment, and thus the testing result indicates the treatment effect.

[0234] Also provided, in one embodiment, is a method for determining the cell type of a disease cell, e.g., a cancer cell, the primary origin of the disease, e.g., cancer, cell, or the signal or origin of the disease, e.g., cancer, cell. In some embodiments, a cancer cell has unknown primary origin. In some embodiments, the methods include detecting the methylation status of one or more DNA fragment of the cancer cell and can use the methylation status to determine the cell as a fallopian epithelial cell, as described above.

[0235] In some instances, a cell-free DNA fragment is released from a cancer cell. The present technology can include determining the cell type of the cancer cell. In some embodiments, a genetic variation may also be present in the DNA fragment, and thus the cell type detection can help associate the genetic variation with the cancer. In some embodiments, the genetic variation includes a mutation. In some embodiments, the genetic variation includes a deletion or insertion. In some embodiments, the genetic variation constitutes microsatellite instability. In some embodiments, the genetic variation constitutes loss of heterozygosity. In some embodiments, the genetic variation interrupts or changes gene splicing. In some embodiments, the genetic variation causes frameshift or generation of premature stop codon. Once the primary origin of the cancer is identified, the subject may be treated with appropriate regiments for that cancer type.

### B3. Kidney Epithelium

[0236] Also as provided in Table A, some genomic locations are uniformly under-methylated or over-methylated in kidney epithelial cells as compared to all other cell types in the human.

[0237] In accordance with one embodiment of the present disclosure, a method is provided for identifying that a biological sample includes DNA from a kidney epithelial cell. In some embodiments, the method entails detecting the methylation status of a plurality (e.g., 3, 4, 5, 6, 7, 8, 9, 10 or more) of CpG sites of a target DNA fragment in the biological sample, wherein at least one (or at least two, three, four, five, six, seven, eight, nine, ten or all) of the CpG sites is located within, or within 100 bp, 200 bp, 500 bp or 1 kb from, a human genomic sequence selected from SEQ ID NO: 2068-2080, 2081-2141, 2142-2144, 2145-2156 or 2157-2194, or selected from SEQ ID NO: 2068-2080 or 2081-2141. In some embodiments, the method then identifies the target DNA fragment as being from a kidney epithelial cell when no more than 40% of the CpG sites are methylated. In some embodiments, the method identifies the target DNA fragment as being from a kidney epithelial cell when no more than 25%, 30%, 35%, 40%, 45%, or 50% of the CpG sites are methylated. Likewise, in some embodiments, the method identifies the target DNA fragment as being from a kidney epithelial cell when at least 50%, 55%, 60%, 65%, 70%, 75%, 80%, 85% or 90% of the CpG sites are unmethylated. In some embodiments, the method identifies the target DNA fragment as not being from a kidney epithelial cell when at least 50%, 55%, 60%, 65%, 70%, 75%, 80%, 85% or 90% of the CpG sites are methylated. In some embodiments, the method identifies the target DNA fragment as not being from a kidney epithelial cell when no more than 25%, 30%, 35%, 40%, 45%, or 50% of the CpG sites are unmethylated.

[0238] In some embodiments, the method entails detecting the methylation status of a plurality (e.g., 3, 4, 5, 6, 7, 8, 9, 10 or more) of CpG sites of a target DNA fragment in the biological sample, wherein at least one (or at least two, three, four, five, six, seven, eight, nine, ten or all) of the CpG sites is located within, or within 100 bp, 200 bp, 500 bp or 1 kb from, a human genomic sequence selected from SEQ ID NO: 2195-2209 or 2210-2219, or selected from SEQ ID NO: 2195-2209. In some embodiments, the method then identifies the target DNA fragment as being from a kidney epithelial cell when 50% or more of the CpG sites are methylated. In some embodiments, the method identifies the target DNA fragment as being from a kidney epithelial cell when at least 55%, 60%, 65%, 70%, 75%, 80%, 85% or 90% of the CpG sites are methylated. Likewise, in some embodiments, the method identifies the target DNA fragment as being from a kidney epithelial cell when no more than 25%, 30%, 35%, 40%, 45%, or 50% of the CpG sites are unmethylated. In some embodiments, the method identifies the target DNA fragment as not being from a kidney epithelial cell when no more than 25%, 30%, 35%, 40%, 45%, or 50% of the CpG sites are methylated. In some embodiments, the method identifies the target DNA fragment as not being from a kidney epithelial cell when at least 50%, 55%, 60%, 65%, 70%, 75%, 80%, 85% or 90% of the CpG sites are unmethylated.

[0239] In some embodiments, the methylation status of one or more other DNA fragments is further used in the cell type determination. In some embodiments, the one or more additional (different from the first one) DNA fragment is represented by a genomic sequence of SEQ ID NO: 2068-2080, 2081-2141, 2142-2144, 2145-2156, 2157-2194, 2195-2209 or 2210-2219.

[0240] The cell type identification method can be used to detect disease or condition associated with the cell type. In one embodiment, when a cell-free DNA in a biological sample (e.g., blood, plasma, serum, semen, milk, urine, saliva or cerebral spinal fluid) is identified as being from a kidney epithelial cell of a subject, the method indicates that the subject has abnormal cell death and/or a disease relating to the cell. In some embodiments, the disease or condition is injury, inflammation, or cancer of the kidney epithelium.

[0241] In some embodiments, when the amount of cell-free DNA identified as being from a particular type of cell or cells, e.g., kidney epithelial cells, is decreased, e.g., less at a second time point than at an earlier first time point of measurement, it indicates that the subject is recovering from the disease or condition. In some versions, the methods include making a diagnosis and/or treating a disease or condition accordingly based on the indication of recovery. In some embodiments, when the amount of cell-free DNA identified as being from a particular type of cell or cells, e.g., kidney epithelial cells is increased, e.g., more at a second time point than at an earlier first time point of measurement, it indicates that the disease or condition is worsening. In some versions, the methods include making a diagnosis and/or treating a disease or condition accordingly based on the indication of worsening. In some embodiments, between two or more testing, the subject undergoes a treatment, and thus the testing result indicates the treatment effect.

[0242] Also provided, in one embodiment, is a method for determining the cell type of a disease cell, e.g., a cancer cell, the primary origin of the disease, e.g., cancer, cell, or the signal or origin of the disease, e.g., cancer, cell. In some embodiments, a cancer cell has unknown primary origin. In some embodiments, the methods include detecting the methylation status of one or more DNA fragment of the cancer cell and can use the methylation status to determine the cell as a kidney epithelial cell, as described above.

[0243] In some instances, a cell-free DNA fragment is released from a cancer cell. The present technology can include determining the cell type of the cancer cell. In some embodiments, a genetic variation may also be present in the DNA fragment, and thus the cell type detection can help associate the genetic variation with the cancer. In some embodiments, the genetic variation includes a mutation. In some embodiments, the genetic variation includes a deletion or insertion. In some embodiments, the genetic variation constitutes microsatellite instability. In some embodiments, the genetic variation constitutes loss of heterozygosity. In some embodiments, the genetic variation interrupts or changes gene splicing. In some embodiments, the genetic variation causes frameshift or generation of premature stop codon. Once the primary origin of the cancer is identified, the subject may be treated with appropriate regiments for that cancer type.

### B4. Bladder Epithelium

[0244] Also as provided in Table A, some genomic locations are uniformly under-methylated or over-methylated in bladder epithelial cells as compared to all other cell types in the human.

[0245] In accordance with one embodiment of the present disclosure, a method is provided for identifying that a biological sample includes DNA from a bladder epithelial cell. In some embodiments, the method entails detecting the methylation status of a plurality (e.g., 3, 4, 5, 6, 7, 8, 9, 10 or more) of CpG sites of a target DNA fragment in the biological sample, wherein at least one (or at least two, three, four, five, six, seven, eight, nine, ten or all) of the CpG sites is located within, or within 100 bp, 200 bp, 500 bp or 1 kb from, a human genomic sequence selected from SEQ ID NO: 2220-2233, 2234-2298, 2299-2299, 2300-2303, 2304-2313 or 2314-2345, or selected from SEQ ID NO: 2220-2233 or 2234-2298. In some embodiments, the method then identifies the target DNA fragment as being from a bladder epithelial cell when no more than 40% of the CpG sites are methylated. In some embodiments, the method identifies the target DNA fragment as being from a bladder epithelial cell when no more than 25%, 30%, 35%, 40%, 45%, or 50% of the CpG sites are methylated. Likewise, in some embodiments, the method identifies the target DNA fragment as being from a bladder epithelial cell when at least 50%, 55%, 60%, 65%, 70%, 75%, 80%, 85% or 90% of the CpG sites are unmethylated. In some embodiments, the method identifies the target DNA fragment as not being from a bladder epithelial cell when at least 50%, 55%, 60%, 65%, 70%, 75%, 80%, 85% or 90% of the CpG sites are methylated. In some embodiments, the method identifies the target DNA fragment as not being from a bladder epithelial cell when no more than 25%, 30%, 35%, 40%, 45%, or 50% of the CpG sites are unmethylated.

[0246] In some embodiments, the method entails detecting the methylation status of a plurality (e.g., 3, 4, 5, 6, 7, 8, 9, 10 or more) of CpG sites of a target DNA fragment in the biological sample, wherein at least one (or at least two, three, four, five, six, seven, eight, nine, ten or all) of the CpG sites is located within, or within 100 bp, 200 bp, 500 bp or 1 kb from, a human genomic sequence selected from SEQ ID NO: 2346-2350, 2351-2351 or 2352-2370, or selected from SEQ ID NO: 2346-2350. In some embodiments, the method then identifies the target DNA fragment as being from a bladder epithelial cell when 50% or more of the CpG sites are methylated. In some embodiments, the method identifies the target DNA fragment as being from a bladder epithelial cell when at least 55%, 60%, 65%, 70%, 75%, 80%, 85% or 90% of the CpG sites are methylated. Likewise, in some embodiments, the method identifies the target DNA fragment as being from a bladder epithelial cell when no more than 25%, 30%, 35%, 40%, 45%, or 50% of the CpG sites are unmethylated. In some embodiments, the method identifies the target DNA fragment as not being from a bladder epithelial cell when no more than 25%, 30%, 35%, 40%, 45%, or 50% of the CpG sites are methylated. In some embodiments, the method identifies the target DNA fragment as not being from a bladder epithelial cell when at least 50%, 55%, 60%, 65%, 70%, 75%, 80%, 85% or 90% of the CpG sites are unmethylated.

[0247] In some embodiments, the methylation status of one or more other DNA fragments is further used in the cell type determination. In some embodiments, the one or more additional (different from the first one) DNA fragment is represented by a genomic sequence of SEQ ID NO: 2220-2233, 2234-2298, 2299-2299, 2300-2303, 2304-2313, 2314-2345, 2346-2350, 2351-2351 or 2352-2370.

[0248] The cell type identification method can be used to detect disease or condition associated with the cell type. In one embodiment, when a cell-free DNA in a biological sample (e.g., blood, plasma, serum, semen, milk, urine, saliva or cerebral spinal fluid) is identified as being from a bladder epithelial cell of a subject, the method indicates that the subject has abnormal cell death and/or a disease relating to the cell. In some embodiments, the disease or condition is injury, inflammation, or cancer of the bladder epithelium.

[0249] In some embodiments, when the amount of cell-free DNA identified as being from a particular type of cell or cells, e.g., bladder epithelial cells, is decreased, e.g., less at a second time point than at an earlier first time point of measurement, it indicates that the subject is recovering from the disease or condition. In some versions, the methods include making a diagnosis and/or treating a disease or condition accordingly based on the indication of recovery. In some embodiments, when the amount of cell-free DNA identified as being from a particular type of cell or cells, e.g., bladder epithelial cells is increased, e.g., more at a second time point than at an earlier first time point of measurement, it indicates that the disease or condition is worsening. In some versions, the methods include making a diagnosis and/or treating a disease or condition accordingly based on the indication of worsening. In some embodiments, between two or more testing, the subject undergoes a treatment, and thus the testing result indicates the treatment effect.

[0250] Also provided, in one embodiment, is a method for determining the cell type of a disease cell, e.g., a cancer cell, the primary origin of the disease, e.g., cancer, cell, or the signal or origin of the disease, e.g., cancer, cell. In some embodiments, a cancer cell has unknown primary origin. In some embodiments, the methods include detecting the methylation status of one or more DNA fragment of the cancer cell and can use the methylation status to determine the cell as a bladder epithelial cell, as described above.

[0251] In some instances, a cell-free DNA fragment is released from a cancer cell. The present technology can include determining the cell type of the cancer cell. In some embodiments, a genetic variation may also be present in the DNA fragment, and thus the cell type detection can help associate the genetic variation with the cancer. In some embodiments, the genetic variation includes a mutation. In some embodiments, the genetic variation includes a deletion or insertion. In some embodiments, the genetic variation constitutes microsatellite instability. In some embodiments, the genetic variation constitutes loss of heterozygosity. In some embodiments, the genetic variation interrupts or changes gene splicing. In some embodiments, the genetic variation causes frameshift or generation of premature stop codon. Once the primary origin of the cancer is identified, the subject may be treated with appropriate regiments for that cancer type.

### B5. Prostate Epithelium

[0252] Also as provided in Table A, some genomic locations are uniformly under-methylated or over-methylated in prostate epithelial cells as compared to all other cell types in the human.

[0253] In accordance with one embodiment of the present disclosure, a method is provided for identifying that a biological sample includes DNA from a prostate epithelial cell. In some embodiments, the method entails detecting the methylation status of a plurality (e.g., 3, 4, 5, 6, 7, 8, 9, 10 or more) of CpG sites of a target DNA fragment in the biological sample, wherein at least one (or at least two, three, four, five, six, seven, eight, nine, ten or all) of the CpG sites is located within, or within 100 bp, 200 bp, 500 bp or 1 kb from, a human genomic sequence selected from SEQ ID NO: 2371-2389, 2390-2476, 2477-2480, 2481-2486 or 2487-2495, or selected from SEQ 1D NO: 2371-2389 or 2390-2476. In some embodiments, the method then identifies the target DNA fragment as being from a prostate epithelial cell when no more than 40% of the CpG sites are methylated. In some embodiments, the method identifies the target DNA fragment as being from a prostate epithelial cell when no more than 25%, 30%, 35%, 40%, 45%, or 50% of the CpG sites are methylated. Likewise, in some embodiments, the method identifies the target DNA fragment as being from a prostate epithelial cell when at least 50%, 55%, 60%, 65%, 70%, 75%, 80%, 85% or 90% of the CpG sites are unmethylated. In some embodiments, the method identifies the target DNA fragment as not being from a prostate epithelial cell when at least 50%, 55%, 60%, 65%, 70%, 75%, 80%, 85% or 90% of the CpG sites are methylated. In some embodiments, the method identifies the target DNA fragment as not being from a prostate epithelial cell when no more than 25%, 30%, 35%, 40%, 45%, or 50% of the CpG sites are unmethylated.

[0254] In some embodiments, the method entails detecting the methylation status of a plurality (e.g., 3, 4, 5, 6, 7, 8, 9, 10 or more) of CpG sites of a target DNA fragment in the biological sample, wherein at least one (or at least two, three, four, five, six, seven, eight, nine, ten or all) of the CpG sites is located within, or within 100 bp, 200 bp, 500 bp or 1 kb from, a human genomic sequence selected from SEQ ID NO: 2496-2500, 2501-2501 or 2502-2520, or selected from SEQ ID NO: 2496-2500. In some embodiments, the method then identifies the target DNA fragment as being from a prostate epithelial cell when 50% or more of the CpG sites are methylated. In some embodiments, the method identifies the target DNA fragment as being from a prostate epithelial cell when at least 55%, 60%, 65%, 70%, 75%, 80%, 85% or 90% of the CpG sites are methylated. Likewise, in some embodiments, the method identifies the target DNA fragment as being from a prostate epithelial cell when no more than 25%, 30%, 35%, 40%, 45%, or 50% of the CpG sites are unmethylated. In some embodiments, the method identifies the target DNA fragment as not being from a prostate epithelial cell when no more than 25%, 30%, 35%, 40%, 45%, or 50% of the CpG sites are methylated. In some embodiments, the method identifies the target DNA fragment as not being from a prostate epithelial cell when at least 50%, 55%, 60%, 65%, 70%, 75%, 800, 85% or 90% of the CpG sites are unmethylated.

[0255] In some embodiments, the methylation status of one or more other DNA fragments is further used in the cell type determination. In some embodiments, the one or more additional (different from the first one) DNA fragment is represented by a genomic sequence of SEQ ID NO: 2371-2389, 2390-2476, 2477-2480, 2481-2486, 2487-2495, 2496-2500, 2501-2501 or 2502-2520.

[0256] The cell type identification method can be used to detect disease or condition associated with the cell type. In one embodiment, when a cell-free DNA in a biological sample (e.g., blood, plasma, serum, semen, milk, urine, saliva or cerebral spinal fluid) is identified as being from a prostate epithelial cell of a subject, the method indicates that the subject has abnormal cell death and/or a disease relating to the cell. In some embodiments, the disease or condition is injury, inflammation, or cancer of the prostate epithelium.

[0257] In some embodiments, when the amount of cell-free DNA identified as being from a particular type of cell or cells, e.g., prostate epithelial cells, is decreased, e.g., less at a second time point than at an earlier first time point of measurement, it indicates that the subject is recovering from the disease or condition. In some versions, the methods include making a diagnosis and/or treating a disease or condition accordingly based on the indication of recovery. In some embodiments, when the amount of cell-free DNA identified as being from a particular type of cell or cells, e.g., prostate epithelial cells is increased, e.g., more at a second time point than at an earlier first time point of measurement, it indicates that the disease or condition is worsening. In some versions, the methods include making a diagnosis and/or treating a disease or condition accordingly based on the indication of worsening. In some embodiments, between two or more testing, the subject undergoes a treatment, and thus the testing result indicates the treatment effect.

[0258] Also provided, in one embodiment, is a method for determining the cell type of a disease cell, e.g., a cancer cell, the primary origin of the disease, e.g., cancer, cell, or the signal or origin of the disease, e.g., cancer, cell. In some embodiments, a cancer cell has unknown primary origin. In some embodiments, the methods include detecting the methylation status of one or more DNA fragment of the cancer cell and can use the methylation status to determine the cell as a prostate epithelial cell, as described above.

[0259] In some instances, a cell-free DNA fragment is released from a cancer cell. The present technology can include determining the cell type of the cancer cell. In some embodiments, a genetic variation may also be present in the DNA fragment, and thus the cell type detection can help associate the genetic variation with the cancer. In some embodiments, the genetic variation includes a mutation. In some embodiments, the genetic variation includes a deletion or insertion. In some embodiments, the genetic variation constitutes microsatellite instability. In some embodiments, the genetic variation constitutes loss of heterozygosity. In some embodiments, the genetic variation interrupts or changes gene splicing. In some embodiments, the genetic variation causes frameshift or generation of premature stop codon. Once the primary origin of the cancer is identified, the subject may be treated with appropriate regiments for that cancer type.

### B6. Breast Basal Epithelium

[0260] Also as provided in Table A, some genomic locations are uniformly under-methylated or over-methylated in breast basal epithelial cells as compared to all other cell types in the human.

[0261] In accordance with one embodiment of the present disclosure, a method is provided for identifying that a biological sample includes DNA from a breast basal epithelial cell. In some embodiments, the method entails detecting the methylation status of a plurality (e.g., 3, 4, 5, 6, 7, 8, 9, 10 or more) of CpG sites of a target DNA fragment in the biological sample, wherein at least one (or at least two, three, four, five, six, seven, eight, nine, ten or all) of the CpG sites is located within, or within 100 bp, 200 bp, 500 bp or 1 kb from, a human genomic sequence selected from SEQ ID NO: 2521-2536, 2537-2616, 2617-2625 or 2626-2651, or selected from SEQ ID NO: 2521-2536 or 2537-2616. In some embodiments, the method then identifies the target DNA fragment as being from a breast basal epithelial cell when no more than 40% of the CpG sites are methylated. In some embodiments, the method identifies the target DNA fragment as being from a breast basal epithelial cell when no more than 25%, 30%, 35%, 40%, 45%, or 50% of the CpG sites are methylated. Likewise, in some embodiments, the method identifies the target DNA fragment as being from a breast basal epithelial cell when at least 50%, 55%, 60%, 65%, 70%, 75%, 80%, 85% or 90% of the CpG sites are unmethylated. In some embodiments, the method identifies the target DNA fragment as not being from a breast basal epithelial cell when at least 50%, 55%, 60%, 65%, 70%, 75%, 80%, 85% or 90% of the CpG sites are methylated. In some embodiments, the method identifies the target DNA fragment as not being from a breast basal epithelial cell when no more than 25%, 30%, 35%, 40%, 45%, or 50% of the CpG sites are unmethylated.

[0262] In some embodiments, the method entails detecting the methylation status of a plurality (e.g., 3, 4, 5, 6, 7, 8, 9, 10 or more) of CpG sites of a target DNA fragment in the biological sample, wherein at least one (or at least two, three, four, five, six, seven, eight, nine, ten or all) of the CpG sites is located within, or within 100 bp, 200 bp, 500 bp or 1 kb from, a human genomic sequence selected from SEQ ID NO: 2652-2659 or 2660-2676, or selected from SEQ ID NO: 2652-2659. In some embodiments, the method then identifies the target DNA fragment as being from a breast basal epithelial cell when 50% or more of the CpG sites are methylated. In some embodiments, the method identifies the target DNA fragment as being from a breast basal epithelial cell when at least 55%, 60%, 65%, 70%, 75%, 80%, 85% or 90% of the CpG sites are methylated. Likewise, in some embodiments, the method identifies the target DNA fragment as being from a breast basal epithelial cell when no more than 25%, 30%, 35%, 40%, 45%, or 50% of the CpG sites are unmethylated. In some embodiments, the method identifies the target DNA fragment as not being from a breast basal epithelial cell when no more than 25%, 30%, 35%, 40%, 45%, or 50% of the CpG sites are methylated. In some embodiments, the method identifies the target DNA fragment as not being from a breast basal epithelial cell when at least 50%, 55%, 60%, 65%, 70%, 75%, 80%, 85% or 90% of the CpG sites are unmethylated.

[0263] In some embodiments, the methylation status of one or more other DNA fragments is further used in the cell type determination. In some embodiments, the one or more additional (different from the first one) DNA fragment is represented by a genomic sequence of SEQ ID NO: 2521-2536, 2537-2616, 2617-2625, 2626-2651, 2652-2659 or 2660-2676.

[0264] The cell type identification method can be used to detect disease or condition associated with the cell type. In one embodiment, when a cell-free DNA in a biological sample (e.g., blood, plasma, serum, semen, milk, urine, saliva or cerebral spinal fluid) is identified as being from a breast basal epithelial cell of a subject, the method indicates that the subject has abnormal cell death and/or a disease relating to the cell. In some embodiments, the disease or condition is injury, inflammation, or cancer of the breast basal epithelium.

[0265] In some embodiments, when the amount of cell-free DNA identified as being from a particular type of cell or cells, e.g., breast basal epithelial cells, is decreased, e.g., less at a second time point than at an earlier first time point of measurement, it indicates that the subject is recovering from the disease or condition. In some versions, the methods include making a diagnosis and/or treating a disease or condition accordingly based on the indication of recovery. In some embodiments, when the amount of cell-free DNA identified as being from a particular type of cell or cells, e.g., breast basal epithelial cells is increased, e.g., more at a second time point than at an earlier first time point of measurement, it indicates that the disease or condition is worsening. In some versions, the methods include making a diagnosis and/or treating a disease or condition accordingly based on the indication of worsening. In some embodiments, between two or more testing, the subject undergoes a treatment, and thus the testing result indicates the treatment effect.

[0266] Also provided, in one embodiment, is a method for determining the cell type of a disease cell, e.g., a cancer cell, the primary origin of the disease, e.g., cancer, cell, or the signal or origin of the disease, e.g., cancer, cell. In some embodiments, a cancer cell has unknown primary origin. In some embodiments, the methods include detecting the methylation status of one or more DNA fragment of the cancer cell and can use the methylation status to determine the cell as a breast basal epithelial cell, as described above.

[0267] In some instances, a cell-free DNA fragment is released from a cancer cell. The present technology can include determining the cell type of the cancer cell. In some embodiments, a genetic variation may also be present in the DNA fragment, and thus the cell type detection can help associate the genetic variation with the cancer. In some embodiments, the genetic variation includes a mutation. In some embodiments, the genetic variation includes a deletion or insertion. In some embodiments, the genetic variation constitutes microsatellite instability. In some embodiments, the genetic variation constitutes loss of heterozygosity. In some embodiments, the genetic variation interrupts or changes gene splicing. In some embodiments, the genetic variation causes frameshift or generation of premature stop codon. Once the primary origin of the cancer is identified, the subject may be treated with appropriate regiments for that cancer type.

### B7. Breast Luminal Epithelium

[0268] Also as provided in Table A, some genomic locations are uniformly under-methylated or over-methylated in breast luminal epithelial cells as compared to all other cell types in the human.

[0269] In accordance with one embodiment of the present disclosure, a method is provided for identifying that a biological sample includes DNA from a breast luminal epithelial cell. In some embodiments, the method entails detecting the methylation status of a plurality (e.g., 3, 4, 5, 6, 7, 8, 9, 10 or more) of CpG sites of a target DNA fragment in the biological sample, wherein at least one (or at least two, three, four, five, six, seven, eight, nine, ten or all) of the CpG sites is located within, or within 100 bp, 200 bp, 500 bp or 1 kb from, a human genomic sequence selected from SEQ ID NO: 2677-2688, 2689-2748, 2749-2749, 2750-2762 or 2763-2802, or selected from SEQ ID NO: 2677-2688 or 2689-2748. In some embodiments, the method then identifies the target DNA fragment as being from a breast luminal epithelial cell when no more than 40% of the CpG sites are methylated. In some embodiments, the method identifies the target DNA fragment as being from a breast luminal epithelial cell when no more than 25%, 30%, 35%, 40%4, 45%, or 50% of the CpG sites are methylated. Likewise, in some embodiments, the method identifies the target DNA fragment as being from a breast luminal epithelial cell when at least 50%, 55%, 60%, 65%, 70%, 75%, 80%, 85% or 90% of the CpG sites are unmethylated. In some embodiments, the method identifies the target DNA fragment as not being from a breast luminal epithelial cell when at least 50%, 55%, 60%, 65%, 70%, 75%, 80%, 85% or 90% of the CpG sites are methylated. In some embodiments, the method identifies the target DNA fragment as not being from a breast luminal epithelial cell when no more than 25%, 30%, 35%, 40%, 45%, or 50% of the CpG sites are unmethylated.

[0270] In some embodiments, the method entails detecting the methylation status of a plurality (e.g., 3, 4, 5, 6, 7, 8, 9, 10 or more) of CpG sites of a target DNA fragment in the biological sample, wherein at least one (or at least two, three, four, five, six, seven, eight, nine, ten or all) of the CpG sites is located within, or within 100 bp, 200 bp, 500 bp or 1 kb from, a human genomic sequence selected from SEQ ID NO: 2803-2815, 2816-2816 or 2817-2827, or selected from SEQ ID NO: 2803-2815. In some embodiments, the method then identifies the target DNA fragment as being from a breast luminal epithelial cell when 50% or more of the CpG sites are methylated. In some embodiments, the method identifies the target DNA fragment as being from a breast luminal epithelial cell when at least 55%, 60%, 65%, 70%, 75%, 80%, 85% or 90% of the CpG sites are methylated. Likewise, in some embodiments, the method identifies the target DNA fragment as being from a breast luminal epithelial cell when no more than 25%, 30%, 35%, 40%, 45%, or 50%, 10 of the CpG sites are unmethylated. In some embodiments, the method identifies the target DNA fragment as not being from a breast luminal epithelial cell when no more than 25%, 30%, 35%, 40%, 45%, or 50% of the CpG sites are methylated. In some embodiments, the method identifies the target DNA fragment as not being from a breast luminal epithelial cell when at least 50%, 55%, 60%, 65%, 70%, 75%, 80%, 85% or 90% of the CpG sites are unmethylated.

[0271] In some embodiments, the methylation status of one or more other DNA fragments is further used in the cell type determination. In some embodiments, the one or more additional (different from the first one) DNA fragment is represented by a genomic sequence of SEQ ID NO: 2677-2688, 2689-2748, 2749-2749, 2750-2762, 2763-2802, 2803-2815, 2816-2816 or 2817-2827.

[0272] The cell type identification method can be used to detect disease or condition associated with the cell type. In one embodiment, when a cell-free DNA in a biological sample (e.g., blood, plasma, serum, semen, milk, urine, saliva or cerebral spinal fluid) is identified as being from a breast luminal epithelial cell of a subject, the method indicates that the subject has abnormal cell death and/or a disease relating to the cell. In some embodiments, the disease or condition is injury, inflammation, or cancer of the breast luminal epithelium.

[0273] In some embodiments, when the amount of cell-free DNA identified as being from a particular type of cell or cells, e.g., breast luminal epithelial cells, is decreased, e.g., less at a second time point than at an earlier first time point of measurement, it indicates that the subject is recovering from the disease or condition. In some versions, the methods include making a diagnosis and/or treating a disease or condition accordingly based on the indication of recovery. In some embodiments, when the amount of cell-free DNA identified as being from a particular type of cell or cells, e.g., breast luminal epithelial cells is increased, e.g., more at a second time point than at an earlier first time point of measurement, it indicates that the disease or condition is worsening. In some versions, the methods include making a diagnosis and/or treating a disease or condition accordingly based on the indication of worsening. In some embodiments, between two or more testing, the subject undergoes a treatment, and thus the testing result indicates the treatment effect.

[0274] Also provided, in one embodiment, is a method for determining the cell type of a disease cell, e.g., a cancer cell, the primary origin of the disease, e.g., cancer, cell, or the signal or origin of the disease, e.g., cancer, cell. In some embodiments, a cancer cell has unknown primary origin. In some embodiments, the methods include detecting the methylation status of one or more DNA fragment of the cancer cell and can use the methylation status to determine the cell as a breast luminal epithelial cell, as described above.

[0275] In some instances, a cell-free DNA fragment is released from a cancer cell. The present technology can include determining the cell type of the cancer cell. In some embodiments, a genetic variation may also be present in the DNA fragment, and thus the cell type detection can help associate the genetic variation with the cancer. In some embodiments, the genetic variation includes a mutation. In some embodiments, the genetic variation includes a deletion or insertion. In some embodiments, the genetic variation constitutes microsatellite instability. In some embodiments, the genetic variation constitutes loss of heterozygosity. In some embodiments, the genetic variation interrupts or changes gene splicing. In some embodiments, the genetic variation causes frameshift or generation of premature stop codon. Once the primary origin of the cancer is identified, the subject may be treated with appropriate regiments for that cancer type.

### Group 6—Breast Basal Epithelium & Breast Luminal Epithelium

[0276] Also as provided in Table A, some genomic locations are uniformly under-methylated or over-methylated in a group of cells, namely breast basal epithelium & breast luminal epithelium, as compared to all other cell types in the human.

[0277] In accordance with one embodiment of the present disclosure, a method is provided for identifying that a biological sample includes DNA from a cell selected from breast basal epithelium & breast luminal epithelium. In some embodiments, the method entails detecting the methylation status of a plurality (e.g., 3, 4, 5, 6, 7, 8, 9, 10 or more) of CpG sites of a target DNA fragment in the biological sample, wherein at least one (or at least two, three, four, five, six, seven, eight, nine, ten or all) of the CpG sites is located within, or within 100 bp, 200 bp, 500 bp or 1 kb from, a human genomic sequence selected from SEQ ID NO: 6076-6090, 6091-6159, 6160-6160, 6161-6162, 6163-6171 or 6172-6201, or selected from SEQ ID NO: 6076-6090 or 6091-6159. In some embodiments, the method then identifies the target DNA fragment as being from a cell selected from breast basal epithelium & breast luminal epithelium when no more than 40% of the CpG sites are methylated. In some embodiments, the method identifies the target DNA fragment as being from a cell selected from breast basal epithelium & breast luminal epithelium when no more than 25%, 30%, 35%, 40%, 45%, or 50% of the CpG sites are methylated. Likewise, in some embodiments, the method identifies the target DNA fragment as being from a cell selected from breast basal epithelium & breast luminal epithelium when at least 50%, 55%, 60%, 65%, 70%, 75%, 80%, 85% or 90% of the CpG sites are unmethylated. In some embodiments, the method identifies the target DNA fragment as not being from a cell selected from breast basal epithelium & breast luminal epithelium when at least 50%, 55%, 60%, 65%, 70%, 75%, 80%, 85% or 90% of the CpG sites are methylated. In some embodiments, the method identifies the target DNA fragment as not being from a cell selected from breast basal epithelium & breast luminal epithelium when no more than 25%, 30%, 35%, 40%, 45%, or 50% of the CpG sites are unmethylated.

[0278] In some embodiments, the method entails detecting the methylation status of a plurality (e.g., 3, 4, 5, 6, 7, 8, 9, 10 or more) of CpG sites of a target DNA fragment in the biological sample, wherein at least one (or at least two, three, four, five, six, seven, eight, nine, ten or all) of the CpG sites is located within, or within 100 bp, 200 bp, 500 bp or 1 kb from, a human genomic sequence selected from SEQ ID NO: 6202-6206 or 6207-6226, or selected from SEQ ID NO: 6202-6206. In some embodiments, the method then identifies the target DNA fragment as being from a cell selected from breast basal epithelium & breast luminal epithelium when 50% or more of the CpG sites are methylated. In some embodiments, the method identifies the target DNA fragment as being from a cell selected from breast basal epithelium & breast luminal epithelium when at least 55%, 60%, 65%, 70%, 75%, 80%, 85% or 90% of the CpG sites are methylated. Likewise, in some embodiments, the method identifies the target DNA fragment as being from a cell selected from breast basal epithelium & breast luminal epithelium when no more than 25%, 30%, 35%, 40%, 45%, or 50% of the CpG sites are unmethylated. In some embodiments, the method identifies the target DNA fragment as not being from a cell selected from breast basal epithelium & breast luminal epithelium when no more than 25%, 30%, 35%, 40%, 45%, or 50% of the CpG sites are methylated. In some embodiments, the method identifies the target DNA fragment as not being from a cell selected from breast basal epithelium & breast luminal epithelium when at least 50%, 55%, 60%, 65%, 70%, 75%, 80%, 85% or 90% of the CpG sites are unmethylated.

[0279] In some embodiments, the methylation status of one or more other DNA fragments is further used in the cell type determination. In some embodiments, the one or more additional (different from the first one) DNA fragment is represented by a genomic sequence of SEQ ID NO: 6076-6090, 6091-6159, 6160-6160, 6161-6162, 6163-6171, 6172-6201, 6202-6206 or 6207-6226.

[0280] The cell type identification method can be used to detect disease or condition associated with the cell type. In one embodiment, when a cell-free DNA in a biological sample (e.g., blood, plasma, serum, semen, milk, urine, saliva or cerebral spinal fluid) is identified as being from a cell selected from breast basal epithelium & breast luminal epithelium of a subject, the method indicates that the subject has abnormal cell death and/or a disease relating to the cell. In some embodiments, the disease or condition is injury, inflammation, or cancer of a cell selected from breast basal epithelium & breast luminal epithelium.

[0281] In some embodiments, when the amount of cell-free DNA identified as being from a particular type of cell or cells, e.g., cells selected from breast basal epithelium & breast luminal epithelium, is decreased, e.g., less at a second time point than at an earlier first time point of measurement, it indicates that the subject is recovering from the disease or condition. In some versions, the methods include making a diagnosis and/or treating a disease or condition accordingly based on the indication of recovery. In some embodiments, when the amount of cell-free DNA identified as being from a particular type of cell or cells, e.g., cells selected from breast basal epithelium & breast luminal epithelium is increased, e.g., more at a second time point than at an earlier first time point of measurement, it indicates that the disease or condition is worsening. In some versions, the methods include making a diagnosis and/or treating a disease or condition accordingly based on the indication of worsening. In some embodiments, between two or more testing, the subject undergoes a treatment, and thus the testing result indicates the treatment effect.

[0282] Also provided, in one embodiment, is a method for determining the cell type of a disease cell, e.g., a cancer cell, the primary origin of the disease, e.g., cancer, cell, or the signal or origin of the disease, e.g., cancer, cell. In some embodiments, a cancer cell has unknown primary origin. In some embodiments, the methods include detecting the methylation status of one or more DNA fragment of the cancer cell and can use the methylation status to determine the cell as a cell selected from breast basal epithelium & breast luminal epithelium, as described above.

[0283] In some instances, a cell-free DNA fragment is released from a cancer cell. The present technology can include determining the cell type of the cancer cell. In some embodiments, a genetic variation may also be present in the DNA fragment, and thus the cell type detection can help associate the genetic variation with the cancer. In some embodiments, the genetic variation includes a mutation. In some embodiments, the genetic variation includes a deletion or insertion. In some embodiments, the genetic variation constitutes microsatellite instability. In some embodiments, the genetic variation constitutes loss of heterozygosity. In some embodiments, the genetic variation interrupts or changes gene splicing. In some embodiments, the genetic variation causes frameshift or generation of premature stop codon. Once the primary origin of the cancer is identified, the subject may be treated with appropriate regiments for that cancer type.

### Group 7—Fallopian Epithelium & Ovarian Epithelium & Endometrial Epithelium

[0284] Also as provided in Table A, some genomic locations are uniformly under-methylated or over-methylated in a group of cells, namely fallopian epithelium & ovarian epithelium & endometrial epithelium, as compared to all other cell types in the human.

[0285] In accordance with one embodiment of the present disclosure, a method is provided for identifying that a biological sample includes DNA from a cell selected from fallopian epithelium & ovarian epithelium & endometrial epithelium. In some embodiments, the method entails detecting the methylation status of a plurality (e.g., 3, 4, 5, 6, 7, 8, 9, 10 or more) of CpG sites of a target DNA fragment in the biological sample, wherein at least one (or at least two, three, four, five, six, seven, eight, nine, ten or all) of the CpG sites is located within, or within 100 bp, 200 bp, 500 bp or 1 kb from, a human genomic sequence selected from SEQ ID NO: 6366-6399, 6400-6468, 6469-6475, 6476-6491 or 6492-6515, or selected from SEQ ID NO: 6366-6399 or 6400-6468. In some embodiments, the method then identifies the target DNA fragment as being from a cell selected from fallopian epithelium & ovarian epithelium & endometrial epithelium when no more than 40% of the CpG sites are methylated. In some embodiments, the method identifies the target DNA fragment as being from a cell selected from fallopian epithelium & ovarian epithelium & endometrial epithelium when no more than 25%, 30%, 35%, 40%, 45%, or 50% of the CpG sites are methylated. Likewise, in some embodiments, the method identifies the target DNA fragment as being from a cell selected from fallopian epithelium & ovarian epithelium & endometrial epithelium when at least 50%, 55%, 60%, 65%, 70%, 75%, 80%, 85% or 90% of the CpG sites are unmethylated. In some embodiments, the method identifies the target DNA fragment as not being from a cell selected from fallopian epithelium & ovarian epithelium & endometrial epithelium when at least 50%, 55%, 60%, 65%, 70%, 75%, 80%, 85% or 90% of the CpG sites are methylated. In some embodiments, the method identifies the target DNA fragment as not being from a cell selected from fallopian epithelium & ovarian epithelium & endometrial epithelium when no more than 25%, 30%, 35%, 40%, 45%, or 50% of the CpG sites are unmethylated.

[0286] In some embodiments, the method entails detecting the methylation status of a plurality (e.g., 3, 4, 5, 6, 7, 8, 9, 10 or more) of CpG sites of a target DNA fragment in the biological sample, wherein at least one (or at least two, three, four, five, six, seven, eight, nine, ten or all) of the CpG sites is located within, or within 100 bp, 200 bp, 500 bp or 1 kb from, a human genomic sequence selected from SEQ ID NO: 6516-6527 or 6528-6540, or selected from SEQ ID NO: 6516-6527. In some embodiments, the method then identifies the target DNA fragment as being from a cell selected from fallopian epithelium & ovarian epithelium & endometrial epithelium when 50% or more of the CpG sites are methylated. In some embodiments, the method identifies the target DNA fragment as being from a cell selected from fallopian epithelium & ovarian epithelium & endometrial epithelium when at least 55%, 60%, 65%, 70%, 75%, 80%, 85% or 90% of the CpG sites are methylated. Likewise, in some embodiments, the method identifies the target DNA fragment as being from a cell selected from fallopian epithelium & ovarian epithelium & endometrial epithelium when no more than 25%, 30%, 35%, 40%, 45%, or 50% of the CpG sites are unmethylated. In some embodiments, the method identifies the target DNA fragment as not being from a cell selected from fallopian epithelium & ovarian epithelium & endometrial epithelium when no more than 25%, 30%, 16, 35%, 40%, 16, 45%, or 50% of the CpG sites are methylated. In some embodiments, the method identifies the target DNA fragment as not being from a cell selected from fallopian epithelium & ovarian epithelium & endometrial epithelium when at least 50%, 55%, 60%, 65%, 70%, 75%, 80%, 85% or 90% of the CpG sites are unmethylated.

[0287] In some embodiments, the methylation status of one or more other DNA fragments is further used in the cell type determination. In some embodiments, the one or more additional (different from the first one) DNA fragment is represented by a genomic sequence of SEQ ID NO: 6366-6399, 6400-6468, 6469-6475, 6476-6491, 6492-6515, 6516-6527 or 6528-6540.

[0288] The cell type identification method can be used to detect disease or condition associated with the cell type. In one embodiment, when a cell-free DNA in a biological sample (e.g., blood, plasma, serum, semen, milk, urine, saliva or cerebral spinal fluid) is identified as being from a cell selected from fallopian epithelium & ovarian epithelium & endometrial epithelium of a subject, the method indicates that the subject has abnormal cell death and/or a disease relating to the cell. In some embodiments, the disease or condition is injury, inflammation, or cancer of a cell selected from fallopian epithelium & ovarian epithelium & endometrial epithelium.

[0289] In some embodiments, when the amount of cell-free DNA identified as being from a particular type of cell or cells, e.g., cells selected from fallopian epithelium & ovarian epithelium & endometrial epithelium, is decreased, e.g., less at a second time point than at an earlier first time point of measurement, it indicates that the subject is recovering from the disease or condition. In some versions, the methods include making a diagnosis and/or treating a disease or condition accordingly based on the indication of recovery. In some embodiments, when the amount of cell-free DNA identified as being from a particular type of cell or cells, e.g., cells selected from fallopian epithelium & ovarian epithelium & endometrial epithelium is increased, e.g., more at a second time point than at an earlier first time point of measurement, it indicates that the disease or condition is worsening. In some versions, the methods include making a diagnosis and/or treating a disease or condition accordingly based on the indication of worsening. In some embodiments, between two or more testing, the subject undergoes a treatment, and thus the testing result indicates the treatment effect.

[0290] Also provided, in one embodiment, is a method for determining the cell type of a disease cell, e.g., a cancer cell, the primary origin of the disease, e.g., cancer, cell, or the signal or origin of the disease, e.g., cancer, cell. In some embodiments, a cancer cell has unknown primary origin. In some embodiments, the methods include detecting the methylation status of one or more DNA fragment of the cancer cell and can use the methylation status to determine the cell as a cell selected from fallopian epithelium & ovarian epithelium & endometrial epithelium, as described above.

[0291] In some instances, a cell-free DNA fragment is released from a cancer cell. The present technology can include determining the cell type of the cancer cell. In some embodiments, a genetic variation may also be present in the DNA fragment, and thus the cell type detection can help associate the genetic variation with the cancer. In some embodiments, the genetic variation includes a mutation. In some embodiments, the genetic variation includes a deletion or insertion. In some embodiments, the genetic variation constitutes microsatellite instability. In some embodiments, the genetic variation constitutes loss of heterozygosity. In some embodiments, the genetic variation interrupts or changes gene splicing. In some embodiments, the genetic variation causes frameshift or generation of premature stop codon. Once the primary origin of the cancer is identified, the subject may be treated with appropriate regiments for that cancer type.

### C. Cardio-Vascular-Pulmonary Cells

### C1. Lung Alveolar Epithelium

[0292] Also as provided in Table A, some genomic locations are uniformly under-methylated or over-methylated in lung alveolar epithelial cells as compared to all other cell types in the human.

[0293] In accordance with one embodiment of the present disclosure, a method is provided for identifying that a biological sample includes DNA from a lung alveolar epithelial cell. In some embodiments, the method entails detecting the methylation status of a plurality (e.g., 3, 4, 5, 6, 7, 8, 9, 10 or more) of CpG sites of a target DNA fragment in the biological sample, wherein at least one (or at least two, three, four, five, six, seven, eight, nine, ten or all) of the CpG sites is located within, or within 100 bp, 200 bp, 500 bp or 1 kb from, a human genomic sequence selected from SEQ ID NO: 2828-2838, 2839-2899, 2900-2900, 2901-2903, 2904-2916 or 2917-2953, or selected from SEQ ID NO: 2828-2838 or 2839-2899. In some embodiments, the method then identifies the target DNA fragment as being from a lung alveolar epithelial cell when no more than 40% of the CpG sites are methylated. In some embodiments, the method identifies the target DNA fragment as being from a lung alveolar epithelial cell when no more than 25%, 30%, 35%, 40%, 45%, or 50% of the CpG sites are methylated. Likewise, in some embodiments, the method identifies the target DNA fragment as being from a lung alveolar epithelial cell when at least 50%, 55%, 60%, 65%, 70%, 75%, 80%, 85% or 90% of the CpG sites are unmethylated. In some embodiments, the method identifies the target DNA fragment as not being from a lung alveolar epithelial cell when at least 50%, 55%, 60%, 65%, 70%, 75%, 80%, 85% or 90% of the CpG sites are methylated. In some embodiments, the method identifies the target DNA fragment as not being from a lung alveolar epithelial cell when no more than 25%, 30%, 35%, 40%, 45%, or 50% of the CpG sites are unmethylated.

[0294] In some embodiments, the method entails detecting the methylation status of a plurality (e.g., 3, 4, 5, 6, 7, 8, 9, 10 or more) of CpG sites of a target DNA fragment in the biological sample, wherein at least one (or at least two, three, four, five, six, seven, eight, nine, ten or all) of the CpG sites is located within, or within 100 bp, 200 bp, 500 bp or 1 kb from, a human genomic sequence selected from SEQ ID NO: 2954-2960 or 2961-2978, or selected from SEQ ID NO: 2954-2960. In some embodiments, the method then identifies the target DNA fragment as being from a lung alveolar epithelial cell when 50% or more of the CpG sites are methylated. In some embodiments, the method identifies the target DNA fragment as being from a lung alveolar epithelial cell when at least 55%, 60%, 65%, 70%, 75%, 80%, 85% or 90% of the CpG sites are methylated. Likewise, in some embodiments, the method identifies the target DNA fragment as being from a lung alveolar epithelial cell when no more than 25%, 30%, 35%, 40%, 45%, or 50% of the CpG sites are unmethylated. In some embodiments, the method identifies the target DNA fragment as not being from a lung alveolar epithelial cell when no more than 25%, 30%, 35%, 40%, 45%, or 50% of the CpG sites are methylated. In some embodiments, the method identifies the target DNA fragment as not being from a lung alveolar epithelial cell when at least 50%, 55%, 60%, 65%, 70%, 75%, 80%, 85% or 90% of the CpG sites are unmethylated.

[0295] In some embodiments, the methylation status of one or more other DNA fragments is further used in the cell type determination. In some embodiments, the one or more additional (different from the first one) DNA fragment is represented by a genomic sequence of SEQ ID NO: 2828-2838, 2839-2899, 2900-2900, 2901-2903, 2904-2916, 2917-2953, 2954-2960 or 2961-2978.

[0296] Example 2 of the instant disclosure discloses a set of methylation markers capable of distinguish different lung cell types, such as alveolar cells or bronchial cells. Example markers are provided in Table 3. The 17 genomic loci were uniquely unmethylated or hypermethylated in lung epithelial cells, including 3 loci that specifically identify bronchial cells, 12 loci that specifically identify alveolar cells, and 2 loci that can identify both of them. Using the reference chromosome locations as references, the 2 loci that identify both bronchial cells and alveolar cells are chromosome 14:55765534 (hg19, same below; reference gene. FBXO34) and chromosome 3:181441571 (reference gene: SOX2OT); the 12 loci that specifically identify alveolar cells are chromosome 1:41486102 (reference gene: SLFNL1), chromosome 2:236672684 (reference gene: AGAP1), chromosome 17:79952367 (reference gene: ASPSCR1), chromosome 16:678127 (reference gene: RAB40C), chromosome 7:2473529 (reference gene: CHST12), chromosome 16:1652552 (reference gene: IFT140), chromosome 14:91691190 (reference gene: C14orf159), chromosome 16:667157 (reference gene: RAB40C), chromosome 11:66116455 (reference gene: B3GNTI), chromosome 4:57522145 (reference gene: HOPX), chromosome 16:84271391 (reference gene: KCNG4), and chromosome 1:1986275 (reference gene: PRKCZ); the 3 loci that specifically identify bronchial cells are chromosome 7:4802132 (reference gene: FOXK1), chromosome 2:239970075 (reference gene: HDAC4), and chromosome 1:164761834 (reference gene: PBX1).

[0297] For instance, as shown in FIG. 9, the genomic marker sequence at the Rab40C gene was unmethylated only in lung alveolar epithelium, but not in bronchial cells. As demonstrated in FIG. 13, when the methylation status of one or more of these markers was used, the lung cell types could be readily distinguished. When the top three markers were used, the performance was close to when all 17 markers were used, underscoring the robustness of the technology.

[0298] Accordingly, in one embodiment, a method is provided for identifying that a biological sample comprises DNA from a lung cell, the method comprising detecting the methylation status of each of at least four CpG sites of a target DNA fragment in the biological sample; and identifying the target DNA fragment as being from a human lung alveolar cell or bronchial cell if the methylation status corresponds to a reference human lung alveolar cell or bronchial cell, wherein the target DNA fragment is within 1 kb from a genomic locus selected from the group selected from human chromosome 14:55765534, chromosome 3:181441571, chromosome 1:41486102, chromosome 2:236672684, chromosome 17:79952367, chromosome 16:678127, chromosome 7:2473529, chromosome 16:1652552, chromosome 14:91691190, chromosome 16:667157, chromosome 11:66116455, chromosome 4:57522145, chromosome 16:84271391, chromosome 1:1986275, chromosome 7:4802132, chromosome 2:239970075, chromosome 1:164761834, according to human genome assembly version hg19.

[0299] As used herein, in some embodiments, the methylation status refers to the percentage of CpG sites being methylated within the genomic sequence. In some embodiments, the methylation status simply refers to over-methylated (M, at least 60% CpG methylated) or under-methylated (U, no more than 40% CpG methylated).

[0300] For instance, in one embodiment, the target DNA fragment is identified as being from a human lung alveolar cell if target DNA fragment is unmethylated and is near a genomic locus of chromosome 2:236672684, chromosome 17:79952367, chromosome 16:678127, chromosome 7:2473529, chromosome 16:1652552, chromosome 14:91691190, chromosome 16:667157, chromosome 11:66116455, chromosome 16:84271391, or chromosome 1:1986275. In one embodiment, the target DNA fragment is identified as being from a human lung alveolar cell if target DNA fragment is methylated and is near a genomic locus of chromosome 4:57522145.

[0301] In one embodiment, the target DNA fragment is identified as being from a human lung bronchial cell if the target DNA fragment is unmethylated and is near a genomic locus of chromosome 7:4802132, chromosome 2:239970075, or chromosome 1:164761834.

[0302] In one embodiment, the target DNA fragment is identified as being from a human lung alveolar or bronchial cell if the target DNA fragment is unmethylated and is near a genomic locus of chromosome 14:55765534, or chromosome 1:41486102, or is methylated and is near a genomic locus of 3:181441571.

[0303] In some embodiments, the DNA fragment that contains the CpG sites used for measurement is within 1000 bp from the reference genomic location, e.g., chromosome 14:55765534. In some embodiments, the DNA fragment that contains the CpG sites used for measurement is within 900, 800, 700, 600, 500, 400, 300, 250, 200 or 150 bp from the reference genomic location.

[0304] The cell type identification method can be used to detect disease or condition associated with the cell type. In one embodiment, when a cell-free DNA in a biological sample (e.g., blood, plasma, serum, semen, milk, urine, saliva or cerebral spinal fluid) is identified as being from a lung alveolar epithelial cell of a subject, the method indicates that the subject has abnormal cell death and/or a disease relating to the cell. In some embodiments, the disease or condition is injury, inflammation, or cancer of the lung alveolar epithelium.

[0305] In some embodiments, when the amount of cell-free DNA identified as being from a particular type of cell or cells, e.g., lung alveolar epithelial cells, is decreased, e.g., less at a second time point than at an earlier first time point of measurement, it indicates that the subject is recovering from the disease or condition. In some versions, the methods include making a diagnosis and/or treating a disease or condition accordingly based on the indication of recovery. In some embodiments, when the amount of cell-free DNA identified as being from a particular type of cell or cells, e.g., lung alveolar epithelial cells is increased, e.g., more at a second time point than at an earlier first time point of measurement, it indicates that the disease or condition is worsening. In some versions, the methods include making a diagnosis and/or treating a disease or condition accordingly based on the indication of worsening. In some embodiments, between two or more testing, the subject undergoes a treatment, and thus the testing result indicates the treatment effect.

[0306] Also provided, in one embodiment, is a method for determining the cell type of a disease cell, e.g., a cancer cell, the primary origin of the disease, e.g., cancer, cell, or the signal or origin of the disease, e.g., cancer, cell. In some embodiments, a cancer cell has unknown primary origin. In some embodiments, the methods include detecting the methylation status of one or more DNA fragment of the cancer cell and can use the methylation status to determine the cell as a lung alveolar epithelial cell, as described above.

[0307] In some instances, a cell-free DNA fragment is released from a cancer cell. The present technology can include determining the cell type of the cancer cell. In some embodiments, a genetic variation may also be present in the DNA fragment, and thus the cell type detection can help associate the genetic variation with the cancer. In some embodiments, the genetic variation includes a mutation. In some embodiments, the genetic variation includes a deletion or insertion. In some embodiments, the genetic variation constitutes microsatellite instability. In some embodiments, the genetic variation constitutes loss of heterozygosity. In some embodiments, the genetic variation interrupts or changes gene splicing. In some embodiments, the genetic variation causes frameshift or generation of premature stop codon. Once the primary origin of the cancer is identified, the subject may be treated with appropriate regiments for that cancer type.

### C2. Lung Bronchial Epithelium

[0308] Also as provided in Table A, some genomic locations are uniformly under-methylated or over-methylated in lung bronchial epithelial cells as compared to all other cell types in the human.

[0309] In accordance with one embodiment of the present disclosure, a method is provided for identifying that a biological sample includes DNA from a lung bronchial epithelial cell. In some embodiments, the method entails detecting the methylation status of a plurality (e.g., 3, 4, 5, 6, 7, 8, 9, 10 or more) of CpG sites of a target DNA fragment in the biological sample, wherein at least one (or at least two, three, four, five, six, seven, eight, nine, ten or all) of the CpG sites is located within, or within 100 bp, 200 bp, 500 bp or 1 kb from, a human genomic sequence selected from SEQ ID NO: 2979-3001, 3002-3087,3088-3090, 3091-3092 or 3093-3104, or selected from SEQ ID NO: 2979-3001 or 3002-3087. In some embodiments, the method then identifies the target DNA fragment as being from a lung bronchial epithelial cell when no more than 40% of the CpG sites are methylated. In some embodiments, the method identifies the target DNA fragment as being from a lung bronchial epithelial cell when no more than 25%, 30%, 35%, 40%, 45%, or 50% of the CpG sites are methylated. Likewise, in some embodiments, the method identifies the target DNA fragment as being from a lung bronchial epithelial cell when at least 50%, 55%, 60/o, 65%, 70%, 75%, 80%, 85% or 90% of the CpG sites are unmethylated. In some embodiments, the method identifies the target DNA fragment as not being from a lung bronchial epithelial cell when at least 50%, 55%, 60%/o, 65%, 70%, 75%, 80%, 85% or 90% of the CpG sites are methylated. In some embodiments, the method identifies the target DNA fragment as not being from a lung bronchial epithelial cell when no more than 25%, 30%, 35%, 40%, 45%, or 50% of the CpG sites are unmethylated.

[0310] In some embodiments, the method entails detecting the methylation status of a plurality (e.g., 3, 4, 5, 6, 7, 8, 9, 10 or more) of CpG sites of a target DNA fragment in the biological sample, wherein at least one (or at least two, three, four, five, six, seven, eight, nine, ten or all) of the CpG sites is located within, or within 100 bp, 200 bp, 500 bp or 1 kb from, a human genomic sequence selected from SEQ ID NO: 3105-3109 or 3110-3129, or selected from SEQ ID NO: 3105-3109. In some embodiments, the method then identifies the target DNA fragment as being from a lung bronchial epithelial cell when 50% or more of the CpG sites are methylated. In some embodiments, the method identifies the target DNA fragment as being from a lung bronchial epithelial cell when at least 55%, 60%, 65%, 70%, 75%, 80%, 85% or 90% of the CpG sites are methylated. Likewise, in some embodiments, the method identifies the target DNA fragment as being from a lung bronchial epithelial cell when no more than 25%, 30%, 35%, 40%, 45%, or 50% of the CpG sites are unmethylated. In some embodiments, the method identifies the target DNA fragment as not being from a lung bronchial epithelial cell when no more than 25%, 30%, 35%, 40%, 45%, or 50% of the CpG sites are methylated. In some embodiments, the method identifies the target DNA fragment as not being from a lung bronchial epithelial cell when at least 50%, 55%, 60%, 65%, 70%, 75%, 80%, 85% or 90% of the CpG sites are unmethylated.

[0311] In some embodiments, the methylation status of one or more other DNA fragments is further used in the cell type determination. In some embodiments, the one or more additional (different from the first one) DNA fragment is represented by a genomic sequence of SEQ ID NO: 2979-3001, 3002-3087, 3088-3090, 3091-3092, 3093-3104, 3105-3109 or 3110-3129.

[0312] The cell type identification method can be used to detect disease or condition associated with the cell type. In one embodiment, when a cell-free DNA in a biological sample (e.g., blood, plasma, serum, semen, milk, urine, saliva or cerebral spinal fluid) is identified as being from a lung bronchial epithelial cell of a subject, the method indicates that the subject has abnormal cell death and/or a disease relating to the cell. In some embodiments, the disease or condition is injury, inflammation, or cancer of the lung bronchial epithelium.

[0313] In some embodiments, when the amount of cell-free DNA identified as being from a particular type of cell or cells, e.g., lung bronchial epithelial cells, is decreased, e.g., less at a second time point than at an earlier first time point of measurement, it indicates that the subject is recovering from the disease or condition. In some versions, the methods include making a diagnosis and/or treating a disease or condition accordingly based on the indication of recovery. In some embodiments, when the amount of cell-free DNA identified as being from a particular type of cell or cells, e.g., lung bronchial epithelial cells is increased, e.g., more at a second time point than at an earlier first time point of measurement, it indicates that the disease or condition is worsening. In some versions, the methods include making a diagnosis and/or treating a disease or condition accordingly based on the indication of worsening. In some embodiments, between two or more testing, the subject undergoes a treatment, and thus the testing result indicates the treatment effect.

[0314] Also provided, in one embodiment, is a method for determining the cell type of a disease cell, e.g., a cancer cell, the primary origin of the disease, e.g., cancer, cell, or the signal or origin of the disease, e.g., cancer, cell. In some embodiments, a cancer cell has unknown primary origin. In some embodiments, the methods include detecting the methylation status of one or more DNA fragment of the cancer cell and can use the methylation status to determine the cell as a lung bronchial epithelial cell, as described above.

[0315] In some instances, a cell-free DNA fragment is released from a cancer cell. The present technology can include determining the cell type of the cancer cell. In some embodiments, a genetic variation may also be present in the DNA fragment, and thus the cell type detection can help associate the genetic variation with the cancer. In some embodiments, the genetic variation includes a mutation. In some embodiments, the genetic variation includes a deletion or insertion. In some embodiments, the genetic variation constitutes microsatellite instability. In some embodiments, the genetic variation constitutes loss of heterozygosity. In some embodiments, the genetic variation interrupts or changes gene splicing. In some embodiments, the genetic variation causes frameshift or generation of premature stop codon. Once the primary origin of the cancer is identified, the subject may be treated with appropriate regiments for that cancer type.

### C3. Heart Cardiomyocytes

[0316] Also as provided in Table A, some genomic locations are uniformly under-methylated or over-methylated in heart cardiomyocytes as compared to all other cell types in the human.

[0317] In accordance with one embodiment of the present disclosure, a method is provided for identifying that a biological sample includes DNA from a heart cardiomyocyte. In some embodiments, the method entails detecting the methylation status of a plurality (e.g., 3, 4, 5, 6, 7, 8, 9, 10 or more) of CpG sites of a target DNA fragment in the biological sample, wherein at least one (or at least two, three, four, five, six, seven, eight, nine, ten or all) of the CpG sites is located within, or within 100 bp, 200 bp, 500 bp or 1 kb from, a human genomic sequence selected from SEQ ID NO: 3130-3147, 3148-3223, 3224-3230 or 3231-3254, or selected from SEQ ID NO: 3130-3147 or 3148-3223. In some embodiments, the method then identifies the target DNA fragment as being from a heart cardiomyocyte when no more than 40% of the CpG sites are methylated. In some embodiments, the method identifies the target DNA fragment as being from a heart cardiomyocyte when no more than 25%, 30%, 35%, 40%, 45%, or 50% of the CpG sites are methylated. Likewise, in some embodiments, the method identifies the target DNA fragment as being from a heart cardiomyocyte when at least 50%, 55%, 60%, 65%, 70%, 75%, 80%, 85% or 90% of the CpG sites are unmethylated. In some embodiments, the method identifies the target DNA fragment as not being from a heart cardiomyocyte when at least 50%, 55%, 60%, 65%, 70%, 75%, 80%, 85% or 90% of the CpG sites are methylated. In some embodiments, the method identifies the target DNA fragment as not being from a heart cardiomyocyte when no more than 25%, 30%, 35%, 40%, 45%, or 50% of the CpG sites are unmethylated.

[0318] In some embodiments, the method entails detecting the methylation status of a plurality (e.g., 3, 4, 5, 6, 7, 8, 9, 10 or more) of CpG sites of a target DNA fragment in the biological sample, wherein at least one (or at least two, three, four, five, six, seven, eight, nine, ten or all) of the CpG sites is located within, or within 100 bp, 200 bp, 500 bp or 1 kb from, a human genomic sequence selected from SEQ ID NO: 3255-3266, 3267-3267 or 3268-3279, or selected from SEQ ID NO: 3255-3266. In some embodiments, the method then identifies the target DNA fragment as being from a heart cardiomyocyte when 50% or more of the CpG sites are methylated. In some embodiments, the method identifies the target DNA fragment as being from a heart cardiomyocyte when at least 55%, 60%, 65%, 70%, 75%, 80%, 85% or 90% of the CpG sites are methylated. Likewise, in some embodiments, the method identifies the target DNA fragment as being from a heart cardiomyocyte when no more than 25%, 30%, 35%, 40%, 45%, or 50% of the CpG sites are unmethylated. In some embodiments, the method identifies the target DNA fragment as not being from a heart cardiomyocyte when no more than 25%, 30%, 35%, 40%, 45%, or 50% of the CpG sites are methylated. In some embodiments, the method identifies the target DNA fragment as not being from a heart cardiomyocyte when at least 50%, 55%, 60%, 65%, 70%, 75%, 80%, 85% or 90% of the CpG sites are unmethylated.

[0319] In some embodiments, the methylation status of one or more other DNA fragments is further used in the cell type determination. In some embodiments, the one or more additional (different from the first one) DNA fragment is represented by a genomic sequence of SEQ ID NO: 3130-3147, 3148-3223, 3224-3230, 3231-3254, 3255-3266, 3267-3267 or 3268-3279.

[0320] The cell type identification method can be used to detect disease or condition associated with the cell type. In one embodiment, when a cell-free DNA in a biological sample (e.g., blood, plasma, serum, semen, milk, urine, saliva or cerebral spinal fluid) is identified as being from a heart cardiomyocyte of a subject, the method indicates that the subject has abnormal cell death and/or a disease relating to the cell. In some embodiments, the disease or condition is injury, inflammation, or cancer of the heart cardiomyocytes.

[0321] In some embodiments, when the amount of cell-free DNA identified as being from a particular type of cell or cells, e.g., heart cardiomyocytes, is decreased, e.g., less at a second time point than at an earlier first time point of measurement, it indicates that the subject is recovering from the disease or condition. In some versions, the methods include making a diagnosis and/or treating a disease or condition accordingly based on the indication of recovery. In some embodiments, when the amount of cell-free DNA identified as being from a particular type of cell or cells, e.g., heart cardiomyocytes is increased, e.g., more at a second time point than at an earlier first time point of measurement, it indicates that the disease or condition is worsening. In some versions, the methods include making a diagnosis and/or treating a disease or condition accordingly based on the indication of worsening. In some embodiments, between two or more testing, the subject undergoes a treatment, and thus the testing result indicates the treatment effect.

[0322] Also provided, in one embodiment, is a method for determining the cell type of a disease cell, e.g., a cancer cell, the primary origin of the disease, e.g., cancer, cell, or the signal or origin of the disease, e.g., cancer, cell. In some embodiments, a cancer cell has unknown primary origin. In some embodiments, the methods include detecting the methylation status of one or more DNA fragment of the cancer cell and can use the methylation status to determine the cell as a heart cardiomyocyte, as described above.

[0323] In some instances, a cell-free DNA fragment is released from a cancer cell. The present technology can include determining the cell type of the cancer cell. In some embodiments, a genetic variation may also be present in the DNA fragment, and thus the cell type detection can help associate the genetic variation with the cancer. In some embodiments, the genetic variation includes a mutation. In some embodiments, the genetic variation includes a deletion or insertion. In some embodiments, the genetic variation constitutes microsatellite instability. In some embodiments, the genetic variation constitutes loss of heterozygosity. In some embodiments, the genetic variation interrupts or changes gene splicing. In some embodiments, the genetic variation causes frameshift or generation of premature stop codon. Once the primary origin of the cancer is identified, the subject may be treated with appropriate regiments for that cancer type.

### C4. Heart Fibroblasts

[0324] Also as provided in Table A, some genomic locations are uniformly under-methylated or over-methylated in heart fibroblast cells as compared to all other cell types in the human.

[0325] In accordance with one embodiment of the present disclosure, a method is provided for identifying that a biological sample includes DNA from a heart fibroblast cell. In some embodiments, the method entails detecting the methylation status of a plurality (e.g., 3, 4, 5, 6, 7, 8, 9, 10 or more) of CpG sites of a target DNA fragment in the biological sample, wherein at least one (or at least two, three, four, five, six, seven, eight, nine, ten or all) of the CpG sites is located within, or within 100 bp, 200 bp, 500 bp or 1 kb from, a human genomic sequence selected from SEQ ID NO: 33280-3300, 3301-3394, 3395-3396, 3397-3400 or 3401-3407, or selected from SEQ ID NO: 3280-3300 or 3301-3394. In some embodiments, the method then identifies the target DNA fragment as being from a heart fibroblast cell when no more than 40% of the CpG sites are methylated. In some embodiments, the method identifies the target DNA fragment as being from a heart fibroblast cell when no more than 25%, 30%, 35%, 40%, 45%, or 50% of the CpG sites are methylated. Likewise, in some embodiments, the method identifies the target DNA fragment as being from a heart fibroblast cell when at least 50%, 55%, 60%, 65%, 70%, 75%, 80%, 85% or 90% of the CpG sites are unmethylated. In some embodiments, the method identifies the target DNA fragment as not being from a heart fibroblast cell when at least 50%, 55%, 60%, 65%, 70%, 75%, 80%, 85% or 90% of the CpG sites are methylated. In some embodiments, the method identifies the target DNA fragment as not being from a heart fibroblast cell when no more than 25%, 30%, 35%, 40%, 45%, or 50% of the CpG sites are unmethylated.

[0326] In some embodiments, the method entails detecting the methylation status of a plurality (e.g., 3, 4, 5, 6, 7, 8, 9, 10 or more) of CpG sites of a target DNA fragment in the biological sample, wherein at least one (or at least two, three, four, five, six, seven, eight, nine, ten or all) of the CpG sites is located within, or within 100 bp, 200 bp, 500 bp or 1 kb from, a human genomic sequence selected from SEQ ID NO: 3408-3414, 3415-3416 or 3417-3432, or selected from SEQ ID NO: 3408-3414. In some embodiments, the method then identifies the target DNA fragment as being from a heart fibroblast cell when 50% or more of the CpG sites are methylated. In some embodiments, the method identifies the target DNA fragment as being from a heart fibroblast cell when at least 55%, 60%, 65%, 70%, 75%, 80%, 85% or 90% of the CpG sites are methylated. Likewise, in some embodiments, the method identifies the target DNA fragment as being from a heart fibroblast cell when no more than 25%, 30%, 35%, 40%, 45%, or 50% of the CpG sites are unmethylated. In some embodiments, the method identifies the target DNA fragment as not being from a heart fibroblast cell when no more than 25%, 30%, 35%, 40%, 45%, or 50% of the CpG sites are methylated. In some embodiments, the method identifies the target DNA fragment as not being from a heart fibroblast cell when at least 50%, 55%, 60%, 65%, 70%, 75%, 80%, 85% or 90% of the CpG sites are unmethylated.

[0327] In some embodiments, the methylation status of one or more other DNA fragments is further used in the cell type determination. In some embodiments, the one or more additional (different from the first one) DNA fragment is represented by a genomic sequence of SEQ ID NO: 3280-3300, 3301-3394, 3395-3396, 3397-3400, 3401-3407, 3408-3414, 3415-3416 or 3417-3432.

[0328] The cell type identification method can be used to detect disease or condition associated with the cell type. In one embodiment, when a cell-free DNA in a biological sample (e.g., blood, plasma, serum, semen, milk, urine, saliva or cerebral spinal fluid) is identified as being from a heart fibroblast cell of a subject, the method indicates that the subject has abnormal cell death and/or a disease relating to the cell. In some embodiments, the disease or condition is injury, inflammation, or cancer of the heart fibroblast cells.

[0329] In some embodiments, when the amount of cell-free DNA identified as being from a particular type of cell or cells, e.g., heart fibroblast cells, is decreased, e.g., less at a second time point than at an earlier first time point of measurement, it indicates that the subject is recovering from the disease or condition. In some versions, the methods include making a diagnosis and/or treating a disease or condition accordingly based on the indication of recovery. In some embodiments, when the amount of cell-free DNA identified as being from a particular type of cell or cells, e.g., heart fibroblast cells is increased, e.g., more at a second time point than at an earlier first time point of measurement, it indicates that the disease or condition is worsening. In some versions, the methods include making a diagnosis and/or treating a disease or condition accordingly based on the indication of worsening. In some embodiments, between two or more testing, the subject undergoes a treatment, and thus the testing result indicates the treatment effect.

[0330] Also provided, in one embodiment, is a method for determining the cell type of a disease cell, e.g., a cancer cell, the primary origin of the disease, e.g., cancer, cell, or the signal or origin of the disease, e.g., cancer, cell. In some embodiments, a cancer cell has unknown primary origin. In some embodiments, the methods include detecting the methylation status of one or more DNA fragment of the cancer cell and can use the methylation status to determine the cell as a heart fibroblast cell, as described above.

[0331] In some instances, a cell-free DNA fragment is released from a cancer cell. The present technology can include determining the cell type of the cancer cell. In some embodiments, a genetic variation may also be present in the DNA fragment, and thus the cell type detection can help associate the genetic variation with the cancer. In some embodiments, the genetic variation includes a mutation. In some embodiments, the genetic variation includes a deletion or insertion. In some embodiments, the genetic variation constitutes microsatellite instability. In some embodiments, the genetic variation constitutes loss of heterozygosity. In some embodiments, the genetic variation interrupts or changes gene splicing. In some embodiments, the genetic variation causes frameshift or generation of premature stop codon. Once the primary origin of the cancer is identified, the subject may be treated with appropriate regiments for that cancer type.

### C5. Vascular Endothelial Cells

[0332] Also as provided in Table A, some genomic locations are uniformly under-methylated or over-methylated in vascular endothelial cells as compared to all other cell types in the human.

[0333] In accordance with one embodiment of the present disclosure, a method is provided for identifying that a biological sample includes DNA from a vascular endothelial cell. In some embodiments, the method entails detecting the methylation status of a plurality (e.g., 3, 4, 5, 6, 7, 8, 9, 10 or more) of CpG sites of a target DNA fragment in the biological sample, wherein at least one (or at least two, three, four, five, six, seven, eight, nine, ten or all) of the CpG sites is located within, or within 100 bp, 200 bp, 500 bp or 1 kb from, a human genomic sequence selected from SEQ ID NO: 3433-3456,3457-3547, 3548-3550, 3551-3551 or 3552-3559, or selected from SEQ ID NO: 3433-3456 or 3457-3547. In some embodiments, the method then identifies the target DNA fragment as being from a vascular endothelial cell when no more than 40% of the CpG sites are methylated. In some embodiments, the method identifies the target DNA fragment as being from a vascular endothelial cell when no more than 25%, 30%, 35%, 40%, 45%, or 50% of the CpG sites are methylated. Likewise, in some embodiments, the method identifies the target DNA fragment as being from a vascular endothelial cell when at least 50%, 55%, 60%, 65%, 70%, 75%, 80%, 85% or 90% of the CpG sites are unmethylated. In some embodiments, the method identifies the target DNA fragment as not being from a vascular endothelial cell when at least 50%, 55%, 60%, 65%, 70%, 75%, 80%, 85% or 90% of the CpG sites are methylated. In some embodiments, the method identifies the target DNA fragment as not being from a vascular endothelial cell when no more than 25%, 30%, 35%, 40%, 45%, or 50% of the CpG sites are unmethylated.

[0334] In some embodiments, the method entails detecting the methylation status of a plurality (e.g., 3, 4, 5, 6, 7, 8, 9, 10 or more) of CpG sites of a target DNA fragment in the biological sample, wherein at least one (or at least two, three, four, five, six, seven, eight, nine, ten or all) of the CpG sites is located within, or within 100 bp, 200 bp, 500 bp or 1 kb from, a human genomic sequence selected from SEQ ID NO: 3560-3579, 3580-3580 or 3581-3584, or selected from SEQ ID NO: 3560-3579. In some embodiments, the method then identifies the target DNA fragment as being from a vascular endothelial cell when 50% or more of the CpG sites are methylated. In some embodiments, the method identifies the target DNA fragment as being from a vascular endothelial cell when at least 55%, 60%, 65%, 70%, 75%, 80%, 85% or 90% of the CpG sites are methylated. Likewise, in some embodiments, the method identifies the target DNA fragment as being from a vascular endothelial cell when no more than 25%, 30%, 35%, 40%, 45%, or 50% of the CpG sites are unmethylated. In some embodiments, the method identifies the target DNA fragment as not being from a vascular endothelial cell when no more than 25%, 30%, 35%, 40%, 45%, or 50% of the CpG sites are methylated. In some embodiments, the method identifies the target DNA fragment as not being from a vascular endothelial cell when at least 50%, 55%, 60%, 65%, 70%, 75%, 80%/o, 85% or 90% of the CpG sites are unmethylated.

[0335] In some embodiments, the methylation status of one or more other DNA fragments is further used in the cell type determination. In some embodiments, the one or more additional (different from the first one) DNA fragment is represented by a genomic sequence of SEQ ID NO: 3433-3456, 3457-3547, 3548-3550, 3551-3551, 3552-3559, 3560-3579, 3580-3580 or 3581-3584.

[0336] The cell type identification method can be used to detect disease or condition associated with the cell type. In one embodiment, when a cell-free DNA in a biological sample (e.g., blood, plasma, serum, semen, milk, urine, saliva or cerebral spinal fluid) is identified as being from a vascular endothelial cell of a subject, the method indicates that the subject has abnormal cell death and/or a disease relating to the cell. In some embodiments, the disease or condition is injury, inflammation, or cancer of the vascular endothelial cells.

[0337] In some embodiments, when the amount of cell-free DNA identified as being from a particular type of cell or cells, e.g., vascular endothelial cells, is decreased, e.g., less at a second time point than at an earlier first time point of measurement, it indicates that the subject is recovering from the disease or condition. In some versions, the methods include making a diagnosis and/or treating a disease or condition accordingly based on the indication of recovery. In some embodiments, when the amount of cell-free DNA identified as being from a particular type of cell or cells, e.g., vascular endothelial cells is increased, e.g., more at a second time point than at an earlier first time point of measurement, it indicates that the disease or condition is worsening. In some versions, the methods include making a diagnosis and/or treating a disease or condition accordingly based on the indication of worsening. In some embodiments, between two or more testing, the subject undergoes a treatment, and thus the testing result indicates the treatment effect.

[0338] Also provided, in one embodiment, is a method for determining the cell type of a disease cell, e.g., a cancer cell, the primary origin of the disease, e.g., cancer, cell, or the signal or origin of the disease, e.g., cancer, cell. In some embodiments, a cancer cell has unknown primary origin. In some embodiments, the methods include detecting the methylation status of one or more DNA fragment of the cancer cell and can use the methylation status to determine the cell as a vascular endothelial cell, as described above.

[0339] In some instances, a cell-free DNA fragment is released from a cancer cell. The present technology can include determining the cell type of the cancer cell. In some embodiments, a genetic variation may also be present in the DNA fragment, and thus the cell type detection can help associate the genetic variation with the cancer. In some embodiments, the genetic variation includes a mutation. In some embodiments, the genetic variation includes a deletion or insertion. In some embodiments, the genetic variation constitutes microsatellite instability. In some embodiments, the genetic variation constitutes loss of heterozygosity. In some embodiments, the genetic variation interrupts or changes gene splicing. In some embodiments, the genetic variation causes frameshift or generation of premature stop codon. Once the primary origin of the cancer is identified, the subject may be treated with appropriate regiments for that cancer type.

### Group 8 Heart Cardiomyocytes & Heart Fibroblasts

[0340] Also as provided in Table A, some genomic locations are uniformly under-methylated or over-methylated in a group of cells, namely heart cardiomyocytes & heart fibroblasts, as compared to all other cell types in the human.

[0341] In accordance with one embodiment of the present disclosure, a method is provided for identifying that a biological sample includes DNA from a cell selected from heart cardiomyocytes & heart fibroblasts. In some embodiments, the method entails detecting the methylation status of a plurality (e.g., 3, 4, 5, 6, 7, 8, 9, 10 or more) of CpG sites of a target DNA fragment in the biological sample, wherein at least one (or at least two, three, four, five, six, seven, eight, nine, ten or all) of the CpG sites is located within, or within 100 bp, 200 bp, 500 bp or 1 kb from, a human genomic sequence selected from SEQ ID NO: 6940-6959, 6960-7045, 7046-7046, 7047-7049, 7050-7053 or 7054-7065, or selected from SEQ ID NO: 6940-6959 or 6960-7045. In some embodiments, the method then identifies the target DNA fragment as being from a cell selected from heart cardiomyocytes & heart fibroblasts when no more than 40% of the CpG sites are methylated. In some embodiments, the method identifies the target DNA fragment as being from a cell selected from heart cardiomyocytes & heart fibroblasts when no more than 25%, 30%, 35%, 40%, 45%, or 50% of the CpG sites are methylated. Likewise, in some embodiments, the method identifies the target DNA fragment as being from a cell selected from heart cardiomyocytes & heart fibroblasts when at least 50%, 55%, 60%, 65%, 70%, 75%, 80%, 85% or 90% of the CpG sites are unmethylated. In some embodiments, the method identifies the target DNA fragment as not being from a cell selected from heart cardiomyocytes & heart fibroblasts when at least 50%, 55%, 60%, 65%, 70%, 75%, 80%, 85% or 90% of the CpG sites are methylated. In some embodiments, the method identifies the target DNA fragment as not being from a cell selected from heart cardiomyocytes & heart fibroblasts when no more than 25%, 30%, 35%, 40%, 45%, or 50% of the CpG sites are unmethylated.

[0342] In some embodiments, the method entails detecting the methylation status of a plurality (e.g., 3, 4, 5, 6, 7, 8, 9, 10 or more) of CpG sites of a target DNA fragment in the biological sample, wherein at least one (or at least two, three, four, five, six, seven, eight, nine, ten or all) of the CpG sites is located within, or within 100 bp, 200 bp, 500 bp or 1 kb from, a human genomic sequence selected from SEQ ID NO: 7066-7082 or 7083-7090, or selected from SEQ ID NO: 7066-7082. In some embodiments, the method then identifies the target DNA fragment as being from a cell selected from heart cardiomyocytes & heart fibroblasts when 50% or more of the CpG sites are methylated. In some embodiments, the method identifies the target DNA fragment as being from a cell selected from heart cardiomyocytes & heart fibroblasts when at least 55%, 60%, 65%, 70%, 75%, 80%, 85% or 90% of the CpG sites are methylated. Likewise, in some embodiments, the method identifies the target DNA fragment as being from a cell selected from heart cardiomyocytes & heart fibroblasts when no more than 25%, 30%, 35%, 40/o, 45%, or 50% of the CpG sites are unmethylated. In some embodiments, the method identifies the target DNA fragment as not being from a cell selected from heart cardiomyocytes & heart fibroblasts when no more than 25%, 30%, 35%, 40%, 45%, or 50% of the CpG sites are methylated. In some embodiments, the method identifies the target DNA fragment as not being from a cell selected from heart cardiomyocytes & heart fibroblasts when at least 50%, 55%, 60%, 65%, 70%, 75%, 80%, 85% or 90% of the CpG sites are unmethylated.

[0343] In some embodiments, the methylation status of one or more other DNA fragments is further used in the cell type determination. In some embodiments, the one or more additional (different from the first one) DNA fragment is represented by a genomic sequence of SEQ ID NO: 6940-6959, 6960-7045, 7046-7046, 7047-7049, 7050-7053, 7054-7065, 7066-7082 or 7083-7090.

[0344] The cell type identification method can be used to detect disease or condition associated with the cell type. In one embodiment, when a cell-free DNA in a biological sample (e.g., blood, plasma, serum, semen, milk, urine, saliva or cerebral spinal fluid) is identified as being from a cell selected from heart cardiomyocytes & heart fibroblasts of a subject, the method indicates that the subject has abnormal cell death and/or a disease relating to the cell. In some embodiments, the disease or condition is injury, inflammation, or cancer of a cell selected from heart cardiomyocytes & heart fibroblasts.

[0345] In some embodiments, when the amount of cell-free DNA identified as being from a particular type of cell or cells, e.g., cells selected from heart cardiomyocytes & heart fibroblasts, is decreased, e.g., less at a second time point than at an earlier first time point of measurement, it indicates that the subject is recovering from the disease or condition. In some versions, the methods include making a diagnosis and/or treating a disease or condition accordingly based on the indication of recovery. In some embodiments, when the amount of cell-free DNA identified as being from a particular type of cell or cells, e.g., cells selected from heart cardiomyocytes & heart fibroblasts is increased, e.g., more at a second time point than at an earlier first time point of measurement, it indicates that the disease or condition is worsening. In some versions, the methods include making a diagnosis and/or treating a disease or condition accordingly based on the indication of worsening. In some embodiments, between two or more testing, the subject undergoes a treatment, and thus the testing result indicates the treatment effect.

[0346] Also provided, in one embodiment, is a method for determining the cell type of a disease cell, e.g., a cancer cell, the primary origin of the disease, e.g., cancer, cell, or the signal or origin of the disease, e.g., cancer, cell. In some embodiments, a cancer cell has unknown primary origin. In some embodiments, the methods include detecting the methylation status of one or more DNA fragment of the cancer cell and can use the methylation status to determine the cell as a cell selected from heart cardiomyocytes & heart fibroblasts, as described above.

[0347] In some instances, a cell-free DNA fragment is released from a cancer cell. The present technology can include determining the cell type of the cancer cell. In some embodiments, a genetic variation may also be present in the DNA fragment, and thus the cell type detection can help associate the genetic variation with the cancer. In some embodiments, the genetic variation includes a mutation. In some embodiments, the genetic variation includes a deletion or insertion. In some embodiments, the genetic variation constitutes microsatellite instability. In some embodiments, the genetic variation constitutes loss of heterozygosity. In some embodiments, the genetic variation interrupts or changes gene splicing. In some embodiments, the genetic variation causes frameshift or generation of premature stop codon. Once the primary origin of the cancer is identified, the subject may be treated with appropriate regiments for that cancer type.

### Group 9 Lung Alveolar Epithelium & Lung Bronchial Epithelium

[0348] Also as provided in Table A, some genomic locations are uniformly under-methylated or over-methylated in a group of cells, namely lung alveolar epithelium & lung bronchial epithelium, as compared to all other cell types in the human.

[0349] In accordance with one embodiment of the present disclosure, a method is provided for identifying that a biological sample includes DNA from a cell selected from lung alveolar epithelium & lung bronchial epithelium. In some embodiments, the method entails detecting the methylation status of a plurality (e.g., 3, 4, 5, 6, 7, 8, 9, 10 or more) of CpG sites of a target DNA fragment in the biological sample, wherein at least one (or at least two, three, four, five, six, seven, eight, nine, ten or all) of the CpG sites is located within, or within 100 bp, 200 bp, 500 bp or 1 kb from, a human genomic sequence selected from SEQ ID NO: 6227-6243, 6244-6326, 6327-6327, 6328-6329, 6330-6336 or 6337-6352, or selected from SEQ ID NO: 6227-6243 or 6244-6326. In some embodiments, the method then identifies the target DNA fragment as being from a cell selected from lung alveolar epithelium & lung bronchial epithelium when no more than 40% of the CpG sites are methylated. In some embodiments, the method identifies the target DNA fragment as being from a cell selected from lung alveolar epithelium & lung bronchial epithelium when no more than 25%, 30%, 35%, 40%, 45%, or 50% of the CpG sites are methylated. Likewise, in some embodiments, the method identifies the target DNA fragment as being from a cell selected from lung alveolar epithelium & lung bronchial epithelium when at least 50%, 55%, 60%, 65%, 70%, 75%, 80%, 85% or 90% of the CpG sites are unmethylated. In some embodiments, the method identifies the target DNA fragment as not being from a cell selected from lung alveolar epithelium & lung bronchial epithelium when at least 50%, 55%, 60%, 65%, 70%, 75%, 80%, 85% or 90% of the CpG sites are methylated. In some embodiments, the method identifies the target DNA fragment as not being from a cell selected from lung alveolar epithelium & lung bronchial epithelium when no more than 25%, 30%, 35%, 40%, 45%, or 50% of the CpG sites are unmethylated.

[0350] In some embodiments, the method entails detecting the methylation status of a plurality (e.g., 3, 4, 5, 6, 7, 8, 9, 10 or more) of CpG sites of a target DNA fragment in the biological sample, wherein at least one (or at least two, three, four, five, six, seven, eight, nine, ten or all) of the CpG sites is located within, or within 100 bp, 200 bp, 500 bp or 1 kb from, a human genomic sequence selected from SEQ ID NO: 6353 or 6354-6365, or selected from SEQ ID NO: 6353. In some embodiments, the method then identifies the target DNA fragment as being from a cell selected from lung alveolar epithelium & lung bronchial epithelium when 50% or more of the CpG sites are methylated. In some embodiments, the method identifies the target DNA fragment as being from a cell selected from lung alveolar epithelium & lung bronchial epithelium when at least 55%, 60%, 65%, 70%, 75%, 80%, 85% or 90% of the CpG sites are methylated. Likewise, in some embodiments, the method identifies the target DNA fragment as being from a cell selected from lung alveolar epithelium & lung bronchial epithelium when no more than 25%, 30%, 35%, 40%, 45%, or 50% of the CpG sites are unmethylated. In some embodiments, the method identifies the target DNA fragment as not being from a cell selected from lung alveolar epithelium & lung bronchial epithelium when no more than 25%, 30%, 35%, 40%, 45%, or 50% of the CpG sites are methylated. In some embodiments, the method identifies the target DNA fragment as not being from a cell selected from lung alveolar epithelium & lung bronchial epithelium when at least 50%, 55%, 60%, 65%, 70%, 75%, 80%, 85% or 90% of the CpG sites are unmethylated.

[0351] In some embodiments, the methylation status of one or more other DNA fragments is further used in the cell type determination. In some embodiments, the one or more additional (different from the first one) DNA fragment is represented by a genomic sequence of SEQ ID NO: 6227-6243, 6244-6326, 6327-6327, 6328-6329, 6330-6336, 6337-6352, 6353 or 6354-6365.

[0352] The cell type identification method can be used to detect disease or condition associated with the cell type. In one embodiment, when a cell-free DNA in a biological sample (e.g., blood, plasma, serum, semen, milk, urine, saliva or cerebral spinal fluid) is identified as being from a cell selected from lung alveolar epithelium & lung bronchial epithelium of a subject, the method indicates that the subject has abnormal cell death and/or a disease relating to the cell. In some embodiments, the disease or condition is injury, inflammation, or cancer of a cell selected from lung alveolar epithelium & lung bronchial epithelium.

[0353] In some embodiments, when the amount of cell-free DNA identified as being from a particular type of cell or cells, e.g., cells selected from lung alveolar epithelium & lung bronchial epithelium, is decreased, e.g., less at a second time point than at an earlier first time point of measurement, it indicates that the subject is recovering from the disease or condition. In some versions, the methods include making a diagnosis and/or treating a disease or condition accordingly based on the indication of recovery. In some embodiments, when the amount of cell-free DNA identified as being from a particular type of cell or cells, e.g., cells selected from lung alveolar epithelium & lung bronchial epithelium is increased, e.g., more at a second time point than at an earlier first time point of measurement, it indicates that the disease or condition is worsening. In some versions, the methods include making a diagnosis and/or treating a disease or condition accordingly based on the indication of worsening. In some embodiments, between two or more testing, the subject undergoes a treatment, and thus the testing result indicates the treatment effect.

[0354] Also provided, in one embodiment, is a method for determining the cell type of a disease cell, e.g., a cancer cell, the primary origin of the disease, e.g., cancer, cell, or the signal or origin of the disease, e.g., cancer, cell. In some embodiments, a cancer cell has unknown primary origin. In some embodiments, the methods include detecting the methylation status of one or more DNA fragment of the cancer cell and can use the methylation status to determine the cell as a cell selected from lung alveolar epithelium & lung bronchial epithelium, as described above.

[0355] In some instances, a cell-free DNA fragment is released from a cancer cell. The present technology can include determining the cell type of the cancer cell. In some embodiments, a genetic variation may also be present in the DNA fragment, and thus the cell type detection can help associate the genetic variation with the cancer. In some embodiments, the genetic variation includes a mutation. In some embodiments, the genetic variation includes a deletion or insertion. In some embodiments, the genetic variation constitutes microsatellite instability. In some embodiments, the genetic variation constitutes loss of heterozygosity. In some embodiments, the genetic variation interrupts or changes gene splicing. In some embodiments, the genetic variation causes frameshift or generation of premature stop codon. Once the primary origin of the cancer is identified, the subject may be treated with appropriate regiments for that cancer type.

### D. Hematologic Cells

[0356] D1. Blood B cells

[0357] Also as provided in Table A, some genomic locations are uniformly under-methylated or over-methylated in blood B cells as compared to all other cell types in the human.

[0358] In accordance with one embodiment of the present disclosure, a method is provided for identifying that a biological sample includes DNA from a blood B cell. In some embodiments, the method entails detecting the methylation status of a plurality (e.g., 3, 4, 5, 6, 7, 8, 9, 10 or more) of CpG sites of a target DNA fragment in the biological sample, wherein at least one (or at least two, three, four, five, six, seven, eight, nine, ten or all) of the CpG sites is located within, or within 100 bp, 200 bp, 500 bp or 1 kb from, a human genomic sequence selected from SEQ ID NO: 3585-3607, 3608-3701, 3702-3702, 3703-3704 or 3705-3712, or selected from SEQ ID NO: 3585-3607 or 3608-3701. In some embodiments, the method then identifies the target DNA fragment as being from a blood B cell when no more than 40% of the CpG sites are methylated. In some embodiments, the method identifies the target DNA fragment as being from a blood B cell when no more than 25%, 30%, 35%, 40%, 45%, or 50% of the CpG sites are methylated. Likewise, in some embodiments, the method identifies the target DNA fragment as being from a blood B cell when at least 50%, 55%, 60%, 65%, 70%, 75%, 80%, 85% or 90% of the CpG sites are unmethylated. In some embodiments, the method identifies the target DNA fragment as not being from a blood B cell when at least 50%, 55%, 60%, 65%, 70%, 75%, 80%, 85% or 90% of the CpG sites are methylated. In some embodiments, the method identifies the target DNA fragment as not being from a blood B cell when no more than 25%, 30%, 35%, 40%, 45%, or 50% of the CpG sites are unmethylated.

[0359] In some embodiments, the method entails detecting the methylation status of a plurality (e.g., 3, 4, 5, 6, 7, 8, 9, 10 or more) of CpG sites of a target DNA fragment in the biological sample, wherein at least one (or at least two, three, four, five, six, seven, eight, nine, ten or all) of the CpG sites is located within, or within 100 bp, 200 bp, 500 bp or 1 kb from, a human genomic sequence selected from SEQ ID NO: 3713-3733 or 3734-3737, or selected from SEQ ID NO: 3713-3733. In some embodiments, the method then identifies the target DNA fragment as being from a blood B cell when 50% or more of the CpG sites are methylated. In some embodiments, the method identifies the target DNA fragment as being from a blood B cell when at least 55%, 60%, 65%, 70%, 75%, 80%, 85% or 90% of the CpG sites are methylated. Likewise, in some embodiments, the method identifies the target DNA fragment as being from a blood B cell when no more than 25%, 30%, 35%, 40%, 45%, or 50% of the CpG sites are unmethylated. In some embodiments, the method identifies the target DNA fragment as not being from a blood B cell when no more than 25%, 30%, 35%, 40%, 45%, or 50% of the CpG sites are methylated. In some embodiments, the method identifies the target DNA fragment as not being from a blood B cell when at least 50%, 55%, 60%, 65%, 70%, 75%, 80%, 85% or 90% of the CpG sites are unmethylated.

[0360] In some embodiments, the methylation status of one or more other DNA fragments is further used in the cell type determination. In some embodiments, the one or more additional (different from the first one) DNA fragment is represented by a genomic sequence of SEQ ID NO: 3585-3607, 3608-3701, 3702-3702, 3703-3704, 3705-3712, 3713-3733 or 3734-3737.

[0361] The cell type identification method can be used to detect disease or condition associated with the cell type. In one embodiment, when a cell-free DNA in a biological sample (e.g., blood, plasma, serum, semen, milk, urine, saliva or cerebral spinal fluid) is identified as being from a blood B cell of a subject, the method indicates that the subject has abnormal cell death and/or a disease relating to the cell. In some embodiments, the disease or condition is injury, inflammation, or cancer of the blood B cells. In some embodiments, the disease or condition is an autoimmune disease or infection.

[0362] In some embodiments, when the amount of cell-free DNA identified as being from a particular type of cell or cells, e.g., blood B cells, is decreased, e.g., less at a second time point than at an earlier first time point of measurement, it indicates that the subject is recovering from the disease or condition. In some versions, the methods include making a diagnosis and/or treating a disease or condition accordingly based on the indication of recovery. In some embodiments, when the amount of cell-free DNA identified as being from a particular type of cell or cells, e.g., blood B cells is increased, e.g., more at a second time point than at an earlier first time point of measurement, it indicates that the disease or condition is worsening. In some versions, the methods include making a diagnosis and/or treating a disease or condition accordingly based on the indication of worsening. In some embodiments, between two or more testing, the subject undergoes a treatment, and thus the testing result indicates the treatment effect.

[0363] Also provided, in one embodiment, is a method for determining the cell type of a disease cell, e.g., a cancer cell, the primary origin of the disease, e.g., cancer, cell, or the signal or origin of the disease, e.g., cancer, cell. In some embodiments, a cancer cell has unknown primary origin. In some embodiments, the methods include detecting the methylation status of one or more DNA fragment of the cancer cell and can use the methylation status to determine the cell as a blood B cell, as described above.

[0364] In some instances, a cell-free DNA fragment is released from a cancer cell. The present technology can include determining the cell type of the cancer cell. In some embodiments, a genetic variation may also be present in the DNA fragment, and thus the cell type detection can help associate the genetic variation with the cancer. In some embodiments, the genetic variation includes a mutation. In some embodiments, the genetic variation includes a deletion or insertion. In some embodiments, the genetic variation constitutes microsatellite instability. In some embodiments, the genetic variation constitutes loss of heterozygosity. In some embodiments, the genetic variation interrupts or changes gene splicing. In some embodiments, the genetic variation causes frameshift or generation of premature stop codon. Once the primary origin of the cancer is identified, the subject may be treated with appropriate regiments for that cancer type.

[0365] D2. Blood Granulocyles

[0366] Also as provided in Table A, some genomic locations are uniformly under-methylated or over-methylated in blood granulocytes as compared to all other cell types in the human.

[0367] In accordance with one embodiment of the present disclosure, a method is provided for identifying that a biological sample includes DNA from a blood granulocyte. In some embodiments, the method entails detecting the methylation status of a plurality (e.g., 3, 4, 5, 6, 7, 8, 9, 10 or more) of CpG sites of a target DNA fragment in the biological sample, wherein at least one (or at least two, three, four, five, six, seven, eight, nine, ten or all) of the CpG sites is located within, or within 100 bp, 200 bp, 500 bp or 1 kb from, a human genomic sequence selected from SEQ ID NO: 3738-3758, 3759-3849,3850-3851, 3852-3855 or 3856-3862, or selected from SEQ ID NO: 3738-3758 or 3759-3849. In some embodiments, the method then identifies the target DNA fragment as being from a blood granulocyte when no more than 40% of the CpG sites are methylated. In some embodiments, the method identifies the target DNA fragment as being from a blood granulocyte when no more than 25%, 30%, 35%, 40%, 45%, or 50% of the CpG sites are methylated. Likewise, in some embodiments, the method identifies the target DNA fragment as being from a blood granulocyte when at least 50%, 55%, 60%, 65%, 70%, 75%, 80%, 85% or 90% of the CpG sites are unmethylated. In some embodiments, the method identifies the target DNA fragment as not being from a blood granulocyte when at least 50%, 55%, 60%, 65%, 70%, 75%, 80%, 85% or 90% of the CpG sites are methylated. In some embodiments, the method identifies the target DNA fragment as not being from a blood granulocyte when no more than 25%, 30%, 35%, 40%, 45%, or 50% of the CpG sites are unmethylated.

[0368] In some embodiments, the method entails detecting the methylation status of a plurality (e.g., 3, 4, 5, 6, 7, 8, 9, 10 or more) of CpG sites of a target DNA fragment in the biological sample, wherein at least one (or at least two, three, four, five, six, seven, eight, nine, ten or all) of the CpG sites is located within, or within 100 bp, 200 bp, 500 bp or 1 kb from, a human genomic sequence selected from SEQ ID NO: 3863-3884, 3885-3885 or 3886-3886, or selected from SEQ ID NO: 3863-3884. In some embodiments, the method then identifies the target DNA fragment as being from a blood granulocyte when 50% or more of the CpG sites are methylated. In some embodiments, the method identifies the target DNA fragment as being from a blood granulocyte when at least 55%, 600, 65%, 70%, 75%, 80%, 85% or 90% of the CpG sites are methylated. Likewise, in some embodiments, the method identifies the target DNA fragment as being from a blood granulocyte when no more than 25%, 30%, 16, 35%, 40%, 45%, or 50% of the CpG sites are unmethylated. In some embodiments, the method identifies the target DNA fragment as not being from a blood granulocyte when no more than 25%, 30%, 35%, 40%, 45%, or 50/% of the CpG sites are methylated. In some embodiments, the method identifies the target DNA fragment as not being from a blood granulocyte when at least 50%, 55%, 60%, 65%, 70%, 75%, 80%, 85% or 90% of the CpG sites are unmethylated.

[0369] In some embodiments, the methylation status of one or more other DNA fragments is further used in the cell type determination. In some embodiments, the one or more additional (different from the first one) DNA fragment is represented by a genomic sequence of SEQ ID NO: 3738-3758, 3759-3849, 3850-3851, 3852-3855, 3856-3862, 3863-3884, 3885-3885 or 3886-3886.

[0370] The cell type identification method can be used to detect disease or condition associated with the cell type. In one embodiment, when a cell-free DNA in a biological sample (e.g., blood, plasma, serum, semen, milk, urine, saliva or cerebral spinal fluid) is identified as being from a blood granulocyte of a subject, the method indicates that the subject has abnormal cell death and/or a disease relating to the cell. In some embodiments, the disease or condition is injury, inflammation, or cancer of the blood granulocytes. In some embodiments, the disease or condition is an autoimmune disease or infection.

[0371] In some embodiments, when the amount of cell-free DNA identified as being from a particular type of cell or cells, e.g., blood granulocytes, is decreased, e.g., less at a second time point than at an earlier first time point of measurement, it indicates that the subject is recovering from the disease or condition. In some versions, the methods include making a diagnosis and/or treating a disease or condition accordingly based on the indication of recovery. In some embodiments, when the amount of cell-free DNA identified as being from a particular type of cell or cells, e.g., blood granulocytes is increased, e.g., more at a second time point than at an earlier first time point of measurement, it indicates that the disease or condition is worsening. In some versions, the methods include making a diagnosis and/or treating a disease or condition accordingly based on the indication of worsening. In some embodiments, between two or more testing, the subject undergoes a treatment, and thus the testing result indicates the treatment effect.

[0372] Also provided, in one embodiment, is a method for determining the cell type of a disease cell, e.g., a cancer cell, the primary origin of the disease, e.g., cancer, cell, or the signal or origin of the disease, e.g., cancer, cell. In some embodiments, a cancer cell has unknown primary origin. In some embodiments, the methods include detecting the methylation status of one or more DNA fragment of the cancer cell and can use the methylation status to determine the cell as a blood granulocyte, as described above.

[0373] In some instances, a cell-free DNA fragment is released from a cancer cell. The present technology can include determining the cell type of the cancer cell. In some embodiments, a genetic variation may also be present in the DNA fragment, and thus the cell type detection can help associate the genetic variation with the cancer. In some embodiments, the genetic variation includes a mutation. In some embodiments, the genetic variation includes a deletion or insertion. In some embodiments, the genetic variation constitutes microsatellite instability. In some embodiments, the genetic variation constitutes loss of heterozygosity. In some embodiments, the genetic variation interrupts or changes gene splicing. In some embodiments, the genetic variation causes frameshift or generation of premature stop codon. Once the primary origin of the cancer is identified, the subject may be treated with appropriate regiments for that cancer type.

### D3. Blood Monocytes+Macrophages

[0374] Also as provided in Table A, some genomic locations are uniformly under-methylated or over-methylated in blood monocytes or macrophages as compared to all other cell types in the human.

[0375] In accordance with one embodiment of the present disclosure, a method is provided for identifying that a biological sample includes DNA from a blood monocyte or macrophage. In some embodiments, the method entails detecting the methylation status of a plurality (e.g., 3, 4, 5, 6, 7, 8, 9, 10 or more) of CpG sites of a target DNA fragment in the biological sample, wherein at least one (or at least two, three, four, five, six, seven, eight, nine, ten or all) of the CpG sites is located within, or within 100 bp, 200 bp, 500 bp or 1 kb from, a human genomic sequence selected from SEQ ID NO: 3887-3909,3910-3997, 3998-4000, 4001-4002 or 4003-4012, or selected from SEQ ID NO: 3887-3909 or 3910-3997. In some embodiments, the method then identifies the target DNA fragment as being from a blood monocyte or macrophage when no more than 40% of the CpG sites are methylated. In some embodiments, the method identifies the target DNA fragment as being from a blood monocyte or macrophage when no more than 25%, 30%, 35%, 40%, 45%, or 50% of the CpG sites are methylated. Likewise, in some embodiments, the method identifies the target DNA fragment as being from a blood monocyte or macrophage when at least 50%, 55%, 60%, 65%, 70%, 75%, 80%, 85% or 90% of the CpG sites are unmethylated. In some embodiments, the method identifies the target DNA fragment as not being from a blood monocyte or macrophage when at least 50%, 55%, 60%, 65%, 70%, 75%, 80%, 85% or 90% of the CpG sites are methylated. In some embodiments, the method identifies the target DNA fragment as not being from a blood monocyte or macrophage when no more than 25%, 30%, 35%, 40%, 45%, or 50% of the CpG sites are unmethylated.

[0376] In some embodiments, the method entails detecting the methylation status of a plurality (e.g., 3, 4, 5, 6, 7, 8, 9, 10 or more) of CpG sites of a target DNA fragment in the biological sample, wherein at least one (or at least two, three, four, five, six, seven, eight, nine, ten or all) of the CpG sites is located within, or within 100 bp, 200 bp, 500 bp or 1 kb from, a human genomic sequence selected from SEQ ID NO: 4013-4036 or 4037, or selected from SEQ ID NO: 40134036. In some embodiments, the method then identifies the target DNA fragment as being from a blood monocyte or macrophage when 50% or more of the CpG sites are methylated. In some embodiments, the method identifies the target DNA fragment as being from a blood monocyte or macrophage when at least 55%, 60%, 65%, 70%, 75%, 80%, 85% or 90% of the CpG sites are methylated. Likewise, in some embodiments, the method identifies the target DNA fragment as being from a blood monocyte or macrophage when no more than 25%, 30%, 35%, 40%, 45%, or 50% of the CpG sites are unmethylated. In some embodiments, the method identifies the target DNA fragment as not being from a blood monocyte or macrophage when no more than 25%, 30%, 35%, 40%, 45%, or 50% of the CpG sites are methylated. In some embodiments, the method identifies the target DNA fragment as not being from a blood monocyte or macrophage when at least 50%, 55%, 60%, 65%, 70%, 75%, 80%, 85% or 90% of the CpG sites are unmethylated.

[0377] In some embodiments, the methylation status of one or more other DNA fragments is further used in the cell type determination. In some embodiments, the one or more additional (different from the first one) DNA fragment is represented by a genomic sequence of SEQ ID NO: 3887-3909, 3910-3997, 3998-4000, 4001-4002, 4003-4012, 4013-4036 or 4037.

[0378] The cell type identification method can be used to detect disease or condition associated with the cell type. In one embodiment, when a cell-free DNA in a biological sample (e.g., blood, plasma, serum, semen, milk, urine, saliva or cerebral spinal fluid) is identified as being from a blood monocyte or macrophage of a subject, the method indicates that the subject has abnormal cell death and/or a disease relating to the cell. In some embodiments, the disease or condition is injury, inflammation, or cancer of the blood monocytes or macrophages. In some embodiments, the disease or condition is an autoimmune disease or infection.

[0379] In some embodiments, when the amount of cell-free DNA identified as being from a particular type of cell or cells, e.g., blood monocytes or macrophages, is decreased, e.g., less at a second time point than at an earlier first time point of measurement, it indicates that the subject is recovering from the disease or condition. In some versions, the methods include making a diagnosis and/or treating a disease or condition accordingly based on the indication of recovery. In some embodiments, when the amount of cell-free DNA identified as being from a particular type of cell or cells, e.g., blood monocytes or macrophages is increased, e.g., more at a second time point than at an earlier first time point of measurement, it indicates that the disease or condition is worsening. In some versions, the methods include making a diagnosis and/or treating a disease or condition accordingly based on the indication of worsening. In some embodiments, between two or more testing, the subject undergoes a treatment, and thus the testing result indicates the treatment effect.

[0380] Also provided, in one embodiment, is a method for determining the cell type of a disease cell, e.g., a cancer cell, the primary origin of the disease, e.g., cancer, cell, or the signal or origin of the disease, e.g., cancer, cell. In some embodiments, a cancer cell has unknown primary origin. In some embodiments, the methods include detecting the methylation status of one or more DNA fragment of the cancer cell and can use the methylation status to determine the cell as a blood monocyte or macrophage, as described above.

[0381] In some instances, a cell-free DNA fragment is released from a cancer cell. The present technology can include determining the cell type of the cancer cell. In some embodiments, a genetic variation may also be present in the DNA fragment, and thus the cell type detection can help associate the genetic variation with the cancer. In some embodiments, the genetic variation includes a mutation. In some embodiments, the genetic variation includes a deletion or insertion. In some embodiments, the genetic variation constitutes microsatellite instability. In some embodiments, the genetic variation constitutes loss of heterozygosity. In some embodiments, the genetic variation interrupts or changes gene splicing. In some embodiments, the genetic variation causes frameshift or generation of premature stop codon. Once the primary origin of the cancer is identified, the subject may be treated with appropriate regiments for that cancer type.

### D4. Blood NK Cells

[0382] Also as provided in Table A, some genomic locations are uniformly under-methylated or over-methylated in blood NK cells as compared to all other cell types in the human.

[0383] In accordance with one embodiment of the present disclosure, a method is provided for identifying that a biological sample includes DNA from a blood NK cell. In some embodiments, the method entails detecting the methylation status of a plurality (e.g., 3, 4, 5, 6, 7, 8, 9, 10 or more) of CpG sites of a target DNA fragment in the biological sample, wherein at least one (or at least two, three, four, five, six, seven, eight, nine, ten or all) of the CpG sites is located within, or within 100 bp, 200 bp, 500 bp or 1 kb from, a human genomic sequence selected from SEQ ID NO: 4038-4061, 4062-4146, 4147-4148, 4149-4149 or 4150-4162, or selected from SEQ ID NO: 4038-4061 or 4062-4146. In some embodiments, the method then identifies the target DNA fragment as being from a blood NK cell when no more than 40% of the CpG sites are methylated. In some embodiments, the method identifies the target DNA fragment as being from a blood NK cell when no more than 25%, 30%, 35%, 40%, 45%, or 50% of the CpG sites are methylated. Likewise, in some embodiments, the method identifies the target DNA fragment as being from a blood NK cell when at least 50%, 55%, 60%, 65%, 70%, 75%, 80%, 85% or 90% of the CpG sites are unmethylated. In some embodiments, the method identifies the target DNA fragment as not being from a blood NK cell when at least 50%, 55%, 60%, 65%, 70%, 75%, 80%, 85% or 90% of the CpG sites are methylated. In some embodiments, the method identifies the target DNA fragment as not being from a blood NK cell when no more than 25%, 30%, 35%, 40%, 45%, or 50% of the CpG sites are unmethylated.

[0384] In some embodiments, the method entails detecting the methylation status of a plurality (e.g., 3, 4, 5, 6, 7, 8, 9, 10 or more) of CpG sites of a target DNA fragment in the biological sample, wherein at least one (or at least two, three, four, five, six, seven, eight, nine, ten or all) of the CpG sites is located within, or within 100 bp, 200 bp, 500 bp or 1 kb from, a human genomic sequence selected from SEQ ID NO: 4163-4184 or 4185-4187, or selected from SEQ ID NO: 4163-4184. In some embodiments, the method then identifies the target DNA fragment as being from a blood NK cell when 50% or more of the CpG sites are methylated. In some embodiments, the method identifies the target DNA fragment as being from a blood NK cell when at least 55%, 60%, 65%, 70%, 75%, 80%, 85% or 90% of the CpG sites are methylated. Likewise, in some embodiments, the method identifies the target DNA fragment as being from a blood NK cell when no more than 25%, 30%, 35%, 40%, 45%, or 50% of the CpG sites are unmethylated. In some embodiments, the method identifies the target DNA fragment as not being from a blood NK cell when no more than 25%, 30%, 35%, 40%, 45%, or 50% of the CpG sites are methylated. In some embodiments, the method identifies the target DNA fragment as not being from a blood NK cell when at least 50%, 55%, 60%, 65%, 70%, 75%, 80%, 85% or 90% of the CpG sites are unmethylated.

[0385] In some embodiments, the methylation status of one or more other DNA fragments is further used in the cell type determination. In some embodiments, the one or more additional (different from the first one) DNA fragment is represented by a genomic sequence of SEQ ID NO: 4038-4061, 4062-4146, 4147-4148, 4149-4149, 4150-4162, 4163-4184 or 4185-4187.

[0386] The cell type identification method can be used to detect disease or condition associated with the cell type. In one embodiment, when a cell-free DNA in a biological sample (e.g., blood, plasma, serum, semen, milk, urine, saliva or cerebral spinal fluid) is identified as being from a blood NK cell of a subject, the method indicates that the subject has abnormal cell death and/or a disease relating to the cell. In some embodiments, the disease or condition is injury, inflammation, or cancer of the blood NK cells. In some embodiments, the disease or condition is an autoimmune disease or infection.

[0387] In some embodiments, when the amount of cell-free DNA identified as being from a particular type of cell or cells, e.g., blood NK cells, is decreased, e.g., less at a second time point than at an earlier first time point of measurement, it indicates that the subject is recovering from the disease or condition. In some versions, the methods include making a diagnosis and/or treating a disease or condition accordingly based on the indication of recovery. In some embodiments, when the amount of cell-free DNA identified as being from a particular type of cell or cells, e.g., blood NK cells is increased, e.g., more at a second time point than at an earlier first time point of measurement, it indicates that the disease or condition is worsening. In some versions, the methods include making a diagnosis and/or treating a disease or condition accordingly based on the indication of worsening. In some embodiments, between two or more testing, the subject undergoes a treatment, and thus the testing result indicates the treatment effect.

[0388] Also provided, in one embodiment, is a method for determining the cell type of a disease cell, e.g., a cancer cell, the primary origin of the disease, e.g., cancer, cell, or the signal or origin of the disease, e.g., cancer, cell. In some embodiments, a cancer cell has unknown primary origin. In some embodiments, the methods include detecting the methylation status of one or more DNA fragment of the cancer cell and can use the methylation status to determine the cell as a blood NK cell, as described above.

[0389] In some instances, a cell-free DNA fragment is released from a cancer cell. The present technology can include determining the cell type of the cancer cell. In some embodiments, a genetic variation may also be present in the DNA fragment, and thus the cell type detection can help associate the genetic variation with the cancer. In some embodiments, the genetic variation includes a mutation. In some embodiments, the genetic variation includes a deletion or insertion. In some embodiments, the genetic variation constitutes microsatellite instability. In some embodiments, the genetic variation constitutes loss of heterozygosity. In some embodiments, the genetic variation interrupts or changes gene splicing. In some embodiments, the genetic variation causes frameshift or generation of premature stop codon. Once the primary origin of the cancer is identified, the subject may be treated with appropriate regiments for that cancer type.

### D5. Blood T Cells

[0390] Also as provided in Table A, some genomic locations are uniformly under-methylated or over-methylated in blood T cells as compared to all other cell types in the human.

[0391] In accordance with one embodiment of the present disclosure, a method is provided for identifying that a biological sample includes DNA from a blood T cell. In some embodiments, the method entails detecting the methylation status of a plurality (e.g., 3, 4, 5, 6, 7, 8, 9, 10 or more) of CpG sites of a target DNA fragment in the biological sample, wherein at least one (or at least two, three, four, five, six, seven, eight, nine, ten or all) of the CpG sites is located within, or within 100 bp, 200 bp, 500 bp or 1 kb from, a human genomic sequence selected from SEQ ID NO: 4188-4205, 4206-4274, 4275-4275, 4276-4276, 4277-4282 or 4283-4312, or selected from SEQ 1D NO: 4188-4205 or 4206-4274. In some embodiments, the method then identifies the target DNA fragment as being from a blood T cell when no more than 40% of the CpG sites are methylated. In some embodiments, the method identifies the target DNA fragment as being from a blood T cell when no more than 25%, 30%, 35%, 40%, 45%, or 50% of the CpG sites are methylated. Likewise, in some embodiments, the method identifies the target DNA fragment as being from a blood T cell when at least 50%, 55%, 60%, 65%, 70%, 75%, 80%, 85% or 90% of the CpG sites are unmethylated. In some embodiments, the method identifies the target DNA fragment as not being from a blood T cell when at least 50%, 55%, 60%, 65%, 70%, 75%, 80%, 85% or 90% of the CpG sites are methylated. In some embodiments, the method identifies the target DNA fragment as not being from a blood T cell when no more than 25%, 30%, 35%, 40%, 45%, or 50% of the CpG sites are unmethylated.

[0392] In some embodiments, the method entails detecting the methylation status of a plurality (e.g., 3, 4, 5, 6, 7, 8, 9, 10 or more) of CpG sites of a target DNA fragment in the biological sample, wherein at least one (or at least two, three, four, five, six, seven, eight, nine, ten or all) of the CpG sites is located within, or within 100 bp, 200 bp, 500 bp or 1 kb from, a human genomic sequence selected from SEQ ID NO: 4313-4322, 4323-4323 or 4324-4337, or selected from SEQ ID NO: 4313-4322. In some embodiments, the method then identifies the target DNA fragment as being from a blood T cell when 50% or more of the CpG sites are methylated. In some embodiments, the method identifies the target DNA fragment as being from a blood T cell when at least 55%, 60%, 65%, 70%, 75%, 80%, 85% or 90% of the CpG sites are methylated. Likewise, in some embodiments, the method identifies the target DNA fragment as being from a blood T cell when no more than 25%, 30%, 35%, 40%, 45%, or 50% of the CpG sites are unmethylated. In some embodiments, the method identifies the target DNA fragment as not being from a blood T cell when no more than 25%, 30%, 35%, 40%, 45%, or 50% of the CpG sites are methylated. In some embodiments, the method identifies the target DNA fragment as not being from a blood T cell when at least 50%, 55%, 60%, 65%, 70%, 75%, 80%, 85% or 90% of the CpG sites are unmethylated.

[0393] In some embodiments, the methylation status of one or more other DNA fragments is further used in the cell type determination. In some embodiments, the one or more additional (different from the first one) DNA fragment is represented by a genomic sequence of SEQ ID NO: 4188-4205, 4206-4274, 4275-4275, 4276-4276, 4277-4282, 4283-4312, 4313-4322, 4323-4323 or 4324-4337.

[0394] The cell type identification method can be used to detect disease or condition associated with the cell type. In one embodiment, when a cell-free DNA in a biological sample (e.g., blood, plasma, serum, semen, milk, urine, saliva or cerebral spinal fluid) is identified as being from a blood T cell of a subject, the method indicates that the subject has abnormal cell death and/or a disease relating to the cell. In some embodiments, the disease or condition is injury, inflammation, or cancer of the blood T cells. In some embodiments, the disease or condition is an autoimmune disease or infection.

[0395] In some embodiments, when the amount of cell-free DNA identified as being from a particular type of cell or cells, e.g., blood T cells, is decreased, e.g., less at a second time point than at an earlier first time point of measurement, it indicates that the subject is recovering from the disease or condition. In some versions, the methods include making a diagnosis and/or treating a disease or condition accordingly based on the indication of recovery. In some embodiments, when the amount of cell-free DNA identified as being from a particular type of cell or cells, e.g., blood T cells is increased, e.g., more at a second time point than at an earlier first time point of measurement, it indicates that the disease or condition is worsening. In some versions, the methods include making a diagnosis and/or treating a disease or condition accordingly based on the indication of worsening. In some embodiments, between two or more testing, the subject undergoes a treatment, and thus the testing result indicates the treatment effect.

[0396] Also provided, in one embodiment, is a method for determining the cell type of a disease cell, e.g., a cancer cell, the primary origin of the disease, e.g., cancer, cell, or the signal or origin of the disease, e.g., cancer, cell. In some embodiments, a cancer cell has unknown primary origin. In some embodiments, the methods include detecting the methylation status of one or more DNA fragment of the cancer cell and can use the methylation status to determine the cell as a blood T cell, as described above.

[0397] In some instances, a cell-free DNA fragment is released from a cancer cell. The present technology can include determining the cell type of the cancer cell. In some embodiments, a genetic variation may also be present in the DNA fragment, and thus the cell type detection can help associate the genetic variation with the cancer. In some embodiments, the genetic variation includes a mutation. In some embodiments, the genetic variation includes a deletion or insertion. In some embodiments, the genetic variation constitutes microsatellite instability. In some embodiments, the genetic variation constitutes loss of heterozygosity. In some embodiments, the genetic variation interrupts or changes gene splicing. In some embodiments, the genetic variation causes frameshift or generation of premature stop codon. Once the primary origin of the cancer is identified, the subject may be treated with appropriate regiments for that cancer type.

### D6. Erythrocyte Progenitor Cells

[0398] Also as provided in Table A, some genomic locations are uniformly under-methylated or over-methylated in erythrocyte progenitor cells as compared to all other cell types in the human.

[0399] In accordance with one embodiment of the present disclosure, a method is provided for identifying that a biological sample includes DNA from an erythrocyte progenitor cell. In some embodiments, the method entails detecting the methylation status of a plurality (e.g., 3, 4, 5, 6, 7, 8, 9, 10 or more) of CpG sites of a target DNA fragment in the biological sample, wherein at least one (or at least two, three, four, five, six, seven, eight, nine, ten or all) of the CpG sites is located within, or within 100 bp, 200 bp, 500 bp or 1 kb from, a human genomic sequence selected from SEQ ID NO: 4338-4361,4362-4449, 4450-4453, 4454-4454 or 4455-4464, or selected from SEQ 1D NO: 4338-4361 or 4362-4449. In some embodiments, the method then identifies the target DNA fragment as being from an erythrocyte progenitor cell when no more than 40% of the CpG sites are methylated. In some embodiments, the method identifies the target DNA fragment as being from an erythrocyte progenitor cell when no more than 25%, 30%, 35%, 40%, 45%, or 50% of the CpG sites are methylated. Likewise, in some embodiments, the method identifies the target DNA fragment as being from an erythrocyte progenitor cell when at least 50%, 55%, 60%, 65%, 70%, 75%, 80%, 85% or 90% of the CpG sites are unmethylated. In some embodiments, the method identifies the target DNA fragment as not being from an erythrocyte progenitor cell when at least 50%, 55%, 60%, 65%, 70%, 75%, 80%, 85% or 90% of the CpG sites are methylated. In some embodiments, the method identifies the target DNA fragment as not being from an erythrocyte progenitor cell when no more than 25%, 30%, 35%, 40%, 45%, or 50% of the CpG sites are unmethylated.

[0400] In some embodiments, the method entails detecting the methylation status of a plurality (e.g., 3, 4, 5, 6, 7, 8, 9, 10 or more) of CpG sites of a target DNA fragment in the biological sample, wherein at least one (or at least two, three, four, five, six, seven, eight, nine, ten or all) of the CpG sites is located within, or within 100 bp, 200 bp, 500 bp or 1 kb from, a human genomic sequence selected from SEQ ID NO: 4465-4470. In some embodiments, the method then identifies the target DNA fragment as being from an erythrocyte progenitor cell when 50% or more of the CpG sites are methylated. In some embodiments, the method identifies the target DNA fragment as being from an erythrocyte progenitor cell when at least 55%, 60%, 65%, 70%, 75%, 80%, 85% or 90% of the CpG sites are methylated. Likewise, in some embodiments, the method identifies the target DNA fragment as being from an erythrocyte progenitor cell when no more than 25%, 30%, 35%, 40%, 45%, or 50% of the CpG sites are unmethylated. In some embodiments, the method identifies the target DNA fragment as not being from an erythrocyte progenitor cell when no more than 25%, 30%, 35%, 40%, 45%, or 50% of the CpG sites are methylated. In some embodiments, the method identifies the target DNA fragment as not being from an erythrocyte progenitor cell when at least 50%, 55%, 60%, 65%, 70%, 75%, 80%, 85% or 90% of the CpG sites are unmethylated.

[0401] In some embodiments, the methylation status of one or more other DNA fragments is further used in the cell type determination. In some embodiments, the one or more additional (different from the first one) DNA fragment is represented by a genomic sequence of SEQ ID NO: 4338-4361, 4362-4449, 4450-4453, 4454-4454, 4455-4464, 4465-4470.

[0402] The cell type identification method can be used to detect disease or condition associated with the cell type. In one embodiment, when a cell-free DNA in a biological sample (e.g., blood, plasma, serum, semen, milk, urine, saliva or cerebral spinal fluid) is identified as being from an erythrocyte progenitor cell of a subject, the method indicates that the subject has abnormal cell death and/or a disease relating to the cell. In some embodiments, the disease or condition is injury, inflammation, or cancer of the erythrocyte progenitor cells. In some embodiments, the disease or condition is an autoimmune disease or infection.

[0403] In some embodiments, when the amount of cell-free DNA identified as being from a particular type of cell or cells, e.g., erythrocyte progenitor cells, is decreased, e.g., less at a second time point than at an earlier first time point of measurement, it indicates that the subject is recovering from the disease or condition. In some versions, the methods include making a diagnosis and/or treating a disease or condition accordingly based on the indication of recovery. In some embodiments, when the amount of cell-free DNA identified as being from a particular type of cell or cells, e.g., erythrocyte progenitor cells is increased, e.g., more at a second time point than at an earlier first time point of measurement, it indicates that the disease or condition is worsening. In some versions, the methods include making a diagnosis and/or treating a disease or condition accordingly based on the indication of worsening. In some embodiments, between two or more testing, the subject undergoes a treatment, and thus the testing result indicates the treatment effect.

[0404] Also provided, in one embodiment, is a method for determining the cell type of a disease cell, e.g., a cancer cell, the primary origin of the disease, e.g., cancer, cell, or the signal or origin of the disease, e.g., cancer, cell. In some embodiments, a cancer cell has unknown primary origin. In some embodiments, the methods include detecting the methylation status of one or more DNA fragment of the cancer cell and can use the methylation status to determine the cell as an erythrocyte progenitor cell, as described above.

[0405] In some instances, a cell-free DNA fragment is released from a cancer cell. The present technology can include determining the cell type of the cancer cell. In some embodiments, a genetic variation may also be present in the DNA fragment, and thus the cell type detection can help associate the genetic variation with the cancer. In some embodiments, the genetic variation includes a mutation. In some embodiments, the genetic variation includes a deletion or insertion. In some embodiments, the genetic variation constitutes microsatellite instability. In some embodiments, the genetic variation constitutes loss of heterozygosity. In some embodiments, the genetic variation interrupts or changes gene splicing. In some embodiments, the genetic variation causes frameshift or generation of premature stop codon. Once the primary origin of the cancer is identified, the subject may be treated with appropriate regiments for that cancer type.

### E. Dermal-Skeleto-Muscular Cells

[0406] E1. Epidermal keratinocytes

[0407] Also as provided in Table A, some genomic locations are uniformly under-methylated or over-methylated in epidermal keratinocytes as compared to all other cell types in the human.

[0408] In accordance with one embodiment of the present disclosure, a method is provided for identifying that a biological sample includes DNA from an epidermal keratinocyte. In some embodiments, the method entails detecting the methylation status of a plurality (e.g., 3, 4, 5, 6, 7, 8, 9, 10 or more) of CpG sites of a target DNA fragment in the biological sample, wherein at least one (or at least two, three, four, five, six, seven, eight, nine, ten or all) of the CpG sites is located within, or within 100 bp, 200 bp, 500 bp or 1 kb from, a human genomic sequence selected from SEQ ID NO: 4471-4492, 4493-4573, 4574-4574, 4575-4577, 4578-4579 or 4580-4595, or selected from SEQ ID NO: 4471-4492 or 4493-4573. In some embodiments, the method then identifies the target DNA fragment as being from an epidermal keratinocyte when no more than 40% of the CpG sites are methylated. In some embodiments, the method identifies the target DNA fragment as being from an epidermal keratinocyte when no more than 25%, 30%, 35%, 40%, 45%, or 50% of the CpG sites are methylated. Likewise, in some embodiments, the method identifies the target DNA fragment as being from an epidermal keratinocyte when at least 50%, 55%, 60%, 65%, 70%, 75%, 80%, 85% or 90% of the CpG sites are unmethylated. In some embodiments, the method identifies the target DNA fragment as not being from an epidermal keratinocyte when at least 50%, 55%, 600, 65%, 70%, 75%, 80%, 85% or 90% of the CpG sites are methylated. In some embodiments, the method identifies the target DNA fragment as not being from an epidermal keratinocyte when no more than 25%, 30%, 35%, 40%, 45%, or 50% of the CpG sites are unmethylated.

[0409] In some embodiments, the method entails detecting the methylation status of a plurality (e.g., 3, 4, 5, 6, 7, 8, 9, 10 or more) of CpG sites of a target DNA fragment in the biological sample, wherein at least one (or at least two, three, four, five, six, seven, eight, nine, ten or all) of the CpG sites is located within, or within 100 bp, 200 bp, 500 bp or 1 kb from, a human genomic sequence selected from SEQ ID NO: 4596-4598, 4599-4599 or 4600-4618, or preferably SEQ ID NO: 4596-4598. In some embodiments, the method then identifies the target DNA fragment as being from an epidermal keratinocyte when 50% or more of the CpG sites are methylated. In some embodiments, the method identifies the target DNA fragment as being from an epidermal keratinocyte when at least 55%, 60%, 65%, 70%, 75%, 80%, 85% or 90% of the CpG sites are methylated. Likewise, in some embodiments, the method identifies the target DNA fragment as being from an epidermal keratinocyte when no more than 25%, 30%, 35%, 40%, 45%, or 50% of the CpG sites are unmethylated. In some embodiments, the method identifies the target DNA fragment as not being from an epidermal keratinocyte when no more than 25%, 30%, 35%, 40%, 45%, or 50% of the CpG sites are methylated. In some embodiments, the method identifies the target DNA fragment as not being from an epidermal keratinocyte when at least 50%, 55%, 60%, 65%, 70%, 75%, 80%, 85% or 90% of the CpG sites are unmethylated.

[0410] In some embodiments, the methylation status of one or more other DNA fragments is further used in the cell type determination. In some embodiments, the one or more additional (different from the first one) DNA fragment is represented by a genomic sequence of SEQ ID NO: 4471-4492, 4493-4573, 4574-4574, 4575-4577, 4578-4579, 4580-4595, 4596-4598, 4599-4599 or 4600-4618.

[0411] The cell type identification method can be used to detect disease or condition associated with the cell type. In one embodiment, when a cell-free DNA in a biological sample (e.g., blood, plasma, serum, semen, milk, urine, saliva or cerebral spinal fluid) is identified as being from an epidermal keratinocyte of a subject, the method indicates that the subject has abnormal cell death and/or a disease relating to the cell. In some embodiments, the disease or condition is injury, inflammation, or cancer of the epidermal keratinocytes.

[0412] In some embodiments, when the amount of cell-free DNA identified as being from a particular type of cell or cells, e.g., epidermal keratinocytes, is decreased, e.g., less at a second time point than at an earlier first time point of measurement, it indicates that the subject is recovering from the disease or condition. In some versions, the methods include making a diagnosis and/or treating a disease or condition accordingly based on the indication of recovery. In some embodiments, when the amount of cell-free DNA identified as being from a particular type of cell or cells, e.g., epidermal keratinocytes is increased, e.g., more at a second time point than at an earlier first time point of measurement, it indicates that the disease or condition is worsening. In some versions, the methods include making a diagnosis and/or treating a disease or condition accordingly based on the indication of worsening. In some embodiments, between two or more testing, the subject undergoes a treatment, and thus the testing result indicates the treatment effect.

[0413] Also provided, in one embodiment, is a method for determining the cell type of a disease cell, e.g., a cancer cell, the primary origin of the disease, e.g., cancer, cell, or the signal or origin of the disease, e.g., cancer, cell. In some embodiments, a cancer cell has unknown primary origin. In some embodiments, the methods include detecting the methylation status of one or more DNA fragment of the cancer cell and can use the methylation status to determine the cell as an epidermal keratinocyte, as described above.

[0414] In some instances, a cell-free DNA fragment is released from a cancer cell. The present technology can include determining the cell type of the cancer cell. In some embodiments, a genetic variation may also be present in the DNA fragment, and thus the cell type detection can help associate the genetic variation with the cancer. In some embodiments, the genetic variation includes a mutation. In some embodiments, the genetic variation includes a deletion or insertion. In some embodiments, the genetic variation constitutes microsatellite instability. In some embodiments, the genetic variation constitutes loss of heterozygosity. In some embodiments, the genetic variation interrupts or changes gene splicing. In some embodiments, the genetic variation causes frameshift or generation of premature stop codon. Once the primary origin of the cancer is identified, the subject may be treated with appropriate regiments for that cancer type.

### E2. Dermal Fibroblasts

[0415] Also as provided in Table A, some genomic locations are uniformly under-methylated or over-methylated in dermal fibroblast cells as compared to all other cell types in the human.

[0416] In accordance with one embodiment of the present disclosure, a method is provided for identifying that a biological sample includes DNA from a dermal fibroblast cell. In some embodiments, the method entails detecting the methylation status of a plurality (e.g., 3, 4, 5, 6, 7, 8, 9, 10 or more) of CpG sites of a target DNA fragment in the biological sample, wherein at least one (or at least two, three, four, five, six, seven, eight, nine, ten or all) of the CpG sites is located within, or within 100 bp, 200 bp, 500 bp or 1 kb from, a human genomic sequence selected from SEQ ID NO: 4619-4641,4642-4719, 4720, 4721-4727, 4728 or 4729-4741, or selected from SEQ ID NO: 4619-4641 or 46424719. In some embodiments, the method then identifies the target DNA fragment as being from a dermal fibroblast cell when no more than 40% of the CpG sites are methylated. In some embodiments, the method identifies the target DNA fragment as being from a dermal fibroblast cell when no more than 25%, 30%, 35%, 40%, 45%, or 50% of the CpG sites are methylated. Likewise, in some embodiments, the method identifies the target DNA fragment as being from a dermal fibroblast cell when at least 50%, 55%, 60%, 65%, 70%, 75%, 80%, 85% or 90% of the CpG sites are unmethylated. In some embodiments, the method identifies the target DNA fragment as not being from a dermal fibroblast cell when at least 50%, 55%, 60%, 65%, 70%, 75%, 80%, 85% or 90% of the CpG sites are methylated. In some embodiments, the method identifies the target DNA fragment as not being from a dermal fibroblast cell when no more than 25%, 30%, 35%, 40%, 16, 45%, or 50% of the CpG sites are unmethylated.

[0417] In some embodiments, the method entails detecting the methylation status of a plurality (e.g., 3, 4, 5, 6, 7, 8, 9, 10 or more) of CpG sites of a target DNA fragment in the biological sample, wherein at least one (or at least two, three, four, five, six, seven, eight, nine, ten or all) of the CpG sites is located within, or within 100 bp, 200 bp, 500 bp or 1 kb from, a human genomic sequence selected from SEQ ID NO: 4742-4747, 4748 or 4749-4766, or selected from SEQ ID NO: 4742-4747. In some embodiments, the method then identifies the target DNA fragment as being from a dermal fibroblast cell when 50% or more of the CpG sites are methylated. In some embodiments, the method identifies the target DNA fragment as being from a dermal fibroblast cell when at least 55%, 60%, 65%, 70%, 75%, 80%, 85% or 90% of the CpG sites are methylated. Likewise, in some embodiments, the method identifies the target DNA fragment as being from a dermal fibroblast cell when no more than 25%, 30%, 35%, 40%, 45%, or 500/% of the CpG sites are unmethylated. In some embodiments, the method identifies the target DNA fragment as not being from a dermal fibroblast cell when no more than 25%, 30%, 35%, 40%, 45%, or 50% of the CpG sites are methylated. In some embodiments, the method identifies the target DNA fragment as not being from a dermal fibroblast cell when at least 50%, 55%, 60%, 65%, 70%, 75%, 80%, 85% or 90% of the CpG sites are unmethylated.

[0418] In some embodiments, the methylation status of one or more other DNA fragments is further used in the cell type determination. In some embodiments, the one or more additional (different from the first one) DNA fragment is represented by a genomic sequence of SEQ ID NO: 4619-4641, 46424719, 4720, 47214727, 4728, 4729-4741, 47424747, 4748 or 4749-4766.

[0419] The cell type identification method can be used to detect disease or condition associated with the cell type. In one embodiment, when a cell-free DNA in a biological sample (e.g., blood, plasma, serum, semen, milk, urine, saliva or cerebral spinal fluid) is identified as being from a dermal fibroblast cell of a subject, the method indicates that the subject has abnormal cell death and/or a disease relating to the cell. In some embodiments, the disease or condition is injury, inflammation, or cancer of the dermal fibroblast cells.

[0420] In some embodiments, when the amount of cell-free DNA identified as being from a particular type of cell or cells, e.g., dermal fibroblast cells, is decreased, e.g., less at a second time point than at an earlier first time point of measurement, it indicates that the subject is recovering from the disease or condition. In some versions, the methods include making a diagnosis and/or treating a disease or condition accordingly based on the indication of recovery. In some embodiments, when the amount of cell-free DNA identified as being from a particular type of cell or cells, e.g., dermal fibroblast cells is increased, e.g., more at a second time point than at an earlier first time point of measurement, it indicates that the disease or condition is worsening. In some versions, the methods include making a diagnosis and/or treating a disease or condition accordingly based on the indication of worsening. In some embodiments, between two or more testing, the subject undergoes a treatment, and thus the testing result indicates the treatment effect.

[0421] Also provided, in one embodiment, is a method for determining the cell type of a disease cell, e.g., a cancer cell, the primary origin of the disease, e.g., cancer, cell, or the signal or origin of the disease, e.g., cancer, cell. In some embodiments, a cancer cell has unknown primary origin. In some embodiments, the methods include detecting the methylation status of one or more DNA fragment of the cancer cell and can use the methylation status to determine the cell as a dermal fibroblast cell, as described above.

[0422] In some instances, a cell-free DNA fragment is released from a cancer cell. The present technology can include determining the cell type of the cancer cell. In some embodiments, a genetic variation may also be present in the DNA fragment, and thus the cell type detection can help associate the genetic variation with the cancer. In some embodiments, the genetic variation includes a mutation. In some embodiments, the genetic variation includes a deletion or insertion. In some embodiments, the genetic variation constitutes microsatellite instability. In some embodiments, the genetic variation constitutes loss of heterozygosity. In some embodiments, the genetic variation interrupts or changes gene splicing. In some embodiments, the genetic variation causes frameshift or generation of premature stop codon. Once the primary origin of the cancer is identified, the subject may be treated with appropriate regiments for that cancer type.

### E3. Osteoblasts

[0423] Also as provided in Table A, some genomic locations are uniformly under-methylated or over-methylated in osteoblast cells as compared to all other cell types in the human.

[0424] In accordance with one embodiment of the present disclosure, a method is provided for identifying that a biological sample includes DNA from an osteoblast cell. In some embodiments, the method entails detecting the methylation status of a plurality (e.g., 3, 4, 5, 6, 7, 8, 9, 10 or more) of CpG sites of a target DNA fragment in the biological sample, wherein at least one (or at least two, three, four, five, six, seven, eight, nine, ten or all) of the CpG sites is located within, or within 100 bp, 200 bp, 500 bp or 1 kb from, a human genomic sequence selected from SEQ ID NO: 47674783, 4784-4869, 4870-4872, 4873-4877, 4878-4882 or 4883-4891, or selected from SEQ ID NO: 4767-4783 or 4784-4869. In some embodiments, the method then identifies the target DNA fragment as being from an osteoblast cell when no more than 40% of the CpG sites are methylated. In some embodiments, the method identifies the target DNA fragment as being from an osteoblast cell when no more than 25%, 30%, 35%, 40%, 45%, or 50% of the CpG sites are methylated. Likewise, in some embodiments, the method identifies the target DNA fragment as being from an osteoblast cell when at least 50%, 55%, 60%, 65%, 70%, 75%, 80%, 85% or 90% of the CpG sites are unmethylated. In some embodiments, the method identifies the target DNA fragment as not being from an osteoblast cell when at least 50%, 55%, 60%, 65%, 70%, 75%, 80%, 85% or 90% of the CpG sites are methylated. In some embodiments, the method identifies the target DNA fragment as not being from an osteoblast cell when no more than 25%, 30%, 35%, 40%, 45%, or 50% of the CpG sites are unmethylated.

[0425] In some embodiments, the method entails detecting the methylation status of a plurality (e.g., 3, 4, 5, 6, 7, 8, 9, 10 or more) of CpG sites of a target DNA fragment in the biological sample, wherein at least one (or at least two, three, four, five, six, seven, eight, nine, ten or all) of the CpG sites is located within, or within 100 bp, 200 bp, 500 bp or 1 kb from, a human genomic sequence selected from SEQ ID NO: 4892-4897 or 4898-4916, or selected from SEQ ID NO: 4892-4897. In some embodiments, the method then identifies the target DNA fragment as being from an osteoblast cell when 50% or more of the CpG sites are methylated. In some embodiments, the method identifies the target DNA fragment as being from an osteoblast cell when at least 55%, 60%, 65%, 70%, 75%, 80%, 85% or 90% of the CpG sites are methylated. Likewise, in some embodiments, the method identifies the target DNA fragment as being from an osteoblast cell when no more than 25%, 30%, 35%, 40%, 45%, or 50% of the CpG sites are unmethylated. In some embodiments, the method identifies the target DNA fragment as not being from an osteoblast cell when no more than 25%, 30%, 35%, 40%, 45%, or 50% of the CpG sites are methylated. In some embodiments, the method identifies the target DNA fragment as not being from an osteoblast cell when at least 50%, 55%, 60%, 65%, 70%, 75%, 80%, 85% or 90% of the CpG sites are unmethylated.

[0426] In some embodiments, the methylation status of one or more other DNA fragments is further used in the cell type determination. In some embodiments, the one or more additional (different from the first one) DNA fragment is represented by a genomic sequence of SEQ ID NO: 4767-4783, 4784-4869, 4870-4872, 4873-4877, 4878-4882, 4883-4891, 4892-4897 or 4898-4916.

[0427] The cell type identification method can be used to detect disease or condition associated with the cell type. In one embodiment, when a cell-free DNA in a biological sample (e.g., blood, plasma, serum, semen, milk, urine, saliva or cerebral spinal fluid) is identified as being from an osteoblast cell of a subject, the method indicates that the subject has abnormal cell death and/or a disease relating to the cell. In some embodiments, the disease or condition is injury, inflammation, or cancer of the osteoblast cells.

[0428] In some embodiments, when the amount of cell-free DNA identified as being from a particular type of cell or cells, e.g., osteoblast cells, is decreased, e.g., less at a second time point than at an earlier first time point of measurement, it indicates that the subject is recovering from the disease or condition. In some versions, the methods include making a diagnosis and/or treating a disease or condition accordingly based on the indication of recovery. In some embodiments, when the amount of cell-free DNA identified as being from a particular type of cell or cells, e.g., osteoblast cells is increased, e.g., more at a second time point than at an earlier first time point of measurement, it indicates that the disease or condition is worsening. In some versions, the methods include making a diagnosis and/or treating a disease or condition accordingly based on the indication of worsening. In some embodiments, between two or more testing, the subject undergoes a treatment, and thus the testing result indicates the treatment effect.

[0429] Also provided, in one embodiment, is a method for determining the cell type of a disease cell, e.g., a cancer cell, the primary origin of the disease, e.g., cancer, cell, or the signal or origin of the disease, e.g., cancer, cell. In some embodiments, a cancer cell has unknown primary origin. In some embodiments, the methods include detecting the methylation status of one or more DNA fragment of the cancer cell and can use the methylation status to determine the cell as an osteoblast cell, as described above.

[0430] In some instances, a cell-free DNA fragment is released from a cancer cell. The present technology can include determining the cell type of the cancer cell. In some embodiments, a genetic variation may also be present in the DNA fragment, and thus the cell type detection can help associate the genetic variation with the cancer. In some embodiments, the genetic variation includes a mutation. In some embodiments, the genetic variation includes a deletion or insertion. In some embodiments, the genetic variation constitutes microsatellite instability. In some embodiments, the genetic variation constitutes loss of heterozygosity. In some embodiments, the genetic variation interrupts or changes gene splicing. In some embodiments, the genetic variation causes frameshift or generation of premature stop codon. Once the primary origin of the cancer is identified, the subject may be treated with appropriate regiments for that cancer type.

### E4. Skeletal Muscle Cells

[0431] Also as provided in Table A, some genomic locations are uniformly under-methylated or over-methylated in skeletal muscle cells as compared to all other cell types in the human.

[0432] In accordance with one embodiment of the present disclosure, a method is provided for identifying that a biological sample includes DNA from a skeletal muscle cell. In some embodiments, the method entails detecting the methylation status of a plurality (e.g., 3, 4, 5, 6, 7, 8, 9, 10 or more) of CpG sites of a target DNA fragment in the biological sample, wherein at least one (or at least two, three, four, five, six, seven, eight, nine, ten or all) of the CpG sites is located within, or within 100 bp, 200 bp, 500 bp or 1 kb from, a human genomic sequence selected from SEQ ID NO: 4917-4937, 4938-5016, 5017-5017, 5018-5023, 5024-5026 or 5027-5040, or selected from SEQ ID NO: 4917-4937 or 4938-5016. In some embodiments, the method then identifies the target DNA fragment as being from a skeletal muscle cell when no more than 40% of the CpG sites are methylated. In some embodiments, the method identifies the target DNA fragment as being from a skeletal muscle cell when no more than 25%, 30%, 35%, 40%, 45%, or 50% of the CpG sites are methylated. Likewise, in some embodiments, the method identifies the target DNA fragment as being from a skeletal muscle cell when at least 50%, 55%, 60%, 65%, 70%, 75%, 80%, 85% or 90% of the CpG sites are unmethylated. In some embodiments, the method identifies the target DNA fragment as not being from a skeletal muscle cell when at least 50%, 55%, 60%, 65%, 70%, 75%, 80%, 85% or 90% of the CpG sites are methylated. In some embodiments, the method identifies the target DNA fragment as not being from a skeletal muscle cell when no more than 25%, 30%, 35%, 40%, 45%, or 50% of the CpG sites are unmethylated.

[0433] In some embodiments, the method entails detecting the methylation status of a plurality (e.g., 3, 4, 5, 6, 7, 8, 9, 10 or more) of CpG sites of a target DNA fragment in the biological sample, wherein at least one (or at least two, three, four, five, six, seven, eight, nine, ten or all) of the CpG sites is located within, or within 100 bp, 200 bp, 500 bp or 1 kb from, a human genomic sequence selected from SEQ ID NO: 5041-5043, 5044-5045 or 5046-5064, or selected from SEQ ID NO: 5041-5043. In some embodiments, the method then identifies the target DNA fragment as being from a skeletal muscle cell when 50% or more of the CpG sites are methylated. In some embodiments, the method identifies the target DNA fragment as being from a skeletal muscle cell when at least 55%, 60%, 65%, 70%, 75%, 80%, 85% or 90% of the CpG sites are methylated. Likewise, in some embodiments, the method identifies the target DNA fragment as being from a skeletal muscle cell when no more than 25%, 30%, 35%, 40%, 45%, or 50% of the CpG sites are unmethylated. In some embodiments, the method identifies the target DNA fragment as not being from a skeletal muscle cell when no more than 25%, 30%, 35%, 40%, 45%, or 50% of the CpG sites are methylated. In some embodiments, the method identifies the target DNA fragment as not being from a skeletal muscle cell when at least 50%, 55%, 60%, 65%, 70%, 75%, 80%, 85% or 90% of the CpG sites are unmethylated.

[0434] In some embodiments, the methylation status of one or more other DNA fragments is further used in the cell type determination. In some embodiments, the one or more additional (different from the first one) DNA fragment is represented by a genomic sequence of SEQ ID NO: 4917-4937, 4938-5016, 5017-5017, 5018-5023, 5024-5026, 5027-5040, 5041-5043, 5044-5045 or 5046-5064.

[0435] The cell type identification method can be used to detect disease or condition associated with the cell type. In one embodiment, when a cell-free DNA in a biological sample (e.g., blood, plasma, serum, semen, milk, urine, saliva or cerebral spinal fluid) is identified as being from a skeletal muscle cell of a subject, the method indicates that the subject has abnormal cell death and/or a disease relating to the cell. In some embodiments, the disease or condition is injury, inflammation, or cancer of the skeletal muscle cells.

[0436] In some embodiments, when the amount of cell-free DNA identified as being from a particular type of cell or cells, e.g., skeletal muscle cells, is decreased, e.g., less at a second time point than at an earlier first time point of measurement, it indicates that the subject is recovering from the disease or condition. In some versions, the methods include making a diagnosis and/or treating a disease or condition accordingly based on the indication of recovery. In some embodiments, when the amount of cell-free DNA identified as being from a particular type of cell or cells, e.g., skeletal muscle cells is increased, e.g., more at a second time point than at an earlier first time point of measurement, it indicates that the disease or condition is worsening. In some versions, the methods include making a diagnosis and/or treating a disease or condition accordingly based on the indication of worsening. In some embodiments, between two or more testing, the subject undergoes a treatment, and thus the testing result indicates the treatment effect.

[0437] Also provided, in one embodiment, is a method for determining the cell type of a disease cell, e.g., a cancer cell, the primary origin of the disease, e.g., cancer, cell, or the signal or origin of the disease, e.g., cancer, cell. In some embodiments, a cancer cell has unknown primary origin. In some embodiments, the methods include detecting the methylation status of one or more DNA fragment of the cancer cell and can use the methylation status to determine the cell as a skeletal muscle cell, as described above.

[0438] In some instances, a cell-free DNA fragment is released from a cancer cell. The present technology can include determining the cell type of the cancer cell. In some embodiments, a genetic variation may also be present in the DNA fragment, and thus the cell type detection can help associate the genetic variation with the cancer. In some embodiments, the genetic variation includes a mutation. In some embodiments, the genetic variation includes a deletion or insertion. In some embodiments, the genetic variation constitutes microsatellite instability. In some embodiments, the genetic variation constitutes loss of heterozygosity. In some embodiments, the genetic variation interrupts or changes gene splicing. In some embodiments, the genetic variation causes frameshift or generation of premature stop codon. Once the primary origin of the cancer is identified, the subject may be treated with appropriate regiments for that cancer type.

### E5. Smooth Muscle Cells

[0439] Also as provided in Table A, some genomic locations are uniformly under-methylated or over-methylated in smooth muscle cells as compared to all other cell types in the human.

[0440] In accordance with one embodiment of the present disclosure, a method is provided for identifying that a biological sample includes DNA from a smooth muscle cell. In some embodiments, the method entails detecting the methylation status of a plurality (e.g., 3, 4, 5, 6, 7, 8, 9, 10 or more) of CpG sites of a target DNA fragment in the biological sample, wherein at least one (or at least two, three, four, five, six, seven, eight, nine, ten or all) of the CpG sites is located within, or within 100 bp, 200 bp, 500 bp or 1 kb from, a human genomic sequence selected from SEQ ID NO: 5065-5086, 5087-5178, 5179-5179, 5180-5181, 5182-5183 or 5184-5191, or selected from SEQ ID NO: 5065-5086 or 5087-5178. In some embodiments, the method then identifies the target DNA fragment as being from a smooth muscle cell when no more than 40% of the CpG sites are methylated. In some embodiments, the method identifies the target DNA fragment as being from a smooth muscle cell when no more than 25%, 30%, 35%, 40%, 45%, or 50% of the CpG sites are methylated. Likewise, in some embodiments, the method identifies the target DNA fragment as being from a smooth muscle cell when at least 50%, 55%, 60%, 65%, 70%, 75%, 80%, 85% or 90% of the CpG sites are unmethylated. In some embodiments, the method identifies the target DNA fragment as not being from a smooth muscle cell when at least 50%, 55%, 60%, 65%, 70%, 75%, 80%, 85% or 90% of the CpG sites are methylated. In some embodiments, the method identifies the target DNA fragment as not being from a smooth muscle cell when no more than 25%, 30%, 35%, 40%, 45%, or 50% of the CpG sites are unmethylated.

[0441] In some embodiments, the method entails detecting the methylation status of a plurality (e.g., 3, 4, 5, 6, 7, 8, 9, 10 or more) of CpG sites of a target DNA fragment in the biological sample, wherein at least one (or at least two, three, four, five, six, seven, eight, nine, ten or all) of the CpG sites is located within, or within 100 bp, 200 bp, 500 bp or 1 kb from, a human genomic sequence selected from SEQ ID NO: 5192-5204, 5205-5207 or 5208-5216, or selected from SEQ ID NO: 5192-5204. In some embodiments, the method then identifies the target DNA fragment as being from a smooth muscle cell when 50% c or more of the CpG sites are methylated. In some embodiments, the method identifies the target DNA fragment as being from a smooth muscle cell when at least 55%, 60%, 65%, 70%, 75%, 80%, 85% or 90% of the CpG sites are methylated. Likewise, in some embodiments, the method identifies the target DNA fragment as being from a smooth muscle cell when no more than 25%, 30%, 35%, 40%, 45%, or 50% of the CpG sites are unmethylated. In some embodiments, the method identifies the target DNA fragment as not being from a smooth muscle cell when no more than 25%, 30%, 35%, 40%, 45%, or 50% of the CpG sites are methylated. In some embodiments, the method identifies the target DNA fragment as not being from a smooth muscle cell when at least 50%, 55%, 60%, 65%, 70%, 75%, 80%, 85% or 90% of the CpG sites are unmethylated.

[0442] In some embodiments, the methylation status of one or more other DNA fragments is further used in the cell type determination. In some embodiments, the one or more additional (different from the first one) DNA fragment is represented by a genomic sequence of SEQ ID NO: 5065-5086, 5087-5178, 5179-5179, 5180-5181, 5182-5183, 5184-5191, 5192-5204, 5205-5207 or 5208-5216.

[0443] The cell type identification method can be used to detect disease or condition associated with the cell type. In one embodiment, when a cell-free DNA in a biological sample (e.g., blood, plasma, serum, semen, milk, urine, saliva or cerebral spinal fluid) is identified as being from a smooth muscle cell of a subject, the method indicates that the subject has abnormal cell death and/or a disease relating to the cell. In some embodiments, the disease or condition is injury, inflammation, or cancer of the smooth muscle cells.

[0444] In some embodiments, when the amount of cell-free DNA identified as being from a particular type of cell or cells, e.g., smooth muscle cells, is decreased, e.g., less at a second time point than at an earlier first time point of measurement, it indicates that the subject is recovering from the disease or condition. In some versions, the methods include making a diagnosis and/or treating a disease or condition accordingly based on the indication of recovery. In some embodiments, when the amount of cell-free DNA identified as being from a particular type of cell or cells, e.g., smooth muscle cells is increased, e.g., more at a second time point than at an earlier first time point of measurement, it indicates that the disease or condition is worsening. In some versions, the methods include making a diagnosis and/or treating a disease or condition accordingly based on the indication of worsening. In some embodiments, between two or more testing, the subject undergoes a treatment, and thus the testing result indicates the treatment effect.

[0445] Also provided, in one embodiment, is a method for determining the cell type of a disease cell, e.g., a cancer cell, the primary origin of the disease, e.g., cancer, cell, or the signal or origin of the disease, e.g., cancer, cell. In some embodiments, a cancer cell has unknown primary origin. In some embodiments, the methods include detecting the methylation status of one or more DNA fragment of the cancer cell and can use the methylation status to determine the cell as a smooth muscle cell, as described above.

[0446] In some instances, a cell-free DNA fragment is released from a cancer cell. The present technology can include determining the cell type of the cancer cell. In some embodiments, a genetic variation may also be present in the DNA fragment, and thus the cell type detection can help associate the genetic variation with the cancer. In some embodiments, the genetic variation includes a mutation. In some embodiments, the genetic variation includes a deletion or insertion. In some embodiments, the genetic variation constitutes microsatellite instability. In some embodiments, the genetic variation constitutes loss of heterozygosity. In some embodiments, the genetic variation interrupts or changes gene splicing. In some embodiments, the genetic variation causes frameshift or generation of premature stop codon. Once the primary origin of the cancer is identified, the subject may be treated with appropriate regiments for that cancer type.

### Group 10 Heart Cardiomyocytes & Skeletal Muscle Cell & Smooth Muscle Cells

[0447] Also as provided in Table A, some genomic locations are uniformly under-methylated or over-methylated in a group of cells, namely heart cardiomyocytes & skeletal muscle cell & smooth muscle cells, as compared to all other cell types in the human.

[0448] In accordance with one embodiment of the present disclosure, a method is provided for identifying that a biological sample includes DNA from a cell selected from heart cardiomyocytes & skeletal muscle cell & smooth muscle cells. In some embodiments, the method entails detecting the methylation status of a plurality (e.g., 3, 4, 5, 6, 7, 8, 9, 10 or more) of CpG sites of a target DNA fragment in the biological sample, wherein at least one (or at least two, three, four, five, six, seven, eight, nine, ten or all) of the CpG sites is located within, or within 100 bp, 200 bp, 500 bp or 1 kb from, a human genomic sequence selected from SEQ ID NO: 6899-6906, 6907 or 6908-6909, or selected from SEQ ID NO: 6899-6906 or 6907. In some embodiments, the method then identifies the target DNA fragment as being from a cell selected from heart cardiomyocytes & skeletal muscle cell & smooth muscle cells when no more than 40% of the CpG sites are methylated. In some embodiments, the method identifies the target DNA fragment as being from a cell selected from heart cardiomyocytes & skeletal muscle cell & smooth muscle cells when no more than 25%, 30%, 35%, 40%, 45%, or 50% of the CpG sites are methylated. Likewise, in some embodiments, the method identifies the target DNA fragment as being from a cell selected from heart cardiomyocytes & skeletal muscle cell & smooth muscle cells when at least 50%, 55%, 60%, 65%, 70%, 75%, 80%, 85% or 90% of the CpG sites are unmethylated. In some embodiments, the method identifies the target DNA fragment as not being from a cell selected from heart cardiomyocytes & skeletal muscle cell & smooth muscle cells when at least 50%, 55%, 60%, 65%, 70%, 75%, 80%, 85% or 90% of the CpG sites are methylated. In some embodiments, the method identifies the target DNA fragment as not being from a cell selected from heart cardiomyocytes & skeletal muscle cell & smooth muscle cells when no more than 25%, 30%, 35%, 40%, 45%, or 50% of the CpG sites are unmethylated.

[0449] In some embodiments, the method entails detecting the methylation status of a plurality (e.g., 3, 4, 5, 6, 7, 8, 9, 10 or more) of CpG sites of a target DNA fragment in the biological sample, wherein at least one (or at least two, three, four, five, six, seven, eight, nine, ten or all) of the CpG sites is located within, or within 100 bp, 200 bp, 500 bp or 1 kb from, a human genomic sequence selected from SEQ ID NO: 6910-6911. In some embodiments, the method then identifies the target DNA fragment as being from a cell selected from heart cardiomyocytes & skeletal muscle cell & smooth muscle cells when 50% or more of the CpG sites are methylated. In some embodiments, the method identifies the target DNA fragment as being from a cell selected from heart cardiomyocytes & skeletal muscle cell & smooth muscle cells when at least 55%, 60%, 65%, 70%, 75%, 80%, 85% or 90% of the CpG sites are methylated. Likewise, in some embodiments, the method identifies the target DNA fragment as being from a cell selected from heart cardiomyocytes & skeletal muscle cell & smooth muscle cells when no more than 25%, 30%, 35%, 40%, 45%, or 50% of the CpG sites are unmethylated. In some embodiments, the method identifies the target DNA fragment as not being from a cell selected from heart cardiomyocytes & skeletal muscle cell & smooth muscle cells when no more than 25%, 30%, 35%, 40%, 45%, or 50% of the CpG sites are methylated. In some embodiments, the method identifies the target DNA fragment as not being from a cell selected from heart cardiomyocytes & skeletal muscle cell & smooth muscle cells when at least 50%, 55%, 60%, 65%, 70%, 75%, 80%, 85% or 90% of the CpG sites are unmethylated.

[0450] In some embodiments, the methylation status of one or more other DNA fragments is further used in the cell type determination. In some embodiments, the one or more additional (different from the first one) DNA fragment is represented by a genomic sequence of SEQ ID NO: 6899-6906, 6907, 6908-6909, 6910-6911.

[0451] The cell type identification method can be used to detect disease or condition associated with the cell type. In one embodiment, when a cell-free DNA in a biological sample (e.g., blood, plasma, serum, semen, milk, urine, saliva or cerebral spinal fluid) is identified as being from a cell selected from heart cardiomyocytes & skeletal muscle cell & smooth muscle cells of a subject, the method indicates that the subject has abnormal cell death and/or a disease relating to the cell. In some embodiments, the disease or condition is injury, inflammation, or cancer of a cell selected from heart cardiomyocytes & skeletal muscle cell & smooth muscle cells.

[0452] In some embodiments, when the amount of cell-free DNA identified as being from a particular type of cell or cells, e.g., cells selected from heart cardiomyocytes & skeletal muscle cell & smooth muscle cells, is decreased, e.g., less at a second time point than at an earlier first time point of measurement, it indicates that the subject is recovering from the disease or condition. In some versions, the methods include making a diagnosis and/or treating a disease or condition accordingly based on the indication of recovery. In some embodiments, when the amount of cell-free DNA identified as being from a particular type of cell or cells, e.g., cells selected from heart cardiomyocytes & skeletal muscle cell & smooth muscle cells is increased, e.g., more at a second time point than at an earlier first time point of measurement, it indicates that the disease or condition is worsening. In some versions, the methods include making a diagnosis and/or treating a disease or condition accordingly based on the indication of worsening. In some embodiments, between two or more testing, the subject undergoes a treatment, and thus the testing result indicates the treatment effect.

[0453] Also provided, in one embodiment, is a method for determining the cell type of a disease cell, e.g., a cancer cell, the primary origin of the disease, e.g., cancer, cell, or the signal or origin of the disease, e.g., cancer, cell. In some embodiments, a cancer cell has unknown primary origin. In some embodiments, the methods include detecting the methylation status of one or more DNA fragment of the cancer cell and can use the methylation status to determine the cell as a cell selected from heart cardiomyocytes & skeletal muscle cell & smooth muscle cells, as described above.

[0454] In some instances, a cell-free DNA fragment is released from a cancer cell. The present technology can include determining the cell type of the cancer cell. In some embodiments, a genetic variation may also be present in the DNA fragment, and thus the cell type detection can help associate the genetic variation with the cancer. In some embodiments, the genetic variation includes a mutation. In some embodiments, the genetic variation includes a deletion or insertion. In some embodiments, the genetic variation constitutes microsatellite instability. In some embodiments, the genetic variation constitutes loss of heterozygosity. In some embodiments, the genetic variation interrupts or changes gene splicing. In some embodiments, the genetic variation causes frameshift or generation of premature stop codon. Once the primary origin of the cancer is identified, the subject may be treated with appropriate regiments for that cancer type.

### Group 11 Skeletal Muscle Cells & Smooth Muscle Cells

[0455] Also as provided in Table A, some genomic locations are uniformly under-methylated or over-methylated in a group of cells, namely skeletal muscle cells & smooth muscle cells, as compared to all other cell types in the human.

[0456] In accordance with one embodiment of the present disclosure, a method is provided for identifying that a biological sample includes DNA from a cell selected from skeletal muscle cells & smooth muscle cells. In some embodiments, the method entails detecting the methylation status of a plurality (e.g., 3, 4, 5, 6, 7, 8, 9, 10 or more) of CpG sites of a target DNA fragment in the biological sample, wherein at least one (or at least two, three, four, five, six, seven, eight, nine, ten or all) of the CpG sites is located within, or within 100 bp, 200 bp, 500 bp or 1 kb from, a human genomic sequence selected from SEQ ID NO: 6912-6929, 6930-6930 or 6931-6931, or selected from SEQ ID NO: 6912-6929 or 6930-6930. In some embodiments, the method then identifies the target DNA fragment as being from a cell selected from skeletal muscle cells & smooth muscle cells when no more than 40% of the CpG sites are methylated. In some embodiments, the method identifies the target DNA fragment as being from a cell selected from skeletal muscle cells & smooth muscle cells when no more than 25%, 30%, 35%, 40%, 45%, or 50% of the CpG sites are methylated. Likewise, in some embodiments, the method identifies the target DNA fragment as being from a cell selected from skeletal muscle cells & smooth muscle cells when at least 50%, 55%, 60%, 65%, 70%, 75%, 80%, 85% or 90% of the CpG sites are unmethylated. In some embodiments, the method identifies the target DNA fragment as not being from a cell selected from skeletal muscle cells & smooth muscle cells when at least 50%, 55%, 60%, 65%, 70%, 75%, 80%, 85% or 90% of the CpG sites are methylated. In some embodiments, the method identifies the target DNA fragment as not being from a cell selected from skeletal muscle cells & smooth muscle cells when no more than 25%, 30%, 35%, 40%, 45%, or 50% of the CpG sites are unmethylated.

[0457] In some embodiments, the method entails detecting the methylation status of a plurality (e.g., 3, 4, 5, 6, 7, 8, 9, 10 or more) of CpG sites of a target DNA fragment in the biological sample, wherein at least one (or at least two, three, four, five, six, seven, eight, nine, ten or all) of the CpG sites is located within, or within 100 bp, 200 bp, 500 bp or 1 kb from, a human genomic sequence selected from SEQ ID NO: 6932-6936 or 6937-6939, or selected from SEQ ID NO: 6932-6936. In some embodiments, the method then identifies the target DNA fragment as being from a cell selected from skeletal muscle cells & smooth muscle cells when 50% or more of the CpG sites are methylated. In some embodiments, the method identifies the target DNA fragment as being from a cell selected from skeletal muscle cells & smooth muscle cells when at least 55%, 60%, 65%, 70%, 75%, 80%, 85% or 90% of the CpG sites are methylated. Likewise, in some embodiments, the method identifies the target DNA fragment as being from a cell selected from skeletal muscle cells & smooth muscle cells when no more than 25%, 30%, 35%, 40%, 45%, or 50% of the CpG sites are unmethylated. In some embodiments, the method identifies the target DNA fragment as not being from a cell selected from skeletal muscle cells & smooth muscle cells when no more than 25%, 30%, 35%, 40%, 45%, or 50% of the CpG sites are methylated. In some embodiments, the method identifies the target DNA fragment as not being from a cell selected from skeletal muscle cells & smooth muscle cells when at least 50%, 55%, 60%, 65%, 70%, 75%, 80%, 85% or 90% of the CpG sites are unmethylated.

[0458] In some embodiments, the methylation status of one or more other DNA fragments is further used in the cell type determination. In some embodiments, the one or more additional (different from the first one) DNA fragment is represented by a genomic sequence of SEQ ID NO: 6912-6929, 6930-6930, 6931-6931, 6932-6936 or 6937-6939.

[0459] The cell type identification method can be used to detect disease or condition associated with the cell type. In one embodiment, when a cell-free DNA in a biological sample (e.g., blood, plasma, serum, semen, milk, urine, saliva or cerebral spinal fluid) is identified as being from a cell selected from skeletal muscle cells & smooth muscle cells of a subject, the method indicates that the subject has abnormal cell death and/or a disease relating to the cell. In some embodiments, the disease or condition is injury, inflammation, or cancer of a cell selected from skeletal muscle cells & smooth muscle cells.

[0460] In some embodiments, when the amount of cell-free DNA identified as being from a particular type of cell or cells, e.g., cells selected from skeletal muscle cells & smooth muscle cells, is decreased, e.g., less at a second time point than at an earlier first time point of measurement, it indicates that the subject is recovering from the disease or condition. In some versions, the methods include making a diagnosis and/or treating a disease or condition accordingly based on the indication of recovery. In some embodiments, when the amount of cell-free DNA identified as being from a particular type of cell or cells, e.g., cells selected from skeletal muscle cells & smooth muscle cells is increased, e.g., more at a second time point than at an earlier first time point of measurement, it indicates that the disease or condition is worsening. In some versions, the methods include making a diagnosis and/or treating a disease or condition accordingly based on the indication of worsening. In some embodiments, between two or more testing, the subject undergoes a treatment, and thus the testing result indicates the treatment effect.

[0461] Also provided, in one embodiment, is a method for determining the cell type of a disease cell, e.g., a cancer cell, the primary origin of the disease, e.g., cancer, cell, or the signal or origin of the disease, e.g., cancer, cell. In some embodiments, a cancer cell has unknown primary origin. In some embodiments, the methods include detecting the methylation status of one or more DNA fragment of the cancer cell and can use the methylation status to determine the cell as a cell selected from skeletal muscle cells & smooth muscle cells, as described above.

[0462] In some instances, a cell-free DNA fragment is released from a cancer cell. The present technology can include determining the cell type of the cancer cell. In some embodiments, a genetic variation may also be present in the DNA fragment, and thus the cell type detection can help associate the genetic variation with the cancer. In some embodiments, the genetic variation includes a mutation. In some embodiments, the genetic variation includes a deletion or insertion. In some embodiments, the genetic variation constitutes microsatellite instability. In some embodiments, the genetic variation constitutes loss of heterozygosity. In some embodiments, the genetic variation interrupts or changes gene splicing. In some embodiments, the genetic variation causes frameshift or generation of premature stop codon. Once the primary origin of the cancer is identified, the subject may be treated with appropriate regiments for that cancer type.

### F. Neural Cells and Others

### F1. Thyroid Epithelium

[0463] Also as provided in Table A, some genomic locations are uniformly under-methylated or over-methylated in thyroid epithelial cells as compared to all other cell types in the human.

[0464] In accordance with one embodiment of the present disclosure, a method is provided for identifying that a biological sample includes DNA from a thyroid epithelial cell. In some embodiments, the method entails detecting the methylation status of a plurality (e.g., 3, 4, 5, 6, 7, 8, 9, 10 or more) of CpG sites of a target DNA fragment in the biological sample, wherein at least one (or at least two, three, four, five, six, seven, eight, nine, ten or all) of the CpG sites is located within, or within 100 bp, 200 bp, 500 bp or 1 kb from, a human genomic sequence selected from SEQ ID NO: 5217-5230, 5231-5284, 5285, 5286-5296 or 5297-5343, or selected from SEQ ID NO: 5217-5230 or 5231-5284. In some embodiments, the method then identifies the target DNA fragment as being from a thyroid epithelial cell when no more than 40% of the CpG sites are methylated. In some embodiments, the method identifies the target DNA fragment as being from a thyroid epithelial cell when no more than 25%, 30%, 35%, 40%, 45%, or 50% of the CpG sites are methylated. Likewise, in some embodiments, the method identifies the target DNA fragment as being from a thyroid epithelial cell when at least 50%, 55%, 60%, 65%, 70%, 75%, 80%, 85% or 90% of the CpG sites are unmethylated. In some embodiments, the method identifies the target DNA fragment as not being from a thyroid epithelial cell when at least 50%, 55%, 60%, 65%, 70%, 75%, 80%, 85% or 90% of the CpG sites are methylated. In some embodiments, the method identifies the target DNA fragment as not being from a thyroid epithelial cell when no more than 25%, 30%, 35%, 40%, 45%, or 50% of the CpG sites are unmethylated.

[0465] In some embodiments, the method entails detecting the methylation status of a plurality (e.g., 3, 4, 5, 6, 7, 8, 9, 10 or more) of CpG sites of a target DNA fragment in the biological sample, wherein at least one (or at least two, three, four, five, six, seven, eight, nine, ten or all) of the CpG sites is located within, or within 100 bp, 200 bp, 500 bp or 1 kb from, a human genomic sequence selected from SEQ ID NO: 5344-5358, 5359 or 5360-5368, or selected from SEQ ID NO: 5344-5358. In some embodiments, the method then identifies the target DNA fragment as being from a thyroid epithelial cell when 50% or more of the CpG sites are methylated. In some embodiments, the method identifies the target DNA fragment as being from a thyroid epithelial cell when at least 55%, 60%, 65%, 70%, 75%, 80%, 16, 85% or 90% of the CpG sites are methylated. Likewise, in some embodiments, the method identifies the target DNA fragment as being from a thyroid epithelial cell when no more than 25%, 30%, 35%, 40%, 45%, or 50% of the CpG sites are unmethylated. In some embodiments, the method identifies the target DNA fragment as not being from a thyroid epithelial cell when no more than 25%, 30%, 35%, 40%, 45%, or 50% of the CpG sites are methylated. In some embodiments, the method identifies the target DNA fragment as not being from a thyroid epithelial cell when at least 50%, 55%, 60%, 65%, 70%, 75%, 80%, 85% or 90% of the CpG sites are unmethylated.

[0466] In some embodiments, the methylation status of one or more other DNA fragments is further used in the cell type determination. In some embodiments, the one or more additional (different from the first one) DNA fragment is represented by a genomic sequence of SEQ ID NO: 5217-5230, 5231-5284, 5285, 5286-5296, 5297-5343, 5344-5358, 5359 or 5360-5368.

[0467] The cell type identification method can be used to detect disease or condition associated with the cell type. In one embodiment, when a cell-free DNA in a biological sample (e.g., blood, plasma, serum, semen, milk, urine, saliva or cerebral spinal fluid) is identified as being from a thyroid epithelial cell of a subject, the method indicates that the subject has abnormal cell death and/or a disease relating to the cell. In some embodiments, the disease or condition is injury, inflammation, or cancer of the thyroid epithelium.

[0468] In some embodiments, when the amount of cell-free DNA identified as being from a particular type of cell or cells, e.g., thyroid epithelial cells, is decreased, e.g., less at a second time point than at an earlier first time point of measurement, it indicates that the subject is recovering from the disease or condition. In some versions, the methods include making a diagnosis and/or treating a disease or condition accordingly based on the indication of recovery. In some embodiments, when the amount of cell-free DNA identified as being from a particular type of cell or cells, e.g., thyroid epithelial cells is increased, e.g., more at a second time point than at an earlier first time point of measurement, it indicates that the disease or condition is worsening. In some versions, the methods include making a diagnosis and/or treating a disease or condition accordingly based on the indication of worsening. In some embodiments, between two or more testing, the subject undergoes a treatment, and thus the testing result indicates the treatment effect.

[0469] Also provided, in one embodiment, is a method for determining the cell type of a disease cell, e.g., a cancer cell, the primary origin of the disease, e.g., cancer, cell, or the signal or origin of the disease, e.g., cancer, cell. In some embodiments, a cancer cell has unknown primary origin. In some embodiments, the methods include detecting the methylation status of one or more DNA fragment of the cancer cell and can use the methylation status to determine the cell as a thyroid epithelial cell, as described above.

[0470] In some instances, a cell-free DNA fragment is released from a cancer cell. The present technology can include determining the cell type of the cancer cell. In some embodiments, a genetic variation may also be present in the DNA fragment, and thus the cell type detection can help associate the genetic variation with the cancer. In some embodiments, the genetic variation includes a mutation. In some embodiments, the genetic variation includes a deletion or insertion. In some embodiments, the genetic variation constitutes microsatellite instability. In some embodiments, the genetic variation constitutes loss of heterozygosity. In some embodiments, the genetic variation interrupts or changes gene splicing. In some embodiments, the genetic variation causes frameshift or generation of premature stop codon. Once the primary origin of the cancer is identified, the subject may be treated with appropriate regiments for that cancer type.

### F2. Adipocytes

[0471] Also as provided in Table A, some genomic locations are uniformly under-methylated or over-methylated in adipocytes as compared to all other cell types in the human.

[0472] In accordance with one embodiment of the present disclosure, a method is provided for identifying that a biological sample includes DNA from an adipocyte. In some embodiments, the method entails detecting the methylation status of a plurality (e.g., 3, 4, 5, 6, 7, 8, 9, 10 or more) of CpG sites of a target DNA fragment in the biological sample, wherein at least one (or at least two, three, four, five, six, seven, eight, nine, ten or all) of the CpG sites is located within, or within 100 bp, 200 bp, 500 bp or 1 kb from, a human genomic sequence selected from SEQ ID NO: 5369-5389,5390-5445, 5446, 5447-5449 or 5450-5453, or selected from SEQ ID NO: 5369-5389 or 5390-5445. In some embodiments, the method then identifies the target DNA fragment as being from an adipocyte when no more than 40% of the CpG sites are methylated. In some embodiments, the method identifies the target DNA fragment as being from an adipocyte when no more than 25%, 30%, 35%, 40%, 45%, or 50% of the CpG sites are methylated. Likewise, in some embodiments, the method identifies the target DNA fragment as being from an adipocyte when at least 50%, 55%, 60%, 65%, 70%, 75%, 80%, 85% or 90% of the CpG sites are unmethylated. In some embodiments, the method identifies the target DNA fragment as not being from an adipocyte when at least 50%, 55%, 60%, 65%, 70%, 75%, 80%, 85% or 90% of the CpG sites are methylated. In some embodiments, the method identifies the target DNA fragment as not being from an adipocyte when no more than 25%, 30%, 35%, 40/o, 45%, or 50% of the CpG sites are unmethylated.

[0473] In some embodiments, the method entails detecting the methylation status of a plurality (e.g., 3, 4, 5, 6, 7, 8, 9, 10 or more) of CpG sites of a target DNA fragment in the biological sample, wherein at least one (or at least two, three, four, five, six, seven, eight, nine, ten or all) of the CpG sites is located within, or within 100 bp, 200 bp, 500 bp or 1 kb from, a human genomic sequence selected from SEQ ID NO: 5454-5463, 5464 or 5465-5470, or selected from SEQ ID NO: 5454-5463. In some embodiments, the method then identifies the target DNA fragment as being from an adipocyte when 50% or more of the CpG sites are methylated. In some embodiments, the method identifies the target DNA fragment as being from an adipocyte when at least 55%, 60%, 65%, 70%, 75%, 80%, 85% or 90% of the CpG sites are methylated. Likewise, in some embodiments, the method identifies the target DNA fragment as being from an adipocyte when no more than 25%, 30%, 35%, 40%, 45%, or 50% of the CpG sites are unmethylated. In some embodiments, the method identifies the target DNA fragment as not being from an adipocyte when no more than 25%, 30%, 35%, 40%, 45%, or 50% of the CpG sites are methylated. In some embodiments, the method identifies the target DNA fragment as not being from an adipocyte when at least 50%, 55%, 60%, 65%, 70%, 75%, 80%, 85% or 90% of the CpG sites are unmethylated.

[0474] In some embodiments, the methylation status of one or more other DNA fragments is further used in the cell type determination. In some embodiments, the one or more additional (different from the first one) DNA fragment is represented by a genomic sequence of SEQ ID NO: 5369-5389, 5390-5445, 5446-5446, 5447-5449, 5450-5453, 5454-5463, 5464 or 5465-5470.

[0475] The cell type identification method can be used to detect disease or condition associated with the cell type. In one embodiment, when a cell-free DNA in a biological sample (e.g., blood, plasma, serum, semen, milk, urine, saliva or cerebral spinal fluid) is identified as being from an adipocyte of a subject, the method indicates that the subject has abnormal cell death and/or a disease relating to the cell. In some embodiments, the disease or condition is injury, inflammation, or cancer of the adipocytes.

[0476] In some embodiments, when the amount of cell-free DNA identified as being from a particular type of cell or cells, e.g., adipocytes, is decreased, e.g., less at a second time point than at an earlier first time point of measurement, it indicates that the subject is recovering from the disease or condition. In some versions, the methods include making a diagnosis and/or treating a disease or condition accordingly based on the indication of recovery. In some embodiments, when the amount of cell-free DNA identified as being from a particular type of cell or cells, e.g., adipocytes is increased, e.g., more at a second time point than at an earlier first time point of measurement, it indicates that the disease or condition is worsening. In some versions, the methods include making a diagnosis and/or treating a disease or condition accordingly based on the indication of worsening. In some embodiments, between two or more testing, the subject undergoes a treatment, and thus the testing result indicates the treatment effect.

[0477] Also provided, in one embodiment, is a method for determining the cell type of a disease cell, e.g., a cancer cell, the primary origin of the disease, e.g., cancer, cell, or the signal or origin of the disease, e.g., cancer, cell. In some embodiments, a cancer cell has unknown primary origin. In some embodiments, the methods include detecting the methylation status of one or more DNA fragment of the cancer cell and can use the methylation status to determine the cell as an adipocyte, as described above.

[0478] In some instances, a cell-free DNA fragment is released from a cancer cell. The present technology can include determining the cell type of the cancer cell. In some embodiments, a genetic variation may also be present in the DNA fragment, and thus the cell type detection can help associate the genetic variation with the cancer. In some embodiments, the genetic variation includes a mutation. In some embodiments, the genetic variation includes a deletion or insertion. In some embodiments, the genetic variation constitutes microsatellite instability. In some embodiments, the genetic variation constitutes loss of heterozygosity. In some embodiments, the genetic variation interrupts or changes gene splicing. In some embodiments, the genetic variation causes frameshift or generation of premature stop codon. Once the primary origin of the cancer is identified, the subject may be treated with appropriate regiments for that cancer type.

### F3. Neuron CNS

[0479] Also as provided in Table A, some genomic locations are uniformly under-methylated or over-methylated in neurons as compared to all other cell types in the human.

[0480] In accordance with one embodiment of the present disclosure, a method is provided for identifying that a biological sample includes DNA from a neuron. In some embodiments, the method entails detecting the methylation status of a plurality (e.g., 3, 4, 5, 6, 7, 8, 9, 10 or more) of CpG sites of a target DNA fragment in the biological sample, wherein at least one (or at least two, three, four, five, six, seven, eight, nine, ten or all) of the CpG sites is located within, or within 100 bp, 200 bp, 500 bp or 1 kb from, a human genomic sequence selected from SEQ ID NO: 5471-5488, 5489-5556, 5557-5559, 5560-5566 or 5567-5594, or selected from SEQ ID NO: 5471-5488 or 5489-5556. In some embodiments, the method then identifies the target DNA fragment as being from a neuron when no more than 40% of the CpG sites are methylated. In some embodiments, the method identifies the target DNA fragment as being from a neuron when no more than 25%, 30%, 35%, 40%, 45%, or 50% of the CpG sites are methylated. Likewise, in some embodiments, the method identifies the target DNA fragment as being from a neuron when at least 50%, 55%, 600%, 65%, 70%, 75%, 80%, 85% or 90% of the CpG sites are unmethylated. In some embodiments, the method identifies the target DNA fragment as not being from a neuron when at least 50%, 55%, 60%, 65%, 70%, 75%, 80%, 85% or 90% of the CpG sites are methylated. In some embodiments, the method identifies the target DNA fragment as not being from a neuron when no more than 25%, 30%, 35%, 40%, 45%, or 50% of the CpG sites are unmethylated.

[0481] In some embodiments, the method entails detecting the methylation status of a plurality (e.g., 3, 4, 5, 6, 7, 8, 9, 10 or more) of CpG sites of a target DNA fragment in the biological sample, wherein at least one (or at least two, three, four, five, six, seven, eight, nine, ten or all) of the CpG sites is located within, or within 100 bp, 200 bp, 500 bp or 1 kb from, a human genomic sequence selected from SEQ ID NO: 5595-5613 or 5614-5619, or selected from SEQ ID NO: 5595-5613. In some embodiments, the method then identifies the target DNA fragment as being from a neuron when 50% or more of the CpG sites are methylated. In some embodiments, the method identifies the target DNA fragment as being from a neuron when at least 55%, 60%, 65%, 70%, 75%, 80%, 85% or 90% of the CpG sites are methylated. Likewise, in some embodiments, the method identifies the target DNA fragment as being from a neuron when no more than 25%, 30%, 35%, 40%, 45%, or 50% of the CpG sites are unmethylated. In some embodiments, the method identifies the target DNA fragment as not being from a neuron when no more than 25%, 30%, 35%, 40%, 45%, or 50% of the CpG sites are methylated. In some embodiments, the method identifies the target DNA fragment as not being from a neuron when at least 50%, 55%, 60%, 65%, 70%, 75%, 80%, 85% or 90% of the CpG sites are unmethylated.

[0482] In some embodiments, the methylation status of one or more other DNA fragments is further used in the cell type determination. In some embodiments, the one or more additional (different from the first one) DNA fragment is represented by a genomic sequence of SEQ ID NO: 5471-5488, 5489-5556, 5557-5559, 5560-5566, 5567-5594, 5595-5613 or 5614-5619.

[0483] The cell type identification method can be used to detect disease or condition associated with the cell type. In one embodiment, when a cell-free DNA in a biological sample (e.g., blood, plasma, serum, semen, milk, urine, saliva or cerebral spinal fluid) is identified as being from a neuron of a subject, the method indicates that the subject has abnormal cell death and/or a disease relating to the cell. In some embodiments, the disease or condition is injury, inflammation, or cancer of the neurons. In some embodiments, the disease or condition is a neurodegenerative disorder, such as amyotrophic lateral sclerosis, multiple sclerosis, Parkinson's disease, Alzheimer's disease, Huntington's disease, and prion diseases.

[0484] In some embodiments, when the amount of cell-free DNA identified as being from a particular type of cell or cells, e.g., neurons, is decreased, e.g., less at a second time point than at an earlier first time point of measurement, it indicates that the subject is recovering from the disease or condition. In some versions, the methods include making a diagnosis and/or treating a disease or condition accordingly based on the indication of recovery. In some embodiments, when the amount of cell-free DNA identified as being from a particular type of cell or cells, e.g., neurons is increased, e.g., more at a second time point than at an earlier first time point of measurement, it indicates that the disease or condition is worsening. In some versions, the methods include making a diagnosis and/or treating a disease or condition accordingly based on the indication of worsening. In some embodiments, between two or more testing, the subject undergoes a treatment, and thus the testing result indicates the treatment effect.

[0485] Also provided, in one embodiment, is a method for determining the cell type of a disease cell, e.g., a cancer cell, the primary origin of the disease, e.g., cancer, cell, or the signal or origin of the disease, e.g., cancer, cell. In some embodiments, a cancer cell has unknown primary origin. In some embodiments, the methods include detecting the methylation status of one or more DNA fragment of the cancer cell and can use the methylation status to determine the cell as a neuron, as described above.

[0486] In some instances, a cell-free DNA fragment is released from a cancer cell. The present technology can include determining the cell type of the cancer cell. In some embodiments, a genetic variation may also be present in the DNA fragment, and thus the cell type detection can help associate the genetic variation with the cancer. In some embodiments, the genetic variation includes a mutation. In some embodiments, the genetic variation includes a deletion or insertion. In some embodiments, the genetic variation constitutes microsatellite instability. In some embodiments, the genetic variation constitutes loss of heterozygosity. In some embodiments, the genetic variation interrupts or changes gene splicing. In some embodiments, the genetic variation causes frameshift or generation of premature stop codon. Once the primary origin of the cancer is identified, the subject may be treated with appropriate regiments for that cancer type.

### F4. Oligodendrocytes

[0487] Also as provided in Table A, some genomic locations are uniformly under-methylated or over-methylated in oligodendrocytes as compared to all other cell types in the human.

[0488] In accordance with one embodiment of the present disclosure, a method is provided for identifying that a biological sample includes DNA from an oligodendrocyte. In some embodiments, the method entails detecting the methylation status of a plurality (e.g., 3, 4, 5, 6, 7, 8, 9, 10 or more) of CpG sites of a target DNA fragment in the biological sample, wherein at least one (or at least two, three, four, five, six, seven, eight, nine, ten or all) of the CpG sites is located within, or within 100 bp, 200 bp, 500 bp or 1 kb from, a human genomic sequence selected from SEQ ID NO: 5620-5649,5650-5721, 5722-5724, 5725-5744 or 5745-5771, or selected from SEQ ID NO: 5620-5649 or 5650-5721. In some embodiments, the method then identifies the target DNA fragment as being from an oligodendrocyte when no more than 40% of the CpG sites are methylated. In some embodiments, the method identifies the target DNA fragment as being from an oligodendrocyte when no more than 25%, 30%, 35%, 40%, 45%, or 50% of the CpG sites are methylated. Likewise, in some embodiments, the method identifies the target DNA fragment as being from an oligodendrocyte when at least 50%, 55%, 60%, 65%, 70%, 75%, 80%, 85% or 90% of the CpG sites are unmethylated. In some embodiments, the method identifies the target DNA fragment as not being from an oligodendrocyte when at least 50%, 55%, 60%, 65%, 70%, 75%, 80%, 85% or 90% of the CpG sites are methylated. In some embodiments, the method identifies the target DNA fragment as not being from an oligodendrocyte when no more than 25%, 30%, 35%, 40%, 45%, or 50% of the CpG sites are unmethylated.

[0489] In some embodiments, the method entails detecting the methylation status of a plurality (e.g., 3, 4, 5, 6, 7, 8, 9, 10 or more) of CpG sites of a target DNA fragment in the biological sample, wherein at least one (or at least two, three, four, five, six, seven, eight, nine, ten or all) of the CpG sites is located within, or within 100 bp, 200 bp, 500 bp or 1 kb from, a human genomic sequence selected from SEQ ID NO: 5772-5782, 5783-5783 or 5784-5796, or selected from SEQ ID NO: 5772-5782. In some embodiments, the method then identifies the target DNA fragment as being from an oligodendrocyte when 50% or more of the CpG sites are methylated. In some embodiments, the method identifies the target DNA fragment as being from an oligodendrocyte when at least 55%, 60%, 65%, 70%, 75%, 80%, 85% or 90% of the CpG sites are methylated. Likewise, in some embodiments, the method identifies the target DNA fragment as being from an oligodendrocyte when no more than 25%, 30%, 35%, 40%, 45%, or 50% of the CpG sites are unmethylated. In some embodiments, the method identifies the target DNA fragment as not being from an oligodendrocyte when no more than 25%, 30%, 35%, 40%, 16, 45%, or 50% of the CpG sites are methylated. In some embodiments, the method identifies the target DNA fragment as not being from an oligodendrocyte when at least 50%, 55%, 60%, 65%, 70%, 75%, 80%, 85% or 90% of the CpG sites are unmethylated.

[0490] In some embodiments, the methylation status of one or more other DNA fragments is further used in the cell type determination. In some embodiments, the one or more additional (different from the first one) DNA fragment is represented by a genomic sequence of SEQ ID NO: 5620-5649, 5650-5721, 5722-5724, 5725-5744, 5745-5771, 5772-5782, 5783-5783 or 5784-5796.

[0491] The cell type identification method can be used to detect disease or condition associated with the cell type. In one embodiment, when a cell-free DNA in a biological sample (e.g., blood, plasma, serum, semen, milk, urine, saliva or cerebral spinal fluid) is identified as being from an oligodendrocyte of a subject, the method indicates that the subject has abnormal cell death and/or a disease relating to the cell. In some embodiments, the disease or condition is injury, inflammation, or cancer of the oligodendrocytes. In some embodiments, the disease is multiple sclerosis (MS).

[0492] In some embodiments, when the amount of cell-free DNA identified as being from a particular type of cell or cells, e.g., oligodendrocytes, is decreased, e.g., less at a second time point than at an earlier first time point of measurement, it indicates that the subject is recovering from the disease or condition. In some versions, the methods include making a diagnosis and/or treating a disease or condition accordingly based on the indication of recovery. In some embodiments, when the amount of cell-free DNA identified as being from a particular type of cell or cells, e.g., oligodendrocytes is increased, e.g., more at a second time point than at an earlier first time point of measurement, it indicates that the disease or condition is worsening. In some versions, the methods include making a diagnosis and/or treating a disease or condition accordingly based on the indication of worsening. In some embodiments, between two or more testing, the subject undergoes a treatment, and thus the testing result indicates the treatment effect.

[0493] Also provided, in one embodiment, is a method for determining the cell type of a disease cell, e.g., a cancer cell, the primary origin of the disease, e.g., cancer, cell, or the signal or origin of the disease, e.g., cancer, cell. In some embodiments, a cancer cell has unknown primary origin. In some embodiments, the methods include detecting the methylation status of one or more DNA fragment of the cancer cell and can use the methylation status to determine the cell as an oligodendrocyte, as described above.

[0494] In some instances, a cell-free DNA fragment is released from a cancer cell. The present technology can include determining the cell type of the cancer cell. In some embodiments, a genetic variation may also be present in the DNA fragment, and thus the cell type detection can help associate the genetic variation with the cancer. In some embodiments, the genetic variation includes a mutation. In some embodiments, the genetic variation includes a deletion or insertion. In some embodiments, the genetic variation constitutes microsatellite instability. In some embodiments, the genetic variation constitutes loss of heterozygosity. In some embodiments, the genetic variation interrupts or changes gene splicing. In some embodiments, the genetic variation causes frameshift or generation of premature stop codon. Once the primary origin of the cancer is identified, the subject may be treated with appropriate regiments for that cancer type.

Group 12—Neuron CNS and oligodendrocytes

[0495] Also as provided in Table A, some genomic locations are uniformly under-methylated or over-methylated in a group of cells, namely neuron CNS and oligodendrocytes, as compared to all other cell types in the human.

[0496] In accordance with one embodiment of the present disclosure, a method is provided for identifying that a biological sample includes DNA from a cell selected from neuron CNS and oligodendrocytes. In some embodiments, the method entails detecting the methylation status of a plurality (e.g., 3, 4, 5, 6, 7, 8, 9, 10 or more) of CpG sites of a target DNA fragment in the biological sample, wherein at least one (or at least two, three, four, five, six, seven, eight, nine, ten or all) of the CpG sites is located within, or within 100 bp, 200 bp, 500 bp or 1 kb from, a human genomic sequence selected from SEQ ID NO: 5797-5870 or 5871-5898, or selected from SEQ ID NO: 5797-5870. In some embodiments, the method then identifies the target DNA fragment as being from a cell selected from neuron CNS and oligodendrocytes when no more than 40% of the CpG sites are methylated. In some embodiments, the method identifies the target DNA fragment as being from a cell selected from neuron CNS and oligodendrocytes when no more than 25%, 30%, 35%, 40%, 45%, or 50% of the CpG sites are methylated. Likewise, in some embodiments, the method identifies the target DNA fragment as being from a cell selected from neuron CNS and oligodendrocytes when at least 50%, 55%, 60%, 65%, 70%, 75%, 80%, 85% or 90% of the CpG sites are unmethylated. In some embodiments, the method identifies the target DNA fragment as not being from a cell selected from neuron CNS and oligodendrocytes when at least 50%, 55%, 60%, 65%, 70%, 75%, 80%, 85% or 90% of the CpG sites are methylated. In some embodiments, the method identifies the target DNA fragment as not being from a cell selected from neuron CNS and oligodendrocytes when no more than 25%, 30%, 35%, 40%, 45%, or 50% of the CpG sites are unmethylated.

[0497] In some embodiments, the method entails detecting the methylation status of a plurality (e.g., 3, 4, 5, 6, 7, 8, 9, 10 or more) of CpG sites of a target DNA fragment in the biological sample, wherein at least one (or at least two, three, four, five, six, seven, eight, nine, ten or all) of the CpG sites is located within, or within 100 bp, 200 bp, 500 bp or 1 kb from, a human genomic sequence selected from SEQ ID NO: 5899-5911, 5912-5912 or 5913-5923, or selected from SEQ ID NO: 5899-5911. In some embodiments, the method then identifies the target DNA fragment as being from a cell selected from neuron CNS and oligodendrocytes when 50% or more of the CpG sites are methylated. In some embodiments, the method identifies the target DNA fragment as being from a cell selected from neuron CNS and oligodendrocytes when at least 55%, 60%, 65%, 70%, 75%, 80%, 85% or 90% of the CpG sites are methylated. Likewise, in some embodiments, the method identifies the target DNA fragment as being from a cell selected from neuron CNS and oligodendrocytes when no more than 25%, 30%, 35%, 40%, 45%, or 50% of the CpG sites are unmethylated. In some embodiments, the method identifies the target DNA fragment as not being from a cell selected from neuron CNS and oligodendrocytes when no more than 25%, 30%, 35%, 40%, 45%, or 50% of the CpG sites are methylated. In some embodiments, the method identifies the target DNA fragment as not being from a cell selected from neuron CNS and oligodendrocytes when at least 50%, 55%, 60%, 65%, 70%, 75%, 80%, 85% or 90% of the CpG sites are unmethylated.

[0498] In some embodiments, the methylation status of one or more other DNA fragments is further used in the cell type determination. In some embodiments, the one or more additional (different from the first one) DNA fragment is represented by a genomic sequence of SEQ ID NO: 5797-5870, 5871-5898, 5899-5911, 5912-5912 or 5913-5923.

[0499] The cell type identification method can be used to detect disease or condition associated with the cell type. In one embodiment, when a cell-free DNA in a biological sample (e.g., blood, plasma, serum, semen, milk, urine, saliva or cerebral spinal fluid) is identified as being from a cell selected from neuron CNS and oligodendrocytes of a subject, the method indicates that the subject has abnormal cell death and/or a disease relating to the cell. In some embodiments, the disease or condition is injury, inflammation, or cancer of a cell selected from neuron CNS and oligodendrocytes.

[0500] In some embodiments, when the amount of cell-free DNA identified as being from a particular type of cell or cells, e.g., cells selected from neuron CNS and oligodendrocytes, is decreased, e.g., less at a second time point than at an earlier first time point of measurement, it indicates that the subject is recovering from the disease or condition. In some versions, the methods include making a diagnosis and/or treating a disease or condition accordingly based on the indication of recovery. In some embodiments, when the amount of cell-free DNA identified as being from a particular type of cell or cells, e.g., cells selected from neuron CNS and oligodendrocytes is increased, e.g., more at a second time point than at an earlier first time point of measurement, it indicates that the disease or condition is worsening. In some versions, the methods include making a diagnosis and/or treating a disease or condition accordingly based on the indication of worsening. In some embodiments, between two or more testing, the subject undergoes a treatment, and thus the testing result indicates the treatment effect.

[0501] Also provided, in one embodiment, is a method for determining the cell type of a disease cell, e.g., a cancer cell, the primary origin of the disease, e.g., cancer, cell, or the signal or origin of the disease, e.g., cancer, cell. In some embodiments, a cancer cell has unknown primary origin. In some embodiments, the methods include detecting the methylation status of one or more DNA fragment of the cancer cell and can use the methylation status to determine the cell as a cell selected from neuron CNS and oligodendrocytes, as described above.

[0502] In some instances, a cell-free DNA fragment is released from a cancer cell. The present technology can include determining the cell type of the cancer cell. In some embodiments, a genetic variation may also be present in the DNA fragment, and thus the cell type detection can help associate the genetic variation with the cancer. In some embodiments, the genetic variation includes a mutation. In some embodiments, the genetic variation includes a deletion or insertion. In some embodiments, the genetic variation constitutes microsatellite instability. In some embodiments, the genetic variation constitutes loss of heterozygosity. In some embodiments, the genetic variation interrupts or changes gene splicing. In some embodiments, the genetic variation causes frameshift or generation of premature stop codon. Once the primary origin of the cancer is identified, the subject may be treated with appropriate regiments for that cancer type.

[0503] Kits and Packages, Software Programs

[0504] The methods described herein may be performed, for example, by utilizing pre-packaged diagnostic kits, such as those described below, comprising agents which may be conveniently used to prepare DNA samples and detect DNA methylation.

[0505] DNA methylation detection can be performed with DNA isolated from cells or in situ directly upon tissue sections (fixed and/or frozen) of primary tissue such as biopsies obtained from biopsies or resections, such that no nucleic acid purification is necessary. The DNA molecules may also be cell-free DNA obtained from body fluid samples. Upon obtaining the DNA samples, in some embodiments, the DNA molecules may be fragmented or modified. In one embodiment, DNA modification agents are also provided, such as sodium bisulfite or APOBEC-Seq.

[0506] In one embodiment, a kit further includes instructions for use. In one aspect, a kit includes a manual comprising reference DNA methylation percentage cutoff levels.

[0507] Also provided are computer programs for storing and/or analyzing the DNA methylation data. FIG. 15 is a block diagram that illustrates a computer system 1500 upon which any embodiments of the present and related technologies, such as DNA methylation data manipulation and analysis, may be implemented. The computer system 1500 includes a bus 1502 or other communication mechanism for communicating information, one or more hardware processors 1504 coupled with bus 1502 for processing information. Hardware processor(s) 1504 may be, for example, one or more general purpose microprocessors.

[0508] The computer system 1500 also includes a main memory 1506, such as a random access memory (RAM), cache and/or other dynamic storage devices, coupled to bus 1502 for storing information and instructions to be executed by processor 1504. Main memory 1506 also may be used for storing temporary variables or other intermediate information during execution of instructions to be executed by processor 1504. Such instructions, when stored in storage media accessible to processor 1504, render computer system 1500 into a special-purpose machine that is customized to perform the operations specified in the instructions.

[0509] The computer system 1500 further includes a read only memory (ROM) 1508 or other static storage device coupled to bus 1502 for storing static information and instructions for processor 1504. A storage device 1510, such as a magnetic disk, optical disk, or USB thumb drive (Flash drive), etc., is provided and coupled to bus 1502 for storing information and instructions.

[0510] The computer system 1500 may be coupled via bus 1502 to a display 1512, such as a LED or LCD display (or touch screen), for displaying information to a computer user. An input device 1514, including alphanumeric and other keys, is coupled to bus 1502 for communicating information and command selections to processor 1504. Another type of user input device is cursor control 1516, such as a mouse, a trackball, or cursor direction keys for communicating direction information and command selections to processor 1504 and for controlling cursor movement on display 1512. In some embodiments, the same direction information and command selections as cursor control may be implemented via receiving touches on a touch screen without a cursor. Additional data may be retrieved from the external data storage 1518.

[0511] The computer system 1500 may include a user interface module to implement a GUI that may be stored in a mass storage device as executable software codes that are executed by the computing device(s). This and other modules may include, by way of example, components, such as software components, object-oriented software components, class components and task components, processes, functions, attributes, procedures, subroutines, segments of program code, drivers, firmware, microcode, circuitry, data, databases, data structures, tables, arrays, and variables.

[0512] In general, the word “module,” as used herein, refers to logic embodied in hardware or firmware, or to a collection of software instructions, possibly having entry and exit points, written in a programming language, such as, for example, Java, C or C++. A software module may be compiled and linked into an executable program, installed in a dynamic link library, or may be written in an interpreted programming language such as, for example, BASIC, Perl, or Python. It will be appreciated that software modules may be callable from other modules or from themselves, and/or may be invoked in response to detected events or interrupts. Software modules configured for execution on computing devices may be provided on a computer readable medium, such as a compact disc, digital video disc, flash drive, magnetic disc, or any other tangible medium, or as a digital download (and maybe originally stored in a compressed or installable format that requires installation, decompression or decryption prior to execution). Such software code may be stored, partially or fully, on a memory device of the executing computing device, for execution by the computing device. Software instructions may be embedded in firmware, such as an EPROM. It will be further appreciated that hardware modules may be comprised of connected logic units, such as gates and flip-flops, and/or may be comprised of programmable units, such as programmable gate arrays or processors. The modules or computing device functionality described herein can be implemented as software modules, but may be represented in hardware or firmware. Generally, the modules described herein refer to logical modules that may be combined with other modules or divided into sub-modules despite their physical organization or storage.

[0513] The computer system 1500 may implement the techniques described herein using customized hard-wired logic, one or more ASICs or FPGAs, firmware and/or program logic which in combination with the computer system causes or programs computer system 1500 to be a special-purpose machine. According to one embodiment, the techniques herein are performed by computer system 1500 in response to processor(s) 1504 executing one or more sequences of one or more instructions contained in main memory 1506. Such instructions may be read into main memory 1506 from another storage medium, such as storage device 1510. Execution of the sequences of instructions contained in main memory 1506 causes processor(s) 1504 to perform the process steps described herein. In alternative embodiments, hard-wired circuitry may be used in place of or in combination with software instructions.

[0514] The term “non-transitory media,” and similar terms, as used herein refers to any media that store data and/or instructions that cause a machine to operate in a specific fashion. Such non-transitory media may comprise non-volatile media and/or volatile media. Non-volatile media includes, for example, optical or magnetic disks, such as storage device 1510. Volatile media includes dynamic memory, such as main memory 1506. Common forms of non-transitory media include, for example, a floppy disk, a flexible disk, hard disk, solid state drive, magnetic tape, or any other magnetic data storage medium, a CD-ROM, any other optical data storage medium, any physical medium with patterns of holes, a RAM, a PROM, and EPROM, a FLASH-EPROM, NVRAM, any other memory chip or cartridge, and networked versions of the same.

[0515] Non-transitory media is distinct from but may be used in conjunction with transmission media. Transmission media participates in transferring information between non-transitory media. For example, transmission media includes coaxial cables, copper wire and fiber optics, including the wires that comprise bus 1502. Transmission media can also take the form of acoustic or light waves, such as those generated during radio-wave and infra-red data communications.

[0516] Various forms of media may be involved in carrying one or more sequences of one or more instructions to processor 1504 for execution. For example, the instructions may initially be carried on a magnetic disk or solid-state drive of a remote computer. The remote computer can load the instructions into its dynamic memory and send the instructions over a telephone line using a component control. A component control local to computer system 1500 can receive the data on the telephone line and use an infra-red transmitter to convert the data to an infra-red signal. An infra-red detector can receive the data carried in the infra-red signal and appropriate circuitry can place the data on bus 1502. Bus 1502 carries the data to main memory 1506, from which processor 1504 retrieves and executes the instructions. The instructions received by main memory 1506 may retrieve and execute the instructions. The instructions received by main memory 1506 may optionally be stored on storage device 1510 either before or after execution by processor 1504.

[0517] The computer system 1500 also includes a communication interface 1518 coupled to bus 1502. Communication interface 1518 provides a two-way data communication coupling to one or more network links that are connected to one or more local networks. For example, communication interface 1518 may be an integrated services digital network (ISDN) card, cable component control, satellite component control, or a component control to provide a data communication connection to a corresponding type of telephone line. As another example, communication interface 1518 may be a local area network (LAN) card to provide a data communication connection to a compatible LAN (or WAN component to communicated with a WAN). Wireless links may also be implemented. In any such implementation, communication interface 1518 sends and receives electrical, electromagnetic or optical signals that carry digital data streams representing various types of information.

[0518] A network link typically provides data communication through one or more networks to other data devices. For example, a network link may provide a connection through local network to a host computer or to data equipment operated by an Internet Service Provider (ISP). The ISP in turn provides data communication services through the world-wide packet data communication network now commonly referred to as the “Internet”. Local network and Internet both use electrical, electromagnetic or optical signals that carry digital data streams. The signals through the various networks and the signals on network link and through communication interface 1518, which carry the digital data to and from computer system 1500, are example forms of transmission media.

[0519] The computer system 1500 can send messages and receive data, including program code, through the network(s), network link and communication interface 1518. In the Internet example, a server might transmit a requested code for an application program through the Internet, the ISP, the local network and the communication interface 1518.

[0520] The received code may be executed by processor 1504 as it is received, and/or stored in storage device 1510, or other non-volatile storage for later execution. Each of the processes, methods, and algorithms described in the preceding sections may be embodied in, and fully or partially automated by, code modules executed by one or more computer systems or computer processors comprising computer hardware. The processes and algorithms may be implemented partially or wholly in application-specific circuitry.

[0521] The various features and processes described above may be used independently of one another, or may be combined in various ways. All possible combinations and sub-combinations are intended to fall within the scope of this disclosure. In addition, certain method or process blocks may be omitted in some implementations. The methods and processes described herein are also not limited to any particular sequence, and the blocks or states relating thereto can be performed in other sequences that are appropriate. For example, described blocks or states may be performed in an order other than that specifically disclosed, or multiple blocks or states may be combined in a single block or state. The example blocks or states may be performed in serial, in parallel, or in some other manner. Blocks or states may be added to or removed from the disclosed example embodiments. The example systems and components described herein may be configured differently than described. For example, elements may be added to, removed from, or rearranged compared to the disclosed example embodiments.

[0522] Any process descriptions, elements, or blocks in the flow diagrams described herein and/or depicted in the attached figures should be understood as potentially representing modules, segments, or portions of code which include one or more executable instructions for implementing specific logical functions or steps in the process. Alternate implementations are included within the scope of the embodiments described herein in which elements or functions may be deleted, executed out of order from that shown or discussed, including substantially concurrently or in reverse order, depending on the functionality involved, as would be understood by those skilled in the art.

[0523] It should be emphasized that many variations and modifications may be made to the above-described embodiments, the elements of which are to be understood as being among other acceptable examples. All such modifications and variations are intended to be included herein within the scope of this disclosure. The foregoing description details certain embodiments of the invention. It will be appreciated, however, that no matter how detailed the foregoing appears in text, the invention can be practiced in many ways. As is also stated above, it should be noted that the use of particular terminology when describing certain features or aspects of the invention should not be taken to imply that the terminology is being re-defined herein to be restricted to including any specific characteristics of the features or aspects of the invention with which that terminology is associated. The scope of the embodiments should, therefore, be construed in accordance with the appended claims and any equivalents thereof.

[0524] The various operations of example methods described herein may be performed, at least partially, by one or more processors that are temporarily configured (e.g., by software) or permanently configured to perform the relevant operations. Similarly, the methods described herein may be at least partially processor-implemented, with a particular processor or processors being an example of hardware. For example, at least some of the operations of a method may be performed by one or more processors. Moreover, the one or more processors may also operate to support performance of the relevant operations in a “cloud computing” environment or as a “software as a service” (SaaS). For example, at least some of the operations may be performed by a group of computers (as examples of machines including processors), with these operations being accessible via a network (e.g., the Internet) and via one or more appropriate interfaces (e.g., an Application Program Interface (API)).

[0525] Treatments

[0526] In another embodiment, the methylation status can be used to make or influence a clinical decision (e.g., diagnosis of cancer, treatment selection, assessment of treatment effectiveness, etc.). For example, a physician can prescribe an appropriate treatment (e.g., a resection surgery, radiation therapy, chemotherapy, and/or immunotherapy).

[0527] In some embodiments, the treatment is one or more cancer therapeutic agents selected from the group consisting of a chemotherapy agent, a targeted cancer therapy agent, a differentiating therapy agent, a hormone therapy agent, and an immunotherapy agent. For example, the treatment can be one or more chemotherapy agents selected from the group consisting of alkylating agents, antimetabolites, anthracyclines, anti-tumor antibiotics, cytoskeletal disruptors (taxans), topoisom erase inhibitors, mitotic inhibitors, corticosteroids, kinase inhibitors, nucleotide analogs, platinum-based agents and any combination thereof. In some embodiments, the treatment is one or more targeted cancer therapy agents selected from the group consisting of signal transduction inhibitors (e.g. tyrosine kinase and growth factor receptor inhibitors), histone deacetylase (HD AC) inhibitors, retinoic receptor agonists, proteosome inhibitors, angiogenesis inhibitors, and monoclonal antibody conjugates. In some embodiments, the treatment is one or more differentiating therapy agents including retinoids, such as tretinoin, alitretinoin and bexarotene. In some embodiments, the treatment is one or more hormone therapy agents selected from the group consisting of anti-estrogens, aromatase inhibitors, progestins, estrogens, anti-androgens, and GnRH agonists or analogs. In one embodiment, the treatment is one or more immunotherapy agents selected from the group comprising monoclonal antibody therapies such as rituximab (RITUXAN) and alemtuzumab (CAMPATH), non-specific immunotherapies and adjuvants, such as BCG, interleukin-2 (IL-2), and interferon-alfa, immunomodulating drugs, for instance, thalidomide and lenalidomide (REVLIMID). It is within the capabilities of a skilled physician or oncologist to select an appropriate cancer therapeutic agent based on characteristics such as the type of tumor, cancer stage, previous exposure to cancer treatment or therapeutic agent, and other characteristics of the cancer.

### EXAMPLES

[0528] The following examples are included to demonstrate specific embodiments of the disclosure. It should be appreciated by those of skill in the art that the techniques disclosed in the examples which follow represent techniques to function well in the practice of the disclosure, and thus can be considered to constitute specific modes for its practice. However, those of skill in the art should, in light of the present disclosure, appreciate that many changes can be made in the specific embodiments which are disclosed and still obtain a like or similar result without departing from the spirit and scope of the disclosure.

### Example 1: A Human DNA Methylation Atlas Reveals Design Principles of Cell Type-Specific Methylation and Identifies Thousands of Cell Type-Specific Regulatory Elements

[0529] This example describes the generation of a human methylome atlas, based on deep whole-genome bisulfite sequencing of 39 cell types sorted from 207 healthy tissue samples.

[0530] Replicates of the same cell type are >99.5% identical, demonstrating robustness of cell identity programs to genetic variation and environmental perturbation. Unsupervised clustering of the atlas recapitulates key elements of tissue ontogeny, and identifies methylation patterns retained since gastrulation. Loci uniquely unmethylated in an individual cell type often reside in transcriptional enhancers and contain DNA binding sites for tissue-specific transcriptional regulators. Uniquely methylated loci are rare and are enriched for CpG islands, polycomb targets, and CTCF binding sites, suggesting a role in shaping cell type-specific chromatin looping. The atlas provides an essential resource for interpretation of disease-associated genetic variants, and a wealth of potential tissue-specific biomarkers for use in liquid biopsies.

### Methods and Materials

[0531] Human Tissue Samples

[0532] Human tissues were obtained from various sources. The majority (150) of the 207 samples analyzed were sorted from tissue remnants obtained at the time of routine, clinically indicated surgical procedures at the Hadassah Medical Center. In all cases, normal tissue distant from any known pathology was used. Surgeons and/or pathologists were consulted prior to removing the tissue to confirm that its removal would not compromise the final pathologic diagnosis in any way. For example, in patients undergoing right colectomy for carcinoma in the cecum, the distal most part of the ascending colon and the most proximal part of the terminal ileum were obtained for cell isolation. Normal bone marrow was obtained at the time of joint replacement in patients with no known hematologic pathology. The patient population included 137 individuals (n=61 males, n=75 females), aged 3-83 years. The majority of donors were Caucasian. Approval for collection of normal tissue remnants was provided by the Institutional Review Board (IRB, Helsinki Committee), Hadassah Medical Center, Jerusalem, Israel. Written informed consent was obtained from each donor or legal guardian prior to surgery.

### Tissue Dissociation and FACS Sorting of Purified Cell Populations

[0533] Fresh tissue obtained at the time of surgery was trimmed to remove extraneous tissue. Cells were dispersed using enzyme-based protocols optimized for each tissue type. The resulting single-cell suspension was incubated with the relevant antibodies and FACS sorted to obtain the desired cell type (Table 1).

TABLE 1
Listing of Cell Types

| Group | Group Name | Cell type |
|---|---|---|
| A | Gastro-Intestinal system | Oral, Larynx and Esophageal epithelium |
| A | Gastro-Intestinal system | Gastric Epithelium |
| A | Gastro-Intestinal system | Small Intestine Epithelium |
| A | Gastro-Intestinal system | Colon Epithelium |
| A | Gastro-Intestinal system | Colon Fibroblasts |
| A | Gastro-Intestinal system | Gallbladder Epithelium |
| A | Gastro-Intestinal system | Liver Hepatocytes |
| A | Gastro-Intestinal system | Pancreatic Acinar cells |
| A | Gastro-Intestinal system | Pancreatic Alpina cells |
| A | Gastro-Intestinal system | Pancreatic Beta cells |
| A | Gastro-Intestinal system | Pancreatic Delta cells |
| A | Gastro-Intestinal system | Pancreatic Ductal cells |
| B | Genito-urinary | Endometrium Epithelium |
| B | Genito-urinary | Fallopian Epithelium |
| B | Genito-urinary | Kidney Epithelium |
| B | Genito-urinary | Bladder Epithelium |
| B | Genito-urinary | Prostate Epithelium |
| B | Genito-urinary | Breast Basal Epithelium |
| B | Genito-urinary | Breast Luminal Epithelium |
| C | Cardio-Vascular-Pulmonary | Lung Alveolar Epithelium |
| C | Cardio-Vascular-Pulmonary | Lung Bronchial Epithelium |
| C | Cardio-Vascular-Pulmonary | Heart Cardiomyocytes |
| C | Cardio-Vascular-Pulmonary | Heart Fibroblasts |
| C | Cardio-Vascular-Pulmonary | Vascular Endothelial cells |
| D | Hemo | Blood B cells |
| D | Hemo | Blood Gramlocytes |
| D | Hemo | Blood Monocytes + Macrophages |
| D | Hemo | Blood NK cells |
| D | Hemo | Blood T cells |
| D | Hemo | Erythrocyte progenitor cells |
| E | Dermal-Skeleto-muscular | Epidermal Keratinocytes |
| E | Dermal-Skeleto-muscular | Dermal Fibroblasts |
| E | Dermal-Skeleto-muscular | Osteoblasts |
| E | Dermal-Skeleto-muscular | Skeletal Muscle cells |
| E | Dermal-Skeleto-muscular | Smooth Muscle cells |
| F | Neural-Misc. | Thyroid Epithelium |
| P | Neural-Misc. | Adipocytes |
| F | Neural-Misc. | Neuron CNS |
| F | Neural-Misc. | Oligodendrocytes |

TABLE 2
Composite Cell Types

| Group | Composite Types |
|---|---|
| 1 | Neurons + Oligodendrocytes |
| 2 | Pancreatic Alpha + Beta + Della cells |
| 3 | Breast Basal + Luminal Epithelium |
| 4 | Lung Alveolar + Bronchial cells |
| 5 | Fallopian + Ovary Epithelium |
| 6 | Gastric + Small Intes. + Colon Epithelium |
| 7 | Gastric + Small Intes, Epithelium |
| 8 | Small Intes. + Colon Epithelium |
| 9 | Colon + Heart Fibroblasts |
| 10 | Cardiomyocytes + Skeletal + Smooth muscle cells |
| 11 | Skeletal + Smooth muscle cells |
| 12 | Heart Cardiomvocytes + Fibroblasts |

[0534] Purity of live sorted cells was determined by mRNA analysis for key known cell-type specific genes whereas purity of cells that were fixed prior to sorting was determined using previously validated cell-type specific methylation signals. DNA was extracted using the DNeasy Blood and Tissue kit (#69504 Qiagen; Germantown, Md.) according to the manufacturer's instructions, and stored at −20° C. for bisulfite conversion and whole genome sequencing.

### Whole-Genome Bisulfite Sequencing

[0535] Up to 75 ng of sheared gDNA was subjected to bisulfite conversion using the EZ-96 DNA Methylation Kit (Zymo Research; Irvine, Calif.), with liquid handling on a Hamilton MicroLab STAR (Hamilton; Reno, Nev.). Dual indexed sequencing libraries were prepared using Accel-NGS Methyl-Seq DNA library preparation kits (Swift BioSciences; Ann Arbor, Mich.) and custom liquid handling scripts executed on the Hamilton MicroLab STAR. Libraries were quantified using KAPA Library Quantification Kits for Illumina Platforms (Kapa Biosystems; Wilmington, Mass.). Four uniquely dual indexed libraries, along with 10% PhiX v3 library (Illumina; San Diego, Calif.), were pooled and clustered on an Illumina NovaSeq 6000 S2 flow cell followed by 150-bp paired-end sequencing.

### Whole-Genome Bisulfite Sequencing Computational Processing

[0536] Paired-end FASTQ files were mapped to the human (hg19), lambda, pUC19 and viral genomes using bwa-meth (V 0.2.0), with default parameters, then converted to BAM files using SAMtools (V 1.9). Duplicated reads were marked by Sambamba (V 0.6.5), with parameters “-1 l -t 16-sort-buffer-size 16000-overflow-list-size 10000000”. Reads with low mapping quality, duplicated, or not mapped in a proper pair were excluded using SAMtools view with parameters -F 1796-q 10. Reads were stripped from non-CpG nucleotides and converted to PAT files using wghstools (V 0.1.0).

Genomic Segmentation into Multi-Sample Homogenous Blocks

[0537] We developed and implemented a multi-channel Dynamic Programming segmentation algorithm to divide the genome into continuous genomic regions (blocks) showing homogeneous methylation levels across multiple CpGs, for each sample. We modeled the CpG sites with a generative probabilistic model, assuming there is a universal underlying segmentation of all ˜28M sites into an unknown number of blocks. This segmentation, unlike the methylation patterns, is similar across different cell types and individuals. Each block induces a Bernoulli distribution with some θᵢ^{k}, where i is a block index and k is a sample (k=1, . . . , K), and all CpG sites are represented by random variables sampled i.i.d from the same beta value Ber(θᵢ^{k}).

### Finding an Optimal Segmentation

[0538] We used dynamic programming to find a segmentation that maximizes a log-likelihood score for the blocks. The score for the i'th block is the log-likelihood of the beta values of the sites in this block across all K samples. We computed K Bayesian estimators for the block's parameters \hat{θ}ᵢ^{k}:

$${\hat{θ}}_{i}^{k} = \frac{{( {N}_{C} )}_{i}^{k} + {α}_{C}}{{( {N}_{C} )}_{i}^{k} + {( {N}_{T} )}_{i}^{k} + {α}_{C} + {α}_{T}}$$

where (N_{C})ᵢ^{k}, (N_{T})ᵢ^{k} is the number of observations of sites in the block i and sample k that are methylated/unmethylated. α_{C}, α_{T} are pseudocounts for methylated/unmethylated observations in block i. They are constant hyper-parameters of the model, which set the tradeoff between longer to more homogenous blocks. The log-likelihood of a single block in a single example is:

score(blockᵢ)=llᵢ=Σ^{K}ₖ₌₁((N_{C})ᵢ^{k}·log(\hat{θ}ᵢ^{k})+(N_{T})ᵢ^{k}·log(1−θᵢ^{k})).

### Dynamic Programming Algorithm

[0539] We maintained a 1×N table T for the optimal scores (N=28,217,448). T[i] holds the score of the optimal segmentation of sites 1, . . . , i. T[N] holds the final optimal score. The table is updated from 1 to N as follows:

$$T [ i ] = {max}_{i ′ < i} \{ T [ {i}^{′} ] + score ( block [ {i}^{′} + 1 , … , i ] ) \}$$

T[i] is the maximum over the sites preceding site i (i′<i), of the score of the optimal segmentation that ends on site i′(T[i′]), concatenated with the single block from i′+1 to i. A similar traceback table is also maintained, in order to retrieve the optimal segmentation. In order to improve performance, we set an upper bound on block length (either in CpG sites or bases), which improves running time and allows for multi-processing.

### Segmentation and Clustering Analysis

[0540] We segmented the genome into 7,264,350 blocks using wgbstools (with parameters “segment-max_bp 5000”), with all of the 207 samples as reference, and retained 2,107,635 blocks that cover ≥4 CpGs. For the hierarchical clustering we selected the top 1% (21,077) blocks showing the largest variability in average methylation across all samples. Blocks with sufficient coverage of ≥10 observations (calculated as sequenced CpG sites) across 3 of the samples we further retained. We then computed the average methylation for each block and sample calculated using wgbstools (“-beta_to_table-c 10”), marked blocks with <10 observations as missing values, and imputed their methylation values using sklearn KNNImputer (V 0.24.2). The 207 samples were clustered with the UPGMA clustering algorithm, using scipy (V 1.6.3), and Li norm as the distance metric. The fanning diagram (FIG. 4) was plotted using ggtree (V 2.2.4).

### Cell Type-Specific Markers

[0541] The 207 atlas samples were grouped into 51 groups by their cell type, including 39 basic groups (e.g. epithelial cells Pancreatic Alpha cells, Table 1), and composite super-groups (e.g. epithelial Alpha, Beta, and Delta cells, all from the endocrine pancreas, Table 2). We performed a one-vs-all comparison, to identify differentially methylated blocks unique for each set. For this, we first identified blocks that cover ≥5 CpGs, with length varying between 10 to 500 bp. We then calculated the average methylation per block/sample, as the number of methylated CpGs sites within all sequenced reads across each block). Blocks with insufficient coverage (<25 observations) were assigned a default value of 0.5. We then selected blocks with average methylation below 0.33 across samples from one cell type, with an average methylation of ≥0.66 in all others, or vice versa.

[0542] For cell type-specific markers, we selected the top 25, 100 or 250 blocks with the highest delta beta for each cell type. For hypo-methylated markers this was computed as the difference between the 75^{th} percentile among the block average methylation within samples in the target set, and the 2.5^{th} percentile among the rest of samples (background set). This allowed for ˜1 outlier sample in the target group, and ˜5 outliers outside. Analogously, for hyper-methylated markers we computed the 97.5^{th} percentile of the background and the 25^{th} percentile within the target samples.

### Enrichment for Gene Set Annotations

[0543] Analysis of gene set enrichment was performed using GREAT (McLean et al., (2010) Nat. Biotechnol. 28, 495-501). For each cell type, we selected the top 250 differentially unmethylated regions, and ran GREAT via batch web interface using default parameters. Enrichments for “Ensembl Genes” were ignored, and a significance threshold of Binomial FDR≤0.05 was used.

### Enrichment for Chromatin Marks

[0544] For each cell type, we analyzed the top 250 differentially unmethylated regions vs. published ChIP-seq (H3K27ac and H3K4me1) and DNase-seq from the Roadmap Epigenomics project. These include E032 for B cells markers, E034 for T cells markers, E029 for monocytes/macrophages markers, E066 for liver hepatocytes, E104 for heart cardiomyocytes and fibroblasts, E109 and E110 for gastric/small intestine/colon. Raw single-cell ATAC-seq data were downloaded from GEO GSE165659 as “feature” and “matrix” files for 70 samples. For each sample, cells of the same type were pooled together to output a bedGraph file, which was mapped from hg38 to hg19 using UCSC liftOver. Overlapping regions were dropped using bedtools (V 2.26.0). Finally, bigWig files were created using bedGraphToBigWig (V 4). Heatmaps and average plots were prepared using deepTools (V 3.4.1), with the computeMatrix, plotHeatmap, and plotProfile functions. We used default parameters except for -referencePoint=center, 15 Kb margins, and binSize=200 for ChIP-seq, DNaseI and chromHMM data, and 75 Kb margins with binSize=1000 for ATAC-seq data.

### Motif Analysis

[0545] For each cell type, we analyzed the top 250 differentially unmethylated regions for known motifs, using HOMER's findMotifsGenome.pl function, with -bits and -size 250 parameters. Additionally, we analyzed the top 100 differentially methylated regions for each cell type (using the same parameters), as well as their combined set, composed of 3,125 regions in total.

### Methylation Marker-Gene Associations

[0546] For each cell type-specific marker, we identified all neighboring genes, up to 500 Kb apart. We then examined the expression levels of these genes across the GTEx datasets, covering 50 tissues and cell types. We then calculated the over-expression level of each <gene,condition> pair, by computing the deviation (Z-score) of that gene across all conditions (row-wise calculation), and then the deviation of that condition across all genes (column-wise calculation), repeatedly until convergence. This Z-score reflects the bidirectional enrichment of each <gene,condition> combination, compared to all other genes/conditions. We then classified each <marker,gene,condition> combination as Tier 1: distance≤5 Kb, expression≥10 TPM, and Z-score≥1.5; or Tier 2: same but as Tier 1, with dist≤50 Kb; or Tier 3: up to 750 Kb, expression≥25 TPM, and Z-score≥5: or Tier 4: same as Tier 3 with Z-score≥3.5

### Inter-Individual Variation in Cell Type Methylation

[0547] We defined a similarity score between two samples as the fraction of blocks containing ≥3 CpGs, and ≥10 binary observations (sequenced CpG sites), where the average methylation of the two samples differs by ≥0.5. Only cell types with n≥3 FACS-sorted replicates from different donors are considered (138 samples in total).

### CTCF ChIP-Seq Analysis

[0548] CTCF ChIP-seq data were downloaded from the ENCODE project, as 168 bigwig files, covering 61 tissues/cell types (hg19). Samples of the same cell type were averaged using multiBigwigSummary bins (V 3.4.1).

### Endodermal Marker Analysis

[0549] The 776 endodermal hypo-methylated markers were found using wgbstools' find_markers function (V 0.1.0), with parameters “-delta 0.4-tg_quant 0.1-bg_quant 0.1. Endoderm-derived epithelium (51 samples was compared to 105 non-epithelial samples from mesoderm or ectoderm. Blocks were selected as markers if the average methylation of the 90^{th} percentile of the epithelial samples was lower than the 10^{th} percentile of the non-epithelial samples by at least 0.4.

### Results

### A Comprehensive Methylation Atlas of Primary Human Cell Types

[0550] To portray the genome-wide patterns of DNA methylation across a variety of cell types, we obtained 207 samples of freshly isolated healthy adult tissue samples from 137 consented donors undergoing a variety of surgical procedures (ages 3-83). We dissociated tissue samples into single cell suspensions and used lineage-specific antibodies to cell type-specific surface markers to FACS purify cell populations covering 39 primary cell types. The purity of cell types was confirmed using RT-qPCR for cell type specific gene expression markers and known tissue-specific methylation markers were assessed when possible. We then subjected cell type-specific genomic DNA to WGBS and sequenced at a mean depth of >30×, using 150 bp-long paired-end reads, with an average fragment size of 174 bp.

[0551] Sequencing reads were mapped to the human genome (hg19). Duplicated reads, reads not covering any CpG site, and reads not mapped in a proper pair with a high mapping quality were filtered out.

[0552] Overall we characterized the methylomes of 39 types of cells (Table 1). These include various blood cell types (T cells, B cells, NK cells, granulocytes, monocytes, and tissue-resident macrophages); erythrocyte progenitor cells; hepatocytes; exocrine and endocrine pancreatic cell types; epithelial cells from the lung (alveolar and bronchial), breast (basal and luminal), kidney, mouth, esophagus, thyroid, bladder, and prostate; neurons and oligodendrocytes; adipocytes; gastrointestinal epithelium from different segments of the GI tract; endometrial, fallopian and ovarian epithelium; cardiomyocytes, skeletal, and various anatomical sources of smooth muscle and vascular endothelial cells (FIG. 1). These represent nearly all major human cell types, allowing a composite view of physiological systems (e.g., GI tract, hematopoietic cells, pancreas), as well as a comparison of similar cell types in different environments (e.g., tissue-resident macrophages).

### Identification of Human Methylation Blocks

[0553] It was observed that the 207 methylomes showed great similarities between replicates, with distinctive changes between cell types in a block-like manner. We therefore sought to identify and delineate genomic regions that are differentially methylated in specific cell types. These would shed light on biological processes that are unique to specific cell types, define their cellular identity, and could be further used as tissue-specific methylation biomarkers to identify the cellular origin of circulating cell-free DNA fragments.

[0554] We developed wgbstools, a computational machine learning suite to represent, compress, visualize, and analyze WGBS data. Our first goal was to move to a more compact representation of the genome-wide methylomes. Instead of using fixed-width genomic windows as is typically done in differentially methylated region (DMR) calling, we sought an unbiased approach that would automatically identify natural changepoints in DNA methylation patterns across multiple conditions. For this, we developed a computational multi-channel dynamic programming algorithm to optimally segment the genome into 7,264,350 non-overlapping continuous blocks. Each of these blocks spans highly correlated CpG sites that share similar methylation patterns in each of the 207 samples analyzed, but may co-vary across cell types. We then filtered out all single and double-CpG blocks to retain 2,807,024 methylation blocks, with an average block length of 532 bp (IQR=551 bp) spanning 8 CpGs on average (IQR=5 CpGs, FIG. 2). These blocks represent compact units that are more straightforward to robustly analyze than individual CpG sites. Beyond the technical ease, the regional nature of DNA methylation strongly suggests that these methylation blocks are the biological “atoms” of human DNA methylation.

### The Extent of Inter-Individual Variation in Cell Type Methylation

[0555] We asked how robust the methylation patterns of a given cell type are across different individuals. This serves a technical goal of defining reproducibility of preparations, but is also addressing a fundamental biological question: how much of the epigenome is determined by cell type-specific differentiation programs as opposed to genetic or environmental factors? For this, we focused on all methylation blocks that consisted of 3 CpGs or more, and calculated for each pair of samples how many blocks show an absolute difference of 50% or more in their average methylation. For most cell types, less than 0.5% of the blocks differ in methylation between donors, compared to an average variation of 4.9%/o blocks among samples of different cell types (FIG. 3). This suggests high similarity in DNA methylation across donors, on par with the estimated variability of the genome sequence between individuals. Importantly, the same inter-individual variation was observed in replicates obtained from different laboratories. While this definition of variation (as 50%) is somewhat arbitrary, other thresholds (35%-50%) show a similar trend, with ≤0.5% of variable blocks.

[0556] Two hundred and one samples in the methylation atlas had n≥3 biological replicates of the same cell type. Strikingly, for 200 of these (99.5%), the most similar sample is of the same cell type from another individual. These results demonstrate the purity and reproducibility of cell preparations used in developing the methylation atlas, and indicate high inter-individual similarity of normal cell type methylomes.

### Methylation Patterns Record Human Developmental History

[0557] DNA methylation patterns are shaped and largely fixed during cell differentiation, and hence reflect the epigenetic identity of a cell. However, methylation patterns could also reflect the developmental history of cells. For example, the differentiated progeny of a progenitor cell may retain methylation marks that were used to control genes expressed in that progenitor, even though these genes are no longer active in the differentiated cells. The implication would be that DNA methylation can be used as an endogenous lineage tracer, similarly to somatic mutation profiles. We thus used the large collection of cell type-specific methylomes to test the hypothesis that the methylome of a given cell type reflects its lineage history.

[0558] We focused on blocks containing 4 CpGs or more, calculated the average methylation levels per sample, and selected those showing the highest variability (21K blocks, top 1%) across all samples (FIG. 5). We then clustered all 207 methylomes using an unsupervised agglomerative algorithm (UPGMA) that iteratively identifies and connects the two closest samples, regardless of their labeling. This blinded clustering analysis systematically grouped together biological replicates of the same cell type. This further supports reproducibility of tissue preparation and cell sorting, and suggests that 3-4 replicates of each normal cell type are sufficient to infer its genome-wide methylation patterns for practical purposes such as marker identification. Notably, clustering based on other sets of high-variability blocks (top 1.5% through top 10%) produced similar groupings.

[0559] Strikingly, the resulting fanning diagram (FIG. 4) recapitulated key elements of lineage relationships among human tissues. For example, different pancreatic islet cell types (alpha, beta, delta), which are known to be derived from the same embryonic endocrine progenitor cell type, densely cluster together. Islet cells share endodermal developmental origins, but not function, with the exocrine pancreas (acinar cells and ducts) and the liver. Consistent with methylomes reflecting lineage rather than function, islet cells are clustered with pancreatic duct and acinar cells, and then with hepatocytes. Importantly, the phenotype of islet cells has many common features with neurons, including both tissue-specific transcription factors and functional elements such as exocytosis controlled by voltage-dependent calcium signaling. However, neurons and islet cells derive from different germ layers (ectoderm and endoderm, respectively). The methylomes of islet cells and neurons have little in common, indicating that methylation mostly reflects lineage rather than function. Additional examples for lineages reconstructed by methylation include the clustering of gastric, small intestine and colon epithelial cells; the clustering of all blood cell types; and the clustering of multiple mesoderm-derived cell types including vascular endothelial cells, adipocytes and skeletal muscle. The map also reveals intriguing relationships between cell types that are not known to share neither function nor lineage, such as the clustering of brain cell types (neurons and oligodendrocytes) with cardiomyocytes. Interestingly, lung bronchial epithelium clustered along with esophagus and oral epithelium consistent with shared embryonic origin whereas alveolar epithelium clustered with intestinal epithelium suggesting a common embryologic origin distinct from that of bronchial epithelium. This is consistent with recent lineage tracing experiments which showed early lineage specification of alveolar cell lineage, although a common lineage with gastric epithelium was not addressed.

[0560] Some methylation patterns were common to multiple cell types which have separated during very early stages of development. For example, 776 blocks are remarkably unmethylated in epithelial cell types derived from early endodermal derivatives, and methylated in cell types derived from the mesoderm and the ectoderm. The most likely interpretation of this observation is that these sites were demethylated in the endoderm germ layer of all donors, during gastrulation or shortly thereafter. Many decades later, different endoderm-derived cell types in different individuals still retain these embryonic patterns. Since endoderm derivatives do not share common function or gene expression, this provides yet another striking example of methylation patterns as a stable lineage mark. Methylation patterns reflected also later lineage splits. For example, lymphocytes (T, B and NK cells) clustered together, separately from myeloid cells (macrophage, monocyte and granulocytes).

[0561] Finally, we applied the same segmentation and blinded clustering approach to a published methylation atlas from the Roadmap Epigenomics project (Kundaje, A. et al. (2015) Nature 518, 317-330). The algorithm failed to group together related tissues and cell types, often clustering samples based on donor identity rather than type. This further emphasizes the importance of careful cell sorting and purification into homogeneous cell types, avoiding whole-tissue and mixed cell populations.

### Tens to Hundreds of Methylation Blocks Uniquely Characterize Each Cell Type

[0562] We next turned to study the methylomes of individual cell types, and identify genomic regions that are differentially methylated in a cell type-specific manner. Based on the unsupervised clustering, we organized the 207 samples into 39 groups of specific cell types, including blood cell types (B, T, NK, Granulocytes, monocytes and tissue-resident macrophages), breast epithelial cells (basal or luminal), lung epithelium (alveolar or bronchial), pancreatic endocrine (alpha, beta, delta) or exocrine (acinar and duct) cells, vascular endothelial cells from various sources, cardiomyocytes and cardiac fibroblasts, and more. We also defined 12 super-groups, where related cell types were grouped together, including muscle cells, gastrointestinal epithelium, pancreatic cells, and more (Tables 1-2).

[0563] We then focused on differentially methylated blocks, composed of 5 CpGs or more, that are methylated (average methylation in block ≥66%) in one group of cell types, but unmethylated (≤33%) in all other samples, or vice versa. Overall, we identified 11,125 differentially methylated genomic regions. Intriguingly, almost all regions (98%, 10,892) were unmethylated in one cell type, and methylated in all others. While some cell types show a surprisingly high number of differential regions, including hepatocytes (1,111 uniquely methylated or unmethylated regions), cardiomyocytes (1,084 regions), oligodendrocytes (897 regions), and small intestinal/colon epithelial cells (811 regions), other cell types had much fewer uniquely methylated regions. For example, there were only 91 unique regions in T cells, 51 in NK cells, 84 in pancreatic alpha cells, 61 in pancreatic duct cells, and 34 in pancreatic delta cells. Only three uniquely methylated regions (at these thresholds) were found for skeletal muscle cells, and no joint markers were found for smooth muscle cells, endothelial cells, or fibroblasts. Obviously, these results are affected by the overall composition of the DNA methylation atlas, allowing more unique regions for cell types with no immediate neighbors. Nonetheless, the findings may reflect the extent to which a particular cell type is unique in its differentiated function relative to other cell types. For example, cardiomyocytes apparently have a large number of specialized functions, reflected in their epigenetic makeup, while pancreatic alpha cells may have much fewer unique functions (given that the atlas contains the highly similar beta and delta cells). Interestingly, we found that only 13-22% of the cell type-specific differentially methylated regions are covered by the Illumina 450K and EPIC DNA methylation arrays, emphasizing the benefits of a whole-genome sequencing approach for exhaustive identification of biomarkers.

[0564] To obtain a human cell type-specific methylation atlas, we identified the top 25 (top markers) and top 125 (extended markers) differentially unmethylated regions, and top 25 differentially methylated regions, for each cell type (sequence listing). As FIG. 6 shows (for the top 25 unmethylated markers), these regions are uniquely demethylated in particular cell types and are methylated in all other samples, and can serve as sensitive biomarkers for identifying and quantifying the presence of DNA from a specific cell type in a mixture. This approach has various applications, including the analysis of cell-free DNA fragments circulating in the blood.

### Cell Type-Specific Unmethylated Regions are Tissue-Specific Enhancers

[0565] We next turned to characterize the sets of cell type-specific differentially unmethylated regions. Using GREAT, we identified the adjacent genes of each group of cell type-specific markers, and tested them for enrichment of various gene-set annotations. The genes adjacent to loci uniquely unmethylated in a given cell type typically reflected the functional identity of this cell type. For example, B cell methylation markers were enriched near genes associated with B cell morphology, B cell differentiation, B cell number, IgM levels, and lymphopoiesis; NK cell markers associated with gene sets related to NK cell mediated cytotoxicity, hematopoietic system, cytotoxicity, and lymphocyte physiology; T cell markers were associated with gene sets linked to the number, activation status, differentiation, physiology and proliferation of T cells; Fallopian tube markers were enriched for genes related to egg coat and perivitelline space; and cardiomyocyte markers were enriched for genes related to cardiac relaxation, systolic pressure, muscle development, and hypertrophy.

[0566] We then analyzed the chromatin packaging of the genome regions that surround cell type-specific methylation markers. We focused on DNA accessibility, via published ATAC-seq and DNaseI-seq datasets, as well as histone marks indicative of active gene regulation at promoters and enhancers, via ChIP-seq data for H3K27ac and H3K4mel. The top 250 cell type-specific DNA unmethylated markers for monocytes and macrophages are characterized by high H3K27ac and H3K4mel in monocytes, as well as high DNA accessibility. Conversely, markers of other blood cell types show no such enrichment in monocytes. We also calculated the positional enrichment of enhancer state near these cell type-specific markers, as annotated by chromHMM in matching cell types. These findings are consistent with previous studies that have associated tissue-specific demethylation with gene enhancers.

[0567] To further assess the biological importance of cell type-specific unmethylated regions, we studied their association with transcription factors that could affect DNA methylation, or bind DNA in a cell type-specific manner, depending on methylation and chromatin. We performed a motif analysis using HOMER, and calculated the enrichment (within the unmethylated markers of each cell type) for known transcription factor binding site motifs. For most cell types, the most significant motifs included master regulators and key transcription factors that govern their transcriptional program (FIG. 7). For example HEB/Ebf2/E2A/PU.1 for B cells, CEBP/AP1/ETS for granulocytes, Tcf7/ETS/RUNX for T cells, GATA/SCL/KLF motifs for erythrocyte progenitors, and GATA/KLF/HNF/Asc12/Cdx motifs for gastrointestinal (GI) epithelial cells. We propose that the association between cell type-specific demethylated regions and transcription factor binding motifs can be used to identify novel gene regulatory circuits that operate by providing transcription factor access to specific enhancers in specific cell types.

### Identification of Target Genes Regulated by Cell-Type Specific Enhancers

[0568] We attempted to identify the target genes of the putative enhancers marked by cell type-specific lack of methylation. Some of the top 25 markers fall within intronic regions and are likely to regulate these same genes (for example glucagon in pancreatic alpha cells; NPPA, MYH6, and MYL4 in cardiomyocytes, or EPCAM in GI epithelial cells), while some of the top markers are proximal to possible targets (e.g., a beta cell marker 5 Kb from the Insulin gene). Yet other markers are further apart, and we devised a computational algorithm that integrates the distance between each cell type-specific marker and surrounding genes, as well as the expression patterns of these genes. Specifically, we aimed for genes that are expressed in the same cell types where the marker is unmethylated, compared to other cell types where the marker is methylated. We applied an iterative bidirectional z-score calculation, where the over-expression of a gene in a given condition is compared to its expression in other conditions, and the expression of genes in the condition. This highlighted hallmark genes for many cell types, and allowed us to associate a putative target gene for many of the top 25 unmethylated markers for each cell type. For example, hepatocyte markers were associated with APOE, APOC1, APOC2, Alpha 2-antiplasmin, and the glucagon receptor (GCGR). Similarly, cardiomyocyte markers were associated with NPPA, NPPB, and myosin genes; and pancreatic islet markers with the insulin and glucagon genes. These findings further support the principle that loci specifically unmethylated in a given cell type are likely enhancers positively regulating genes expressed in this cell type, often controlling adjacent genes. We note however that very often, the genes adjacent to a locus specifically unmethylated in a given cell type are broadly expressed beyond this cell type (see discussion).

Cell Type-Specific Hyper-Methylated Regions are Enriched for CpG Islands and for Polycomb. CTCF, and REST Targets

[0569] Finally, we studied the genomic regions that are methylated in one cell type, but unmethylated elsewhere in the human body. These are enriched for CpG islands (38% of methylated regions, compared to 1.7-2.7% of cell type-specific unmethylated regions), and are marked by H3K27me3 and polycomb in other cell types (FIG. 8A-C), as previously reported for cancer and developmental processes. These cell type-specific hyper-methylation regions were generally less significant for motif enrichment (compared to uniquely unmethylated regions), possibly due to their smaller number. Intriguingly, only ˜3% of the total set of cell type-specific differentially methylated regions are hyper-methylated.

[0570] However, when we pooled together all cell type-specific hyper-methylated regions, we identified a strong enrichment for the target sequences of the chromatin regulator CTCF (p≤1E-26) (FIG. 8D). This suggests that DNA methylation of CTCF binding sites could act as a tissue-specific regulatory switch to modulate its binding, potentially affecting tissue-specific 3D genomic organization. To test this idea, we compared patterns of DNA methylation at CTCF sites with data on genome-wide CTCF protein binding in specific tissues. FIG. 8E shows the methylation pattern and the published in vivo CTCF occupancy at one locus, which is methylated specifically in the colon and intestine. Consistent with DNA methylation preventing CTCF binding, ChIP data show selective absence of CTCF binding at this locus in the colon. In addition, loci methylated in specific cell types were enriched for targets of the transcriptional repressor of neural genes, REST/NRSF (p≤1E-18), and this was seen most prominently in the methylome of pancreatic islet cells (FIG. 8F). While DNA methylation has not been shown to affect the binding or activity of REST, this finding raises the possibility that methylation of REST targets in a specific tissue could endow this tissue with the ability to differentiate independently of REST repression.

[0571] The comprehensive atlas of human cell type methylomes described here sheds light on principles of DNA methylation, and provides a valuable resource for multiple lines of investigation, as well as translational applications.

### Variation of DNA Methylation Between Replicates and Different Cell Types

[0572] Our analysis revealed that methylation patterns are strikingly similar among healthy biological replicates of the same cell type from different individuals. From a practical perspective, this suggests that a small number of samples are sufficient to determine the methylation blueprint of any given cell type. From a developmental biology perspective, the similarity between individuals reflects the extreme robustness of cell differentiation and maintenance circuits, at least as far as healthy tissues are concerned. Pathologies involving destabilization of the epigenome obviously disrupt these circuits, resulting in a much larger variety of methylation patterns among cells that descend from a specific normal cell type. We predict that even in cancer (when examining tumors of the same primary anatomic site and histologic type), comparative methylome analysis of epithelial cells (free of stroma), performed at the level of methylation blocks, will reveal a smaller inter-individual variation than typically assumed.

[0573] As the atlas blocks revealed, each cell type has a set of genomic regions that are specifically and uniquely unmethylated in that cell type compared to others, as well as additional genomic regions that share methylation patterns with related cell types. An unsupervised clustering of cell type-specific methylomes revealed similarities between cell types that could not be explained by common gene expression patterns. Instead, cell types in the atlas were clustered in ways that reflected their developmental origins. This was most apparent in the methylation-based similarity between beta cells and cells of the exocrine pancreas and the liver, which share endodermal origins but have little in common with regard to function; this similarity was in stark contrast to the distance of beta cell methylation from that of neurons, which share common function but derive from a different lineage. This offers a fascinating view of DNA methylation as a living record of the methylomes of progenitor cells, retained in the genome through dramatic embryonic developmental transitions and decades of life thereafter. Perhaps the most striking example of this principle is the clustering of cells according to their germ layer of origin. The loci that drive the clustering of colon epithelial cells from one adult donor with lung alveolar cells of another donor are probably reflecting the common origins of these cell types in the embryonic endoderm, which forms during gastrulation and diverges shortly after. We propose that comparative methylome analysis will allow reconstructing parts of the methylomes of fetal structures or cell types, similarly to the reconstruction of last common ancestors in evolutionary biology.

### Cell Type-Specific Demethylation Identifies Enhancers and TF Binding Motifs

[0574] The vast majority of the cell type-specific differentially methylated regions were specifically demethylated in one cell type, suggesting a positive regulatory role for that region. Indeed, an unbiased analysis of the chromatin packaging of these genomic regions across a variety of cells revealed that they are typically highly accessible and bear histone marks associated with active gene regulation, as found in enhancers and promoters. Moreover, a motif analysis for these genomic regions identified a statistically significant enrichment of transcription factor binding site motifs, and deciphered much of the regulatory circuitry for each cell type. Finally, we devised an integrated approach that, based on distance and gene expression profiles, allowed us to highlight possible target genes for these putative enhancer regions. Notably, many enhancer regions were associated with nearby genes that are broadly expressed, potentially reflecting gene regulation by multiple tissue-specific enhancers.

[0575] In this example we used strict definitions of cell type-specificity and focused on genomic regions that are uniquely unmethylated in a given cell type, compared to all others. Obviously, the DNA methylation atlas permits different analytical approaches. A more lenient definition of specificity will reveal tens of thousands of additional putative enhancers per cell type.

### Roles for Cell Type-Specfic Hyper-Methylation

[0576] Conversely, we identified genomic regions that are specifically methylated in one or two cell types but unmethylated in all other atlas cell types. These regions represent about ˜3% of cell type-specific differentially methylated regions. They are often located in CpG islands, and characterized by H3K27me3 and polycomb binding in tissues where the locus is not methylated. These regions are significantly enriched for CTCF binding sites, suggesting a role for DNA methylation in attenuating the binding of CTCF and thus modulating the 3D organization of neighboring DNA, including enhancers and their target genes. The specifically methylated regions also showed enrichment for the transcriptional repressor REST/NRSF binding site motif, suggesting yet another role for DNA hyper-methylation in prevention of REST binding and gene repression in some cell types. Of particular interest is the enrichment of the REST/NRSF motif in blocks that are methylated in pancreatic islet cells. REST represses neuronal differentiation in non-neural tissues, and endocrine differentiation in the fetal and exocrine pancreas. We believe that methylation of REST targets in the endocrine pancreas serves to guarantee protection of islet genes from accidental repression by REST.

### Cell Type-Specific DNA Methylation Biomarkers for Cell-Free DNA Analysis

[0577] The atlas described here is the most comprehensive whole-genome healthy DNA methylation atlas to date. We have identified over a thousand cell type-unique DNA methylation regions that could serve as accurate and highly specific biomarkers for identifying and quantifying cell death events by monitoring cell-free DNA fragments circulating in the blood. Notably, the vast majority of these marker regions are not covered by the 450K/EPIC BeadChip DNA methylation arrays, and were not previously appreciated. The resolution of the atlas yields a quantitative understanding of composite tissues, and allows one to identify missing methylomes of additional cell types that are yet to be sorted and characterized.

[0578] In summary, this example presents a comprehensive methylome atlas of primary human cell types and provide examples for biological insights that can be gleaned from this resource. Among the many potential utilities of this atlas, perhaps most promising is the possibility to use it for deconvolution of cell types in a mixed cell type sample, and sensitive identification of the tissue of origin of cfDNA in plasma of individuals with cancer and other diseases.

### Example 2. Universal Lung Epithelium DNA Methylation Markers for Detection of Lung Damage in Liquid Biopsies

[0579] Liquid biopsies using circulating cell-free DNA (cfDNA) are extensively used for monitoring patients with lung cancer. Analysis of cfDNA molecules carrying oncogenic mutations allows to assess disease progression, response to therapy, and evolutionary dynamics in the cancer genome. The strength of this approach—the ability to assess the tumor genome via a blood test—is also the source of its inherent limitations. It requires personalization of analysis for the mutations of each particular tumor; it is blind to tumors in which the mutational profile is not known, and to the dynamics of tumor clones not containing the mutation(s) being studied; and it cannot identify the tissue source of malignancy (for example, whether a lesion in the lung represents lung cancer or metastasis from a different site). Most fundamentally, liquid biopsies that rely on somatic mutations are blind to pathologies that involve damage to lung cells with a normal genome, including cancer-induced collateral damage to adjacent epithelial cells.

[0580] Liquid biopsies using lung-specific methylation markers can theoretically offer a universal circulating lung biomarker, applicable to cfDNA derived from all lung lesions in all individuals. Such a biomarker is expected to be highly specific, due to the cell-type specificity of DNA methylation. Theoretically, the sensitivity of tissue-specific methylation markers can be enhanced by parallel assessment of multiple informative genomic loci in the same plasma sample, with a minimal loss of specificity.

[0581] Example 1 has developed a method for targeted analysis of cell type-specific methylation markers. To identify such markers for lung epithelial cells, this example now determined the methylomes of sorted alveolar and bronchial epithelial cells and compared them to an extensive methylome atlas of other human tissues. The analysis revealed hundreds of loci that are uniquely methylated or unmethylated in lung epithelial cells, representing the epigenetic basis for the cellular identity and gene expression program of lung epithelium, including differences between alveolar and bronchial compartments. The maps also allowed the development of a panel of lung-specific methylation markers.

[0582] This example reports the analysis of lung epithelial methylomes, and characterization of a universal lung marker panel. As proof of concept, we applied the markers for the assessment of lung-derived DNA in plasma from healthy individuals, patients with lung cancer, individuals undergoing bronchoscopy and patients with COPD.

### Materials and Methods

[0583] Patients. All clinical studies were approved by the ethics committees of Hadassah and Shaare Zedek Medical Center.

[0584] Biomarkers. Tissue-specific methylation biomarkers were selected after a comparison of publicly available genome-wide DNA methylation datasets generated using Illumina Infinium HumanMethylation450k BeadChip array. The comparison included in addition the methylome of human alveolar and bronchial epithelial cells, generated by whole genome bisulfite sequencing from sorted dissociated Lung tissue. Table 3 lists the coordinates of markers, and primers used to amplify them.

TABLE 3
Listing of Markers

| Marker type | Chromosome | Location | Ref Gene | Meth |
|---|---|---|---|---|
| Lung 1 | 14 | 55765534 | FBX034 | U |
| Lung 2 | 3 | 181441571 | SOX2OT | M |
| Alveo1 | 1 | 41486102 | SLFNL1 | U |
| Alveo2 | 2 | 236672684 | AGAPI | U |
| Alveo3 | 17 | 79952367 | ASPSCR1 | U |
| Alveo4 | 16 | 678127 | RAB40C | U |
| Alveo5 | 7 | 2473529 | CHST12 | U |
| Alveo6 | 16 | 1652552 | IFT140 | U |
| Alveo7 | 14 | 91691190 | C14orf159 | U |
| Alveo8 | 16 | 667157 | RAB40C | U |
| Alveo9 | 11 | 66116455 | B3GNT1 | U |
| Alveo10 | 4 | 57522145 | HOPX | M |
| Alveo11 | 16 | 84271391 | KCNG4 | U |
| Alveo12 | 1 | 1986275 | PRKCZ | U |
| Bronch1 | 7 | 4802132 | FOXK1 | U |
| Bronch2 | 2 | 239970075 | HDAC4 | U |
| Bronch3 | 1 | 164761834 | PBX1 | U |

[0585] Sample Preparation and DNA Processing. Blood samples were collected in plasma-preparation tubes and centrifuged for 10 min in 4 degrees at 1,500×g. The supernatant was transferred to a fresh 15 ml conical tube without disturbing the cellular layer and centrifuged again for 10 min in 4 degrees at 3000×g. The supernatant was collected and stored in −80c.

[0586] Cell-free DNA was extracted from 1-4 mL of plasma using the QIAsymphony liquid handling robot (Qiagen) and treated with bisulfite (Zymo Research). DNA concentration was measured using Qubit High Sensitive double-strand molecular probes (Invitrogen). Bisulfite-treated DNA was PCR amplified using primers specific for bisulfite-treated DNA but independent of methylation status at monitored CpG sites.

[0587] Primers were bar-coded, allowing the mixing of samples from different individuals when sequencing products. We used a multiplex 2-step PCR protocol. Sequencing was performed on PCR products using MiSeq Reagent Kit v2 (MiSeq, Illumina method) or NextSeq 500/550 v2 sequencing reagent kits. Sequenced reads were separated by barcode, aligned to the target sequence, and analyzed using custom scripts written and implemented in Matlab. Reads were quality filtered based on Illumina quality scores. Reads were identified by having at least 80%/o similarity to target sequences and containing all the expected CpGs in the sequence. CpGs were considered methylated if “CG” was read and were considered unmethylated if “TG” was read. The efficiency of bisulfite conversion was assessed by analyzing the methylation of non-CpG cytosines.

[0588] Lung epithelium sorting. Fresh surgical samples of alveolar and bronchial lung were dissociated. Alveolar and bronchial epithelial isolated cells were sorted by FACs using CD45 eFluor 450, CD31 eFluor 450 and CD234A eFluor 450 (eBioscience) and CD326 (Miltenyi) antibodies.

### Results

### Methylomes of Alveolar and Bronchial Epithelial Cells

[0589] Previous studies have characterized the methylomes of unsorted or laser-captured lung tissue, using either Illumina BeadChip arrays (which cover up to 3% of the genome) or shallow whole genome bisulfite sequencing. Such preparations typically contain mixtures of lung epithelial cells and other cell types (e.g., endothelial cells, pericytes, fibroblasts, blood cells). Importantly, non-epithelial cell types vary in their proportion in lung tissue and can even constitute the majority population, complicating the extraction of lung epithelium-specific methylation markers from such datasets. To overcome this limitation, we sorted ultra-pure populations of lung epithelial cells from fresh surgical material, using an antibody against the Epithelial Cell Adhesion Molecule (EpCAM) as a cell surface marker. The starting material was a piece of lung tissue, from a bronchial area or from a distal alveolar area. The tissue fragments were typically obtained during surgery for removal of lung cancer, from an area as far as possible from the tumor. We dissociated the tissue to single cells, stained for EpCAM, sorted EpCAM+ and EpCAM-cells using flow cytometry and prepared RNA and genomic DNA from sorted cells. Quantitative RT-PCR for EpCAM confirmed that the EpCAM+ population was indeed highly enriched for epithelial cells. We then subjected genomic DNA from bronchial epithelial cells (n=3 donors) and from alveolar epithelial cells (n=3 donors) to whole-genome bisulfite sequencing, with an average coverage of 30×.

[0590] Analysis of the resulting methylomes revealed a high similarity between preparations of the same cell type from different individuals, consistent with the conserved nature of cell-type specific methylomes, and supporting the conclusion that the preparations represented highly purified epithelial cells (FIG. 9A).

[0591] We compared the lung alveolar and bronchial methylomes to an extensive atlas of human cell type methylomes, containing >200 methylomes and representing 40 different cell types, and identified differentially methylated regions that are uniquely methylated or unmethylated in either lung cell type, compared with all other cell types. Consistent with the different functions of bronchial and alveolar cells, the similarity between their methylomes was limited: Out of ˜2400 regions that are differentially methylated in the lung compared with other tissues, only ˜140 loci (5.8%) were shared among bronchial and alveolar cells (FIG. 9A). We subjected the methylomes to an unsupervised hierarchical clustering, and found that the samples from each of the two cell types tightly cluster within themselves. Interestingly, the bronchial methylomes clustered together with methylomes of larynx epithelial cells, suggesting that bronchial and larynx epithelial cells are more similar to each other than to lung alveolar cells. We also observed an intriguing similarity between the methylomes of lung cells and the methylomes of bladder and prostate epithelial cells. In addition, hundreds of loci were uniquely methylated or unmethylated in lung alveolar (˜1,600 loci) or bronchial (˜700 loci) epithelial cells, compared with all other tissues in the atlas, apparently underlying the epigenetic basis for unique gene expression programs of these cell types. All together, we identified about 2,500 loci that have a lung-specific methylation pattern, mostly unmethylated in lung epithelium and methylated elsewhere. Initial computational analysis of loci specifically unmethylated in lung epithelial cells revealed enrichment for gene promoters and enhancers, overlapping regulatory histone marks such as histone H3 lysine 27 acetylation (H3K27ac), and the enhancer mark histone H3 lysine 4 monomethylation (H3K4mel). Lung unmethylated regions are also enriched 3-10 fold for the presence of enhancers based on genome-wide annotation of lung chromatin (FIG. 9B-C).

[0592] Next, we used GREAT to associate differentially methylated regions with nearby genes and identify enrichment for specific biological functions. Genomic regions specifically unmethylated in either alveolar or bronchial epithelial cells were enriched near gene sets that relate to lung biology, indicating that at least some of the loci specifically unmethylated in lung epithelium are promoters or proximal enhancers of lung-specific genes (FIG. 1D). Some examples of genes that reside immediately adjacent to loci with lung-specific hypomethylation include lung transcriptional regulators Eya1 and Nkx2.1, and the surfactant B gene SFTPB. However, most genes adjacent to loci unmethylated in lung were expressed in multiple tissues other than the lung, suggesting that the unmethylated loci represent either a distal enhancer of another gene, or a lung-specific enhancer of a gene with broad expression.

[0593] Finally, we used the bronchial and alveolar methylomes, along with other methylomes in our atlas, to deconvolute previously-published methylomes of alveolar and bronchial tissue, obtained by laser capture microscopy. This analysis revealed that the published alveolar methylomes contained 20-30% alveolar DNA, mixed with DNA of vascular endothelial cells, fibroblasts and blood cells. The published bronchial methylomes had varied contribution of bronchial DNA, with ˜50% of the DNA in fact derived from alveolar cells. These findings highlight the value of sorted cells for obtaining lung epithelial cell methylomes.

### Characterization of Lung-Specific Methylation Markers

[0594] To generate methylation markers for targeted cfDNA analysis, we selected 17 genomic loci (Table 3) that were uniquely unmethylated or hypermethylated in lung epithelial cells, including loci that identify specifically bronchial cells (n=3) alveolar cells (n=12) or both types of lung epithelial cells (n=2), and prepared PCR primers to amplify these loci in two multiplex PCR reactions after bisulfite conversion (see methods). Sequencing the PCR products that were amplified from a panel of tissues and cell types confirmed the extreme specificity of alveolar, bronchial and general lung epithelium methylation markers (FIG. 10A). We also examined the status of these markers in hundreds of lung cancer methylomes, available through TCGA. Lung cancers retained the methylation patterns of common lung markers. Lung adenocarcinoma DNA had alveolar but not bronchial methylation markers, while lung squamous carcinoma contained both alveolar and bronchial markers, consistent with the presumed tissue origins of these tumors (FIG. 10B). These findings support the relevance of our universal lung markers for lung cancer analysis.

[0595] To assess the ability of markers to identify rare lung DNA when present within a large excess of non-lung DNA, we spiked different amounts of alveolar or bronchial DNA into leukocyte DNA and assessed the fraction of lung DNA using the methylation assay. Lung DNA could be identified when it contributed as little as 0.04% of the DNA in a mixture, or when there were only 1.25 lung genome equivalents in the mixtures (FIG. 10C). Finally, to assess the reproducibility of the assay we ran 19 plasma samples in duplicates or triplicates, and found an excellent correlation (FIG. 10D).

[0596] These data establish a cocktail of methylation markers that can identify lung epithelial DNA from essentially any human donor with extreme sensitivity, and specificity that is retained even in lung cancer.

### Lung-Derived DNA in Healthy Donors

[0597] Epithelial cells in the lung turn over at an estimated rate of 0.83% per day. Given that the number of epithelial cells in the human lung is ˜10¹¹, about 10⁹ cells die each day. The DNA of such dying cells could in principle be eliminated locally by phagocytes, released to blood, or released to the air spaces of the lung. To distinguish between these possibilities we measured the presence of lung DNA in plasma samples from 30 healthy individuals. Most samples had no DNA molecules carrying the methylation signature of lung epithelium, with the exception of one individual that had 3.7% of cfDNA derived from the lung (31 GE/ml, calculated as the average value for all lung markers), and one individual that had 0.25% of cfDNA derived from the lung (0.83 GE/ml). Both donors did not have obvious medical conditions that could explain the high levels of lung cfDNA (FIG. 11A-B). We then obtained material from a broncho-alveolar lavage (BAL), a procedure whereby a lobe of the lung is washed with a large volume of saline. We extracted DNA from the BAL fluid of individuals that underwent the procedure for suspicion of cancer or other pathologies, but turned out to have either no pathology, or mild pneumonitis. The BAL DNA from 6 out of 6 donors contained lung DNA including both alveolar, bronchial and general lung markers. On average, 2.98% of BAL DNA was derived from lung epithelium. The rest of BAL DNA was derived from immune cells.

[0598] These findings indicate that under normal conditions, dying lung cells release DNA fragments to the air spaces but not to blood. We propose that this situation reflects lung topology, which dictates the route of clearance of material from dying. This is similar to what is observed in the intestine, where material from dying cells during normal turnover reaches the lumen of gut rather than the blood.

Lung-Derived cfDNA in Patients with Advanced Lung Cancer

[0599] Having defined the extremely low levels of lung cfDNA in the plasma of healthy donors, we next assessed the levels of lung-derived cfDNA in the plasma of lung cancer patients, using the same cocktail of normal lung epithelial cell markers. We used 26 samples from patients with advanced lung cancer including adenocarcinoma, squamous cell carcinoma (SCC), small cell carcinoma (SCLC) and Poorly Differentiated Carcinoma. The patients had varying tumor burdens and were mostly under treatment. The average concentration of normal lung cfDNA in these patients was 36 GE/ml plasma (p<0.0001 compared with healthy donors) (FIG. 12A-B), and a receiver operating characteristic (ROC) curve was able to distinguish healthy from cancer plasma with an area under the curve (AUC) of 0.835 (FIG. 12B).

[0600] While this was a small cohort intended for a proof of concept showing presence of normal lung methylation markers in the plasma of cancer patients, we observed an interesting link between the specific lung markers observed and the presumed tissue of origin of cancer. cfDNA from patients with adenocarcinoma, thought to derive from type 2 pneumocytes residing in the alveoli, showed mostly alveolar markers. In contrast, samples from patients with SCC, thought to derive from bronchi, had a stronger representation of bronchial cfDNA markers (FIG. 12A). Nonetheless, all marker classes—alveolar, bronchial, and common—have contributed to the signal observed in the plasma of cancer patients.

Lung-Derived cfDNA in Patients Undergoing Bronchoscopy

[0601] An important test for a cfDNA biomarker is its ability to identify pathology prior to obtaining definitive knowledge from other sources. To perform such a test, we established a prospective cohort of individuals that were referred to bronchoscopy for suspicion of cancer. We obtained plasma samples from 51 individuals just prior to bronchoscopy, prepared cfDNA and assessed the presence of lung-derived cfDNA blindly. We then compared the results to the outcome of histopathological analysis of the bronchoscopy reported later. As shown in FIG. 12C, abnormally high levels of lung cfDNA were identified in 25 out of 36 patients diagnosed as having lung cancer. As expected, some patients with other lung pathologies also had elevated lung cfDNA (5 out of 15). Overall, the plasma of bronchoscopy patients with any lung disease had significantly higher levels of lung cfDNA than healthy individuals (FIG. 12D). The ROC curve for distinguishing patients with lung pathology from healthy individuals based on lung cfDNA had an AUC of 0.8615 (FIG. 12D, right panel). At 70% specificity, lung cfDNA had an 82.35% sensitivity for detection of lung diseases among healthy individuals (see below).

### The Value of Multiplexing Markers

[0602] Multiplexing cfDNA markers—that is, assessing the presence of multiple independent biomarkers in the same plasma sample—is seen as a promising approach for sensitizing liquid biopsies to allow for early detection of disease. The abundance of universal DNA methylation markers for any given tissue permits in principle to multiplex and hence sensitize methylation-based cfDNA markers, potentially beyond what is afforded by mutation-based analysis. We took advantage of our lung-specific methylation cocktail to assess empirically whether the use of additional markers increases the likelihood of identifying lung-derived cfDNA in patients with lung pathology, without compromising specificity. As shown in FIG. 13, the best methylation marker produced an AUC of 0.75 for distinguishing the plasma of patients with any lung disease from the plasma of healthy people. Adding additional markers further increased the AUC, with a combination of 17 markers providing improved sensitivity over the combination of 3 markers (FIG. 13).

Lung cfDNA in Patients with COPD

[0603] We next assessed the presence of lung-derived cfDNA in the plasma of patients with COPD, a lung disease for which there are currently no circulating biomarkers. This is interesting and challenging for several reasons. First, lung epithelium is not mutated in COPD, precluding the use of somatic mutations as biomarkers. Second, it is not clear if lung damage in COPD is sufficient to reverse tissue topology and release cfDNA to blood rather than to the air spaces. For example, in Crohn's disease we found that the damage to intestinal epithelial cells does not lead to cfDNA release to plasma.

[0604] We obtained 77 plasma samples from patients with exacerbated (n=39) or stable (N=38) COPD, and determined blindly the levels of general and lung-specific cfDNA in these samples. Patients with exacerbated COPD had significantly more lung-specific cfDNA than patients with a stable disease, but less than patients with advanced lung cancer (FIG. 14A-B). We assessed multiple parameters that could potentially underlie the difference in lung cfDNA levels between patients with exacerbated and stable disease. Lung cfDNA did not correlate with patient age, gender, smoking habits, and the presence of emphysema (Table 4). This suggests that lung cfDNA truly reflects the severity of lung disease. In support of this idea, COPD patients who have died up to 14 months after sampling (n=12) had significantly higher levels of lung cfDNA at the time of sampling (FIG. 14C).

TABLE 4
Correlations between king cfDNA and clinical/
demographic parameters among COPD patients

| | p value test |
|---|---|
| | (relative to |
| | cfDNA sum |
| Condition | ad markers) |
| Exacerbated vs stable | 0.018 |
| FEV1 LITERS | 0.019 |
| Future exacerbation vs none | 0.0255 |
| Dead vs Alive | 0.0365 |
| Age | 0.22 |
| Emphysema | 0.115 |
| Male vs Female | 0.1555 |
| FEV1 Per | 0.367 |
| Smoker vs non-smoker | 0.376 |

[0605] Our analysis of the methylomes of human alveolar and bronchial epithelial cells led to several insights. First, whole genome bisulfite sequencing of highly purified epithelial cells, sorted from primary surgical preparations, revealed the complete methylation landscape of lung epithelial cells, which comprise only a minority population in mixed preparations of previously reported lung tissue. Second, a global comparison of lung epithelial cell methylomes to other cell type-specific methylomes revealed that alveolar and bronchial epithelial cells are highly divergent. In fact, bronchial epithelial cells are more similar to epithelial cells of the larynx than to alveolar cells, reflecting their common origin as well as function in conductance of air. The divergence of alveolar cell methylomes from bronchial cells likely reflects the complex differentiation pathway of terminal branching morphogenesis in the lung. Third, most loci showing a lung-specific methylation pattern are unmethylated in lung epithelial cells and methylated elsewhere, and are enriched for lung-specific gene enhancers. The finding that lung-specific methylation markers are typically lung-specific enhancers is consistent with previous studies in other systems, for example our previous demonstration that pancreatic beta cell methylation markers are enriched for beta cell-specific gene enhancers. Interestingly, the genes that are closest to lung-specific methylation markers are enriched for lung-related gene sets, even though the expression of individual genes in these gene sets is typically not restricted to the lung. These findings suggest that lung-specific enhancers (demethylated in lung cells) regulate lung expression of genes, while other enhancers control the expression of these genes in other tissues.

[0606] The detailed analysis of lung methylomes allowed the identification of specific loci that can serve as markers for identification of lung DNA in a mixture. Importantly, our lung-specific markers retain their typical methylation pattern in lung cancer, suggesting utility as universal biomarkers.

[0607] How tissues clear debris from dying cells is an important yet neglected aspect of tissue topology and dynamics. In the case of normal lung epithelium, genomic DNA from dead epithelial cells could in principle be released to blood (as in the case of the liver), or to the air spaces (analogous to the release of DNA from intestinal epithelial cells to the lumen of the gut). Our data strongly support the latter possibility, that is the release of DNA from normal lung during tear and wear into the air spaces, where it is likely digested by lung macrophages. This arrangement has important implications. First, DNA extracted from broncho-alveolar lavage can inform on lung epithelial cell genome and epigenome. Second, pathologic disruption of tissue architecture as occurs in cancer can release lung DNA to blood, which can be detected on the background of a very low healthy baseline.

[0608] Indeed, we were able to detect our universal lung-specific methylation markers in the plasma of patients with advanced lung cancer. In addition, further study in patients undergoing bronchoscopy suggests that lung methylation markers can be identified in cfDNA as a biomarker of lung pathology, including cancer.

[0609] Perhaps the most interesting and unique aspect of lung methylation markers is their ability to report on non-cancer lung pathologies involving lung cell death, for which there are currently virtually no circulating biomarkers. Indeed, we found that patients with COPD release more lung cfDNA to blood during exacerbation of the disease, and that the levels of lung cfDNA in such patients predicts mortality.

[0610] In summary, this example describes the complete methylomes of lung alveolar and bronchial epithelial cells, and use the information present in these methylomes for developing circulating biomarkers, opening a novel minimally-invasive window into human lung turnover dynamics.

[0611] Unless otherwise defined, all technical and scientific terms used herein have the same meaning as commonly understood by one of ordinary skill in the art to which this invention belongs.

[0612] The inventions illustratively described herein may suitably be practiced in the absence of any element or elements, limitation or limitations, not specifically disclosed herein. Thus, for example, the terms “comprising”, “including,” “containing”, etc. shall be read expansively and without limitation. Additionally, the terms and expressions employed herein have been used as terms of description and not of limitation, and there is no intention in the use of such terms and expressions of excluding any equivalents of the features shown and described or portions thereof, but it is recognized that various modifications are possible within the scope of the invention claimed.

[0613] Thus, it should be understood that although the present invention has been specifically disclosed by preferred embodiments and optional features, modification, improvement and variation of the inventions embodied therein herein disclosed may be resorted to by those skilled in the art, and that such modifications, improvements and variations are considered to be within the scope of this invention. The materials, methods, and examples provided here are representative of preferred embodiments, are exemplary, and are not intended as limitations on the scope of the invention.

[0614] The invention has been described broadly and generically herein. Each of the narrower species and subgeneric groupings falling within the generic disclosure also form part of the invention. This includes the generic description of the invention with a proviso or negative limitation removing any subject matter from the genus, regardless of whether or not the excised material is specifically recited herein.

[0615] In addition, where features or aspects of the invention are described in terms of Markush groups, those skilled in the art will recognize that the invention is also thereby described in terms of any individual member or subgroup of members of the Markush group.

[0616] All publications, patent applications, patents, and other references mentioned herein are expressly incorporated by reference in their entirety, to the same extent as if each were incorporated by reference individually. In case of conflict, the present specification, including definitions, will control.

[0617] It is to be understood that while the disclosure has been described in conjunction with the above embodiments, that the foregoing description and examples are intended to illustrate and not limit the scope of the disclosure. Other aspects, advantages and modifications within the scope of the disclosure will be apparent to those skilled in the art to which the disclosure pertains.

1. A method for identifying that a biological sample comprises DNA from a cell type, the method comprising:
detecting the methylation status of each of at least four CpG sites of a target DNA fragment in the biological sample; and
identifying the target DNA fragment as being:
(1) from a human oral, larynx or esophageal epithelial cell when no more than 40% of the CpG sites are methylated, wherein at least one of the CpG sites is located within a human genomic sequence selected from the group consisting of SEQ ID NO: 1-90, or when 50% or more of the CpG sites are methylated, wherein at least one of the CpG sites is located within a human genomic sequence selected from the group consisting of SEQ ID NO: 126-133;
(2) from a human gastric epithelial cell when no more than 40% of the CpG sites are methylated, wherein at least one of the CpG sites is located within a human genomic sequence selected from the group consisting of SEQ ID NO: 151-330, or when 50% c or more of the CpG sites are methylated, wherein at least one of the CpG sites is located within a human genomic sequence selected from the group consisting of SEQ ID NO: 379-401;
(3) from a human small intestine epithelial cell when no more than 40% of the CpG sites are methylated, wherein at least one of the CpG sites is located within a human genomic sequence selected from the group consisting of SEQ ID NO: 429-527, or when 50% or more of the CpG sites are methylated, wherein at least one of the CpG sites is located within a human genomic sequence selected from the group consisting of SEQ ID NO: 555-564;
(4) from a human colon epithelial cell when no more than 40% of the CpG sites are methylated, wherein at least one of the CpG sites is located within a human genomic sequence selected from the group consisting of SEQ ID NO: 580-657, or when 50% or more of the CpG sites are methylated, wherein at least one of the CpG sites is located within a human genomic sequence selected from the group consisting of SEQ ID NO: 705-715;
(5) from a human colon fibroblast when no more than 40% of the CpG sites are methylated, wherein at least one of the CpG sites is located within a human genomic sequence selected from the group consisting of SEQ ID NO: 730-732, or when 50% or more of the CpG sites are methylated, wherein at least one of the CpG sites is located within a human genomic sequence selected from the group consisting of SEQ ID NO: 733-739;
(6) from a human gallbladder epithelial cell when no more than 40% of the CpG sites are methylated, wherein at least one of the CpG sites is located within a human genomic sequence selected from the group consisting of SEQ ID NO: 742-829, or when 50% or more of the CpG sites are methylated, wherein at least one of the CpG sites is located within a human genomic sequence selected from the group consisting of SEQ ID NO: 868-875;
(7) from a human liver hepatocyte when no more than 40% of the CpG sites are methylated, wherein at least one of the CpG sites is located within a human genomic sequence selected from the group consisting of SEQ ID NO: 877-980, or when 50% or more of the CpG sites are methylated, wherein at least one of the CpG sites is located within a human genomic sequence selected from the group consisting of SEQ ID NO: 1003-1018;
(8) from a human pancreatic acinar cell when no more than 40% of the CpG sites are methylated, wherein at least one of the CpG sites is located within a human genomic sequence selected from the group consisting of SEQ ID NO: 1028-1112, or when 50% or more of the CpG sites are methylated, wherein at least one of the CpG sites is located within a human genomic sequence selected from the group consisting of SEQ ID NO: 1156-1161;
(9) from a human pancreatic alpha cell when no more than 40% of the CpG sites are methylated, wherein at least one of the CpG sites is located within a human genomic sequence selected from the group consisting of SEQ ID NO: 1181-1282, or when 50% or more of the CpG sites are methylated, wherein at least one of the CpG sites is located within a human genomic sequence selected from the group consisting of SEQ ID NO: 1307-1315;
(10) from a human pancreatic beta cell when no more than 40% of the CpG sites are methylated, wherein at least one of the CpG sites is located within a human genomic sequence selected from the group consisting of SEQ ID NO: 1332-1440, or when 50% or more of the CpG sites are methylated, wherein at least one of the CpG sites is located within a human genomic sequence selected from the group consisting of SEQ ID NO: 1461-1471;
(11) from a human pancreatic delta cell when no more than 40% of the CpG sites are methylated, wherein at least one of the CpG sites is located within a human genomic sequence selected from the group consisting of SEQ ID NO: 1486-1594, or when 50% or more of the CpG sites are methylated, wherein at least one of the CpG sites is located within a human genomic sequence selected from the group consisting of SEQ ID NO: 1614-1624; or
(12) from a human pancreatic ductal cell when no more than 40% of the CpG sites are methylated, wherein at least one of the CpG sites is located within a human genomic sequence selected from the group consisting of SEQ ID NO: 1639-1742, or when 50% or more of the CpG sites are methylated, wherein at least one of the CpG sites is located within a human genomic sequence selected from the group consisting of SEQ ID NO: 1768-1779.

2. The method of claim 1, further comprising detecting the methylation status of each of at least four CpG sites of a second target DNA fragment in the biological sample, and identifying the second target DNA fragment as being:
(1′) from a human oral, larynx or esophageal epithelial cell when no more than 40% of the CpG sites are methylated, wherein at least one of the CpG sites is located within a human genomic sequence selected from the group consisting of SEQ ID NO: 1-125, or when 50% or more of the CpG sites are methylated, wherein at least one of the CpG sites is located within a human genomic sequence selected from the group consisting of SEQ ID NO: 126-150;
(2′) from a human gastric epithelial cell when no more than 40% of the CpG sites are methylated, wherein at least one of the CpG sites is located within a human genomic sequence selected from the group consisting of SEQ ID NO: 151-378, or when 50% or more of the CpG sites are methylated, wherein at least one of the CpG sites is located within a human genomic sequence selected from the group consisting of SEQ ID NO: 379-428;
(3′) from a human small intestine epithelial cell when no more than 40% of the CpG sites are methylated, wherein at least one of the CpG sites is located within a human genomic sequence selected from the group consisting of SEQ ID NO: 429-554, or when 50% or more of the CpG sites are methylated, wherein at least one of the CpG sites is located within a human genomic sequence selected from the group consisting of SEQ ID NO: 555-579;
(4′) from a human colon epithelial cell when no more than 40% of the CpG sites are methylated, wherein at least one of the CpG sites is located within a human genomic sequence selected from the group consisting of SEQ ID NO: 580-704, or when 50% or more of the CpG sites are methylated, wherein at least one of the CpG sites is located within a human genomic sequence selected from the group consisting of SEQ ID NO: 705-729;
(5′) from a human colon fibroblast when no more than 40% of the CpG sites are methylated, wherein at least one of the CpG sites is located within a human genomic sequence selected from the group consisting of SEQ ID NO: 730-732, or when 50% or more of the CpG sites are methylated, wherein at least one of the CpG sites is located within a human genomic sequence selected from the group consisting of SEQ ID NO: 733-741;
(6′) from a human gallbladder epithelial cell when no more than 40% of the CpG sites are methylated, wherein at least one of the CpG sites is located within a human genomic sequence selected from the group consisting of SEQ ID NO: 742-867, or when 50% or more of the CpG sites are methylated, wherein at least one of the CpG sites is located within a human genomic sequence selected from the group consisting of SEQ ID NO: 868-876;
(7′) from a human liver hepatocyte when no more than 40% of the CpG sites are methylated, wherein at least one of the CpG sites is located within a human genomic sequence selected from the group consisting of SEQ ID NO: 877-1002, or when 50% or more of the CpG sites are methylated, wherein at least one of the CpG sites is located within a human genomic sequence selected from the group consisting of SEQ ID NO: 1003-1027;
(8′) from a human pancreatic acinar cell when no more than 40% of the CpG sites are methylated, wherein at least one of the CpG sites is located within a human genomic sequence selected from the group consisting of SEQ ID NO: 1028-1155, or when 50% or more of the CpG sites are methylated, wherein at least one of the CpG sites is located within a human genomic sequence selected from the group consisting of SEQ ID NO: 1156-1180;
(9′) from a human pancreatic alpha cell when no more than 40% of the CpG sites are methylated, wherein at least one of the CpG sites is located within a human genomic sequence selected from the group consisting of SEQ ID NO: 1181-1306, or when 50% or more of the CpG sites are methylated, wherein at least one of the CpG sites is located within a human genomic sequence selected from the group consisting of SEQ ID NO: 1307-1331;
(10′) from a human pancreatic beta cell when no more than 40% of the CpG sites are methylated, wherein at least one of the CpG sites is located within a human genomic sequence selected from the group consisting of SEQ ID NO: 1332-1460, or when 50% or more of the CpG sites are methylated, wherein at least one of the CpG sites is located within a human genomic sequence selected from the group consisting of SEQ ID NO: 1461-1485;
(11′) from a human pancreatic delta cell when no more than 40% of the CpG sites are methylated, wherein at least one of the CpG sites is located within a human genomic sequence selected from the group consisting of SEQ ID NO: 1486-1613, or when 50% or more of the CpG sites are methylated, wherein at least one of the CpG sites is located within a human genomic sequence selected from the group consisting of SEQ ID NO: 1614-1638; or
(12′) from a human pancreatic ductal cell when no more than 40% of the CpG sites are methylated, wherein at least one of the CpG sites is located within a human genomic sequence selected from the group consisting of SEQ ID NO: 1639-1767, or when 50% or more of the CpG sites are methylated, wherein at least one of the CpG sites is located within a human genomic sequence selected from the group consisting of SEQ ID NO: 1768-1792.

3. The method of claim 1, wherein the biological sample comprises blood, plasma, serum, semen, milk, urine, saliva or cerebral spinal fluid, acquired from a human subject.

4. The method of claim 3, wherein the target DNA fragment is a cell-free DNA fragment.

5. The method of claim 4, wherein identifying the cell-free DNA fragment as being from a cell type comprises detecting abnormal cell death of the cell type, or a disease relating to the cell type.

6. The method of claim 4, further comprising identifying the human subject as having or likely having an injury, inflammation, or cancer at the corresponding cell type.

7. The method of claim 5, further comprising identifying the human subject as having or likely having a pancreatic disease or condition when the amount of the cell-free DNA fragment identified as being from a pancreatic cell type is greater than a reference cut-off value.

8. The method of claim 7, wherein the pancreatic disease or condition is diabetes, inflammation, or cancer.

9. A method for identifying that a biological sample comprises DNA from a cell type, the method comprising:
detecting the methylation status of each of at least four CpG sites of a target DNA fragment in the biological sample; and
identifying the target DNA fragment as being:
(1) from a human endometrium epithelial cell when no more than 40% of the CpG sites are methylated, wherein at least one of the CpG sites is located within a human genomic sequence selected from the group consisting of SEQ ID NO: 1793-1864, or when 50% or more of the CpG sites are methylated, wherein at least one of the CpG sites is located within a human genomic sequence selected from the group consisting of SEQ ID NO: 1893-1905;
(2) from a human fallopian epithelial cell when no more than 40% of the CpG sites are methylated, wherein at least one of the CpG sites is located within a human genomic sequence selected from the group consisting of SEQ ID NO: 1918-2022, or when 50% or more of the CpG sites are methylated, wherein at least one of the CpG sites is located within a human genomic sequence selected from the group consisting of SEQ ID NO: 2043-2061;
(3) from a human kidney epithelial cell when no more than 40% of the CpG sites are methylated, wherein at least one of the CpG sites is located within a human genomic sequence selected from the group consisting of SEQ ID NO: 2068-2141, or when 50% or more of the CpG sites are methylated, wherein at least one of the CpG sites is located within a human genomic sequence selected from the group consisting of SEQ ID NO: 2195-2209;
(4) from a human bladder epithelial cell when no more than 40% of the CpG sites are methylated, wherein at least one of the CpG sites is located within a human genomic sequence selected from the group consisting of SEQ ID NO: 2220-2298, or when 50% or more of the CpG sites are methylated, wherein at least one of the CpG sites is located within a human genomic sequence selected from the group consisting of SEQ ID NO: 2346-2350;
(5) from a human prostate epithelial cell when no more than 40% of the CpG sites are methylated, wherein at least one of the CpG sites is located within a human genomic sequence selected from the group consisting of SEQ ID NO: 2371-2476, or when 50% or more of the CpG sites are methylated, wherein at least one of the CpG sites is located within a human genomic sequence selected from the group consisting of SEQ ID NO: 2496-2500;
(6) from a human breast basal epithelial cell when no more than 40% of the CpG sites are methylated, wherein at least one of the CpG sites is located within a human genomic sequence selected from the group consisting of SEQ ID NO: 2521-2616, or when 50% or more of the CpG sites are methylated, wherein at least one of the CpG sites is located within a human genomic sequence selected from the group consisting of SEQ ID NO: 2652-2659; or
(7) from a human breast luminal epithelial cell when no more than 40% of the CpG sites are methylated, wherein at least one of the CpG sites is located within a human genomic sequence selected from the group consisting of SEQ ID NO: 2677-2748, or when 50% or more of the CpG sites are methylated, wherein at least one of the CpG sites is located within a human genomic sequence selected from the group consisting of SEQ ID NO: 2803-2815.

10. The method of claim 9, wherein the biological sample comprises blood, plasma, serum, semen, milk, urine, saliva or cerebral spinal fluid, acquired from a human subject.

11. The method of claim 10, wherein the target DNA fragment is a cell-free DNA fragment.

12. The method of claim 11, wherein identifying the cell-free DNA fragment as being from a cell type indicates abnormal cell death of the cell type, or a disease relating to the cell type.

13. The method of claim 11, further comprising identifying the human subject as having or likely having an injury, inflammation, or cancer at the corresponding genito-urinary cell.

14. A method for identifying that a biological sample comprises DNA from a cell type, the method comprising:
detecting the methylation status of each of at least four CpG sites of a target DNA fragment in the biological sample; and
identifying the target DNA fragment as being:
(1) from a human lung alveolar epithelial cell when no more than 40% of the CpG sites are methylated, wherein at least one of the CpG sites is located within a human genomic sequence selected from the group consisting of SEQ ID NO: 2828-2899, or when 50% or more of the CpG sites are methylated, wherein at least one of the CpG sites is located within a human genomic sequence selected from the group consisting of SEQ ID NO: 2954-2960;
(2) from a human lung bronchial epithelial cell when no more than 40% of the CpG sites are methylated, wherein at least one of the CpG sites is located within a human genomic sequence selected from the group consisting of SEQ ID NO: 2979-3087, or when 50% or more of the CpG sites are methylated, wherein at least one of the CpG sites is located within a human genomic sequence selected from the group consisting of SEQ ID NO: 3105-3109;
(3) from a human heart cardiomyocyte when no more than 40% of the CpG sites are methylated, wherein at least one of the CpG sites is located within a human genomic sequence selected from the group consisting of SEQ ID NO: 3130-3223, or when 50% or more of the CpG sites are methylated, wherein at least one of the CpG sites is located within a human genomic sequence selected from the group consisting of SEQ ID NO: 3255-3266;
(4) from a human heart fibroblast when no more than 40% of the CpG sites are methylated, wherein at least one of the CpG sites is located within a human genomic sequence selected from the group consisting of SEQ ID NO: 3280-3394, or when 50% or more of the CpG sites are methylated, wherein at least one of the CpG sites is located within a human genomic sequence selected from the group consisting of SEQ ID NO: 3408-3414; or
(5) from a human vascular endothelial cell when no more than 40% of the CpG sites are methylated, wherein at least one of the CpG sites is located within a human genomic sequence selected from the group consisting of SEQ ID NO. 3433-3547, or when 50% or more of the CpG sites are methylated, wherein at least one of the CpG sites is located within a human genomic sequence selected from the group consisting of SEQ ID NO: 3560-3579.

15. The method of claim 14, wherein the biological sample comprises blood, plasma, serum, semen, milk, urine, saliva or cerebral spinal fluid, acquired from a human subject.

16. The method of claim 15, wherein the target DNA fragment is a cell-free DNA fragment.

17. The method of claim 16, wherein identifying the cell-free DNA fragment as being from a cell type indicates abnormal cell death of the cell type, or a disease at the corresponding cardio-vascular-pulmonary cell.

18. The method of claim 1, further comprising detecting a genetic variation in the target DNA fragment, thereby determining that the cell from which the target DNA fragment is released contains the genetic variation.

19. The method of claim 5, further comprising administering to the patient an agent useful for treating the identified disease or condition.

The application's sequence listing, which the Patent Office published only in electronic form, follows.

SEQUENCE LISTING (7090 sequences)

SEQ ID NO: 1 - DNA, 11 bp, Homo sapiens
  misc_feature 1..11: note = U/M: U (0.05:0.94) in Oral, Larynx and Esophageal epithelium
  misc_feature 1..11: note = source = chr1:232372658-232372668; Gene: SIPA1L2 (Intergenic)
  source 1..11: mol_type = genomic DNA
cgcacgcgcgc

SEQ ID NO: 2 - DNA, 283 bp, Homo sapiens
  misc_feature 1..283: note = U/M: U (0.05:0.94) in Oral, Larynx and Esophageal epithelium
  misc_feature 1..283: note = source = chr9:119238427-119238709; Gene: ASTN2 (intron)
  source 1..283: mol_type = genomic DNA
cggatggcccgaggtgttccttggcttgaggcggcatcactctaatctcagcctctgtcttcacatgccttctttgctctgtcttctcagagcggcatcagtcactgaattaaggaattaacttaatccagtattacctcatcttgatccttaagtaaatacatctgcaaagatgatttccaaataaagccccatcccaaggtttcaggtagatgtgaatttttcaaggacactgttcaacccactgcaatccatcctctcacttcctcagaagacttgcagc

SEQ ID NO: 3 - DNA, 225 bp, Homo sapiens
  misc_feature 1..225: note = U/M: U (0.03:0.91) in Oral, Larynx and Esophageal epithelium
  misc_feature 1..225: note = source = chr22:45557574-45557798; Gene: LOC100506714 (intron)
  source 1..225: mol_type = genomic DNA
cgcagtctcactgtattacccagcctggagtgcaatggcgtgattttggctcgctgcaacctctgcctcgcgggttcaagtgattctcctgcttcagcctcccaagtagctgagattacaggcatgtgccaccacgccccgctaatttttgtatttttagtagagatgaggtttcaccatgttggtcgggctggtctcccactcctgacctcaggtgatgcaccc

SEQ ID NO: 4 - DNA, 95 bp, Homo sapiens
  misc_feature 1..95: note = U/M: U (0.05:0.9) in Oral, Larynx and Esophageal epithelium
  misc_feature 1..95: note = source = chr4:69018630-69018724; Gene: TMPRSS11F (Intergenic)
  source 1..95: mol_type = genomic DNA
cgtgtgtgtgcatgtgcgtgcgtgcaatagaacaagaacttgggaggggagcaaaaattacacgcttgagtgttttaagcattttgttttgtggc

SEQ ID NO: 5 - DNA, 402 bp, Homo sapiens
  misc_feature 1..402: note = U/M: U (0.07:0.9) in Oral, Larynx and Esophageal epithelium
  misc_feature 1..402: note = source = chr12:53251350-53251751; Gene: KRT78 (Intergenic)
  source 1..402: mol_type = genomic DNA
cggtgacctccctgatccaggcaccatggaagcttctctcagtttttggcttttgcagctgagaagtacatgctgaattctaacccaggatatcctgactatcctgaacatgagtcattcgcattcaacctttaccatcaagccacatcgacattccataggtatgaaggtgtacttaagatttttctttaaatcaaatctaaatcattcacttttttcttatcctgaccctaaacaatgacagccttgaaatcttggcttctgtgtgctaattcttaatgctctaattcatattcaaaaaaaacataactattaagatgtatgacatttggccgggcgcggtggctcacgcctgtaatcccaacactttgggaggccaaggtgcgtggatcacctgaggtc

SEQ ID NO: 6 - DNA, 257 bp, Homo sapiens
  misc_feature 1..257: note = U/M: U (0.08:0.88) in Oral, Larynx and Esophageal epithelium
  misc_feature 1..257: note = source = chr1:55096065-55096321; Gene: ACOT11 (exon,intron)
  source 1..257: mol_type = genomic DNA
cgctggaaggttgtgggtttacgggaatgacggcaaggaacacctggcccgcccagggtggaaaaccccttaaaggcattcttaagccacaaacaaaagcatgagtgatctgtgtcttaagggcgtgttcctgctgcaattaattcggcacatcccttcgtttcccataagggatacttttagttaattcaacatctatagaaacaatgctaatgactggtttgctgttaataaatacgtggataaatctctgttcc

SEQ ID NO: 7 - DNA, 303 bp, Homo sapiens
  misc_feature 1..303: note = U/M: U (0.12:0.91) in Oral, Larynx and Esophageal epithelium
  misc_feature 1..303: note = source = chr7:110559652-110559954; Gene: IMMP2L (intron)
  source 1..303: mol_type = genomic DNA
cggagaggagattgaaccagaaattctcttttaaaaagggttttgaaatgtgcgcattttcttcaatcaaattcacttatttcttgaaaaaaaaatattctaagagtaccattgtgagctaaggcattagggaagataaacataaactgtgatgattgcattaaccaagtgtcaacttgattggattgaaggatgcaaaatagtgttcctgggtgtgtctgtgagggtgttgccgaaggagattaacaattgagtcggtggactgggagaggcagacccatcctcaaactggctgggtactac

SEQ ID NO: 8 - DNA, 216 bp, Homo sapiens
  misc_feature 1..216: note = U/M: U (0.04:0.83) in Oral, Larynx and Esophageal epithelium
  misc_feature 1..216: note = source = chr14:99419301-99419516; Gene: C14orf177 (Intergenic)
  source 1..216: mol_type = genomic DNA
cgccatgtctgggccctacctccaaaaaaaacttacaccaacattaaccggcaagatgtgtttgatttcaaaggattacccttcccctgtaagtattttgagtgcaaaatgctaaatacacaaacacccttaattggtttgttctaatccgccgacttgagcctctctaaaagaatctttgcacttggtctctgcagccaccttgcatttgctgac

SEQ ID NO: 9 - DNA, 86 bp, Homo sapiens
  misc_feature 1..86: note = U/M: U (0.1:0.88) in Oral, Larynx and Esophageal epithelium
  misc_feature 1..86: note = source = chr13:68460537-68460622; Gene: PCDH9 (Intergenic)
  source 1..86: mol_type = genomic DNA
cgcccgtctcagcctctcaaagttctgggattacaggaatgaaccaacgtgcccggctcatcttgtttcatcagtgtggtctttgc

SEQ ID NO: 10 - DNA, 210 bp, Homo sapiens
  misc_feature 1..210: note = U/M: U (0.13:0.91) in Oral, Larynx and Esophageal epithelium
  misc_feature 1..210: note = source = chr10:124095969-124096178; Gene: BTBD16 (exon)
  source 1..210: mol_type = genomic DNA
cgattgcagttccacctaaggtgaatcactctctttgcagagaataaagcacacagacctggaatctccctctgcggtctacgagcacaaccacgtcagcctgcgagcggcacgcctggtgaagtatgagatcagagcagaggccctggttgacggcaagtggcaggagttcaggacaaaccagatcaagcagaagtttgggttgaccac

SEQ ID NO: 11 - DNA, 159 bp, Homo sapiens
  misc_feature 1..159: note = U/M: U (0.16:0.94) in Oral, Larynx and Esophageal epithelium
  misc_feature 1..159: note = source = chr1:249138696-249138854; Gene: ZNF672 (exon)
  source 1..159: mol_type = genomic DNA
cgtgacccttttgcctgtgggatgagctccagcatggggtgaggtacagaagagagacttgaagagcgtgccttgggactcaagcgccaaacctgtaccctagcgagtgtcctactccgcatccgtaatggaaggaaatggtattgttgtttatatgcc

SEQ ID NO: 12 - DNA, 350 bp, Homo sapiens
  misc_feature 1..350: note = U/M: U (0.11:0.88) in Oral, Larynx and Esophageal epithelium
  misc_feature 1..350: note = source = chr11:128518761-128519110; Gene: FLI1 (Intergenic)
  source 1..350: mol_type = genomic DNA
cgtgcgcatctgcccggccctccccagtgttggcagcagccctgaccccatgcctgtacagttggtggactcagggcggagaacggcttccctgggacctgcccggcactagtcacactagcagaagcacataggtgtgggggcagaaatatgtgccttttcttttctttccagaggacttgcaaccttacttttgattttctcttttaattaagggttaatctcagagcattaatttcccaggaggtaagttttctggatatattttattatttgtttttaattatggtagattatgatctaatcttccaaacaaattatcttcttagtttgtcaaggttttcaagtac

SEQ ID NO: 13 - DNA, 107 bp, Homo sapiens
  misc_feature 1..107: note = U/M: U (0.11:0.86) in Oral, Larynx and Esophageal epithelium
  misc_feature 1..107: note = source = chr5:9202217-9202323; Gene: SEMA5A (exon)
  source 1..107: mol_type = genomic DNA
cgcccaccaatatcgttcttgcacacccgggcagctctggagaacactgttttcccacagtcatgctctactgcattttctcggaaaaagaagtaggtaaaatttcc

SEQ ID NO: 14 - DNA, 61 bp, Homo sapiens
  misc_feature 1..61: note = U/M: U (0.23:0.93) in Oral, Larynx and Esophageal epithelium
  misc_feature 1..61: note = source = chr11:130242997-130243057; Gene: ADAMTS8 (Intergenic)
  source 1..61: mol_type = genomic DNA
cgggcgtggtggccggtgcctgtagtcccagctactccggaggctgaggcaggagaactgc

SEQ ID NO: 15 - DNA, 169 bp, Homo sapiens
  misc_feature 1..169: note = U/M: U (0.21:0.87) in Oral, Larynx and Esophageal epithelium
  misc_feature 1..169: note = source = chr11:65680975-65681143; Gene: C11orf68 (Intergenic)
  source 1..169: mol_type = genomic DNA
cgtcattgcactctctaggcctcagttttttcatcggtaaaaaaagggactttcggcggggcataatggctcatacctctaatcccagcactttgggaggcaaaggtgggcggatcacctgaggtcaggcgttcgagaccagactggccaacatggcaacccaggaggc

SEQ ID NO: 16 - DNA, 72 bp, Homo sapiens
  misc_feature 1..72: note = U/M: U (0.09:0.93) in Oral, Larynx and Esophageal epithelium
  misc_feature 1..72: note = source = chr22:45526552-45526623; Gene: LOC100506714 (Intergenic)
  source 1..72: mol_type = genomic DNA
cgcggtggctcacgctggtaatcccggcactttgggaggccgaggcgggcggatcacgaggtcaggagatcg

SEQ ID NO: 17 - DNA, 232 bp, Homo sapiens
  misc_feature 1..232: note = U/M: U (0.04:0.88) in Oral, Larynx and Esophageal epithelium
  misc_feature 1..232: note = source = chr1:156682901-156683132; Gene: CRABP2 (Intergenic)
  source 1..232: mol_type = genomic DNA
cgcggtggcttaccatgtaatcccagcactttgggaggccgaagggggtggatcatctgaggtcgggagttcgagaccagcctgaccaacatggaaaaaccctgtctctactaaaaaatacaaaattaactgggcatggtggcacatgcctgtaatcccagctacttgggaggtggaggcaagagaattgcttgatcccaggaggtggaggttgcagtgagccgaggtgacg

SEQ ID NO: 18 - DNA, 207 bp, Homo sapiens
  misc_feature 1..207: note = U/M: U (0.08:0.89) in Oral, Larynx and Esophageal epithelium
  misc_feature 1..207: note = source = chr5:125932585-125932791; Gene: ALDH7A1 (Intergenic)
  source 1..207: mol_type = genomic DNA
cgctagagtgcagtggcaggatcatggcttactgaagcctcgacctccgaggctctagtgatcctcctacctcaacctcccaagtagctgggactacaggcatgccatcacacccagctaatttttgaggattttttgtagagacagggttcccccatgttgcccaggctggtccgcacctcctcggctcaagggatctgccttgcg

SEQ ID NO: 19 - DNA, 241 bp, Homo sapiens
  misc_feature 1..241: note = U/M: U (0.06:0.87) in Oral, Larynx and Esophageal epithelium
  misc_feature 1..241: note = source = chr18:9012779-9013019; Gene: NDUFV2 (Intergenic)
  source 1..241: mol_type = genomic DNA
cgacatggtgagagaagaagcgagagaaagagagacagacagacagagaggagaaggtgccaggctcttttcaacaaccgattatcttgggaattaagagtgagagctcgctcactcccaccagacaggcaccaacccatccatgagggatcctcccccacaatccaaacaccttccaccaggccccacctccactggggattaaatttcaacatgagatttggtggggccaaacaaaccg

SEQ ID NO: 20 - DNA, 116 bp, Homo sapiens
  misc_feature 1..116: note = U/M: U (0.13:0.93) in Oral, Larynx and Esophageal epithelium
  misc_feature 1..116: note = source = chr3:126650706-126650821; Gene: CHCHD6 (intron)
  source 1..116: mol_type = genomic DNA
cgtctcatctcatctcacttaaacccgcctgggacggggagccctcaccccatttttgtgatgaggaagtgaggctcagctaggctgacgcatcctaagttgctgggctggaagcg

SEQ ID NO: 21 - DNA, 178 bp, Homo sapiens
  misc_feature 1..178: note = U/M: U (0.08:0.88) in Oral, Larynx and Esophageal epithelium
  misc_feature 1..178: note = source = chr15:43589375-43589552; Gene: TGM7 (intron)
  source 1..178: mol_type = genomic DNA
cgggcacagtggctcacggctgtaatcccagcactttgggaggccgaggcgggtggatcacgagctcaggagttcgagaccagctgaccaacatggtgaaaccctgtctccactaaaaatacaaaaattagccaggcatggtggctcatgcttataatcccagctactcaggaggccg

SEQ ID NO: 22 - DNA, 188 bp, Homo sapiens
  misc_feature 1..188: note = U/M: U (0.08:0.88) in Oral, Larynx and Esophageal epithelium
  misc_feature 1..188: note = source = chr17:70698846-70699033; Gene: SLC39A11 (intron)
  source 1..188: mol_type = genomic DNA
cgggtggatcacttgaggtcaggagttccagaccagcttggccaacacggtgaaactccgtctctactaaaaatacaaaaattagccaggtgtggtggtgcatgcctgtaattccagctactcaggaggctgaggcaggagaatcgcttgaaccctggaggtggaggttgcagtgagccaagatcacg

SEQ ID NO: 23 - DNA, 240 bp, Homo sapiens
  misc_feature 1..240: note = U/M: U (0.11:0.91) in Oral, Larynx and Esophageal epithelium
  misc_feature 1..240: note = source = chr15:67728831-67729070; Gene: IQCH-AS1 (intron)
  source 1..240: mol_type = genomic DNA
cggtaaatctccacagggagaaggaattctctagctaaagtttgtaacaacttgaacagggtgagaagcctcctggcgagaactcaggggagggcacaaatccggtgtgcagactccataggcaggggaagaaccaagcccttttctttctagcctgcaacaagttttcaagcccgtcttgccctctgcctggaaagagactcggggctgttgtggagaggcatggtgggagtgagaccg

SEQ ID NO: 24 - DNA, 303 bp, Homo sapiens
  misc_feature 1..303: note = U/M: U (0.04:0.84) in Oral, Larynx and Esophageal epithelium
  misc_feature 1..303: note = source = chr3:24511875-24512177; Gene: THRB (intron)
  source 1..303: mol_type = genomic DNA
cgtgactgcctggattcaaatcccagttccaccatgtactagctatgtgaccttaggaaagttgctcaacctctctaaatctactttctaaggctgttacgaggattaaataggttaacatacgtaaagtacttggaacggtgcctggtacttaataagccccatagaaatgtttgttggatatataaaaggatggcagaactgtgaatcaaagccaggtttatctggctccaatgtagagacttttttttgagacagagtgtcacttcttctcccaggctggagtgcaatggtgcgatctcg

SEQ ID NO: 25 - DNA, 426 bp, Homo sapiens
  misc_feature 1..426: note = U/M: U (0.08:0.88) in Oral, Larynx and Esophageal epithelium
  misc_feature 1..426: note = source = chr3:59146774-59147199; Gene: C3orf67 (Intergenic)
  source 1..426: mol_type = genomic DNA
cgacagtaaatgttctatctgcaattctgatggctcattagttattttcagataaatcttttgccaaagagaacaaggtttattttatgtatgcagaagacttaaaggaggcagtcaaataaaaaatatacatatggaagaaatctgtgtgtaaataagtagattgcgaaataacttagaaatttgttcatgcagagttctggaacccagaggtgtggagtcctacagaaaggataaaagatatgaaatccccacggtcatggagttgacatgttagtgctggtattggtgagatgacaaagaaataataagtgagggctgggtgcggcggctcacacctgtaatcccagcactttgggagacaaaggcgggcggatcatgaggtcaggagttcaagatcagcctggccaacatggtgaaaccccg

SEQ ID NO: 26 - DNA, 458 bp, Homo sapiens
  misc_feature 1..458: note = U/M: U (0.09:0.89) in Oral, Larynx and Esophageal epithelium
  misc_feature 1..458: note = source = chr19:51862398-51862855; Gene: ETFB (intron)
  source 1..458: mol_type = genomic DNA
cgggctcaggtgatcctcccacttcagcctccccagtagctgggaccacaggcgggcaccatcatgccgggctaatttttttttttttactttttgtagagaaaggatttccccgtgtttcccaggctggtctggaactcctggcctaaagtgatccgcctgcttcagcctaccaaagtgatgggattacaggtgtgagtcgcagtgcctggccttttttcttaaaaaaaaaaacacaacataggagttgcccctttaagacagaaaagaacctcatccacccatcagtaagaggccccaagcttcttgctgtgagtcagggaggcttctgaagggcctcaagccacatcttgctcttgctctggcagaactcccagccctaagctcctgattcccaggctcctgactcctgaggagaaagggtaagaactttccagacacacacacacacacgcacg

SEQ ID NO: 27 - DNA, 178 bp, Homo sapiens
  misc_feature 1..178: note = U/M: U (0.07:0.86) in Oral, Larynx and Esophageal epithelium
  misc_feature 1..178: note = source = chr15:89035700-89035877; Gene: MRPS11 (Intergenic)
  source 1..178: mol_type = genomic DNA
cggctcactgcaacctctgcctcccaggttcaagacattctcatgcctcagcctgccgagtagctgggattacaggcgcatgccaccacgcctggctaggcttttttgtatttttagtagagacgaggttttaccatgttggccaggctggtatcaaactcctgactcaagtgatccg

SEQ ID NO: 28 - DNA, 308 bp, Homo sapiens
  misc_feature 1..308: note = U/M: U (0.08:0.87) in Oral, Larynx and Esophageal epithelium
  misc_feature 1..308: note = source = chr20:49053090-49053397; Gene: PTPN1 (Intergenic)
  source 1..308: mol_type = genomic DNA
cgctggtccttgtcaaggagactaaagtaacagagggtttctgagatgtagagaaattggttctccctttgcccaggcaagcaggcagcaagtctcaatctgccgatctctcgtttctctctagcctaagaacctgtatgtttctggggattttttgatgttttgttgttgttgcctcctaattttataagagcaagtcttgtatgttttggtttgtagggcatactgccatcctgggaggcttctgaatatgccacgacatcaggcctcagattggcgctgaggaagcgctaataatcacgtccccg

SEQ ID NO: 29 - DNA, 336 bp, Homo sapiens
  misc_feature 1..336: note = U/M: U (0.13:0.92) in Oral, Larynx and Esophageal epithelium
  misc_feature 1..336: note = source = chr15:44197814-44198149; Gene: FRMD5,FRMD5 (exon,intron)
  source 1..336: mol_type = genomic DNA
cgcttttcttggagagggagcctacagggcttgtggctgtgacttgtgctgtcagtgtatcactgacaatggtacatccgcggtcaggaaggctggggagcatcactctgtgtcagtaaacagtctgcgagaacagaggacacggcgtggagcctgcgtgctcaggctgtggagaagccacaatgttctgggcctgattaagtgccacgtacctcagttccgtcttgtgaatctcagcaattttcctttccagcttctctgaatgtttagggaaaaactggaacttggagctgtagccttcagggtgtttccctgagtcataatccccaatctccg

SEQ ID NO: 30 - DNA, 153 bp, Homo sapiens
  misc_feature 1..153: note = U/M: U (0.12:0.9) in Oral, Larynx and Esophageal epithelium
  misc_feature 1..153: note = source = chr2:17623091-17623243; Gene: RAD51AP2 (Intergenic)
  source 1..153: mol_type = genomic DNA
cgcttccgcagttgggtcactcacagtatttggggtgtctcctgggtgttgcaggaacagtccgcttttttcagagggtctgtgggtcctctcaggattgctggtttgttcttgaagtttatctggagctaaaattcacaatgcgagcctccg

SEQ ID NO: 31 - DNA, 242 bp, Homo sapiens
  misc_feature 1..242: note = U/M: U (0.04:0.82) in Oral, Larynx and Esophageal epithelium
  misc_feature 1..242: note = source = chr8:36554568-36554809; Gene: KCNU1 (Intergenic)
  source 1..242: mol_type = genomic DNA
cggcacccagccaagctttcaaaaacattatatcgtatacgcatagtgtaaagaaaaattatttcagacatgaaaacttagatcagcgtctggcacattttaagcactctatacatgctaagaccttgtgactattactctcactgttattgaaagggatgttgtgctgtttgctggcattaaatataatctgtaaagatctactttctactctctaaggtaattgccttcctatgtcaccg

SEQ ID NO: 32 - DNA, 297 bp, Homo sapiens
  misc_feature 1..297: note = U/M: U (0.09:0.87) in Oral, Larynx and Esophageal epithelium
  misc_feature 1..297: note = source = chr16:84438956-84439252; Gene: ATP2C2 (intron)
  source 1..297: mol_type = genomic DNA
cgcccctttcacgctgccccagccagcctgagcatcagtcatgagcaaatcaccaactcccaggcaaccgcgatcaggaaaaacagtgatcactttcgtagacagttgagcaggccccgggccccacgctatatgagtaagtgaataagtaagcatgcgcttactaatcctcctcctaatcccgcctttgcacatgaggaaggagaagtgcagaggttgaaagatttccccagagttgccaggtttagcaaataacaatataggatgccctgttaaatttcaatttcaggctgggcg

SEQ ID NO: 33 - DNA, 342 bp, Homo sapiens
  misc_feature 1..342: note = U/M: U (0.09:0.87) in Oral, Larynx and Esophageal epithelium
  misc_feature 1..342: note = source = chr10:116074117-116074458; Gene: AFAP1L2 (intron)
  source 1..342: mol_type = genomic DNA
cgtcctctgtgttcaccgttcagttctccaaagtggacagactttcactgtttctccacctctctgtattgcttgcttggcttctggagtaaaggatccataaggcacaaaaactaagcctcttatctgcctagttaggaagatgatgtattaacaaagaaaggaaggactcttcccctactagagaaaatactttatcccttggcttcccatttgtaaaatggggttacagggttgcttaaaaggattacttgaaataacattggcacggagcagggcctgttgtaaccaggcaagaaaaggtgtttataataattccgtggaatttcaaatcaggacacg

SEQ ID NO: 34 - DNA, 434 bp, Homo sapiens
  misc_feature 1..434: note = U/M: U (0.11:0.89) in Oral, Larynx and Esophageal epithelium
  misc_feature 1..434: note = source = chr12:31831608-31832041; Gene: AMN1 (intron)
  source 1..434: mol_type = genomic DNA
cgtgagccaccaccgtgcccggccaaagaatacaaacttttaacaaagtatttttttcaaatgttcaaaggaaatgtaatttagacatttttagagaacacacagtgaaaaaagtatggctgaacacatttttacaaataatgatcaaagtcctaatgtttcattacagtgatctggcaaaaataaacatgtcatgtaggattagtaatgaatgaatgaataatgaggaaacagaataatacaggattaagacaaatatgaaataaaaaaatgagttctcctttaagcaaggaaccagctttaattaaagggaaaccctgaagcaaaccacttgggtcttaaaatactgttttggctgggcatggcagctcacgcctgtaatcccagcactttgagaggccaacgtgggtggatctcttgagcccaagagttcg

SEQ ID NO: 35 - DNA, 108 bp, Homo sapiens
  misc_feature 1..108: note = U/M: U (0.08:0.84) in Oral, Larynx and Esophageal epithelium
  misc_feature 1..108: note = source = chr9:126114492-126114599; Gene: CRB2 (Intergenic)
  source 1..108: mol_type = genomic DNA
cggggttttgccatgttggccaggctggtctcgaactcctgatctcaggtgatccgcccacctcggctcccaaagtgctgggattacaggcatgagacacagcgcccg

SEQ ID NO: 36 - DNA, 141 bp, Homo sapiens
  misc_feature 1..141: note = U/M: U (0.13:0.89) in Oral, Larynx and Esophageal epithelium
  misc_feature 1..141: note = source = chr3:126650914-126651054; Gene: CHCHD6 (intron)
  source 1..141: mol_type = genomic DNA
cggatgtttatctaagagcacggaggctccagtgagatgtgcattcctcttgttgtcttcttttagaggagagaggggcttcagagccttcaccatgccctgctgcccgtagcacctctcggtagccctgataacaccacg

SEQ ID NO: 37 - DNA, 201 bp, Homo sapiens
  misc_feature 1..201: note = U/M: U (0.17:0.93) in Oral, Larynx and Esophageal epithelium
  misc_feature 1..201: note = source = chr15:43388602-43388802; Gene: UBR1 (intron)
  source 1..201: mol_type = genomic DNA
cgcccacctcggcctcccaaagtgctgggattacagccgtgagccaacgcgcccggccaggcaatttcttaaaataagacaaccatgaagtctgccacattgattgaccttttcacaaaagatttctctgtagcatgtgatagcatgttaccaatggcagaacttctttcaaaactggagtcaatccttgccaactctgcg

SEQ ID NO: 38 - DNA, 239 bp, Homo sapiens
  misc_feature 1..239: note = U/M: U (0.13:0.89) in Oral, Larynx and Esophageal epithelium
  misc_feature 1..239: note = source = chr13:101197929-101198167; Gene: GGACT (intron)
  source 1..239: mol_type = genomic DNA
cgaagcctgctggaataacacagcactcctgtgagtggagagcccaggagtgtgggatcgtggtagacccagggtgtggggctttctggcattagggtgaagcttgggtgagctgctgcacttcccattgcaagcagaacctgttccccctacagaaggaagtaagggttcggagaattcagacaccaaaggccccatcatgtcccttcctacacatgcgtcagccaaccacatactcg

SEQ ID NO: 39 - DNA, 253 bp, Homo sapiens
  misc_feature 1..253: note = U/M: U (0.15:0.91) in Oral, Larynx and Esophageal epithelium
  misc_feature 1..253: note = source = chr1:23583336-23583588; Gene: HTR1D (Intergenic)
  source 1..253: mol_type = genomic DNA
cggtctccctctcatgccaagccgaagctggactgtactgccaccatctcggctcactgcagcctccctggttgattctcctgcctcagcctgcccagtgcctgcgattgcaggcacgcgccgccacgcctgactggttttcgtatgtttttggtggagacggggtttcgctgtgttggccgggctggtctccagctcctaaccgcgagtgatccgccagcctcagcctcctgaggtgccaggattgcagacg

SEQ ID NO: 40 - DNA, 186 bp, Homo sapiens
  misc_feature 1..186: note = U/M: U (0.12:0.87) in Oral, Larynx and Esophageal epithelium
  misc_feature 1..186: note = source = chr1:45542837-45543022; Gene: ZSWIM5 (intron)
  source 1..186: mol_type = genomic DNA
cgtcagtgtctgggcattgaagagttaggtatttgttgtagtcttctcagcctgggcttgtttgtacctgtctattggggaacctgccccaataatcacgtaggttcttttctattttcctaagcgtcggctggcttgagaaataaagggacagagtacaaaagagagaaattttaaagctgggcg

SEQ ID NO: 41 - DNA, 205 bp, Homo sapiens
  misc_feature 1..205: note = U/M: U (0.11:0.86) in Oral, Larynx and Esophageal epithelium
  misc_feature 1..205: note = source = chr5:135370936-135371140; Gene: TGFBI (intron)
  source 1..205: mol_type = genomic DNA
cgatattcttgctgctatgaacaaaaggagactatgcaaattatacaccacccattcttccaggatgcctgacttaaaaaataagaaaaaagatgggccgggcacagtggctcacgcctgtaatcccaacactttgggaggccgaggtgggcggatcacaaggtcaggagacagagaccatcctggctaacatggtgaaaccccg

SEQ ID NO: 42 - DNA, 389 bp, Homo sapiens
  misc_feature 1..389: note = U/M: U (0.15:0.9) in Oral, Larynx and Esophageal epithelium
  misc_feature 1..389: note = source = chr4:113338667-113339055; Gene: ALPK1 (intron)
  source 1..389: mol_type = genomic DNA
cgatctcactctgttacccaggctagagtacagtggtgcaatcatgggtcactgcagcctcaaccttccaggccaagcaatcctcccactttagccttccaagtagctgggactacaggcatgtgccaccatgcccagctaacttgtttattttctgtagagtcgaggtctctctacgttgcccagactggtcttgaattcctgggctcaagcgatcctcctgcctcagcttcccaaagtcctgggattataggcatgagtcaccgtgcctggctgatagttaagtatttttaaatctattcatttagtgcaccacatgcacagaataaagaagaaaaagtatgtgttcacctaaatagattttttaaagttaacaaaattttcaaccg

SEQ ID NO: 43 - DNA, 32 bp, Homo sapiens
  misc_feature 1..32: note = U/M: U (0.07:0.81) in Oral, Larynx and Esophageal epithelium
  misc_feature 1..32: note = source = chr16:18938831-18938862; Gene: SMG1 (Intergenic)
  source 1..32: mol_type = genomic DNA
cgaggcgggcggatcacgaggtcaggagatcg

SEQ ID NO: 44 - DNA, 92 bp, Homo sapiens
  misc_feature 1..92: note = U/M: U (0.15:0.89) in Oral, Larynx and Esophageal epithelium
  misc_feature 1..92: note = source = chr11:16799587-16799678; Gene: C11orf58 (Intergenic)
  source 1..92: mol_type = genomic DNA
cggatgaatcacctgaggtcaggagttcgagaccaacctcaccaacatgaagaaacccccgtctctactaaaaatacaaaattagccgggcg

SEQ ID NO: 45 - DNA, 184 bp, Homo sapiens
  misc_feature 1..184: note = U/M: U (0.12:0.86) in Oral, Larynx and Esophageal epithelium
  misc_feature 1..184: note = source = chr16:8850737-8850920; Gene: ABAT (intron)
  source 1..184: mol_type = genomic DNA
cgagtgtgctaagccttgttgtgcaatgtcaggcccagtctggatggtaaatgctgtaggactctgggaataagcagatgtgtgaaggcaggatgaggcatgcgggtcacagattgcaggtggcatcactactcgctcagtctctgagcaaacatttgtcgagatttgactcagcccatgggcg

SEQ ID NO: 46 - DNA, 406 bp, Homo sapiens
  misc_feature 1..406: note = U/M: U (0.14:0.88) in Oral, Larynx and Esophageal epithelium
  misc_feature 1..406: note = source = chr4:13587143-13587548; Gene: BOD1L1 (intron)
  source 1..406: mol_type = genomic DNA
cggcagaacacaaatacaaatttgtgaggaggttctgtgagtcataagatgaaaataaaaccataggaaaaaaggcaatgggtgaggccaatccttagagtacccagattttagaggcaggaggtgatatgatttggctgtgaccccactcaaatctcattttgaattataggtcccataatccccacttgtagtgggaaggatgcagtgggaggtaattgaatcggggggcaggtttgtcctgtgctgttctcctgacagtgaataagtctcctgagatctaatgcttttataaagaggagttcccctgcacatgccctcttgcctgttgtcatgttaagacgtgactttgctcctcctttgccttctaccatgattgtgaggcctccccagccatgcggaaccg

SEQ ID NO: 47 - DNA, 218 bp, Homo sapiens
  misc_feature 1..218: note = U/M: U (0.08:0.81) in Oral, Larynx and Esophageal epithelium
  misc_feature 1..218: note = source = chr5:18993241-18993458; Gene: CDH18 (Intergenic)
  source 1..218: mol_type = genomic DNA
cggtgtttggtttcctgttcttgtgttagtttgctgagaatgatggtttccagcttcatccatgtccctgcaaaggccataaactcatactattttatggctccatagtattccgtggtgtatatgtgccacatttgctttatacagtctatcgctgatgggcatttgggttggttccaagtctttgctattgtgaacagtgcttcaataaacgtacg

SEQ ID NO: 48 - DNA, 393 bp, Homo sapiens
  misc_feature 1..393: note = U/M: U (0.06:0.79) in Oral, Larynx and Esophageal epithelium
  misc_feature 1..393: note = source = chr5:167431793-167432185; Gene: TENM2 (intron)
  source 1..393: mol_type = genomic DNA
cgccttgggggaaatccagatttatcctgctctgtcacggttaattttttttaagtcatatacataatacaaaacaataataaagttaatttcattttaggcttttaaaaaacttaccagtctgtggatctgtgatttttttctgactcttgtccccatcccctcatccccatctccaccctcgcttctttgggtggaaggttgttgggtaaaggtgctgcctaaggtctcatgaactctgccatgtctgggagaaagtgtctgtatttcttttctggggatgtgagtgctgattgcatggtgttgtattcttttcttcaaaactatcaggaattaagcctttcggaaaggtcagctgacccacagtgatatccatattgtagtgaaacaccg

SEQ ID NO: 49 - DNA, 86 bp, Homo sapiens
  misc_feature 1..86: note = U/M: U (0.11:0.83) in Oral, Larynx and Esophageal epithelium
  misc_feature 1..86: note = source = chr5:171042175-171042260; Gene: FGF18 (Intergenic)
  source 1..86: mol_type = genomic DNA
cgcttcgtgtgcagcaccgctaaaggccgcatgtcatcgccacactttattatatgatgatcgtgtgtgtccatttgacagatgcg

SEQ ID NO: 50 - DNA, 145 bp, Homo sapiens
  misc_feature 1..145: note = U/M: U (0.2:0.92) in Oral, Larynx and Esophageal epithelium
  misc_feature 1..145: note = source = chr4:54347865-54348009; Gene: LNX1 (exon)
  source 1..145: mol_type = genomic DNA
cgacctgccctagaggcctcaccttgggagtgttgctcctctcccctggccctggggaccagctgccattgctgttccagccggcttcctgaaagatgtcagggctccgctgccgaacctggcgggacacgacgaggtgaacacg

SEQ ID NO: 51 - DNA, 157 bp, Homo sapiens
  misc_feature 1..157: note = U/M: U (0.15:0.87) in Oral, Larynx and Esophageal epithelium
  misc_feature 1..157: note = source = chr12:116825665-116825821; Gene: MIR4472-2 (Intergenic)
  source 1..157: mol_type = genomic DNA
cgcctgtaatcccagcactttgggaggccgaggtgggcggatcactggaggccaggagttggagatcagcctggccaacatgatgaaactccgtcaatacaaaaaatacaaaaattagctgggtgtggtggtgtgtgtctgtaatcccagctactcg

SEQ ID NO: 52 - DNA, 193 bp, Homo sapiens
  misc_feature 1..193: note = U/M: U (0.16:0.88) in Oral, Larynx and Esophageal epithelium
  misc_feature 1..193: note = source = chr1:241419066-241419258; Gene: RGS7 (intron)
  source 1..193: mol_type = genomic DNA
cgactggaaatatggtggttcctaccgcgatgtgcttttctaaaactcccaaatgggtgttcactaagtaaacatgcatttcaaagagaacttaggtaattcccttagcaagagaaaccagaaattctgactggggctccacaatatgtttatgaaaataatctatgtttccggaaattttgggacaccagcg

SEQ ID NO: 53 - DNA, 242 bp, Homo sapiens
  misc_feature 1..242: note = U/M: U (0.16:0.88) in Oral, Larynx and Esophageal epithelium
  misc_feature 1..242: note = source = chr7:105391774-105392015; Gene: ATXN7L1 (intron)
  source 1..242: mol_type = genomic DNA
cgtaaccagcatctggatcagaaatgacattcccagcaccccagaaaggctggggtgtagtggctcatgcctgacgggtgaatcacttgtgttctggagttcgagaccagcctgggcaacatggggaaacccccgtctctactaaaaatacaaaaaaaattagctgggcatggtggtgcatgcctgtagttccagctccttgggagactgaggtgggaggattgaataagcccaggaagtcg

SEQ ID NO: 54 - DNA, 383 bp, Homo sapiens
  misc_feature 1..383: note = U/M: U (0.14:0.86) in Oral, Larynx and Esophageal epithelium
  misc_feature 1..383: note = source = chr19:39766779-39767161; Gene: IFNL2 (Intergenic)
  source 1..383: mol_type = genomic DNA
cgagatgtgttctaaggtaagcaggtctgtgcaaacctacccccaaaggccaagggagaaagagcctgacaaatccagtttctttttttttcttcttcttcttcttttttgagacagaatctcctgttgcccaggctggagtgcagaggtgcgatctcagctcactctgcctcctgggttcaagcaattctcctgcctcagcctcccgagtagctaggattacaggcgcccaccatgacgcccggctaatttttgtatttttagtagagatagggttttaccatgttggccaatctggtctcaaactcctgatctcaggttatccgcccaccttggcttccctgagtgccaggattagaggcgtcagccaccacgcccggccg

SEQ ID NO: 55 - DNA, 101 bp, Homo sapiens
  misc_feature 1..101: note = U/M: U (0.19:0.9) in Oral, Larynx and Esophageal epithelium
  misc_feature 1..101: note = source = chr6:158619634-158619734; Gene: GTF2H5 (exon)
  source 1..101: mol_type = genomic DNA
cggggtttgcaccatgttggccaggctggtctcgaactcccaacctcaagtaatctggcctcccaaagtggtgggattacaggcgtgagccagcgcgcccg

SEQ ID NO: 56 - DNA, 102 bp, Homo sapiens
  misc_feature 1..102: note = U/M: U (0.18:0.89) in Oral, Larynx and Esophageal epithelium
  misc_feature 1..102: note = source = chr6:83781122-83781223; Gene: DOPEY1 (intron)
  source 1..102: mol_type = genomic DNA
cgccatgttggtcacgctggtctcaaactcctgacctcaggttatccgcctcgcctctgcctctcaaaatgctgggattacagacatgagccactgtgtccg

SEQ ID NO: 57 - DNA, 115 bp, Homo sapiens
  misc_feature 1..115: note = U/M: U (0.15:0.86) in Oral, Larynx and Esophageal epithelium
  misc_feature 1..115: note = source = chr6:783511-783625; Gene: EXOC2 (Intergenic)
  source 1..115: mol_type = genomic DNA
cgtgggtgtgagaatgaggggccctgccgttgcccgagggctgcttcctgccttgcgcccggagctgctgccaggatgggctccgatcacctgtgaccctgaactggaataagcg

SEQ ID NO: 58 - DNA, 123 bp, Homo sapiens
  misc_feature 1..123: note = U/M: U (0.2:0.91) in Oral, Larynx and Esophageal epithelium
  misc_feature 1..123: note = source = chr8:134687594-134687716; Gene: ST3GAL1 (Intergenic)
  source 1..123: mol_type = genomic DNA
cgtggtggcaggcgcctgtaatcccagctactcaggaggctgaggcaggagaatcacctgaacctgggaggcagaggttgcagtgagccaagatcatgccactgcactccaccccgggcgacg

SEQ ID NO: 59 - DNA, 220 bp, Homo sapiens
  misc_feature 1..220: note = U/M: U (0.18:0.89) in Oral, Larynx and Esophageal epithelium
  misc_feature 1..220: note = source = chr17:49227132-49227351; Gene: NME1-NME2 (Intergenic)
  source 1..220: mol_type = genomic DNA
cgttggccaggctggtctcgaactcctgatctcaggtaatccacccacctcagcctcccaaagtgctgggattacaggcatgagccaccgtgcccagcccttgtgtcgatcttctatctcatcctgtgactaagaatggctagcctcctgggaatgcagcccagtaggtctaagcctctttttacccagcccctatttaagatggagttgctctggttcg

SEQ ID NO: 60 - DNA, 242 bp, Homo sapiens
  misc_feature 1..242: note = U/M: U (0.18:0.89) in Oral, Larynx and Esophageal epithelium
  misc_feature 1..242: note = source = chr11:60902945-60903186; Gene: VPS37C (intron)
  source 1..242: mol_type = genomic DNA
cgtccagaatgagtgcaatagcatgaccataggtcactgcagcctcaaactcctgagctcgagcaatattcccttctcagcctttccagcagctgggactacaggcatgcaccaccacgcctggctaagttcttttattttctgtagagatggggtttccctacgttgcccaggctggcctcaaacaatcctcccatcccatccttccaatagctgggactacaggcacaaaccaccatacg

SEQ ID NO: 61 - DNA, 261 bp, Homo sapiens
  misc_feature 1..261: note = U/M: U (0.12:0.83) in Oral, Larynx and Esophageal epithelium
  misc_feature 1..261: note = source = chr1:113740846-113741106; Gene: LOC643441 (exon)
  source 1..261: mol_type = genomic DNA
cgggctcctgggattagcggttaggtccctagagtatactgggtgtttattctcggagacccgaggctccaaggagtagcaagagtcggaggcacagggcctccccaggtagctcattgttggttctacttcttgcagaagccaaattgggatcctctgccatatacccttcatgttcacaggctgcttctcaattcagcatcagctgagcaactgccagggatccccgagagacaggaaagactgggtgggaaatggacg

SEQ ID NO: 62 - DNA, 113 bp, Homo sapiens
  misc_feature 1..113: note = U/M: U (0.19:0.88) in Oral, Larynx and Esophageal epithelium
  misc_feature 1..113: note = source = chr2:99649323-99649435; Gene: TSGA10 (intron)
  source 1..113: mol_type = genomic DNA
cgtggtatgcaatccaggttgacgagtctacggatgttgacggcaaggcaacaatgcttgtttctgtgtgatatatttttcaggagcatgtgcatgaagacatgttatgtgcg

SEQ ID NO: 63 - DNA, 260 bp, Homo sapiens
  misc_feature 1..260: note = U/M: U (0.15:0.84) in Oral, Larynx and Esophageal epithelium
  misc_feature 1..260: note = source = chr16:2998130-2998389; Gene: FLYWCH1 (intron)
  source 1..260: mol_type = genomic DNA
cgaattgaaactttttggaagtgttgggtggttctcccccaaacatgctggtgtgggaagcagggaattccccaggtgtgtgtcacgaagcaacctcatgttgtaaaggaattgatacggatggatggatgtgtgtgtaaaaatgatcagccaggtgaggtggctcatgcctgtaatcccagcactttggtaggcggaggtgggtggatcacctgaggtcaggagatcgagaccatcctggccaacatggtgaaaccccg

SEQ ID NO: 64 - DNA, 315 bp, Homo sapiens
  misc_feature 1..315: note = U/M: U (0.21:0.9) in Oral, Larynx and Esophageal epithelium
  misc_feature 1..315: note = source = chr1:9426821-9427135; Gene: SPSB1 (intron)
  source 1..315: mol_type = genomic DNA
cggggtttcaccatgttggccaggctggtcttgaactcctggcctcaaatgatccacccaccttggcctcccaaaatgctgggattaccagcgtgaaccaccatgcccagctagtcttcagctttaaaacagaggtgagaatggtatctgagagcagctggtaacagaaaatgattcccttcctgaagctagtgctgggggtgcgtgccaggaagagctggctcccatgtgttccgaccgacaggccccaatggcagctgcttgcctggacaggcagagtcaccagtggggaagagcagggatcgcctgggttcg

SEQ ID NO: 65 - DNA, 78 bp, Homo sapiens
  misc_feature 1..78: note = U/M: U (0.21:0.89) in Oral, Larynx and Esophageal epithelium
  misc_feature 1..78: note = source = chr14:86143084-86143161; Gene: FLRT2 (Intergenic)
  source 1..78: mol_type = genomic DNA
cgggcacggtggctcacgcctgtaatcccagcactttgggaagccaaggcgggtgggtcacctgaggtcagaagttcg

SEQ ID NO: 66 - DNA, 147 bp, Homo sapiens
  misc_feature 1..147: note = U/M: U (0.22:0.9) in Oral, Larynx and Esophageal epithelium
  misc_feature 1..147: note = source = chr16:1742392-1742538; Gene: HN1L (intron)
  source 1..147: mol_type = genomic DNA
cgcacagtcaaggtcctcggctggttacctgtggagattgtcagcacttgactgaagcgtagctgacgcctctgacccagtaatggcatcagtaggataagacaagtggcctggaaaggagaggaatgcctacacgatgcgacctcg

SEQ ID NO: 67 - DNA, 169 bp, Homo sapiens
  misc_feature 1..169: note = U/M: U (0.18:0.86) in Oral, Larynx and Esophageal epithelium
  misc_feature 1..169: note = source = chr3:58455461-58455629; Gene: KCTD6 (Intergenic)
  source 1..169: mol_type = genomic DNA
cgagtagctgggattacaggcatgtgcaaccacgcctggctaattttgtatttttagtagagacggggtttctccatgttggtcaggctgtcttgaactcccgacctcaggtgatccgcccaccttggcatcccagtgctgggattacaggcgtgagccaccacgcccg

SEQ ID NO: 68 - DNA, 114 bp, Homo sapiens
  misc_feature 1..114: note = U/M: U (0.25:0.92) in Oral, Larynx and Esophageal epithelium
  misc_feature 1..114: note = source = chr7:120066865-120066978; Gene: KCND2 (intron)
  source 1..114: mol_type = genomic DNA
cggggttcactgtgttagccaggatggtctcgatctcctgacctcgtgatccgcccgcttcagcctcctaaagtgctgagattacaggcatgagccaccgcgcccggcccaacg

SEQ ID NO: 69 - DNA, 160 bp, Homo sapiens
  misc_feature 1..160: note = U/M: U (0.2:0.87) in Oral, Larynx and Esophageal epithelium
  misc_feature 1..160: note = source = chrX:3709660-3709819; Gene: LOC389906 (Intergenic)
  source 1..160: mol_type = genomic DNA
cgctcaccttggcctcccaaattgctgggattacaggcgtgagtcacactgcccgacccatggtgctgctatgaatatggtgtgtacatatctgttggagtctcaattattttttaaattcttttcatttttagcgatgggggtctcggtgtgttgatcg

SEQ ID NO: 70 - DNA, 207 bp, Homo sapiens
  misc_feature 1..207: note = U/M: U (0.22:0.89) in Oral, Larynx and Esophageal epithelium
  misc_feature 1..207: note = source = chr16:1804549-1804755; Gene: MAPK8IP3 (intron)
  source 1..207: mol_type = genomic DNA
cggatcacaaggtcaggagttcgagaccactctggccgacgtggtgaaaccccatctctactaaaaatacaaaaattacccgggtgtggtggcgggccctgtagtcccagctactcaggaggctgagacaggagaatcacttgaacctgggaggcgggggttgcagtgaactgagatcatgccactgcactccagagcgagactccg

SEQ ID NO: 71 - DNA, 348 bp, Homo sapiens
  misc_feature 1..348: note = U/M: U (0.19:0.86) in Oral, Larynx and Esophageal epithelium
  misc_feature 1..348: note = source = chr19:19081147-19081494; Gene: HOMER3 (Intergenic)
  source 1..348: mol_type = genomic DNA
cgccactgcactccagcctgggggacagcatgagagcctgtctcaaaaaattaaaacaaaatagcacacagaaaaaagtttttgaaattagcctcaataacttgacagtttcatccatgtcagggatcaagcctgaactctggatgaatcacatatctatttttttttctttttttgggggagacagagtgagactgtctcccaggctggagtgcagtggcacgatctcggcttgctgcaacttgtctcttggcttcacgcaattctcatgcctcagcctcccaagtagctgggattacaggcatgcgccaccacgcctggctaatttttgtatttttagtagaaacg

SEQ ID NO: 72 - DNA, 386 bp, Homo sapiens
  misc_feature 1..386: note = U/M: U (0.27:0.94) in Oral, Larynx and Esophageal epithelium
  misc_feature 1..386: note = source = chr5:159717995-159718380; Gene: CCNJL (intron)
  source 1..386: mol_type = genomic DNA
cgcttgatgagaccagcctgggcaacatagaaacaccccgtctttacttaaaaaaaaaaaaaaaaaaaaaaaaagaaagaaagagagagagaaagaaagaaagaaaagaaagtaagtgagggagttggattccagcagaaagagaaagctctgtccttgccctggggtgacatgtgcctcagtctacccaagagcaacagtgggtttccacggaagaagcgggtcagtgtttatggagaagtggaagcttcaaaaattataaactgtgcacctagcagtcatttttcaaaggcaatgtttcctaatgtgtgttctgtggcacactagtcccaagatatgctccctgaaaaaaagggttctgtgggccacagtttggcgaaacatcg

SEQ ID NO: 73 - DNA, 436 bp, Homo sapiens
  misc_feature 1..436: note = U/M: U (0.15:0.82) in Oral, Larynx and Esophageal epithelium
  misc_feature 1..436: note = source = chr10:1541424-1541859; Gene: ADARB2 (intron)
  source 1..436: mol_type = genomic DNA
cgctcattactcatgcatcattcatcattcctcactgctcactcacactcacttatcactcaacattcattcattactcatcacgcattcattactcactgaattaaccattcagtcattactcactcattactcatcactcacttattacttacccatgtatcagtcattactcattcatcactcactcaacactctattacttattactcactaatcgctcactcattactcactcatcattcagttgtcagctactcatcactcacctatcactcactcattactcactcaaacttattcatcactcgctcatgtctcactcatcactcatcactcactcatcattcatcacccaccactcatttttactcaacactcactcatcattcaccactcaccactcattcatcacccaccactcactcattactcg

SEQ ID NO: 74 - DNA, 490 bp, Homo sapiens
  misc_feature 1..490: note = U/M: U (0.19:0.86) in Oral, Larynx and Esophageal epithelium
  misc_feature 1..490: note = source = chrX:3601127-3601616; Gene: PRKX (intron)
  source 1..490: mol_type = genomic DNA
cgcagagggagcacagccctgccgcatctgcacttcagagttgtggtctccaggactgtgaaacaattaacttctgttattttaaggcacccagtctgtggtatgttaccaaagcaaatatgcccaaggggtacaaattcaaccaaatagttccaaatttagccaagtacattccctagcaatgctgcgagctcacagtcaaaggtataactccaccatctctgagaacctgagagaggcttccagggtggtctgaactgtgcagacctcagcaaacagcaacatcccaggaaagagtggggctaagaagctactaatccctattcctacaaaggcagcctagacatgtctgagccttcccaggccgatcactaaggaatgtccacaacgcagagccgccccaaacatgggagaagacagaagtcttcaaaggagccgagatgaaaaaccaagttcaaattgtaaactaggctgggcagggtggctcacg

SEQ ID NO: 75 - DNA, 159 bp, Homo sapiens
  misc_feature 1..159: note = U/M: U (0.19:0.85) in Oral, Larynx and Esophageal epithelium
  misc_feature 1..159: note = source = chr17:37897998-37898156; Gene: GRB7 (intron)
  source 1..159: mol_type = genomic DNA
cgtggtggcttacgcctgtaatcccagcactttgggaggccaaggcgggcggatcaggagttcaagaccagcctggccaacatggtgaaaccctgtctctactaaaaatacaaaaattagacgggcgtggtggtgggcacctgtaatcccagttactcg

SEQ ID NO: 76 - DNA, 275 bp, Homo sapiens
  misc_feature 1..275: note = U/M: U (0.25:0.91) in Oral, Larynx and Esophageal epithelium
  misc_feature 1..275: note = source = chr2:72255311-72255585; Gene: CYP26B1 (Intergenic)
  source 1..275: mol_type = genomic DNA
cggagggcttttctgtgaatagggaagagagaactcggacattccttcaatagcaactttcgaactcccactgcaggcgggcacatgctagatgctggccaccaatgccatctttgcctccttggaacttatagtctagtggggaaatgatattaatcaaagaaaagtaaagttgcaatggcattaggggatttaacccaaaagttcatggtgccaggagagcccgcagagacagtgcttgctctgctccacacctggagggcagcctgcctccg

SEQ ID NO: 77 - DNA, 364 bp, Homo sapiens
  misc_feature 1..364: note = U/M: U (0.22:0.88) in Oral, Larynx and Esophageal epithelium
  misc_feature 1..364: note = source = chr1:112090880-112091243; Gene: ADORA3 (intron)
  source 1..364: mol_type = genomic DNA
cgacccacccacctcggcctcccaaagtgctgggattacaagcgtgagccactgcacctggcatggaccactttttacctcttggtatccattgctttgattgtgccttgtctttaggatcatactggtaaaactatatgtcatctcctgttataatcctttaaagaaatgcttcaggatcttgactctgcttgtttaaaatttcctttgaaagctctgctcttttgtgcagctgatctgggcacaatggttttggcacccatcaagtggaaagtttgcacaactttaatttttcggtcagaactgggtaagctgaaccaactgagatgtttatggcattgactattgtttctgctgttaatcg

SEQ ID NO: 78 - DNA, 429 bp, Homo sapiens
  misc_feature 1..429: note = U/M: U (0.25:0.91) in Oral, Larynx and Esophageal epithelium
  misc_feature 1..429: note = source = chr16:23548205-23548633; Gene: EARS2 (intron)
  source 1..429: mol_type = genomic DNA
cgttggtcaggctggtctcgaactcctgatctcgtgatctacccgcctcggcctcccatagtgctgggattacaggtgtgagccaccgtgcccggccaaaaaagaaatttttacaaatgagtcagttgcacatgagtgaacaggagggtgttcagctgcagaagcagggcagcattatgtctgaatcaaaggaacttgtttcttcaagctcttctggcaggaattctgacagtgagtttgacaaaaagttaaagaagaaaaagtaagttgctccagaaaaacttgtaaaggaacaaaagactggcaaaactttgggagctctgtcatcttccaaacagagcagcggcagtaaacataataacatgtttattttcttttttaaatttcatatagagatggggtttcaccatgttgcccaggctggtctcg

SEQ ID NO: 79 - DNA, 88 bp, Homo sapiens
  misc_feature 1..88: note = U/M: U (0.28:0.93) in Oral, Larynx and Esophageal epithelium
  misc_feature 1..88: note = source = chr19:11630205-11630292; Gene: ECSIT (intron)
  source 1..88: mol_type = genomic DNA
cgtgatcatagctcaatgcagcctccaacttctgggcccaagtgatcctccagccccagagcgtcgagaagctgggactacagacgcg

SEQ ID NO: 80 - DNA, 424 bp, Homo sapiens
  misc_feature 1..424: note = U/M: U (0.28:0.93) in Oral, Larynx and Esophageal epithelium
  misc_feature 1..424: note = source = chr6:134717812-134718235; Gene: LOC154092 (Intergenic)
  source 1..424: mol_type = genomic DNA
cgcccgcctcagactcccaaagtgctgggattacaggcatgagctgctgtgcctggcctcttgtcaccttttctgatttttccttggtggctctctaaggagaaggccccaaatggactcaagagcagaaaagacaaccgattctagggccacatagagacgctttagacaattaaaactcctggattgaagagtgttgacacagagacacagattccagctgcactgccccgcctcagccttgggaaattctctggatgattatataggattgagctgctccttctgggggatcacagaaaatccagatgcaggtgcattcaggcccaaacttgtgagagaggcaaatggtggccaccctccccaggcactttagccgcttctcactgagcttgccccaacttggccatgccgctgtctcacg

SEQ ID NO: 81 - DNA, 153 bp, Homo sapiens
  misc_feature 1..153: note = U/M: U (0.27:0.91) in Oral, Larynx and Esophageal epithelium
  misc_feature 1..153: note = source = chr17:36874349-36874501; Gene: MLLT6,MLLT6 (exon,intron)
  source 1..153: mol_type = genomic DNA
cgggtgtggtggctcacgcctgtaatcccagcactttgggaggccgaggcgggtggatcacctgagatcaggagtttgagaccagcctggccaacatggtgaaaccccgtctctactaaaaatacaaaaagtagctgggcgtggtggtgggcg

SEQ ID NO: 82 - DNA, 236 bp, Homo sapiens
  misc_feature 1..236: note = U/M: U (0.26:0.89) in Oral, Larynx and Esophageal epithelium
  misc_feature 1..236: note = source = chr21:18876143-18876378; Gene: CXADR (Intergenic)
  source 1..236: mol_type = genomic DNA
cggggcgcagtgactcacgccagtaatcccagaactttgggaggccggggcaggtggatcacctgaggtcaggagtttgagaccagcctggcaacatggtgacaccccagctctactaaaactacaaaactagcttggcgtggtggcacaagcctgtaatcccagctactcgagaggctgaggcaggagaatcgcttgaacctgggaggcagaggttgcagtgagccaagattgcg

SEQ ID NO: 83 - DNA, 295 bp, Homo sapiens
  misc_feature 1..295: note = U/M: U (0.26:0.89) in Oral, Larynx and Esophageal epithelium
  misc_feature 1..295: note = source = chr10:73629716-73630010; Gene: PSAP (Intergenic)
  source 1..295: mol_type = genomic DNA
cgatgggcggccgggcagagacgctcctcacttcctagatgggatggcggccaggcagagacgctcctcacttcccagatggggtggcggccgggcagaggctgcaatctcagcactttgggaggccaaggcaggctgctgggaggtggaggttgtagcgagccgagatcacgccactgcactccagcctgggcaccattgagcactgagtgaacgagactccgtctgcaatcccagcacctcgggaagccgaggctggtggatcactcgtggttaggagctggagaccagcccg

SEQ ID NO: 84 - DNA, 329 bp, Homo sapiens
  misc_feature 1..329: note = U/M: U (0.23:0.85) in Oral, Larynx and Esophageal epithelium
  misc_feature 1..329: note = source = chr7:101651783-101652111; Gene: CUX1 (intron)
  source 1..329: mol_type = genomic DNA
cggtcgtgtgcgtgtctttattctcctcgtgtaatccctgaggtgcagagtgcgtgtctgtcctcctctgccctctctagagattgggatatgaccagtgttcagcccccaaccaaaagagcctaagaaccccaggtccccagcctgtcctgctctgctgggggcccacatgcctggggacaaggcacctttccttccctgaccttgactaggacaggacatggggtagggcctgaacattgagcaattgtcaaactgcctacttacgatgaacaaaatagcttttcaggaggcgagaccacagcacagtcatggtgaatcctgatgcg

SEQ ID NO: 85 - DNA, 165 bp, Homo sapiens
  misc_feature 1..165: note = U/M: U (0.32:0.93) in Oral, Larynx and Esophageal epithelium
  misc_feature 1..165: note = source = chr2:160457961-160458125; Gene: BAZ2B (intron)
  source 1..165: mol_type = genomic DNA
cggtggctcacgcctgtaatcccagcacttcgggaggccgaggcaggtggatcacaagttcaggagttcaagaccagcctggccaacatgcagaaaccccgcctctactaaaaatacaaaaattaggcaggtgtgatggcaggtgcctgtaattccagctactcg

SEQ ID NO: 86 - DNA, 333 bp, Homo sapiens
  misc_feature 1..333: note = U/M: U (0.29:0.9) in Oral, Larynx and Esophageal epithelium
  misc_feature 1..333: note = source = chr10:73630048-73630380; Gene: PSAP (Intergenic)
  source 1..333: mol_type = genomic DNA
cgaaaaccagtcaggcgtggcggcgcgcgcctgcaatcgcaggcactcggcaggctgaggcaggagaatcaggcagggaggttgcagtgagccgagatggcagcagtacagtccagcttcagctctgcatcagagggagaccgtggaaagagagggagaggagggagaggagggagaggagggagaggagggagaggagggagagggagagggagagggagagagctataatcatgttactgcactccagcttgagcaacagtgggagacccagtttcttaagaagaaaaaaaaaaaggaaaaagtatcccagcactttgagaggtcgaggcg

SEQ ID NO: 87 - DNA, 254 bp, Homo sapiens
  misc_feature 1..254: note = U/M: U (0.28:0.88) in Oral, Larynx and Esophageal epithelium
  misc_feature 1..254: note = source = chr22:46980960-46981213; Gene: GRAMD4 (Intergenic)
  source 1..254: mol_type = genomic DNA
cgtcaggcccttgcagaagttttgggaagagagagaaccaggtggtcactcctcgtctgctggtttgtcggcggtgttttccaggcagcattttggggatctgagtggagcctgtcttttttctttctttctttttttttttttttagatggagttttgctcttgttgcccaggctggagtgcaatggcgtgatcgtggctcattgcaacctccacctcccaggttcaagtgattctcctgcctcagcctcccg

SEQ ID NO: 88 - DNA, 221 bp, Homo sapiens
  misc_feature 1..221: note = U/M: U (0.32:0.91) in Oral, Larynx and Esophageal epithelium
  misc_feature 1..221: note = source = chr19:6442589-6442809; Gene: SLC25A23 (intron)
  source 1..221: mol_type = genomic DNA
cgctcttgttgcccaggctggagtgcaatggtgcaatctcggctcactgcaacctccgcctcccgggttcaagcaattctcctgcctcagcctgccaagtagccgggattacaggcatgcgccaccttgcccggctaatttttttgtatttatagtagagacggggtttctccatgttggtcaggctggtctccaactcccaacctcaggtgatccatccg

SEQ ID NO: 89 - DNA, 137 bp, Homo sapiens
  misc_feature 1..137: note = U/M: U (0.31:0.87) in Oral, Larynx and Esophageal epithelium
  misc_feature 1..137: note = source = chr11:66881355-66881491; Gene: KDM2A (Intergenic)
  source 1..137: mol_type = genomic DNA
cgtggtggctcacggctgtaatcccagcactttgggaggcggaggtgggtggatcaccaggtcaggaattcgagaccagcctggccaacatggtgaaaccccgtctctactaaaaatacaaaaattagccaggcacg

SEQ ID NO: 90 - DNA, 225 bp, Homo sapiens
  misc_feature 1..225: note = U/M: U (0.34:0.88) in Oral, Larynx and Esophageal epithelium
  misc_feature 1..225: note = source = chr4:109465282-109465506; Gene: RPL34-AS1 (intron)
  source 1..225: mol_type = genomic DNA
cgggctttcggaaattctggcagaaggccaggtgcagtggcttatgtctgtaatcccagcactttgggagactgaggcaggcagatcacctaaggtcagaagttcgagaccagcctggccaatatggcaaaaccccgtctctactaaaaatacaaaaaaattatccaggtgtggtggcacacgcctgtaatcccagctactcgggaggctgaggcaggagaatcg

SEQ ID NO: 91 - DNA, 165 bp, Homo sapiens
  misc_feature 1..165: note = U/M: U (0.24:0.88) in Oral, Larynx and Esophageal epithelium
  misc_feature 1..165: note = source = chr20:51105019-51105183; Gene: ZFP64 (Intergenic)
  source 1..165: mol_type = genomic DNA
cgcccactccccatcttgtttttcctggtatattttaaagaatatcccagacaggctgggtgcagtggctcacgcctgtaatcccaagcactttgggagaccgaggtgggcggattgcctgaggtcaggagttcgagaccagcgtggccaacatggtgaaccccg

SEQ ID NO: 92 - DNA, 191 bp, Homo sapiens
  misc_feature 1..191: note = U/M: U (0.03:0.91) in Oral, Larynx and Esophageal epithelium
  misc_feature 1..191: note = source = chr9:139546439-139546629; Gene: EGFL7 (Intergenic)
  source 1..191: mol_type = genomic DNA
cgcccctggccagagcttcattcctctttacggctcagcagtgtctcactgtacggatgggccttggcttgtcaatgcactcatccgtggatgcgcatccgggtctatccacctctcggctcctgtgagcacaacgctgtgtgtacattgcgcgtctgtttgaatccctgctctaggggaatgtacctagc

SEQ ID NO: 93 - DNA, 251 bp, Homo sapiens
  misc_feature 1..251: note = U/M: U (0.06:0.92) in Oral, Larynx and Esophageal epithelium
  misc_feature 1..251: note = source = chr7:101652569-101652819; Gene: CUX1 (intron)
  source 1..251: mol_type = genomic DNA
cgctgaccgcacaaatgatggtgttaggatccctccacggatgtggccaggtgacacccctcacctaggccgcacagcaccctaatgtacacactgaagaaaggctgcgtggggctgcagagcggctcatttctaagaaggccaaagaaattgctcagtccagaccagggaacccagtttctcttttagaggtgggatcttgctatgttgctcaggctggtctcgaactcctgacctcaagtgatcctccc

SEQ ID NO: 94 - DNA, 311 bp, Homo sapiens
  misc_feature 1..311: note = U/M: U (0.08:0.93) in Oral, Larynx and Esophageal epithelium
  misc_feature 1..311: note = source = chr22:47436553-47436863; Gene: TBC1D22A (intron)
  source 1..311: mol_type = genomic DNA
cggctgacttgatggggggccctgtgggaggttaccccgtgcgggacgtgactcagcagcagaggagcagctggggtaggccgtggaatgaaaaagaacaacaggttctgacaggacattcaaagccaggttcttttctctaaatcccggtgacttcttcctcttggggaacattcagggctctgagtatggtgagtgagcagcagccaagccggcctcctgggcctgggaggttccatttccagtttggtgaaggccacctctcgtttgagatcctcggctgccttcagggctgcgggtacacctgaaac

SEQ ID NO: 95 - DNA, 377 bp, Homo sapiens
  misc_feature 1..377: note = U/M: U (0.06:0.9) in Oral, Larynx and Esophageal epithelium
  misc_feature 1..377: note = source = chr9:107109138-107109514; Gene: OR13F1 (Intergenic)
  source 1..377: mol_type = genomic DNA
cggttctcagaaatcatgacgcatcgactctttggtacatacattattaaatgcaaaagtctgaataaacttttatctaaaaacataataaacacaaggtcttcagaaatggttcattgtgcatttttcccaagcatgttgtctgaatggttctgaaacataaaataactcccatttattttggtctgagtgcagactagtttagcttacagacaacatgctggacacatgtctgagaaagatgactcaacttcacttttcttacaaataaggataatccaggccgggcggtggctcatgcctgtaatcccagcactttgagaggacaaggagggcggatcacaaagtcaggagatcgagaccatcctggctaacac

SEQ ID NO: 96 - DNA, 217 bp, Homo sapiens
  misc_feature 1..217: note = U/M: U (0.06:0.89) in Oral, Larynx and Esophageal epithelium
  misc_feature 1..217: note = source = chr20:44416524-44416740; Gene: WFDC3 (exon,intron)
  source 1..217: mol_type = genomic DNA
cgtgcagcatttctttacacctggacatgtctcatcagtgatgcaccttttcaaacaggattgtttccgaataaccctagggcaatctcttttcctccctgtagcaaaaagggagacagcaaagaaaagagaaaataggccgagcgccatggctcacacctgtaatcccagcactttgggaggccaaggcgggtggatcacctgaggtagggagttc

SEQ ID NO: 97 - DNA, 401 bp, Homo sapiens
  misc_feature 1..401: note = U/M: U (0.09:0.89) in Oral, Larynx and Esophageal epithelium
  misc_feature 1..401: note = source = chr22:50954593-50954993; Gene: NCAPH2 (intron)
  source 1..401: mol_type = genomic DNA
cgccttgtggagggagccgctgtgctgccctggttgtttgtagacagtgtgccctgggggccttccacttccaaaacaggtttttgttataggaagtagggggaaacacagagacctgtctctgccccgaaataccagggacaaccggtgagcccacagcatagctagagctgcccgtctcgggaggtgctgggcagagaccaaagatgggtggggctgccctggaagaagcgagtgcagactgggccttggattccccctgtctttgtgttgtttcttgcagctggatcagatctgcatttcttttgacgaaggcaagaccacaatgaacttcattgaggcagcgttgttgatccagggctctgcctgcgtctacagtaagaaggtgggccctgcttgac

SEQ ID NO: 98 - DNA, 99 bp, Homo sapiens
  misc_feature 1..99: note = U/M: U (0.14:0.93) in Oral, Larynx and Esophageal epithelium
  misc_feature 1..99: note = source = chr2:65251128-65251226; Gene: SLC1A4 (TTS)
  source 1..99: mol_type = genomic DNA
cgagcccctaagtcagggcaggcatgctcagggggcagtgctaccgccggagctgctgtcgctgatccttttgcggccacctgcttgcaactgggaagc

SEQ ID NO: 99 - DNA, 321 bp, Homo sapiens
  misc_feature 1..321: note = U/M: U (0.09:0.86) in Oral, Larynx and Esophageal epithelium
  misc_feature 1..321: note = source = chr2:121550957-121551277; Gene: GLI2 (Intergenic)
  source 1..321: mol_type = genomic DNA
cgtgggagccatccctggagagaccctccctgctgtccccaggcagcccctggaggcccagatgagactatccgctttggctgcagggcttgacgggcctgcctcagatgagctttggggagtgaaagtggctgcctgggaccctgggcgcctggtgtttacctagaaattgtgctaatcccgctaattcctgtgatttacacagcctcttggctctgtgtactatcttcttctccgggaagtggtgggaaggcgaggccacggatgcagtgggcactgcctggaatccccccgctgcatctgctccccacaggcgttcac

SEQ ID NO: 100 - DNA, 138 bp, Homo sapiens
  misc_feature 1..138: note = U/M: U (0.07:0.79) in Oral, Larynx and Esophageal epithelium
  misc_feature 1..138: note = source = chr22:33656465-33656602; Gene: MIR4764 (Intergenic)
  source 1..138: mol_type = genomic DNA
cgctgggctgtgagtctcttatgtcaccttctcgacccatctggagaaatgaggatcacagcgtctatttcatagggtttgcctggggattaaatgagataatgccggccatgcatctagcagaggacctgggacagc

SEQ ID NO: 101 - DNA, 158 bp, Homo sapiens
  misc_feature 1..158: note = U/M: U (0.23:0.9) in Oral, Larynx and Esophageal epithelium
  misc_feature 1..158: note = source = chr16:21569207-21569364; Gene: SLC7A5P2 (Intergenic)
  source 1..158: mol_type = genomic DNA
cgcagttccccgaaacaaataccacgagtctcaaggtaagacctgcacgtaaggatgtcgaaagataaatatgtcttaagaacatgtccatgagaaggggctttgccagccatgcaagcataaaagaagaaaagtccctcattcatccaaaaacaccc

SEQ ID NO: 102 - DNA, 333 bp, Homo sapiens
  misc_feature 1..333: note = U/M: U (0.1:0.94) in Oral, Larynx and Esophageal epithelium
  misc_feature 1..333: note = source = chr15:31289788-31290120; Gene: MTMR10 (Intergenic)
  source 1..333: mol_type = genomic DNA
cgttcaataagtaaagtttagactgtgggaaactttgcaagacaagtggcccatgttcttcaacaaagaaattgttaaggaagagaaagagagaaaggtaataccagattaaaagagatttaaaagaccttcaaataaaaaagagtaaggctaaactatagtgctaaggaacattcaagtgatacaactataatgaaatacaagtatagtgattttaaaacatatctgcaggccgggcgcggtggctcacgcctctaatcccagcactttgggaggccgaggcgggtggatcacgaggtcaggagatcgagaccacggtgaaatgaaaccccg

SEQ ID NO: 103 - DNA, 77 bp, Homo sapiens
  misc_feature 1..77: note = U/M: U (0.09:0.92) in Oral, Larynx and Esophageal epithelium
  misc_feature 1..77: note = source = chr2:217674422-217674498; Gene: TNP1 (Intergenic)
  source 1..77: mol_type = genomic DNA
cgaaatcttcccgggagaccacgcagcaataccagtgacagaaatgaacagctatgtgccagggacggcactgtgcg

SEQ ID NO: 104 - DNA, 208 bp, Homo sapiens
  misc_feature 1..208: note = U/M: U (0.06:0.89) in Oral, Larynx and Esophageal epithelium
  misc_feature 1..208: note = source = chr19:19214027-19214234; Gene: SLC25A42 (intron)
  source 1..208: mol_type = genomic DNA
cgagtagctgggacaacaggcacgcaccaccacgcctggctaatttttttgtatttttagtagagacaggtttcgacacgttggccccgctggtcttgaattcctagcctcaagtgatccacccgccttggcctcccaaagtgctgggattatgggcatgagtcaccgcgcccggcctgttttctcttcttataaggacaccaattcg

SEQ ID NO: 105 - DNA, 287 bp, Homo sapiens
  misc_feature 1..287: note = U/M: U (0.03:0.86) in Oral, Larynx and Esophageal epithelium
  misc_feature 1..287: note = source = chr9:88048026-88048312; Gene: AGTPBP1 (Intergenic)
  source 1..287: mol_type = genomic DNA
cgaataggaaaagctccggtctgcagctcccagtgagatcaatgcagaaggtgggtgatttctgcatctccaactgaggtaccggctcatctcattggaactggttagacagtgggtgcagctcgcagagggcaagccaaagcagggtggggcatcgtctcacctgggaagcacaaagagacggggaactccctcctctagccaagggaagccatgaggaactgtgccatgcggaatggtgcattctggcccagatactatgcttttcccacagtcttcatagcccg

SEQ ID NO: 106 - DNA, 293 bp, Homo sapiens
  misc_feature 1..293: note = U/M: U (0.03:0.86) in Oral, Larynx and Esophageal epithelium
  misc_feature 1..293: note = source = chr16:11342023-11342315; Gene: SOCS1 (Intergenic)
  source 1..293: mol_type = genomic DNA
cgttatttaaccctgtgccccagtttcctcatctgcaaaatgaaggtagtaatagtcatacctgattcatacagttcttgtgaggattaattgggatactacgcatgaattacttagaatcatgcctagcgtctagcgacatgggtgagctggcagtcaccgctgttattagcaagaagcaacctgagaatgggaccaggtgggtctgacttcatggctgtgctgattcaaatcctctgcacagctgctatgacgcaaaataataattattattatagttctgtctgggtgcg

SEQ ID NO: 107 - DNA, 182 bp, Homo sapiens
  misc_feature 1..182: note = U/M: U (0.03:0.85) in Oral, Larynx and Esophageal epithelium
  misc_feature 1..182: note = source = chr22:24976072-24976253; Gene: GGT1 (Intergenic)
  source 1..182: mol_type = genomic DNA
cgaggccagatcacctgaggtcaggagctcgagaccagcaacatggagaaaccccgtttctagtaaaaatacaaaattagcccagtgtggtggcacatacctgtaaccccagctactcaggaaggctgaggcaggagaatcgcttgaacccaggaggcggaggttgcggtgagccgagatcg

SEQ ID NO: 108 - DNA, 314 bp, Homo sapiens
  misc_feature 1..314: note = U/M: U (0.07:0.89) in Oral, Larynx and Esophageal epithelium
  misc_feature 1..314: note = source = chr7:5692480-5692793; Gene: RNF216 (intron)
  source 1..314: mol_type = genomic DNA
cgcacaaggaaaaatttctctccctagatcaaaaggaagtgttgctcccatcacttaatttgcataagcctttctaaaatgctctgggccatctgaaaaaaccaaaggagacggatcttgggtaatcttgggtttttaaaacacagtagcacgagctgcttggcagggcctgtttggatctcgttaatctctgcaaaatccctgtgcccacaagctggcgtccaaaactcgcttctactggattgaagaatggcctacttcagttcaccaggggctcctaagggagactttcctccgttgctcatcactcatcg

SEQ ID NO: 109 - DNA, 188 bp, Homo sapiens
  misc_feature 1..188: note = U/M: U (0.07:0.88) in Oral, Larynx and Esophageal epithelium
  misc_feature 1..188: note = source = chr6:17575539-17575726; Gene: FAM8A1 (Intergenic)
  source 1..188: mol_type = genomic DNA
cgccaggcacggtggctcatacctataatcccagcactttgggagaccaaggcaggcggatcatttaaagccaagaggttgctgcaataagctatgattgagtcacttcattccagcctgggcaacagactgaatcctatctctaaaaaaaaaaaaaaaaaaaaaagtgccaggcacggtggctcacg

SEQ ID NO: 110 - DNA, 230 bp, Homo sapiens
  misc_feature 1..230: note = U/M: U (0.09:0.88) in Oral, Larynx and Esophageal epithelium
  misc_feature 1..230: note = source = chr14:74849506-74849735; Gene: VRTN (Intergenic)
  source 1..230: mol_type = genomic DNA
cggcctcccaaagtgctgggattacaggtgtcagccaccgtgcctggcccgggagtttcttaaaaaaactaaatatatgcttaccctctgactcaatattttcacctctaggtatttacctgagagaaaagaaaatatatttccacaaaaaatattgtataagaatgttaatggaagctttttttttttttttttaagaccaagttttgttcttgtcgcccaggctggcg

SEQ ID NO: 111 - DNA, 467 bp, Homo sapiens
  misc_feature 1..467: note = U/M: U (0.12:0.91) in Oral, Larynx and Esophageal epithelium
  misc_feature 1..467: note = source = chr16:3998421-3998887; Gene: CREBBP (Intergenic)
  source 1..467: mol_type = genomic DNA
cgagctttctcattccttctggtggctgcctggtattctagtctatggatggataaatatttattgatggatatttaggttgttgctacacctcagcttttgcaaacaaatgctgcaaagaagaacctggtgcatgagacattttgcatgttcgggcagatctgtagaagtaattcccagaagggcgcatgttttttacattttgacagttcttgctaaatggccctttatagaggttacaccagttttaattcccatcagaatttatttccaaacctatcatgagatacgccagcactgacaagaatcctcactgcggcattgttcatcgcgccccaaactggaaacagctcaatcgatcctcagcggaacggagaaatcatggcctcttcacgcgatgaaatattatgctgcaatgaaaagaaacaaaattctgctgcacacggcagggaggaatctcctaggcg

SEQ ID NO: 112 - DNA, 143 bp, Homo sapiens
  misc_feature 1..143: note = U/M: U (0.14:0.91) in Oral, Larynx and Esophageal epithelium
  misc_feature 1..143: note = source = chr13:113105830-113105972; Gene: SPACA7 (Intergenic)
  source 1..143: mol_type = genomic DNA
cggagggcgtggggagagatggtgacggcgcggagcctccctgggccgattggcacgatccgcgctccggagtcacctgcgcgccagctgatgacacagtgtgaatctcctccaaggtgtgactccatgtcccgggactggcg

SEQ ID NO: 113 - DNA, 218 bp, Homo sapiens
  misc_feature 1..218: note = U/M: U (0.16:0.93) in Oral, Larynx and Esophageal epithelium
  misc_feature 1..218: note = source = chr4:184554422-184554639; Gene: RWDD4 (Intergenic)
  source 1..218: mol_type = genomic DNA
cgtctcttggattcaagcgattctcttgcctcagcctcccaagtagctgggattacaggcatctgccaccacgcccagctagtttttgtatttttagtagatacggggtttcaccatgttggctaggctggtctcgaactcctgatctcaggtgatctgcccgcctcggcttcccaaagtgctgagattatacaggtgtgactcaccttgcccggccg

SEQ ID NO: 114 - DNA, 222 bp, Homo sapiens
  misc_feature 1..222: note = U/M: U (0.09:0.86) in Oral, Larynx and Esophageal epithelium
  misc_feature 1..222: note = source = chr4:184754711-184754932; Gene: STOX2 (Intergenic)
  source 1..222: mol_type = genomic DNA
cgcaacagagaaatagcgttggcaaggcgggatcggggctgatgaaaatgatacaggcttttatatttctgcaggagttttttttttttttcattccaagcataccagagtttcaccaaagcaggtagaaagaatgtgagaagggccgggcgcggtggctcacgcctgtaatcccagcactttgggaggccgaggcgggcggatcacgaggtcaggagatcg

SEQ ID NO: 115 - DNA, 332 bp, Homo sapiens
  misc_feature 1..332: note = U/M: U (0.1:0.86) in Oral, Larynx and Esophageal epithelium
  misc_feature 1..332: note = source = chr2:190369207-190369538; Gene: WDR75 (Intergenic)
  source 1..332: mol_type = genomic DNA
cgtcgggttagtcacttaatccttctaagcctcattttccacagctgtcaattaaagaaaaatagattacttcagagagtgtttggggattcaaattacataatggaaatgtatatgctttgtaaattataaaattatctatgaatgttacttaacgacattttaatactaaaatctggctgtacaggttttagggattatttaaataatcggaaaagaaggctgggcgtgttggctcacgcctgtaatcccagcactttgggaggccgaggcagttggattgcctcaggtcaggagttcaagaccagcctggccaacatggcaagaccccg

SEQ ID NO: 116 - DNA, 449 bp, Homo sapiens
  misc_feature 1..449: note = U/M: U (0.14:0.9) in Oral, Larynx and Esophageal epithelium
  misc_feature 1..449: note = source = chr20:35858645-35859093; Gene: RPN2 (intron)
  source 1..449: mol_type = genomic DNA
cggtgactaacccccagaaagcagagagttgaagatgaaatcagaacctgagtctggttttcctgacatccggcaggttcaaccctcagaccacagcttattagctatgagcgcagatggttctagcgtttatcctccctgctcctgtgtaaatcagggctgatggggcgacaggtgggaaaactcacctgggagaacagggctctacttccttaggcaagtccttggataagcaagcctggtcctgtcctgcacgcaggactgttgtgagaatcaaagttgataacagatgagtgaagaaaggctttgaaatgtttctaaagccctttccaaaataaacacaataattgttaaacactttggatactggttaaggaaactgaggtggatccactcagtggactattttgcaatcttgagaaatgatcgtacttggaaacttgcatacg

SEQ ID NO: 117 - DNA, 299 bp, Homo sapiens
  misc_feature 1..299: note = U/M: U (0.1:0.82) in Oral, Larynx and Esophageal epithelium
  misc_feature 1..299: note = source = chr20:31649647-31649945; Gene: BPIFB3 (intron)
  source 1..299: mol_type = genomic DNA
cgggccgtgtgccagcatgccctctcccaggactgggcctctttccccctctggttttgggtgaagtttggcgccaggcaggattaggctgtacttcccttccacacccacctggtaatcccatccgggcctgctgaccggccttcctggcgcgcctgctagtctgggggtggatgacacgatcctttcggcctgggtcccctgctcccaaatcgtaggctcctaagaagggtaagaacccctgctctgtttctgccatttgtattagtaccaactttatgtttttctttaaattagcg

SEQ ID NO: 118 - DNA, 132 bp, Homo sapiens
  misc_feature 1..132: note = U/M: U (0.21:0.91) in Oral, Larynx and Esophageal epithelium
  misc_feature 1..132: note = source = chr14:74513552-74513683; Gene: CCDC176 (intron)
  source 1..132: mol_type = genomic DNA
cgtcagcctccagagtagctgggactacaggcatgtgccaccacgcccagctaatttttgtattttttgtagagactgggttttgcccgggctggtctcgaactccggggctcaagcaatccacccgcctcg

SEQ ID NO: 119 - DNA, 363 bp, Homo sapiens
  misc_feature 1..363: note = U/M: U (0.2:0.9) in Oral, Larynx and Esophageal epithelium
  misc_feature 1..363: note = source = chr20:33144418-33144780; Gene: MAP1LC3A (intron)
  source 1..363: mol_type = genomic DNA
cgagacagagtctcactctgttgcccaggctggagggcagtggcgcaatctcagctcactgcaacctccgcctagcaggttcaagcaattcttgtgcctcagccacctgagtagttgggatgacaggcgtgcaccaccacgcccagctagctaatctttgtatttttagtagagacagagttttgccatgttggccaggctggtcttgaattcccagcctctagtgatccacccacctcggcctcccaaagtgctgggattactggcatgagccactgcgcctggcctattttcagccttaaaaacaaaaaccctggaacatagaagttcagaactttcctctcttcacagagttcctcctcg

SEQ ID NO: 120 - DNA, 375 bp, Homo sapiens
  misc_feature 1..375: note = U/M: U (0.22:0.92) in Oral, Larynx and Esophageal epithelium
  misc_feature 1..375: note = source = chr2:47094735-47095109; Gene: LOC100134259 (Intergenic)
  source 1..375: mol_type = genomic DNA
cgaagtgctgggattacacgtgtgagccactgctcctggcccagcttgctttctgaggcagcctaagccccaagctgggattgcagggacctacattcttgttccggttgagtcactaactacctaggtgtgctagggcagggcctgtcacttctttgggactcagattccttgcctgtaaagaaggttggccctcagagcccccttgcaattttaaggttctagaattccacttttgggaccagctggtgccccatgaacagcttgttgtggttcctacattagtttagattggggtgtcctacaagtccctgtggtgagaaagggcagtcttcctcccgcagcgagtcagagcctaccttggcagaggcgtcg

SEQ ID NO: 121 - DNA, 459 bp, Homo sapiens
  misc_feature 1..459: note = U/M: U (0.21:0.9) in Oral, Larynx and Esophageal epithelium
  misc_feature 1..459: note = source = chr4:178278001-178278459; Gene: NEIL3 (intron)
  source 1..459: mol_type = genomic DNA
cgatccaattactgtaaacacagagcaaaacacagtgatgcagtttcaaagaatgcatgtgttttaggctgaaatttttcctgcgttgatgcaaaggctcacataggagggtgaaatgacaataacaaaatcattaatattttctcacatttgctgccgtcagggatgttgaagatctgtctttaatcaccagtgcaagtactgacaccatgtccttgtctcttggttgcttcttggagttttcagtctcaggatttcagaaccacctggggccgtccagaatgagtcatttcacttttgtttgttttaatcctcgaaataatcctgtatgacaaaatctacattcagtgagaccgattaatccaaaaaattcagacagtatttttattataatgaatcgccctatctataaaatgagttaaaccaagcttgtccaaccataggcttgtgggctggacg

SEQ ID NO: 122 - DNA, 350 bp, Homo sapiens
  misc_feature 1..350: note = U/M: U (0.19:0.86) in Oral, Larynx and Esophageal epithelium
  misc_feature 1..350: note = source = chr1:27183269-27183618; Gene: SFN (Intergenic)
  source 1..350: mol_type = genomic DNA
cgcctccctcctcccaggcctgctaaccctctctcttctccttctttgctgtcctgccggggatctccagtgtgtgcgggggcttaaggacctcctgaggaccgctgctctctgcctctccaggaatggcctggggggagccaggcacccggcacctccacctgcctaacctgtggcccatctgccaccatctgtgcctacagggtctgccccccagcctgcccggcctgtgtgctctctaggacccccatagggggcaggggctggcctctttgccccattcccgctccatgccggccagagtgtagaaagccataacgcagccatcagcacaataatgtgactctacg

SEQ ID NO: 123 - DNA, 342 bp, Homo sapiens
  misc_feature 1..342: note = U/M: U (0.24:0.9) in Oral, Larynx and Esophageal epithelium
  misc_feature 1..342: note = source = chr20:35857668-35858009; Gene: RPN2 (intron)
  source 1..342: mol_type = genomic DNA
cgtgatgagagtaaacgtcttgcaagacagggcatttgagcaaggggttgaagaatggcaagggtttatcagatctggggctgtggggtgatcattggggaagggcttgcagaagagctcaaggtgctttcagtgcaatgggagcggttgtgttttgccagagcacctgaatcctgtcaaaagcaggaggtgatgagcttggaaaggtagcagaggccaaattgcaggctttgaatggtggttgactcactttgcaagacaaaggggcagctgcgttttctcgtgtggtattcaagacttcttttcttctcctggacttcaggctgtttttgtacaagagcg

SEQ ID NO: 124 - DNA, 159 bp, Homo sapiens
  misc_feature 1..159: note = U/M: U (0.2:0.83) in Oral, Larynx and Esophageal epithelium
  misc_feature 1..159: note = source = chr6:16323477-16323635; Gene: ATXN1 (intron)
  source 1..159: mol_type = genomic DNA
cgcagtggctcacgcctacaatcccagctttaggaggctgaggcgggtgaatcacctgaggtcaggagttcgagaccagcctggccaacatggtgaaaccctgtctctactaaaaatacaaaaattagcagggggtgatggcgtgtgcctgtagtctcg

SEQ ID NO: 125 - DNA, 201 bp, Homo sapiens
  misc_feature 1..201: note = U/M: U (0.27:0.85) in Oral, Larynx and Esophageal epithelium
  misc_feature 1..201: note = source = chr22:18287102-18287302; Gene: MICAL3 (intron)
  source 1..201: mol_type = genomic DNA
cgtgcagtcagtgctctcccaggaattcccacgaccccactgctgactctatcaaatgccttgcagacccacttttgccgaatgggtttgagagaaaggggatcctgtttcgaggcttaggcctccaaattcagtcggccttcttaacaacaggaaacgagcagagactcatgcagagttcttcccccaggcactcggccg

SEQ ID NO: 126 - DNA, 342 bp, Homo sapiens
  misc_feature 1..342: note = U/M: M (0.7:0.14) in Oral, Larynx and Esophageal epithelium
  misc_feature 1..342: note = source = chr4:86747319-86747660; Gene: ARHGAP24 (intron)
  source 1..342: mol_type = genomic DNA
cgacctctaaaaaatgcttaagtaattgtagagaaattagcatgaatgcccagatgcatttgttactgaataactcagcagtgaacttggcattccatagctaacctttccccttcattaatccccttctccatccccctcaaacacaggagtacaacaggatgccaggcgaactatgtaaccaaccatgcacgtgagcattttctcccagaattttgactagtcttgttctgcctcaaacactagacggggctcatgctgctcacaattaactgactctggccatgtggtggctgccctcaagatctgccacaaagagaacagcagttcaataaaatctcg

SEQ ID NO: 127 - DNA, 314 bp, Homo sapiens
  misc_feature 1..314: note = U/M: M (0.6:0.09) in Oral, Larynx and Esophageal epithelium
  misc_feature 1..314: note = source = chr5:139030310-139030623; Gene: CXXC5 (intron)
  source 1..314: mol_type = genomic DNA
cgtgccttggtttccaaccgccactagaaaaccgggaactgagaccgaagccccctctaaacccctttctgagagccgtgcggggaaactcaggccggcgggctacctacccgtaactgcgtattgttgatttagcagtttccctagatgagagtcaggctggagcttgggggggtggggagtggcccgctctgcagctgtcacccccctcccagaacggaaattgtcctctccttggggaggagggagagggggtgatggtttgatttttgccctgggaagagatgggaacagctgaaggagattggcctccg

SEQ ID NO: 128 - DNA, 144 bp, Homo sapiens
  misc_feature 1..144: note = U/M: M (0.74:0.26) in Oral, Larynx and Esophageal epithelium
  misc_feature 1..144: note = source = chr16:1970516-1970659; Gene: HS3ST6 (Intergenic)
  source 1..144: mol_type = genomic DNA
cgtgatggctcctccagccccctgcccagcccagcatggtcatttccatctcctggcctttccgctgccgtctctctgctggatgctttatccttagtccccgctgagggcagaaggactttccaggaggaattgaccagaacg

SEQ ID NO: 129 - DNA, 126 bp, Homo sapiens
  misc_feature 1..126: note = U/M: M (0.66:0.21) in Oral, Larynx and Esophageal epithelium
  misc_feature 1..126: note = source = chr8:94995343-94995468; Gene: PDP1 (Intergenic)
  source 1..126: mol_type = genomic DNA
cggataaagacattattcactgactcaggtgggatggttcccacagtgaattgctgcattccctgaagaccgtcctctatcgctccctctagtggctgatctgttttaaaaacccgcttgtacacg

SEQ ID NO: 130 - DNA, 134 bp, Homo sapiens
  misc_feature 1..134: note = U/M: M (0.58:0.14) in Oral, Larynx and Esophageal epithelium
  misc_feature 1..134: note = source = chr1:226187637-226187770; Gene: SDE2 (promoter-TSS)
  source 1..134: mol_type = genomic DNA
cgggtttctgcctgccacgcacggtttattcttatttccgcctgtttgtgcactgcgttatctccacttcagctctgttttcaaaatatttcacagcaagtgggctcttgtgaaaggcagtgacaggagtgacg

SEQ ID NO: 131 - DNA, 146 bp, Homo sapiens
  misc_feature 1..146: note = U/M: M (0.59:0.2) in Oral, Larynx and Esophageal epithelium
  misc_feature 1..146: note = source = chr19:52223282-52223427; Gene: HAS1 (intron)
  source 1..146: mol_type = genomic DNA
cgtccttccttctctttatctttctctctctctgtgtctgtctcgctgtctctctctctctctcgctctcgctctccctttctctctcctttcgttttttgttttttttttcttttgagacagggtctcactccagcctagtgtcg

SEQ ID NO: 132 - DNA, 199 bp, Homo sapiens
  misc_feature 1..199: note = U/M: M (0.61:0.25) in Oral, Larynx and Esophageal epithelium
  misc_feature 1..199: note = source = chr6:133089322-133089520; Gene: VNN2 (Intergenic)
  source 1..199: mol_type = genomic DNA
cgggctgaggaagggcggctgtccttgcgtgggtggacatgaaggtcaaaaaagtcctggagggggccaggatgacttaaggcaatcaaggcccagatctgcatgccacatgggtgcagggggccagggtcacactctgtcctggcactgctccgggaagggaattgcaggccatttgtcctcctcagacattggatcg

SEQ ID NO: 133 - DNA, 260 bp, Homo sapiens
  misc_feature 1..260: note = U/M: M (0.52:0.18) in Oral, Larynx and Esophageal epithelium
  misc_feature 1..260: note = source = chr21:43199238-43199497; Gene: RIPK4 (Intergenic)
  source 1..260: mol_type = genomic DNA
cgcagagcatttggtttatccacatccccccgccccccgcccatgcatattagtggtttccagtgctaaagggacagcgccccccacgtgcatttctccaggtactgaggcaggagaataggggctggaggcaggggaccaaaggctgtttcactcagacttcctacaactaaattgaaaggaaaaccctaactttccactcctaagtaacaaaaggaccagaggctattccctttctaaacccccccaccttttcctcg

SEQ ID NO: 134 - DNA, 289 bp, Homo sapiens
  misc_feature 1..289: note = U/M: M (0.57:0.13) in Oral, Larynx and Esophageal epithelium
  misc_feature 1..289: note = source = chr8:38299962-38300250; Gene: FGFR1 (intron)
  source 1..289: mol_type = genomic DNA
cggagcccaggcctcccagccatgtgtctgcagctgcgacctgtcatgcacttcctggtctgggttctgtaatggaaagatcattaagagtgggggagggtggagagatgaatcaacggcaaagaggtaaccctgcagctcccactctccactgagctctgaccttaaagttcggtcaggttccttaaggaaaagaatgtatcgccctccccccacctctcccagctggggcctctcgaacaacctcccctcccccaaactcagcagaaattgtatggggaaggaaacg

SEQ ID NO: 135 - DNA, 399 bp, Homo sapiens
  misc_feature 1..399: note = U/M: M (0.79:0.12) in Oral, Larynx and Esophageal epithelium
  misc_feature 1..399: note = source = chr3:181421265-181421663; Gene: SOX2-OT (intron)
  source 1..399: mol_type = genomic DNA
cgaattcgagataacatttcaaggggaattgctatttagtgcgatgagagatgacttctccatctggttccagaattagatctcggcttaggttttttagtaagtaggttcagatgcaatggaaggagagaagaatcaagccttttgataaaatctctaccccgaattctatggaaaagacaggcaagcgggattccagccacagcacccccaccttttgctctaccaaaaggcttgtccccattacagaaataatatagtcggtgctagttttgtgaacccgcgccaaccgataaggtaagaaacggtgcgctgacagccgaggtccgaaggctgctcagtggttcccgcagcccgtggggtagggaggccaaagccagcaaaatgttggaggcgacg

SEQ ID NO: 136 - DNA, 144 bp, Homo sapiens
  misc_feature 1..144: note = U/M: M (0.8:0.16) in Oral, Larynx and Esophageal epithelium
  misc_feature 1..144: note = source = chr20:55500006-55500149; Gene: TFAP2C (Intergenic)
  source 1..144: mol_type = genomic DNA
cgtgcacctagataatgaagcctggtcgcggttattggcagaagggcccgggcgcgctgtgagaacgctgcaggctcactttgtagtgcggggcctacgcctattagattccaatcagtttcgcctaaaaaggggaggagggcg

SEQ ID NO: 137 - DNA, 161 bp, Homo sapiens
  misc_feature 1..161: note = U/M: M (0.8:0.19) in Oral, Larynx and Esophageal epithelium
  misc_feature 1..161: note = source = chr11:78673053-78673213; Gene: TENM4 (intron)
  source 1..161: mol_type = genomic DNA
cgtcaggcccccagctcccccggatcccaccacgcaccaggcccctccgcccggcaagtggcccaagcaggcatccgcaacggaaggacaattttaaaaacaaaccctcaaaagtaggaagagagagggacttaccgttcgccgcgacccccaggctggcg

SEQ ID NO: 138 - DNA, 408 bp, Homo sapiens
  misc_feature 1..408: note = U/M: M (0.66:0.1) in Oral, Larynx and Esophageal epithelium
  misc_feature 1..408: note = source = chr17:80452508-80452915; Gene: FOXK2 (Intergenic)
  source 1..408: mol_type = genomic DNA
cgtgccttgacacaaacagggacgttattggggcctggagaagaattatgggccacaggctgcccagtcaggaaagaaaagggagtctatagcagaggatggtttcgatccatcgacctctgggttatgggcccagcacgcttccgctgcgccactctgctggctataaggggggagcctgagtcagatcatgaccacaggagtcatctccctgcaggcggcgacccctactggccaagaggggccaacagaggactggctgggcaaggcacatgctcaattataagcctactcctcctctctcaacttcttgtagataaaactctctgaattcatgtccttttctgctgttaaaacattggctggaggccgggcacagtggctcacgcctgtaatcacagcacttcg

SEQ ID NO: 139 - DNA, 36 bp, Homo sapiens
  misc_feature 1..36: note = U/M: M (0.73:0.19) in Oral, Larynx and Esophageal epithelium
  misc_feature 1..36: note = source = chr17:48049945-48049980; Gene: DLX4 (promoter-TSS)
  source 1..36: mol_type = genomic DNA
cgctggccgcagccggaggctgccacgcggacaccg

SEQ ID NO: 140 - DNA, 61 bp, Homo sapiens
  misc_feature 1..61: note = U/M: M (0.72:0.2) in Oral, Larynx and Esophageal epithelium
  misc_feature 1..61: note = source = chr17:48050244-48050304; Gene: DLX4 (exon)
  source 1..61: mol_type = genomic DNA
cggtgaacgtgggggttgaaacgctccacgcggaaggtagagggcaggggccaagggggcg

SEQ ID NO: 141 - DNA, 125 bp, Homo sapiens
  misc_feature 1..125: note = U/M: M (0.75:0.23) in Oral, Larynx and Esophageal epithelium
  misc_feature 1..125: note = source = chr9:96715977-96716101; Gene: BARX1 (intron)
  source 1..125: mol_type = genomic DNA
cggaaattccaaagtaccctgagaacctggaaattattgttcacgttttctattttcagacgcttccccatgcagatgtttccattttcttcagtcctaaaatgattgtgtgcccgcttcaaacg

SEQ ID NO: 142 - DNA, 324 bp, Homo sapiens
  misc_feature 1..324: note = U/M: M (0.65:0.13) in Oral, Larynx and Esophageal epithelium
  misc_feature 1..324: note = source = chr17:53341243-53341566; Gene: HLF,HLF (promoter-TSS,Intergenic)
  source 1..324: mol_type = genomic DNA
cggttttctttcatttgtgcccattcgttcttgcagccccttccccagatcgaagactagggtcttagtaaggagaggtaaggagggaggggaagaacctgcctggccccccgcggagctctgcagggggcgtcgcggctgcacgccagcgcccgcaccaccccaggcgggaagggagttatcacacagggggtcgcacgcagatctcggggaccgtgggtgccacgaggtcaaactggcagagggagacgctgcagctgctgtaacagcaaggaaagccgaagcccccttaggggatactttacaaaattattttaatcaccg

SEQ ID NO: 143 - DNA, 127 bp, Homo sapiens
  misc_feature 1..127: note = U/M: M (0.67:0.17) in Oral, Larynx and Esophageal epithelium
  misc_feature 1..127: note = source = chr16:3017432-3017558; Gene: KREMEN2,KREMEN2 (intron,exon)
  source 1..127: mol_type = genomic DNA
cggccgcgattgggggtgaggcgggcgcgcgggacgggagtgagtcagggagccgccccctcgcgcccatcctcaccgcagccgtgtgcccgcagcccgggtcttctcgacggtgacggctgtctcg

SEQ ID NO: 144 - DNA, 132 bp, Homo sapiens
  misc_feature 1..132: note = U/M: M (0.62:0.13) in Oral, Larynx and Esophageal epithelium
  misc_feature 1..132: note = source = chr16:68676804-68676935; Gene: CDH3 (Intergenic)
  source 1..132: mol_type = genomic DNA
cgcggagctcagcgagcagccccaggctttcccaaccgcgtggtccacccccagcctcagtcccagccccagctgctgggctcacccgccggctaagggaatgctcccgagataccagatgccagttgctcg

SEQ ID NO: 145 - DNA, 150 bp, Homo sapiens
  misc_feature 1..150: note = U/M: M (0.63:0.15) in Oral, Larynx and Esophageal epithelium
  misc_feature 1..150: note = source = chr17:48050048-48050197; Gene: DLX4 (promoter-TSS)
  source 1..150: mol_type = genomic DNA
cggctcagccctggacctagcctttctgccccgccctaccccaagctggcgccaccgcccgtggctgaactccgacctcccaccgcaggcgccgcggtaccctggctgtggccctcggcgctttcttcctagggtcacaggacccatacg

SEQ ID NO: 146 - DNA, 96 bp, Homo sapiens
  misc_feature 1..96: note = U/M: M (0.72:0.25) in Oral, Larynx and Esophageal epithelium
  misc_feature 1..96: note = source = chr9:975762-975857; Gene: DMRT3 (Intergenic)
  source 1..96: mol_type = genomic DNA
cgtggggatttgaactgagtggctggcgcaagacctccgtttgcttccagtagctgctgggagcgagggaagaggatatcggtaactttgggggcg

SEQ ID NO: 147 - DNA, 42 bp, Homo sapiens
  misc_feature 1..42: note = U/M: M (0.65:0.19) in Oral, Larynx and Esophageal epithelium
  misc_feature 1..42: note = source = chr13:95354825-95354866; Gene: SOX21 (Intergenic)
  source 1..42: mol_type = genomic DNA
cggagagttgagtgagcgcagatccgtgacgcctgcggtacg

SEQ ID NO: 148 - DNA, 56 bp, Homo sapiens
  misc_feature 1..56: note = U/M: M (0.66:0.21) in Oral, Larynx and Esophageal epithelium
  misc_feature 1..56: note = source = chr21:28337857-28337912; Gene: ADAMTS5 (exon)
  source 1..56: mol_type = genomic DNA
cggccatacaaccgcgccatggacgcgtcagccaccagaagcagctccacctggcg

SEQ ID NO: 149 - DNA, 299 bp, Homo sapiens
  misc_feature 1..299: note = U/M: M (0.6:0.16) in Oral, Larynx and Esophageal epithelium
  misc_feature 1..299: note = source = chr9:96709470-96709768; Gene: BARX1 (Intergenic)
  source 1..299: mol_type = genomic DNA
cggcaactatcagcgcaatcaatcatcagtggaggtattcctaaaacttctttgagaagccttctttgagagaggtcagaggcacctctctcaatggacaccctctaagctgctcttcccctgtgaatttctatgccttgctgaagaaccaccccccaccccgccccgccccaagcttctcctcccctgtgaattccttggcctagctgaaggactcccctctgtggtcttcccctccagtgttggtgcctgagaggccaggggccaccactgttcactggaatggctaaataacctcg

SEQ ID NO: 150 - DNA, 211 bp, Homo sapiens
  misc_feature 1..211: note = U/M: M (0.61:0.18) in Oral, Larynx and Esophageal epithelium
  misc_feature 1..211: note = source = chr10:102898947-102899157; Gene: TLX1 (Intergenic)
  source 1..211: mol_type = genomic DNA
cggcagccatgagggctgtgacacaggtcgtgagcacagcaacttcccaccccagcaagcccatggggaagttcggctgagtggagggtgggcttggtcatccaccccctcatctggggtcccctgggatatccgcataagagggggcttctgtcactcactttgtgtagacatgaagaaaagagaaaaagaggggagggttcagggtccg

SEQ ID NO: 151 - DNA, 305 bp, Homo sapiens
  misc_feature 1..305: note = U/M: U (0.05:0.97) in Gastric Epithelium
  misc_feature 1..305: note = source = chr6:126336351-126336655; Gene: TRMT11 (intron)
  source 1..305: mol_type = genomic DNA
cgactcctgcacatatctattatcactaatcttttttttgagatggagtctcactctgtcacccaggctggagtgcagtggcatgatcttggctcactgcaagctccgccttccgggttcacgccatttctcctgcctcagcctcccaagtagctgggactacaggtgtctgccactgcgcccagctaattttttgtatttttttagtagagacagggttttaccatgttagccaggatgatcttgatctcctcacctcttgatccacttgcctcggtgctgggattacaggtgtgagccactgc

SEQ ID NO: 152 - DNA, 320 bp, Homo sapiens
  misc_feature 1..320: note = U/M: U (0.03:0.95) in Gastric Epithelium
  misc_feature 1..320: note = source = chr5:139627446-139627765; Gene: PFDN1 (intron)
  source 1..320: mol_type = genomic DNA
cggaggctgcagtgagccaaggccatgccatcgcactccagcctgggcaacaagagcaaaactccaactcatggtgaccatgataaccattcaatccaatgcctgcaaatgcatactgctgctaaggaattttaattacattgctaaaccaaatacagtcctatcactgtgatatcagagtgggaatttaaacttcctttgataaacaactcttttttttttttttgagacggaatctcgcactgttgcccaggctggagtgcaatggcgccatctcggctcactgcaacctccgcctcccgggttcacacgattctccc

SEQ ID NO: 153 - DNA, 346 bp, Homo sapiens
  misc_feature 1..346: note = U/M: U (0.01:0.91) in Gastric Epithelium
  misc_feature 1..346: note = source = chr6:119154681-119155026; Gene: MCM9 (intron)
  source 1..346: mol_type = genomic DNA
cggagaaaatccaggcgtacatagataaaggaatggataaggaaaacgcggtctatacacacaatggaaaattgttcagtcttaaaaagaaagaaaatgcaaacacatactacaacatggaagaaccttaactatatcatgctaagtgaaataagccagttacgaaagatcaatactgtatgattccacttacctgtgaaatacctagagtagtcaaatccatagaaacggaaagtagaatggtggttgctaggggctgggaggaggaggaaatgggagtttttttaaacaggtatagagtttcagtttgcaagacggaaagagtcctggtgattgcttgtacaac

SEQ ID NO: 154 - DNA, 369 bp, Homo sapiens
  misc_feature 1..369: note = U/M: U (0.01:0.91) in Gastric Epithelium
  misc_feature 1..369: note = source = chr7:152166508-152166876; Gene: LOC100128822 (Intergenic)
  source 1..369: mol_type = genomic DNA
cgattacctgcggtattgctgactagctgctgccctctttacacagggtgtacactccatatatcaggctcagtacagtcatttatcttcaccacctggccactgcagggatctgtgtttggaatactgatatggtttggctctgtccccaccctcctaaatctcaacttgaattgtaactcccagaattcccatgtgttgtgggaaggacccagagggaggtaattgaatcatgggggccagtctttcccgtgctactcttgtggtagtgaatacatctcatgagatctgatgggtttatcaggggtttctgcttttgcttcgtcctcattttttcttgctgccgccatgtgccttttgcctcccgcc

SEQ ID NO: 155 - DNA, 63 bp, Homo sapiens
  misc_feature 1..63: note = U/M: U (0.06:0.95) in Gastric Epithelium
  misc_feature 1..63: note = source = chr2:232284718-232284780; Gene: B3GNT7 (Intergenic)
  source 1..63: mol_type = genomic DNA
cgtgaacccgggatgcggagcttgcagtgagccgagatcgcgccagtgcactccagcctgggc

SEQ ID NO: 156 - DNA, 195 bp, Homo sapiens
  misc_feature 1..195: note = U/M: U (0.06:0.95) in Gastric Epithelium
  misc_feature 1..195: note = source = chr18:55321793-55321987; Gene: ATP8B1 (intron)
  source 1..195: mol_type = genomic DNA
cgcccacctcggcctcccaaagtgctgggattataggcgtgagccactgcacccagccctgttatcgctactcttaatgtcaacatgaaaaaataaccaaagataaagataaaaacatacaagcaaatcccctcctttttttttttttttttgagacaaagtcttgcccaggttggagtgcaatagcgcagtctc

SEQ ID NO: 157 - DNA, 106 bp, Homo sapiens
  misc_feature 1..106: note = U/M: U (0.05:0.93) in Gastric Epithelium
  misc_feature 1..106: note = source = chr1:150813616-150813721; Gene: ARNT (intron)
  source 1..106: mol_type = genomic DNA
cgcggtttcaccaagttggccaggatattctccatctcttgacctcgtgatctgcctgcctcggcctcccaaagtgctagggttacaagcatgagccactgcgccc

SEQ ID NO: 158 - DNA, 183 bp, Homo sapiens
  misc_feature 1..183: note = U/M: U (0.01:0.89) in Gastric Epithelium
  misc_feature 1..183: note = source = chr2:103095103-103095285; Gene: SLC9A4 (intron)
  source 1..183: mol_type = genomic DNA
cgccgagctgggcatgttacctactgatcttattggcgaccctcatgacactaccagttcctgctacagatgggacgctgaggctgagatgccagtcagcttgtccacggtcctgtctgcttgactttaaaagacctcaggtacacccagaccgtttcgtttgcaagcacctaactgctcttc

SEQ ID NO: 159 - DNA, 275 bp, Homo sapiens
  misc_feature 1..275: note = U/M: U (0.01:0.89) in Gastric Epithelium
  misc_feature 1..275: note = source = chr4:25304443-25304717; Gene: ZCCHC4 (Intergenic)
  source 1..275: mol_type = genomic DNA
cgtgactatatgtattttgtatgtaaatagtcatgaccacgtggttaagttataatgaaatcatcagaggcatggactttcttatcagagtgcattagtactggagatatgtaaggcaaaatggttttttttttctctttgtatatgactttttttttttttttttttgagaaggagtctcgctctgtcgcccaggctggagtgcagtggtgcgatctcggctcactgcaagctccgcctcctgggttcacgccattctcctgcctcagactccc

SEQ ID NO: 160 - DNA, 366 bp, Homo sapiens
  misc_feature 1..366: note = U/M: U (0.02:0.9) in Gastric Epithelium
  misc_feature 1..366: note = source = chr21:35738641-35739006; Gene: KCNE2 (intron)
  source 1..366: mol_type = genomic DNA
cgagggatctttaacaccgcccctcccccacccccaattcccacaccccttaagaataaattaagaatcactgttctggtagtttccagttgaattccacagaggaactgtcattcattcacaccttcattcaacagatttttagtaaagatttgctacgtacccatcgctgtgtagggtcccgggattcagagatgagtaaagcaatccctgccttccgggggctcaagctctcctgtcatcgggactcagttactgaatctcactaaacatcctgaaggtaggagtttatagagtggttttgaggatcacatgaataagcacacaatacatgggtaattcaaaaacgaaaacaaggccgggcac

SEQ ID NO: 161 - DNA, 192 bp, Homo sapiens
  misc_feature 1..192: note = U/M: U (0.06:0.93) in Gastric Epithelium
  misc_feature 1..192: note = source = chr3:30693303-30693494; Gene: TGFBR2 (intron)
  source 1..192: mol_type = genomic DNA
cgtgtaccttctccaacactgggaatggataagtcttttaattttaccagcgtggtagtgtaaatgttagtttagtcaacaataggtctgatttaattaaaaaatctttttgaaatacaaatgctggctctacaccctatctctgcggccatgtgcattccacctgcgagaagctatgtgtcctcgtgtttc

SEQ ID NO: 162 - DNA, 351 bp, Homo sapiens
  misc_feature 1..351: note = U/M: U (0.04:0.91) in Gastric Epithelium
  misc_feature 1..351: note = source = chr21:35739053-35739403; Gene: KCNE2 (intron)
  source 1..351: mol_type = genomic DNA
cggatcacgaggtcaggagatcgagaccatcctggctaacatggtgaaaccccgtctgtactaaaaatacaaaaaattagccgggcttcgtggcgggtgcctgtagacccagctactcaggaggctgaggcaggagaatggcgtaaacccgggaggcagagcttgcagtaagccgagatcgcgccactgcactccagcctgggcaaaagagactccatctcaaaaaaaaaaaaaaaaaaaaaaaaaaaggaaaaaaacaaaactaacatggtcatttgcagaaggggcagaaaaagggtctctgcctagacctggggaggtcagggaaagtactatggattggtaacaacc

SEQ ID NO: 163 - DNA, 489 bp, Homo sapiens
  misc_feature 1..489: note = U/M: U (0.08:0.95) in Gastric Epithelium
  misc_feature 1..489: note = source = chr8:6595371-6595859; Gene: AGPAT5 (intron)
  source 1..489: mol_type = genomic DNA
cggcttctttccttaaacctcacgaaccaacctctgctagcttctaagttttttcctgccacttctttacctctctcagccttcagagaattaaagggagttagggccttgctctggattaggatttgctttaagggagtgttgtggctggtttgatgttttatctagagcactcaaactttctccatatcagcaataaggctgttttgctttctaatcattcatgtgttcagtgaagtagcacttttaattctctttaagaacttttcctttgcatccgcaacttggctgtttagtggaaaggacctagcttttgacctaccttggctttcaacataccttcctcactaagccatttctagctattgatgtaaagtgagagacatgcaactcttcctttcactggaacgcttagcagccattgtagggttattaattggcctaatttcaatattgttgtgtctcagggaatagggaaacccaaggggc

SEQ ID NO: 164 - DNA, 410 bp, Homo sapiens
  misc_feature 1..410: note = U/M: U (0.06:0.92) in Gastric Epithelium
  misc_feature 1..410: note = source = chr17:554292-554701; Gene: VPS53 (intron)
  source 1..410: mol_type = genomic DNA
cggagagataggattaaaactatagatttatgtaaatacacacacaaatccagagcgatagccactgaaactacagatttatgtaaatacacacacacaaatccggagcgatagccattaaactacagatttacgtaaatacacacacacaaatccgcagtgatagccattaaactgataacaattaccacctctgaggacaacaatgggattctgaagtctaggtaaagggaacttaggtttcacctgtatacatatttgacctttttaaacaatagaagatgtggaaccaggtgcagtggctcacgcctgtaaccccgatgcactgggagcccaagaccagccctgggccacagagtgagaccctgtctctacaaaaaagtaacaaagttagttgggtgaggtgctgc

SEQ ID NO: 165 - DNA, 359 bp, Homo sapiens
  misc_feature 1..359: note = U/M: U (0.08:0.94) in Gastric Epithelium
  misc_feature 1..359: note = source = chr6:119150051-119150409; Gene: MCM9 (exon)
  source 1..359: mol_type = genomic DNA
cgtaagtggctcctctcactgctttctgtctaagcttttctctattgcctggtactacatagcctatcttgggtatttatttaattttcttgaaagggaatttcttttagttacagctaatctctctgttattttgaatgctttgtttgtcttcacgtacctttattttctaagataaaggaggaaatgatacgatcccagtcttcattcttggtatcaagcaaaaccaggatcaggtcaaatcgacttaagagtgggctgccgagggcaatgttcacagacacggactcctgggggtcgtactggcctttggggttcgttgctgccaggatggtggtccttgtgttcagcttgcacac

SEQ ID NO: 166 - DNA, 485 bp, Homo sapiens
  misc_feature 1..485: note = U/M: U (0.07:0.92) in Gastric Epithelium
  misc_feature 1..485: note = source = chr4:1364945-1365429; Gene: UVSSA (intron)
  source 1..485: mol_type = genomic DNA
cgtgtatgtgtgtgtatgtactcagtaagcctgcacaaaagaaggcctgcacgctctgcagctcacccgtgttcagtgagagtacgtctgtgggtggacctgtgtgtgtgtgtgtgtgtgtgtgtgtgtgtgtgtaaaatcgatgacgtgtacatgactttccgggtgtctgagctctctggtggcctctgtttttgacgctctgttctgtggtctcaggacacagtctgggcggtgctgattcttgggaggtgactgaggcccctgttgacttagtacttggttttctttcgtcagttccgcgtgtgtgttggagaagggacttcttgcatagtgtattactccgttttcctgctgctgataaggacatacctgagactgggcaatttacagaagaaagaggtttactggacttagcgttccacatggctggggaggcctcacaatcatggtggaaggcaagaaggagcaagtcacatcttaac

SEQ ID NO: 167 - DNA, 316 bp, Homo sapiens
  misc_feature 1..316: note = U/M: U (0.09:0.93) in Gastric Epithelium
  misc_feature 1..316: note = source = chr1:54805307-54805622; Gene: SSBP3 (intron)
  source 1..316: mol_type = genomic DNA
cgggcatggtggctcacacctataatcctagcactttgggaggctgaggcaggtagttcacctgaggtcaggagttcgagaccagcctggccaagatggcgaaaccccatctctactaaaaatacaaaaattagccgggcatgttggcgggcgcctgtaattccagctacttgggaggctgagggtaggagaattgcttgaaccaaaggggcggaggttgcagtgagctgagatcgtgccacttcactccagcacgggcaaaaaagcaaaactccatcaaagaaagaaagaaaagaaagaacgaaaggggaaaggc

SEQ ID NO: 168 - DNA, 233 bp, Homo sapiens
  misc_feature 1..233: note = U/M: U (0.1:0.93) in Gastric Epithelium
  misc_feature 1..233: note = source = chr13:22036153-22036385; Gene: ZDHHC20 (Intergenic)
  source 1..233: mol_type = genomic DNA
cgtgatcttggctcactgcaacctccacctcccagcttcaagtgattctcatgcctcagcctcccgagtagctgggattacaggcgtgcaccaccacgtgaggcctgcattttgtatttttgctagagatggggtttccccatgttggccaggctggtctcaaacttttggagtcaagtgatttgcctgcctcggccttccaaagtgctgggattacaggcctaagccacctc

SEQ ID NO: 169 - DNA, 83 bp, Homo sapiens
  misc_feature 1..83: note = U/M: U (0.17:0.96) in Gastric Epithelium
  misc_feature 1..83: note = source = chr1:32411721-32411803; Gene: PTP4A2 (Intergenic)
  source 1..83: mol_type = genomic DNA
cgaactcctgacctcaggtgatccgcccgcctcagcctcccaaagtgctgggattacaggcgtgagccaccgtgcccggccac

SEQ ID NO: 170 - DNA, 261 bp, Homo sapiens
  misc_feature 1..261: note = U/M: U (0.16:0.94) in Gastric Epithelium
  misc_feature 1..261: note = source = chr2:112824910-112825170; Gene: TMEM87B (intron)
  source 1..261: mol_type = genomic DNA
cgcggtggctcacacctgtaatcccagcaccttgggagactgaggtgggtggatcacctgtggtcaggagtttgagaccagcctggtgaaaccccatctctactaaaaataaaaaaattagccgggtgtggtggcatgtgcccgtagtcccagctactcgggtggctgaggcatgagaattgcttgaactcgtgaggcagagcttgcagtgagccatgattgcgccactgcactccagcctgggcgacagagcgagactcc

SEQ ID NO: 171 - DNA, 58 bp, Homo sapiens
  misc_feature 1..58: note = U/M: U (0.02:0.94) in Gastric Epithelium
  misc_feature 1..58: note = source = chr3:65168887-65168944; Gene: MIR548A2 (Intergenic)
  source 1..58: mol_type = genomic DNA
cgtgatccgcccgcctcgacctcccaaagtgctgggattacaggcgtgagccaccgcg

SEQ ID NO: 172 - DNA, 64 bp, Homo sapiens
  misc_feature 1..64: note = U/M: U (0.01:0.93) in Gastric Epithelium
  misc_feature 1..64: note = source = chr12:77624848-77624911; Gene: E2F7 (Intergenic)
  source 1..64: mol_type = genomic DNA
cgatcctggctcaccgcaacctctgcctccccggttcaagcgattctcctacctcagccttccg

SEQ ID NO: 173 - DNA, 110 bp, Homo sapiens
  misc_feature 1..110: note = U/M: U (0.02:0.92) in Gastric Epithelium
  misc_feature 1..110: note = source = chr1:77570358-77570467; Gene: PIGK (intron)
  source 1..110: mol_type = genomic DNA
cgcgccttcaacaaactcgcaacacaggcaccctgtttactcagcccaccatgctcaactccttgtgggagggagcatgtgagcaagcgagtgtgggatctgactggccg

SEQ ID NO: 174 - DNA, 247 bp, Homo sapiens
  misc_feature 1..247: note = U/M: U (0.01:0.91) in Gastric Epithelium
  misc_feature 1..247: note = source = chr1:41640685-41640931; Gene: SCMH1 (intron)
  source 1..247: mol_type = genomic DNA
cggatgccgagttgaaaacgagtacttgtgatggttaactttatgtgtcaacttaactgggctaagggacgcccaaatagctggtaaacattatttctgagtgtatctgtggtggtatttattgaagagattaacatttgaatcagtagactgagtaaagattgccctcaccaatgtgtgtgggcattatccaatccactgagggtccaaatagcacaaaaaggtgaaggaagagtgaattatctcg

SEQ ID NO: 175 - DNA, 143 bp, Homo sapiens
  misc_feature 1..143: note = U/M: U (0.02:0.91) in Gastric Epithelium
  misc_feature 1..143: note = source = chr12:32651756-32651898; Gene: FGD4 (Intergenic)
  source 1..143: mol_type = genomic DNA
cgaactcctgacctcgtgatccgcctgccttggcctcccaaagtgctgggattacaggcgtgagccaccacacccaacagttattagtttttttgtaccaaaccacttaatcaatggaactctaaggaattgctcctgccccg

SEQ ID NO: 176 - DNA, 202 bp, Homo sapiens
  misc_feature 1..202: note = U/M: U (0.02:0.91) in Gastric Epithelium
  misc_feature 1..202: note = source = chr3:137727159-137727360; Gene: CLDN18 (intron)
  source 1..202: mol_type = genomic DNA
cggagggctgggcacagtggctcacgcctgcaatcctggcactttgggaggccgaggcaggcagatcatttgaggtcaggagttcgaggccagcctgaccaacatggtgaaaccccatctctactaaaatacaaaaattagctgggtgtggtggcaggcgcctgtaatctcagctagtcaggaggctgaggcaggagaatcg

SEQ ID NO: 177 - DNA, 234 bp, Homo sapiens
  misc_feature 1..234: note = U/M: U (0.02:0.91) in Gastric Epithelium
  misc_feature 1..234: note = source = chr21:35736753-35736986; Gene: KCNE2 (intron)
  source 1..234: mol_type = genomic DNA
cgatctaccatgtttcaagaaaagaaaactttggggctgggcgcggtggctcacgcctgtaatcccagcactttgagaggctgaggcaggcggatcacctgaggtcaggagatcgagaccagcctggccaacatagtgaaaccccatctctactaaaaatacaaaaaaaattagcctggcgtggtggctggcgcctgtagtcccagctactcaggaagctgaggcaggagaacg

SEQ ID NO: 178 - DNA, 273 bp, Homo sapiens
  misc_feature 1..273: note = U/M: U (0.01:0.9) in Gastric Epithelium
  misc_feature 1..273: note = source = chr21:35737943-35738215; Gene: KCNE2 (intron)
  source 1..273: mol_type = genomic DNA
cgaactcctgggttcaagcgatcctcccacctcggcctcccgaagtgctgggattacaggtgtgaaccactgtgcctggcctccaaatatggttgatgtctatcagtcagttaaacagtaattctgggaataaaaaattgaaatcaacccacttataattggaatgtcttagcataatgtccttcaacgaagctgctttcacacactgtgatttgtttttttcctgtggtcatggagcaggcatgggccactcggccacatctcatgcatccg

SEQ ID NO: 179 - DNA, 375 bp, Homo sapiens
  misc_feature 1..375: note = U/M: U (0.01:0.9) in Gastric Epithelium
  misc_feature 1..375: note = source = chr8:135939325-135939699; Gene: MIR30D (Intergenic)
  source 1..375: mol_type = genomic DNA
cgtagcgaggagaggggttactagggctcctgaggtttctatacactgtgcttatcaccaagactgtaatacagtttggggattactgccaaagaggaaggaaatttacattttgggtagccaaaacatgacaaagaaccactgcacctagtacctctgtttctgttctgcttatctggagctctgcttgggagtggctttggtgaaaaggaatgggaaaataaatttacacatgcattttgatatataaaacatgtgcattcctggccaggcgcagtggctcatgcctgtaatcccagcactttgggaggccgaggccggtggatcacgaggtcaggagatcgataccatcctagctaacagagtgaaaccccg

SEQ ID NO: 180 - DNA, 469 bp, Homo sapiens
  misc_feature 1..469: note = U/M: U (0.02:0.91) in Gastric Epithelium
  misc_feature 1..469: note = source = chr20:58554277-58554745; Gene: CDH26 (intron)
  source 1..469: mol_type = genomic DNA
cggagtcttgttctgtcgccaggctggaatgcagtggtgcaatctttgctcactgcaacctccatctcccaggttcaagcaattctcctgcctcagtctactgagtacctgggactacaggcgcctgccaccatgcaaggctaattttttgtgttttagtagagatagggtttcaccatgttggtcagaatggccttgacctcctggccttgtgatctgcccacctgggcctaccaaagtgctgggattacaggcgtgagccgccgtgcccagccgagtttgttctgttttatcgctgagtagtatcttgcttctcactttataaaactaaagggtgcttggactcttttcaattgtggtgagataaagctgctatgcactttttttttttttttttttttttttttttttttttttttttttagatagagtttcactgttgtcgcccaggctggagagcaatggtgcg

SEQ ID NO: 181 - DNA, 72 bp, Homo sapiens
  misc_feature 1..72: note = U/M: U (0.02:0.9) in Gastric Epithelium
  misc_feature 1..72: note = source = chr20:51959785-51959856; Gene: TSHZ2 (intron)
  source 1..72: mol_type = genomic DNA
cgtgagccaccgcaccgggccaggacccgtatttctaacaagacggcaggtgcggccacactgggagtagcg

SEQ ID NO: 182 - DNA, 132 bp, Homo sapiens
  misc_feature 1..132: note = U/M: U (0.03:0.91) in Gastric Epithelium
  misc_feature 1..132: note = source = chr11:77707568-77707699; Gene: INTS4 (Intergenic)
  source 1..132: mol_type = genomic DNA
cgggcgtcggggtgggtgactgtaatcctagctacacgggaggctgaagcaggagaatcgtttgaacccaggtggcagcggctgcagtgcgccgagatcgggcctctgtactccagcctgagcaacagagcg

SEQ ID NO: 183 - DNA, 236 bp, Homo sapiens
  misc_feature 1..236: note = U/M: U (0.04:0.92) in Gastric Epithelium
  misc_feature 1..236: note = source = chr2:98376000-98376235; Gene: TMEM131 (exon)
  source 1..236: mol_type = genomic DNA
cggggcctcttccacagtgctgctgtgctgtgttctccagcacacaaaaccacacctcctctcccttcctctgtccacaggcttattagttacacatctagtgttaaacactcaccaccagttagattaaaagagtttccaaaggcggagaacgaattgaggggagtgaagtcagggctgcttgggttgctgacgggactccacaaacccgagctaaatgttacaagaggaaaacg

SEQ ID NO: 184 - DNA, 428 bp, Homo sapiens
  misc_feature 1..428: note = U/M: U (0.04:0.92) in Gastric Epithelium
  misc_feature 1..428: note = source = chr13:74588468-74588895; Gene: KLF12 (intron)
  source 1..428: mol_type = genomic DNA
cgtttgtttactggtaacgaataaaacattaaaacagccatttagaatataaagcacagtagttcctgcaaatggtaaagttatgctggctgtagtttagggtactaaggctgttatttatagaataaaacccattatcactactcaaatattgaacatgcgtagtttgtattcaaagataaagttgccacaggggactattgatataggaaatatggctggagagatatggaatgcatattaaaatttatatactgaaaagaaagaatgtatttaacaggtatatttaatattccagtagcattgaccgcaattgttaaagttatatatgctgacatttcagttataaccttctattttcagtgccttcgcagttcaatccaaaaattttctgcaggcccaaaagtatgtactttccaaggtctccg

SEQ ID NO: 185 - DNA, 71 bp, Homo sapiens
  misc_feature 1..71: note = U/M: U (0.01:0.88) in Gastric Epithelium
  misc_feature 1..71: note = source = chr5:127000250-127000320; Gene: CTXN3 (Intergenic)
  source 1..71: mol_type = genomic DNA
cggtggctcacgcctgtaatcccagcactttgggaagccgaggtgggcagatacccgaggtcagaagttcg

SEQ ID NO: 186 - DNA, 207 bp, Homo sapiens
  misc_feature 1..207: note = U/M: U (0.07:0.94) in Gastric Epithelium
  misc_feature 1..207: note = source = chr4:184013404-184013610; Gene: WWC2-AS2 (Intergenic)
  source 1..207: mol_type = genomic DNA
cgcccccatgatccagtcacctcctgccaggccccagctcctggaaattacaattcaacatcagatatgggcggggacacaaatccaaaccataatcagctgtatactagataatatttgctgtatcaattttaatttcttaggtttgataatattgtagttataggccgggcacggtggctcacgcttgtaatcctagcactttcg

SEQ ID NO: 187 - DNA, 248 bp, Homo sapiens
  misc_feature 1..248: note = U/M: U (0.01:0.88) in Gastric Epithelium
  misc_feature 1..248: note = source = chr11:59303419-59303666; Gene: OR4D9 (Intergenic)
  source 1..248: mol_type = genomic DNA
cgcaattttatcaatccttatgttatcaacagtagcaaatattttctttcttgtgaatgatttttattgttaaaaagtcatgcctttcaggctgggggcggtggctgatgcctgtaatcccagcactttgggaagccgaggtggggaaatcacccaggagtttgagaccagcctgggcaatacagtgagacctcatctcagaaaaataatcatgcttttcataaaaattaaactcccggcccggcgcg

SEQ ID NO: 188 - DNA, 319 bp, Homo sapiens
  misc_feature 1..319: note = U/M: U (0.07:0.94) in Gastric Epithelium
  misc_feature 1..319: note = source = chr6:137024152-137024470; Gene: MAP3K5 (intron)
  source 1..319: mol_type = genomic DNA
cgttttttctttctttttttttaaaaaaacctccaattctggttttcaatttttagaaactacataaaggtaaatagaagtgtgtgttgaaaatgacatgagcttctggaaggaaaagctctcagcattcaaatgtattgatagagatgctcgaaatattcaactttttataaggacattcagcacctgaaacgcaacacctctctctcaagtcagcgggcaacttcttcaaaatgtacaatatttggttcttttatcagcctgcttctccacaagtccaagctgggctaggcaggatggacttctttctgccattccg

SEQ ID NO: 189 - DNA, 373 bp, Homo sapiens
  misc_feature 1..373: note = U/M: U (0.05:0.92) in Gastric Epithelium
  misc_feature 1..373: note = source = chr4:122607782-122608154; Gene: ANXA5 (intron)
  source 1..373: mol_type = genomic DNA
cgaaaccccaccaacacctcctggttcacagagggcacatctttgcaggttcccttcccattaagtctcacaccattttgatctacaagcatactgagcccgcactaaatcttaataccctatcctgagtactcaattttaagcagtgctcttgttacgtgccttttgatctaagtcctgtttctgtatacatacttagggactttacgataacccagcaaagcctgaaatgatcgttcacgtgccagaggaatacaaatctttgaatttagaactttataaaggtgtattggaagacattcttcataaagcttcctgttacacattactttatcatatatatacactgcttttaataaccaaaatatcttcg

SEQ ID NO: 190 - DNA, 438 bp, Homo sapiens
  misc_feature 1..438: note = U/M: U (0.04:0.91) in Gastric Epithelium
  misc_feature 1..438: note = source = chr11:47890596-47891033; Gene: NUP160 (Intergenic)
  source 1..438: mol_type = genomic DNA
cgtgttggccaggttggtctcaaactcctgacctcaagtgatccacctgcctcggcctcccgaagtgctgggattacaggcatgagccattgcacctggccttaccaggagtttccgagtcaacttttatgccatctatagcaaaaacttcatgacttgcatcttacctctatacctttactttccctttgctatgtggtttctgtttcaaatttattttatcttgctatagtgtttgtataagtggcctttagattattcttgtaagaagatagggtatagataaataagtaaaatagacatttgtagataagaaaatccagagaaaagtgagttctttaaggcagcagatagctccattgataaaacctaggcttgccacagattacccacagtacagtgaagattatattagaaaatgcaatgcccttttaagcg

SEQ ID NO: 191 - DNA, 489 bp, Homo sapiens
  misc_feature 1..489: note = U/M: U (0.02:0.89) in Gastric Epithelium
  misc_feature 1..489: note = source = chr19:52683528-52684016; Gene: ZNF836,PPP2R1A (Intergenic,Intergenic)
  source 1..489: mol_type = genomic DNA
cgtgtttggaaataagtatacatccttgaaactattatcacaactaatgccataaacttatcaattgcctccaaaaattcccttccagttcatttcttcactccgctttggttttgtttgtccttttgtgataacataagatcttatataagacctaccctttcagcaaagttttaaatgtacaacgccgtatttgttaatcatgtgccctatgttgtacggtaggcctccagaacttgtttatcttgcaggactgaaactttgtacactttcctttttgtttttgtttttttgctttttgcttttttaatttccccatgaaattaaaaaaaaaaagtttctcttcatgagaaactttgcacactttgaccaacaccttttcatttcctcccacctctcagcctcttgcaaccactattctgctttctgcttctgtgtgtttgactattttggattccacatataaatgaggtcatacggccgggcgcg

SEQ ID NO: 192 - DNA, 95 bp, Homo sapiens
  misc_feature 1..95: note = U/M: U (0.03:0.89) in Gastric Epithelium
  misc_feature 1..95: note = source = chr16:81295026-81295120; Gene: BCMO1 (intron)
  source 1..95: mol_type = genomic DNA
cgagataaccagtgtggactcacattcctggcaaagcagatatcagctacgttgttaggctttgggagccgttacgggttcatatacgatttccg

SEQ ID NO: 193 - DNA, 224 bp, Homo sapiens
  misc_feature 1..224: note = U/M: U (0.06:0.92) in Gastric Epithelium
  misc_feature 1..224: note = source = chr1:38353963-38354186; Gene: INPP5B (intron)
  source 1..224: mol_type = genomic DNA
cggaggcattctttgggggactgcccatttacattgtatgttcccgcaaaaaacctgtcaccaaagagaaataattagtgactccgaatcactatggagataacaggagaaagcattttatgctgatttatgctggtttccgtctctgtggactggcattttgagacataagaaatgtcatttctaacctagaccaggactgcagcaccaaggagtgacttgcg

SEQ ID NO: 194 - DNA, 239 bp, Homo sapiens
  misc_feature 1..239: note = U/M: U (0.09:0.95) in Gastric Epithelium
  misc_feature 1..239: note = source = chr12:80052815-80053053; Gene: PAWR (intron)
  source 1..239: mol_type = genomic DNA
cgcctgttatcccaacactttgggaggccaaggcaggcggatcacaaactcaggagatcaacaccatcctggctaacacggtgaaaccccatctctactaaaagtacaaaaaacgagccaggcgtggtggcgggcgcctgtagtcccagctacttgggctaaggcaggagaatcgcttgatcccgggaggtggaggttgcagtgagccaagatggcgccactgcactccagcctgggcg

SEQ ID NO: 195 - DNA, 254 bp, Homo sapiens
  misc_feature 1..254: note = U/M: U (0.05:0.91) in Gastric Epithelium
  misc_feature 1..254: note = source = chr19:12269298-12269551; Gene: ZNF625-ZNF20 (Intergenic)
  source 1..254: mol_type = genomic DNA
cgccctggggggctccatttcagcagtcacagtttggcttccaagcttggaaatatcatttaccttctgacagagggttttccttgtgaactgtgcatgaagcaggctgcttatctgaactacttcaaatgtttgctttacttttcttttgattcctttataaaatattgctgccggctgggcgcggtggctcacgcctgtaatcccagcactttgggaggccgaggcgggcggatcacgaagtcaggagttcg

SEQ ID NO: 196 - DNA, 309 bp, Homo sapiens
  misc_feature 1..309: note = U/M: U (0.07:0.93) in Gastric Epithelium
  misc_feature 1..309: note = source = chr9:128467739-128468047; Gene: MAPKAP1 (intron)
  source 1..309: mol_type = genomic DNA
cgcacctaccactgtcacaagaactctcacacaatgtacttatcacggtgttagaattattcatttcccttatctctctttcactaaattgagctccctggcagcaaagactgaatcttatatttatctctaattgcctagcatggtacctggcatatatatacatatccatattcagtaaacatttgctaagttaaataattgtagataaaaatgagcgcttatagaattctagaggaaaaatcatttccaggtggggttgtcctgaattggttgggtgaggccaactcagctgagccgtgggaagcg

SEQ ID NO: 197 - DNA, 340 bp, Homo sapiens
  misc_feature 1..340: note = U/M: U (0.07:0.93) in Gastric Epithelium
  misc_feature 1..340: note = source = chr1:235359359-235359698; Gene: ARID4B (intron)
  source 1..340: mol_type = genomic DNA
cgatgttttatctttggcacatttttatcagcaggtcttactattttatctgctttaatccattcatcgtatctaaaattaaaggaaattaatataaatatgtacaatatataccacggaaataacctatgccatattaaagagaaactcatatagaatcttgacattttagaagggaaaggaccttggaaatcatctcagcttcctggtttgaagagcaagctaccaaggcacaaagagagggaggtaataacttgcccatggacttaaagttagctactggccgagccaagactagagagcatgatctcatgattcctcaactagcactgcttactcg

SEQ ID NO: 198 - DNA, 400 bp, Homo sapiens
  misc_feature 1..400: note = U/M: U (0.07:0.93) in Gastric Epithelium
  misc_feature 1..400: note = source = chr6:130332560-130332959; Gene: L3MBTL3 (Intergenic)
  source 1..400: mol_type = genomic DNA
cggcattctacgtgaacaaagtaatgttccagatttttttaatatatagttacatttactgtatttatgtgataaattcaattctagatataggtattagcaattggaaccatgcttcagttatctcccttatgaaagataacataggaatgttataacaaatatttagttaaaaaactgaaaagggctttgaaaatgtaaaagtgtaatataaatgctaaataaagataatatattctgaacagcaggctcctttgaaatagggcctatgaattccattaacactctctgtttacatgcttttaggaacttttaggagggtgttgcccatgaacataactccgatacaatacctacggtctagtaactagccaggaaagacacaagtccaagagcagcg

SEQ ID NO: 199 - DNA, 419 bp, Homo sapiens
  misc_feature 1..419: note = U/M: U (0.07:0.93) in Gastric Epithelium
  misc_feature 1..419: note = source = chr1:246490876-246491294; Gene: SMYD3 (intron)
  source 1..419: mol_type = genomic DNA
cgcacatatatgaaaaagcattaaaaccaaaatcactgagattgtgtgttaccagattttctacatcattctgtacacacatacaaacaattatcagttcttattaagtcagtaaacttaagcagacttttccatgaaataatttacaactaggtcatgactaaactaataaacagcatcacctctaaggcaaaaagacagaaaataagaactaaaaagttcagataaagttcaaataggttaaatttgtcatatggctagtacatcatgaatagaacagggatcaagcacagcaatttcaacttcaagttatctgagttgaataaacaagataaaggagcctggcgccgtgactcacgcctgtaaccccaacactttgggaggccaagacgggcagatcacttgaggtcagtagttcg

SEQ ID NO: 200 - DNA, 423 bp, Homo sapiens
  misc_feature 1..423: note = U/M: U (0.03:0.89) in Gastric Epithelium
  misc_feature 1..423: note = source = chr2:239252776-239253198; Gene: TRAF3IP1 (intron)
  source 1..423: mol_type = genomic DNA
cgcctacttgcagcctctcagctgctgggtctggctctactggggaggtgagtggagactggcagtgtcaggtagctccagaaatggggggcgggggcagtctgctcctcctggcctgagtagaccaaggatccactcatagtctggggtgtcctttccctttcaccccagagccgcccatgggggaggaacattctagatgcatgttttctaaaagctgcctttggtcagtcctttgtcagtcctaacttgcagtgtgggaaaacatagataagtaagtgtgctctatgttaatgaagccgctgatcaccggccctttggtgtacagtcttaatgactaattttaaactgttttatgtcaggaacaaaagaagctaatattaactcaactagtatttcagatgataattcagctagtctgcg

SEQ ID NO: 201 - DNA, 92 bp, Homo sapiens
  misc_feature 1..92: note = U/M: U (0.05:0.9) in Gastric Epithelium
  misc_feature 1..92: note = source = chr4:186492550-186492641; Gene: PDLIM3 (Intergenic)
  source 1..92: mol_type = genomic DNA
cgactagcactggaagcaaaaaagtacttagacaactatggaaatacaaagccatgcacaaagtgtacgaacccaacgtgagacgacacacg

SEQ ID NO: 202 - DNA, 140 bp, Homo sapiens
  misc_feature 1..140: note = U/M: U (0.09:0.94) in Gastric Epithelium
  misc_feature 1..140: note = source = chr2:52957376-52957515; Gene: CHAC2 (Intergenic)
  source 1..140: mol_type = genomic DNA
cggagtctcgctctgtcgcccaggctggagtgcagtggcgggatctcggctcactgcaagctccgcctcccgggttcacgccattctcctgcctcagcctcccaagtagctgggactacaggcgcccgccactacgcccg

SEQ ID NO: 203 - DNA, 162 bp, Homo sapiens
  misc_feature 1..162: note = U/M: U (0.02:0.87) in Gastric Epithelium
  misc_feature 1..162: note = source = chr7:98006036-98006197; Gene: BAIAP2L1 (intron)
  source 1..162: mol_type = genomic DNA
cggggggctgaggcaggagaatcacttgaacccgggaggtgcaggttgcggtgagctgagattatgccatcgcactccagcctaggcaacaagaacaaaactccatctcaaacaacaacaaaccaacccactaatctaacacggtgttgtctaaacacagcg

SEQ ID NO: 204 - DNA, 169 bp, Homo sapiens
  misc_feature 1..169: note = U/M: U (0.03:0.88) in Gastric Epithelium
  misc_feature 1..169: note = source = chr13:34897662-34897830; Gene: LINC00457 (Intergenic)
  source 1..169: mol_type = genomic DNA
cgaagaataggattcgtgctaaatgaatatgtgtatacacacgtataatatctgagtagaaaaatattatctgagcaaatcagttataaaaagacactaatctttcatgagagagaaaaatgttgataggaatgcatttttttttaataatctgatagaggtcgtctcg

SEQ ID NO: 205 - DNA, 179 bp, Homo sapiens
  misc_feature 1..179: note = U/M: U (0.07:0.92) in Gastric Epithelium
  misc_feature 1..179: note = source = chr3:194017474-194017652; Gene: LOC100131551 (Intergenic)
  source 1..179: mol_type = genomic DNA
cggctcactgcaagctccgcctcccgggttcacgccattctcctgcctcagcctcccaagtagctgggactacaggcgcccgccaccacgcccggctaattttttgtatttttagtagagacggggtttcaccgtgttagccaggatggtctcgatctcctgacctcgtgatccgcccg

SEQ ID NO: 206 - DNA, 182 bp, Homo sapiens
  misc_feature 1..182: note = U/M: U (0.02:0.87) in Gastric Epithelium
  misc_feature 1..182: note = source = chr17:10704250-10704431; Gene: LINC00675 (intron)
  source 1..182: mol_type = genomic DNA
cggtaataatcataaccataataacctatactgtggccggggtggtctcttggaaacacaggtccaattatgttaagcccctgcctctgcttatatctcttcaatggattcctttttactgtttttttttttttttgagacggagtctcgctctgtcacccaggctggagtgcagtggtgcg

SEQ ID NO: 207 - DNA, 209 bp, Homo sapiens
  misc_feature 1..209: note = U/M: U (0.07:0.92) in Gastric Epithelium
  misc_feature 1..209: note = source = chr10:490007-490215; Gene: DIP2C (intron)
  source 1..209: mol_type = genomic DNA
cgtgttcactggtgctcttccgtcacctgagactcgtgtagattccccatcgtcacatggactccacgccatggtgttccctcaagagacagccactgttcattcatgaggagtgttccttggcgctcttccatcacccgagactcgtgtagattctctaccattgcatggactccacgccatggtgttccctcaagagacagccaccg

SEQ ID NO: 208 - DNA, 230 bp, Homo sapiens
  misc_feature 1..230: note = U/M: U (0.05:0.9) in Gastric Epithelium
  misc_feature 1..230: note = source = chr2:128021537-128021766; Gene: ERCC3 (intron)
  source 1..230: mol_type = genomic DNA
cggcctcccaaagtgctcggattacaggcaagagccaccgtgcccggctgtcttgttccagttcttaaagggaatgcttccagcttttgcttacttagtatgatgttggctgtgagtttgtcatagatggcttttattattgtgagatatgttccttcgatgccatttgttgagggtttttatcatgaaggaatgttgaattttatcaaaagctctttctgggctgggcg

SEQ ID NO: 209 - DNA, 236 bp, Homo sapiens
  misc_feature 1..236: note = U/M: U (0.09:0.94) in Gastric Epithelium
  misc_feature 1..236: note = source = chr8:74278573-74278808; Gene: STAU2-AS1 (Intergenic)
  source 1..236: mol_type = genomic DNA
cgagatcgcgccactgcactccagcctgggtaacagagagagactctatctcaaaacataactaactaactaactaaataaataaatagtgccttcatcctaacctatgggattcttatcatactaactgagatatgctggagtttactttccacgtcgcactgtacctaatgaacatgattcaaatgtctactctctcctccctgaggcggcagtgtggcctggtggctggtgcg

SEQ ID NO: 210 - DNA, 261 bp, Homo sapiens
  misc_feature 1..261: note = U/M: U (0.04:0.89) in Gastric Epithelium
  misc_feature 1..261: note = source = chr4:25851481-25851741; Gene: SEL1L3 (intron)
  source 1..261: mol_type = genomic DNA
cgaaacgtggtcagtgttcccatcaaactgtaaacaagcccaagggtgcatagcactgagagagaataattctaactggaaggtctgggataggctttatggaagaaacggtatctcagttgggctttgagggacgaaaagaagttcttcacgtagagacacaagggaaaggcactgcaaggggtgtgaacagcataagccgggcaagaggcaggggaatgcaggtgtacttggggaatagcaagcagctatgtggacacg

SEQ ID NO: 211 - DNA, 267 bp, Homo sapiens
  misc_feature 1..267: note = U/M: U (0.04:0.89) in Gastric Epithelium
  misc_feature 1..267: note = source = chr16:30126072-30126338; Gene: MAPK3,MAPK3 (exon,intron)
  source 1..267: mol_type = genomic DNA
cgggcagacccactggagccctgacctcaacatctctcatttcaccctcacagctggataggctgggtctcagtttccttatctgtaaatggagataataatagtacctagcttgaggtactgctgtaagattaaaggaattaatacatgtaaacctcttagaacaatgcttagggctttatgctttcattattagaactgtctcggccgggcacagtggctcacgcctataatcccagcactttgagaagctgaggtggtggatcg

SEQ ID NO: 212 - DNA, 299 bp, Homo sapiens
  misc_feature 1..299: note = U/M: U (0.06:0.91) in Gastric Epithelium
  misc_feature 1..299: note = source = chr4:25304099-25304397; Gene: ZCCHC4 (Intergenic)
  source 1..299: mol_type = genomic DNA
cgcccagagcaacttccagtcctgcaagctccatttgtggtaagtgcctagactggtgtagcattttttatcttttttacggcactttttactttgccttttctatgtttagatatgcctagatacacaaatacttcccactgggttccagttgcctttaatattcagtacagtaacacgctgcacaggtttgtagtctaggagcaagaggctatcgcctgtagcctaggtgtgtagtaggctataccactgaggtttgtgtaagtccattctacgatgttcacacagtgatgaaatcg

SEQ ID NO: 213 - DNA, 420 bp, Homo sapiens
  misc_feature 1..420: note = U/M: U (0.02:0.87) in Gastric Epithelium
  misc_feature 1..420: note = source = chr6:41727035-41727454; Gene: PGC (Intergenic)
  source 1..420: mol_type = genomic DNA
cgggggtctggataggactctttgtagggagctcccagacctgttccagaggcgccaggaggaacccatgctcctttgccttgttctcccagtaccctgtgggagttggaggggcagcaggaggcaatgcaggtaagagaggccatgaaggaggggttgtttggactgagctggatgtggtcccagactaggtctctctgggtggggttgagaattgggtggcagaaaggggagagtccagtgtccaggttccggcacatcaaacgccaaagaacgtaatcaccagggcctggataaggagcaggaaccgagcctaatgcaaaagtcccaaaccaaacactgataatgggctcaggaggctctaggcctggacctcacgcttccaccccgtggcccctagtcaagcctcatatggatacg

SEQ ID NO: 214 - DNA, 441 bp, Homo sapiens
  misc_feature 1..441: note = U/M: U (0.04:0.89) in Gastric Epithelium
  misc_feature 1..441: note = source = chr2:158327858-158328298; Gene: CYTIP (Intergenic)
  source 1..441: mol_type = genomic DNA
cgtcaaagccacagggcccatctggctgttccagtcaaattgctgccagtggtccccgtaacaggaagcatggcggcacaggtttcctgaatcaagggtacttgtgctcagtggaattctggtgttaacaatggtatattaagttttatatttgttccgtatgctgagaatactattcagtaaactgaagtttcttaaactctctgaacctcagtcacctaaaccacaaaatgaagataataatatttatttttgcagggttgttctgatgatgtgaaaaaaaatgcctaggacattggctactatatagtcactcaaaaaacaaaaccctggctgggcacagtggctcacacctgtaattccagcactttgggaggccgaggccagtggatcacgaggtcaagagtttgagaacagcctggccaatatagtgaaaccccg

SEQ ID NO: 215 - DNA, 445 bp, Homo sapiens
  misc_feature 1..445: note = U/M: U (0.04:0.89) in Gastric Epithelium
  misc_feature 1..445: note = source = chr5:90287841-90288285; Gene: GPR98 (intron)
  source 1..445: mol_type = genomic DNA
cgcatacagaaacacaagtacatccacataaaaatagcaaccttagactagcattttctatctattcagaccttaaaattaaaaaatcttgaaagtacgcttccccacgaagtcttcttaggttaatggaatctaagagttagatgtctagcttgctttaataaagtttcccacacatccttaaaacatgattcaaattcttattcaaaggcctgttaactccttcaaatttttattctaaacatgctcagtatatctgactttttatggcgattaattatacaatttgttctgctaataccttgttctcttagtttgatttttacattattatcactccaaaccacaaccttagcttttctgattactgctttgtctctctgagaaaaatccaactaatgttttgagttatatctctcttggcttcccttagttcctggatccg

SEQ ID NO: 216 - DNA, 50 bp, Homo sapiens
  misc_feature 1..50: note = U/M: U (0.04:0.88) in Gastric Epithelium
  misc_feature 1..50: note = source = chr6:43630355-43630404; Gene: RSPH9 (intron)
  source 1..50: mol_type = genomic DNA
cggcctcccaaagcgctgggattacaggcgtgagccaccacgcctggccg

SEQ ID NO: 217 - DNA, 80 bp, Homo sapiens
  misc_feature 1..80: note = U/M: U (0.06:0.9) in Gastric Epithelium
  misc_feature 1..80: note = source = chr3:8529090-8529169; Gene: LMCD1-AS1 (intron)
  source 1..80: mol_type = genomic DNA
cgcctgtaatcccagcactttaggaggccgaggcaggtgaatcacgaggtcaggagatcgagaccatcctggctaacacg

SEQ ID NO: 218 - DNA, 202 bp, Homo sapiens
  misc_feature 1..202: note = U/M: U (0.08:0.92) in Gastric Epithelium
  misc_feature 1..202: note = source = chr2:39017864-39018065; Gene: GEMIN6 (Intergenic)
  source 1..202: mol_type = genomic DNA
cgattctcctgcctcagcctcctgagtagctgggattacaggcgtgtgccaccatatctggctaattttttttgtatttttagtagagacagagtttcaccatgttggccaggctggtctcgaactcctgacctcaggtgatgcaccggcctcggcctcctaaactgctgggattacaggcatgagccactgcgcccagccg

SEQ ID NO: 219 - DNA, 202 bp, Homo sapiens
  misc_feature 1..202: note = U/M: U (0.06:0.9) in Gastric Epithelium
  misc_feature 1..202: note = source = chr15:42045333-42045534; Gene: MGA (intron)
  source 1..202: mol_type = genomic DNA
cgctgtagctctcgcctgtaattccaacactttgggaggctgaggcaggcggatcacctgaggtcaggagtttgagaccagcctggccaacatggtgaaaccccatctctactaacaatacacaaattagccaggtgtggtggcacagtcctagagtcccaactactcgggaggctgaagcaggagaatcgtttgaatcccg

SEQ ID NO: 220 - DNA, 276 bp, Homo sapiens
  misc_feature 1..276: note = U/M: U (0.07:0.91) in Gastric Epithelium
  misc_feature 1..276: note = source = chr2:11960587-11960862; Gene: LPIN1 (intron)
  source 1..276: mol_type = genomic DNA
cgtcaaccctaaaggagagctggtacaggaacatgcaaagaccaacatctcttcgtgagtattgtacacattttatgtgattatgatatcagtactattatcttaaaacggtgcttcccagtttgcggtgtaccttttcccctttgctgcctatatgttaatctgtaattcttataatgaaaaaatgtattttaactccttgtattttgtccaaaacataatttttagacaactggaattaaatcagatcccttctgggtctaaaatttaaactcg

SEQ ID NO: 221 - DNA, 423 bp, Homo sapiens
  misc_feature 1..423: note = U/M: U (0.06:0.9) in Gastric Epithelium
  misc_feature 1..423: note = source = chr15:42149853-42150275; Gene: SPTBN5,SPTBN5 (exon,intron)
  source 1..423: mol_type = genomic DNA
cgctcctggatggcctccgaggctgggtggcccccctgcagcagcctctgtccctcctgcagccacaacatgaaacacaccttgtggactcaggactgctggtaccagggcacttgtgttgactctgaccaccagcactagagctgcagagtccctgcggtccagctgcatgatcttgagcaactttctttacctaagcctcattttcctcatccgtatcatagagaaaataatggttattttgtttaaatgagataagtcatataaaatacttagcagggtgatttatatcagagggagccagcctggggtcaggacctgcctttgcaggtggaaaagagaatgttttaaaaagtgctatgctgggcacagtggctcattcctgtaatcccagcactttgggaggctgaggcaggtggatcg

SEQ ID NO: 222 - DNA, 48 bp, Homo sapiens
  misc_feature 1..48: note = U/M: U (0.12:0.95) in Gastric Epithelium
  misc_feature 1..48: note = source = chr4:159964521-159964568; Gene: C4orf45 (Intergenic)
  source 1..48: mol_type = genomic DNA
cggagtctcactctgtcgcccaggctggagtgcagtggcgcgatctcg

SEQ ID NO: 223 - DNA, 102 bp, Homo sapiens
  misc_feature 1..102: note = U/M: U (0.04:0.87) in Gastric Epithelium
  misc_feature 1..102: note = source = chr16:28984636-28984737; Gene: SPNS1 (Intergenic)
  source 1..102: mol_type = genomic DNA
cgggtgtggtggcacgtgcctgttatcccagctacttgggaggctgaggcacaagaatcgcttggaccccggaagtggaggttgcagtgagccgagatcccg

SEQ ID NO: 224 - DNA, 176 bp, Homo sapiens
  misc_feature 1..176: note = U/M: U (0.05:0.88) in Gastric Epithelium
  misc_feature 1..176: note = source = chr12:125410972-125411147; Gene: MIR5188 (Intergenic)
  source 1..176: mol_type = genomic DNA
cggaagcagaaggagcagttcctggcctcggaagctgataatcttattctgagaaaccattacataaaccaaacagtttgcaggaggggtgcaagaaatggatgaacacggccagacacggtggctcaggcctgtaatcccagcactttgggaggccgaggcaggaggatcacccg

SEQ ID NO: 225 - DNA, 190 bp, Homo sapiens
  misc_feature 1..190: note = U/M: U (0.11:0.94) in Gastric Epithelium
  misc_feature 1..190: note = source = chr1:180988876-180989065; Gene: STX6 (intron)
  source 1..190: mol_type = genomic DNA
cggaagccacatacaactactgactggaaatgtggctagtgtgacagaaattaaattttaattaatgtaaacttggtaactgatagcaattcagttatcaaaaaccttttatgtatgtttggaacaattaaagagtatgtaggccgggcgcggtggctcacgcctgtaatcacagcactttgggaggccg

SEQ ID NO: 226 - DNA, 224 bp, Homo sapiens
  misc_feature 1..224: note = U/M: U (0.02:0.85) in Gastric Epithelium
  misc_feature 1..224: note = source = chr14:93606446-93606669; Gene: ITPK1 (Intergenic)
  source 1..224: mol_type = genomic DNA
cgcatatttgcagatagccaccagggcattcatttactgaagttatgtattcaattattaaaagttaatttccgccaggcgcagtggctcatgtctgtaatcccagcacttcgggaggccaaggcgggcagattgcctgaggtcaggagtttgagaacagcctggccaacatggcgaaaccctgtctctactaaaaatacaaaacttagccgggtgtagtggcg

SEQ ID NO: 227 - DNA, 255 bp, Homo sapiens
  misc_feature 1..255: note = U/M: U (0.07:0.9) in Gastric Epithelium
  misc_feature 1..255: note = source = chr19:38415210-38415464; Gene: SIPA1L3 (intron)
  source 1..255: mol_type = genomic DNA
cgggaggctgaggcaggagaatagcttgaatccgggaggcagaggttgcagtgagctgagattgcgccactgcactccagcctgggtgacagggctagactctatctcaaaaaaaaaaaaaaaagtatatatactaaatatgtaaaccagtaacatagtcatttattatccttatcaagtgttatgtactgtacatgggctgggtgtggtggctcacgcctgtaatcccagcactttcggagcctgaagtgggcg

SEQ ID NO: 228 - DNA, 375 bp, Homo sapiens
  misc_feature 1..375: note = U/M: U (0.03:0.86) in Gastric Epithelium
  misc_feature 1..375: note = source = chr11:66120745-66121119; Gene: B3GNT1 (Intergenic)
  source 1..375: mol_type = genomic DNA
cggggtttcatcctgttagccaggatggttgcaatctcctaaccttgtgatccacccccctccgcctcccaaagtgctgggattacaggcgtgagccaccacgcccagccaggcatacctcactttattgcactttggtttattgcacgtcacagataattgcatttttttttttttacagattgaaggtggcgggttcctgtagtcccagctactcaggaggctgaggcaggagaatggcatgaacccgggaggcagagcttgcagtgagccgagatcgtgccactgcactccagcctgggtgacagagcgaaactccgtctcaaaaaaaaaaaaaaatcagtaagtgttgtgtgtgtgctgactgctccaccg

SEQ ID NO: 229 - DNA, 467 bp, Homo sapiens
  misc_feature 1..467: note = U/M: U (0.06:0.89) in Gastric Epithelium
  misc_feature 1..467: note = source = chr3:29884926-29885392; Gene: RBMS3 (intron)
  source 1..467: mol_type = genomic DNA
cgacactattgaactgaattcataggtatgtatttagcttgcatttgtttattccagtagccactgaggtgtatttctttgtttataatctataatcaaaatcctttgctatgacatacaaaaaatgtatcgagccacggacgttgaccagggttttcttccttcattagttgaaaatgaactgtatctgctattgtttatctggggaataaagagccaaatgttaaaagttgccttcagctaggagcagtgcctcacacctgtaatcccaacactttgggaggccaggaggggtagatagcttgagcccaggggaccagcctgggcaacatagcaaaaccccatctctactaaaaatacaaaaattagccaggcattgtgatatgcatctgtagtaccagctacccgggaggctgaggcacaagaatcacttgaaccgggaagcgggcagaggttgcagtgagccg

SEQ ID NO: 230 - DNA, 138 bp, Homo sapiens
  misc_feature 1..138: note = U/M: U (0.05:0.87) in Gastric Epithelium
  misc_feature 1..138: note = source = chr1:36354031-36354168; Gene: AGO1 (exon)
  source 1..138: mol_type = genomic DNA
cgggcgcttacctgccccccctgcagcaggtgttccaggcacctcgccggcctggcattggcactgtggggaaaccaatcaagctcctggccaattactttgaggtggacatccctaagatcgacgtgtaccactacg

SEQ ID NO: 231 - DNA, 233 bp, Homo sapiens
  misc_feature 1..233: note = U/M: U (0.04:0.86) in Gastric Epithelium
  misc_feature 1..233: note = source = chr2:65413067-65413299; Gene: ACTR2 (Intergenic)
  source 1..233: mol_type = genomic DNA
cggagtctcgctctggaggctctgtcgccctggctggagtgcagtggcatgatctctgctcactgcaacctccacctcctaggtttaagcgattctcccttctcagcctcctgaggagctgggactacagacgagtgccaccacgcccggctaatttttgtatttttagtagagatggggtttcaccatgttggccaggctggtctcaaactcctgaccctgtgatccacccg

SEQ ID NO: 232 - DNA, 241 bp, Homo sapiens
  misc_feature 1..241: note = U/M: U (0.04:0.86) in Gastric Epithelium
  misc_feature 1..241: note = source = chr11:130515074-130515314; Gene: C11orf44 (Intergenic)
  source 1..241: mol_type = genomic DNA
cgttcttcaagaaccagtttcctcatccactaagtggagataaataataatagcacaatttttaataattgtaaaaattaaatgagacagtgttcatagaatgttcacacagtgttgaacgccatgaagtgctctgcaaatatgagctactgctattatcacaaccataaagttaaaatcgttatactggcctctgcctaccctttaccctcactgcgtattgcagccctttcctcctgcg

SEQ ID NO: 233 - DNA, 245 bp, Homo sapiens
  misc_feature 1..245: note = U/M: U (0.09:0.91) in Gastric Epithelium
  misc_feature 1..245: note = source = chr19:12416506-12416750; Gene: ZNF44 (Intergenic)
  source 1..245: mol_type = genomic DNA
cgatctgcccgcctcagcctcccaaagtgctgggactacaggtatgaggcaccgtgcccagcctgaaatacatttcaatacaagttattcccctgaataaagaatcagctcttatcaaagcctaaagtgatcaaatgcttgccaaaagctgccgttgatccgggtttttttctgtttttttttttttttttttttttttgagagaagtctcactcttatcccccaggtttgagtgcaatggctcg

SEQ ID NO: 234 - DNA, 335 bp, Homo sapiens
  misc_feature 1..335: note = U/M: U (0.11:0.93) in Gastric Epithelium
  misc_feature 1..335: note = source = chr4:25304741-25305075; Gene: ZCCHC4 (Intergenic)
  source 1..335: mol_type = genomic DNA
cgccacaatgcccggctaatttttttttatatatatatttttagtagagaaggggtttcaccgtgttagccaggatggtctcgatctcctgacgtcatgatcctcccgcctcggcctcccaaagtgctggggttacaggcatgagccactgcacccggcctgtatatgacattttgagatcagggctaaattaagataatcaggtcaaatcaccgaggtaggttagatttttgctcaaacatatttactctcttccctccgcctccatggcaggcgtgtgcttttacttttccacctgttgacttcgggcttggcgatggggcctgctttggccg

SEQ ID NO: 235 - DNA, 350 bp, Homo sapiens
  misc_feature 1..350: note = U/M: U (0.11:0.93) in Gastric Epithelium
  misc_feature 1..350: note = source = chr7:23380702-23381051; Gene: IGF2BP3 (intron)
  source 1..350: mol_type = genomic DNA
cgggtgatcctcccgcctcggcctcccaaagtgctgggattacaggtgtgagccatggcacttggcctaagatttatttcttatataacctacctctttacaaaataaacatctgcttaatgtatgcacgcacacacacaatataattgtgcacaaaactatcttatctctttggtttaaaaaagtacactcaacatggaaaacacacagagtcactcctgacctttcaaagccattgacttcaggtgacaaagatgaaagaagcctttaaaaaatcttttcctttagtatttaataattactggccaggtaatagctcacgcctataaccccagcactttgagaggccg

SEQ ID NO: 236 - DNA, 443 bp, Homo sapiens
  misc_feature 1..443: note = U/M: U (0.02:0.84) in Gastric Epithelium
  misc_feature 1..443: note = source = chr11:16981380-16981822; Gene: PLEKHA7 (intron)
  source 1..443: mol_type = genomic DNA
cgggctcccctcagcagccctggaggactgtacctacttccccccaggtaccaggaggcagggcctgcctccccgggccaagcccaactgaaggagcccaggtaaggctgcaggattgtcagagctaaaacctactgccccccaagggatctactgacagaccagaagatgtgcagtggcaggtcctgccccccaacctcactcctgtgccctcctttcgctggcccaggctgtgtgtgtgcacacacgcctccacatccacacaggttctcacgccctgctctgctccggcttcactctccactttaggccacgttcctttcaggggcccccttcactcccggacgctgaccctgttcccttttgtccagaatgcatagcacccccaccagctcccctgcttccacagccaggacccaagtccaggactcaagtcccacccg

SEQ ID NO: 237 - DNA, 52 bp, Homo sapiens
  misc_feature 1..52: note = U/M: U (0.09:0.9) in Gastric Epithelium
  misc_feature 1..52: note = source = chr16:4253074-4253125; Gene: SRL,SRL (exon,intron)
  source 1..52: mol_type = genomic DNA
cgggagagtccaggccggtcagcagtgtggccccgccgacaggcctgcgccg

SEQ ID NO: 238 - DNA, 74 bp, Homo sapiens
  misc_feature 1..74: note = U/M: U (0.11:0.92) in Gastric Epithelium
  misc_feature 1..74: note = source = chr1:160945988-160946061; Gene: ITLN2 (Intergenic)
  source 1..74: mol_type = genomic DNA
cgaactcctgacctcaggtgatccgcccgcctcagcctcccaaagtgctgggattacaggcgtgagccaccgcg

SEQ ID NO: 239 - DNA, 74 bp, Homo sapiens
  misc_feature 1..74: note = U/M: U (0.08:0.89) in Gastric Epithelium
  misc_feature 1..74: note = source = chr4:85385908-85385981; Gene: NKX6-1 (Intergenic)
  source 1..74: mol_type = genomic DNA
cgcggtggctcacgcttgtaatcctaacactttgggaggccaaggcgggcagatcacttgaggtcaagagttcg

SEQ ID NO: 240 - DNA, 104 bp, Homo sapiens
  misc_feature 1..104: note = U/M: U (0.03:0.84) in Gastric Epithelium
  misc_feature 1..104: note = source = chr20:52682634-52682737; Gene: BCAS1 (intron)
  source 1..104: mol_type = genomic DNA
cgaagtctggctctgtcgcccaggctggagtgcagtggcgccatttcggctcactgcaagctccgtctcccgggttcacaccattctcctgcctcagtctcccg

SEQ ID NO: 241 - DNA, 148 bp, Homo sapiens
  misc_feature 1..148: note = U/M: U (0.1:0.91) in Gastric Epithelium
  misc_feature 1..148: note = source = chr17:38075074-38075221; Gene: GSDMB (promoter-TSS)
  source 1..148: mol_type = genomic DNA
cgcaatctcggctcactgcaagctccgcctcccaagttcacgccattctcctgcctcagcctcccgagtagctgggactacaggtgcctgccaccacgcccagctaatttttttgtgtgtgttttttagtagagacggggtttcaccg

SEQ ID NO: 242 - DNA, 149 bp, Homo sapiens
  misc_feature 1..149: note = U/M: U (0.09:0.9) in Gastric Epithelium
  misc_feature 1..149: note = source = chr19:34933440-34933588; Gene: UBA2 (intron)
  source 1..149: mol_type = genomic DNA
cgattctcctgctcagcctctcgagtggctgggattacaggcgtctgccaccacgcccagctaatatttgtattttagtagatacagggtttcaccttgttggccaggctggtctcaaactcctgacttcggttgatccacccgcctcg

SEQ ID NO: 243 - DNA, 189 bp, Homo sapiens
  misc_feature 1..189: note = U/M: U (0.04:0.85) in Gastric Epithelium
  misc_feature 1..189: note = source = chr1:118189258-118189446; Gene: FAM46C (Intergenic)
  source 1..189: mol_type = genomic DNA
cgtggagtacagactgcagtggcttcagctggcccccaggccccttctcctctggcccagatatgaaccacgccctgtacagaccggaggactttacctcctaggagccgcagcttcctacagaagaccagtgggtgtgccagcgatgttagaatgggtccacgtgccccaggaaggcagccttttccg

SEQ ID NO: 244 - DNA, 231 bp, Homo sapiens
  misc_feature 1..231: note = U/M: U (0.06:0.87) in Gastric Epithelium
  misc_feature 1..231: note = source = chr3:193756991-193757221; Gene: LOC647323 (Intergenic)
  source 1..231: mol_type = genomic DNA
cggctttgcgagcttgtggctcttccagacatttccttatcagctttctcctgcaagaatctgggcaatcaactgtgttacaggtgcccagcttgatagaaaccctgcttattaaaaaagggtggggtgtagtggcagttacgccagtgaacttggctttggaaatggaggcctgcaagatgacctgttattgagccttgaagccggggcctggggcctgctcccagggcg

SEQ ID NO: 245 - DNA, 240 bp, Homo sapiens
  misc_feature 1..240: note = U/M: U (0.08:0.89) in Gastric Epithelium
  misc_feature 1..240: note = source = chr17:70409134-70409373; Gene: LINC00673 (intron)
  source 1..240: mol_type = genomic DNA
cgcaaaaaccttcaaaagactgcaaaggaacaagtctgataagcttttaggttttgtctcctctgagtgtccacctcacctcaccattaaacttctcacaccaactgcctttgggatgtcgagtcagggactcaacgacacaagagtgaccctcctacttaagatgctaagttaccattttcaaggacatcttaggagctggaccatccagaatgcgggaacagagttcatgagttgtcg

SEQ ID NO: 246 - DNA, 264 bp, Homo sapiens
  misc_feature 1..264: note = U/M: U (0.1:0.91) in Gastric Epithelium
  misc_feature 1..264: note = source = chr12:122177926-122178189; Gene: TMEM120B (intron)
  source 1..264: mol_type = genomic DNA
cggcccatcttggcctcccaaagtgttgggattacaggcgtgagccaacgcgcccggcgactcccacaaaacttctatcagcctaatgttgaccagagtctcactgataacagatacagttgattaacacacattttatgtatgcattatacattgtattcttacaataaagaaagctagagaggcctggcacggtggctcatgcttgtaatcccagcactttgggaggctgaggcaggtgaatcatctgagtttgggagttcg

SEQ ID NO: 247 - DNA, 267 bp, Homo sapiens
  misc_feature 1..267: note = U/M: U (0.07:0.88) in Gastric Epithelium
  misc_feature 1..267: note = source = chr21:17133457-17133723; Gene: USP25 (intron)
  source 1..267: mol_type = genomic DNA
cggttgtgcattttcggcagggctatctcacagattatagagtgtcaggaggcacgcactgccattttatcctattattggtaatactaactttgatctcttggttaaggcagtgactgtcagggtttacactgttgttacagtaggtagctagtcagacatgagcagggcagaagggggcctcccccccaggaatgtcaggcaaccattaggcggtggtcaggctgttattaaccatctctctgaaataataattggtcgcagccg

SEQ ID NO: 248 - DNA, 305 bp, Homo sapiens
  misc_feature 1..305: note = U/M: U (0.12:0.93) in Gastric Epithelium
  misc_feature 1..305: note = source = chr1:61729101-61729405; Gene: NFIA (intron)
  source 1..305: mol_type = genomic DNA
cgggcaggtagaactgctcgcttgtgttttacacacaggcgccccagccttcctataggctctttcttgtgaataggcttccaccatgaccaaaatgtttgaaaaaccgtaaagccaagagataagtaatttttgttgaatataaaatagataagccattacctattcataggaatatttacctcctgatagactttggcaagggttctaacacagagacactccatgttctcaccaccagtgaagacgagggaagtagctactctcaaaaaacaaatagcattggctgggcacggtggctcacg

SEQ ID NO: 249 - DNA, 323 bp, Homo sapiens
  misc_feature 1..323: note = U/M: U (0.04:0.85) in Gastric Epithelium
  misc_feature 1..323: note = source = chr1:1586852-1587174; Gene: CDK11B (intron)
  source 1..323: mol_type = genomic DNA
cggggagttccttattgtgatctccatgcggtgatctctcagctccccctcctcaagggaatcccgcttggaatcccggtcatcagactaagaagcaaagagaaagttaatcattttctttataagtttttttttcttcatagataaaagtatttttaatgataatcaaacctgggcaacatcccaaaacaaactttcatatatactctgaatgagccagtgttataaaatataaagaacttttggccgggtgtggtggctcacgcttgtaatcccagcactttgggaggcccaggcaggcggatcacgaggtcaggagctcg

SEQ ID NO: 250 - DNA, 331 bp, Homo sapiens
  misc_feature 1..331: note = U/M: U (0.06:0.87) in Gastric Epithelium
  misc_feature 1..331: note = source = chr2:8427976-8428306; Gene: LINC00299 (intron)
  source 1..331: mol_type = genomic DNA
cgaaggagcaagtatagcctaaccaggacttgagtctcagaacacgttttgcaaaatgagtgatatggcatggctcagtccctgcctgatcaggagcagagactgtgcagagggggagctgctgtgagaagtcacggtcggagtgtggatggaagcacccctcggtctaactgtcctcagccatgaagctaagctgctggctttcctccctagtcctcaccacccccaaggcaagggggacgtatcccatttggagagtgtttctaagggatattagtgcccaatctcattcaatctatgcaaaagctgcaggtggggctgggtggtggcg

SEQ ID NO: 251 - DNA, 103 bp, Homo sapiens
  misc_feature 1..103: note = U/M: U (0.09:0.89) in Gastric Epithelium
  misc_feature 1..103: note = source = chr1:67570737-67570839; Gene: C1orf141 (intron)
  source 1..103: mol_type = genomic DNA
cggtggctcgtgcctgtaatcccagcactttgggaggccgaggcgggtggatcacctgaggtcaggagttcaagaccagcccggccaacgtggtgaaaccccg

SEQ ID NO: 252 - DNA, 112 bp, Homo sapiens
  misc_feature 1..112: note = U/M: U (0.06:0.86) in Gastric Epithelium
  misc_feature 1..112: note = source = chr21:39899795-39899906; Gene: ERG (intron)
  source 1..112: mol_type = genomic DNA
cgtgagtttggtctgataagattgtatgcgtttcccaggggtgccataacaaagtgccacaccctgggcggcttccgccaccgaaatgtattttctcacagctctgaggtcg

SEQ ID NO: 253 - DNA, 187 bp, Homo sapiens
  misc_feature 1..187: note = U/M: U (0.13:0.93) in Gastric Epithelium
  misc_feature 1..187: note = source = chr21:42504879-42505065; Gene: LINC00323 (Intergenic)
  source 1..187: mol_type = genomic DNA
cgtatccctggtaggaacggcactaaccatattcaccaaaactgcttatgtgtgtattttgttccccgcggggagtaaattccaatgattaggtcttattcatctttttataaaccttcctcaagtgtttgttccctttgggctgggccagaaaaatctaagataaagaagtgtggggctaggtacg

SEQ ID NO: 254 - DNA, 312 bp, Homo sapiens
  misc_feature 1..312: note = U/M: U (0.1:0.9) in Gastric Epithelium
  misc_feature 1..312: note = source = chr16:78883425-78883736; Gene: WWOX (intron)
  source 1..312: mol_type = genomic DNA
cgtgacactgcactccggcctgggtgacagagcctgaatccctctcaaaaaaaaaaaaaaaaaaagaaaacaactacaaccacattttgagataggccttccttggcaaactttgatttcgtttctgtatttgaggacaaaacacagtatggttgtttccctccctagactagatttctaatcttgatgcagtgagcaaagggcgaggtttatattgttcttacctgagccaaaggacccataaaaaatagagtgataggctgggctgggcgtggtggctcatgcctgtaatcccagcactttgggaggccg

SEQ ID NO: 255 - DNA, 347 bp, Homo sapiens
  misc_feature 1..347: note = U/M: U (0.07:0.87) in Gastric Epithelium
  misc_feature 1..347: note = source = chr16:75569829-75570175; Gene: CHST5,CHST5 (promoter-TSS,Intergenic)
  source 1..347: mol_type = genomic DNA
cgaatcttaatcttggccctcctcgctcttgggggcatccttgcagccaagggacttggaatccaaacccttcccaaggccccaacctcagccctaagccaagacccaggcaccttgatgacacaggaatccgtgctgcctcccggtgcagtgtcccagctgggaggagttgaaagaccaggtggccttaggagctgtgccctccctgccctagcctccgcccagaggcgcaggcttgataacatgttccaatgaatacaggatatgtttcagtaaataaaagctccccacccaccccttacaaataacagctcagcctggcctggtggcatatgactgtaatcccg

SEQ ID NO: 256 - DNA, 373 bp, Homo sapiens
  misc_feature 1..373: note = U/M: U (0.13:0.93) in Gastric Epithelium
  misc_feature 1..373: note = source = chr11:108055929-108056301; Gene: NPAT (intron)
  source 1..373: mol_type = genomic DNA
cgcacccatgcacaccccaaccacccataccggaagtcctaggaattcatcaattgaagtctctggctccgtagggttgttatctgtttgcttaggtacttgggcaatattgttatcactgttaataaagaaagaaaaatctttattatagttatgcaattaggcaaaaacaattaggcattttaaacatatatagcttacctagttaaaaatttatttatgttttctgctagcttttcttgaagagatttgttgcttagtattttttctcgtgcattttcaataaccatttgctggaaaagaaagccactgttagcaaaaggacaataaagagtattctgctatttaatatttataagaaaagaacaaaccg

SEQ ID NO: 257 - DNA, 72 bp, Homo sapiens
  misc_feature 1..72: note = U/M: U (0.14:0.93) in Gastric Epithelium
  misc_feature 1..72: note = source = chr3:33397874-33397945; Gene: FBXL2 (intron)
  source 1..72: mol_type = genomic DNA
cgctctgtcgccaggctggagtgcagtggcggatctcggctcactgcaacctctgcctcctgggttcaagcg

SEQ ID NO: 258 - DNA, 109 bp, Homo sapiens
  misc_feature 1..109: note = U/M: U (0.1:0.89) in Gastric Epithelium
  misc_feature 1..109: note = source = chr17:7904025-7904133; Gene: GUCY2D (Intergenic)
  source 1..109: mol_type = genomic DNA
cgggacttcaccatgttggccaggctggtctcaaactcctgacctcaagtgatccgcctgcctcggcctcccaaagtgctgggattataggcgtgagccacggtgcccg

SEQ ID NO: 259 - DNA, 110 bp, Homo sapiens
  misc_feature 1..110: note = U/M: U (0.07:0.86) in Gastric Epithelium
  misc_feature 1..110: note = source = chr11:129742817-129742926; Gene: NFRKB (exon)
  source 1..110: mol_type = genomic DNA
cggcagccgtggaggcactgggagcagaggtcccaggagaactcgtggctggcttactcacagggctggctgtggcagggagacttgtcaccgtgagccctgtctgcccg

SEQ ID NO: 260 - DNA, 141 bp, Homo sapiens
  misc_feature 1..141: note = U/M: U (0.08:0.87) in Gastric Epithelium
  misc_feature 1..141: note = source = chr11:2761714-2761854; Gene: KCNQ1 (intron)
  source 1..141: mol_type = genomic DNA
cgcacgcgggctttgaagtccttcctggcaggccccgaatgtgagcgggtggacccaggcctcctgggggcctcagctcagctggagccagggtctctggaggggcctgggttagtttcctgtggctgctggaacaagtcg

SEQ ID NO: 261 - DNA, 183 bp, Homo sapiens
  misc_feature 1..183: note = U/M: U (0.08:0.87) in Gastric Epithelium
  misc_feature 1..183: note = source = chr18:47112271-47112453; Gene: LIPG (intron)
  source 1..183: mol_type = genomic DNA
cgtgagataggtcatgtttttatatgtgtataaacatataggtcctaaggtccttagggcttcctgggaaaggttcttaagctcttctgaatggggcttttgtcctgcctcagctccagggtcaggtgccccacacccttaaggattacgtggtcacgctaatcacacgcccctgaggctgcg

SEQ ID NO: 262 - DNA, 263 bp, Homo sapiens
  misc_feature 1..263: note = U/M: U (0.1:0.89) in Gastric Epithelium
  misc_feature 1..263: note = source = chr5:139642009-139642271; Gene: PFDN1 (intron)
  source 1..263: mol_type = genomic DNA
cgtgacctccatttctaaatcatgggcagaagccaccaagttcatgagatggcttcacacagaatccatggctattagaaaataagagcagcagatcaaactgacctgctggcactcgactgttgagtccactgaccagccctaccaatggcaatgtttgtgcttcatatggaatgaaaaaaacaagttgttgaaagatataaacaacacggtgttacctattgaatacaggatgtatatcaaacacggaatgaaaagatacg

SEQ ID NO: 263 - DNA, 272 bp, Homo sapiens
  misc_feature 1..272: note = U/M: U (0.1:0.89) in Gastric Epithelium
  misc_feature 1..272: note = source = chr1:110339894-110340165; Gene: EPS8L3 (Intergenic)
  source 1..272: mol_type = genomic DNA
cgaactgtttgatctgttgtagcaacctctcccctccaccttcgtcctcagccaggcataagctcacagagggtagagactgcgtctgccttggtccctgctatatctttgttgtgtttttttggcctaaggaataaagatgtttatatgtgccgggtgcagtggctcacgcctgtaatcccaactctttgggaggccaaggcaggtggatcacctgatgtcaggagttggagaccagcctggccaacatattaaaatagaaaaattagccg

SEQ ID NO: 264 - DNA, 282 bp, Homo sapiens
  misc_feature 1..282: note = U/M: U (0.1:0.89) in Gastric Epithelium
  misc_feature 1..282: note = source = chr4:6958629-6958910; Gene: TBC1D14 (intron)
  source 1..282: mol_type = genomic DNA
cgggagtgggatggacagccagtaagctgcttccggctacttggttgtctttgcctttttaccattgatttggtatctcctccaccacaccccacagctttgcctttcttaggaaaagtctgggagtggagcaggagcatggttgcaccgtgctgggagccacatcgcttgctgtgtgctcctcttgagggtggcgccggccagctgttcttcatttgtactgggaggaaagtggagaaacttgtagcctgcactgggaaactagactccatgggtccaccg

SEQ ID NO: 265 - DNA, 294 bp, Homo sapiens
  misc_feature 1..294: note = U/M: U (0.06:0.85) in Gastric Epithelium
  misc_feature 1..294: note = source = chr1:7738875-7739168; Gene: CAMTA1 (intron)
  source 1..294: mol_type = genomic DNA
cgcaccccgcacccacagctggccttctgggtctcacctctcagactgccccttgctgttggctgctggaggatttctgggcttgggtacatagttcatttcctgaaccacccagtgtgtaaacctcagccttatcccagtccctgccccagccgagagagagggtgccgacagctgccctggctggtgaaccctcaggagacaattccctggggtggctttgggtcttcaaaccctagcatgggctgccctggggcaccgagctgcccttggcagcatctctggctgaggccg

SEQ ID NO: 266 - DNA, 400 bp, Homo sapiens
  misc_feature 1..400: note = U/M: U (0.13:0.92) in Gastric Epithelium
  misc_feature 1..400: note = source = chr15:56737844-56738243; Gene: TEX9,MNS1 (TTS,intron)
  source 1..400: mol_type = genomic DNA
cgaaaacaatgttctcattttacagataagaaaactaaggctcagagaaaaagccaaaactagtacttgcatgacacctagtcaagtcctagtagtattcgactttcattttgtggatcaatttttatttggaaaatagcagcaattctcgtaggagtcagattaaaacgtctacaactaccttgaataacttcaactatcaggataattaaaactgcaaaccactggacaaacaggacattgtttgtgctactttctttttcaaaggacagcgctatatggcttagcaaatgaagtctctccaccttttcttatcacctgccacacctaaaggtattcctgttaacagcatgctgtgtacccgctagacattttctatactaacacaattgtacacacg

SEQ ID NO: 267 - DNA, 92 bp, Homo sapiens
  misc_feature 1..92: note = U/M: U (0.03:0.81) in Gastric Epithelium
  misc_feature 1..92: note = source = chr20:62162500-62162591; Gene: PTK6 (intron)
  source 1..92: mol_type = genomic DNA
cgtggtggctcacgcctgtaatcccagcactttgagaggctgaggcggatggatcacgaggtcaggagatcgagaccatcctggctaacacg

SEQ ID NO: 268 - DNA, 115 bp, Homo sapiens
  misc_feature 1..115: note = U/M: U (0.13:0.91) in Gastric Epithelium
  misc_feature 1..115: note = source = chr6:41743174-41743288; Gene: FRS3 (exon)
  source 1..115: mol_type = genomic DNA
cggcggccactctcaaaggagaagaggttggagtcgtagccatagcgccgcaagcagagataaggccagcggacggcctcacgccgatgcaggtgcagcaccagctcactctgcg

SEQ ID NO: 269 - DNA, 135 bp, Homo sapiens
  misc_feature 1..135: note = U/M: U (0.07:0.85) in Gastric Epithelium
  misc_feature 1..135: note = source = chr6:47476304-47476438; Gene: CD2AP (intron)
  source 1..135: mol_type = genomic DNA
cggagtctcgctctgttgcccagggtggagtgcaatagcacgattttggctcactgcaacctctgcctcccaggttcaagtgattctcctgcccagtctcctgagtagctgggattacaggggcgtgccaccacg

SEQ ID NO: 270 - DNA, 172 bp, Homo sapiens
  misc_feature 1..172: note = U/M: U (0.12:0.9) in Gastric Epithelium
  misc_feature 1..172: note = source = chr6:34530231-34530402; Gene: SPDEF (Intergenic)
  source 1..172: mol_type = genomic DNA
cggtggtcagggcagatccctttggggaggtgggatttgagcaaggcacgaaggaggcgagggtgtgagctctgcaggtctctgtgtgcattccgggtggcgggaggtgacatgaggaggcactgtggagttagattgtgggggccttgaagccctggccgctcatttcccg

SEQ ID NO: 271 - DNA, 230 bp, Homo sapiens
  misc_feature 1..230: note = U/M: U (0.13:0.91) in Gastric Epithelium
  misc_feature 1..230: note = source = chr19:11995926-11996155; Gene: ZNF69 (Intergenic)
  source 1..230: mol_type = genomic DNA
cgataaattacatctattataattagcagcagtttatgaattacaccaaggatcttatcaaaaaacagctgaccagttaaggcctactagccaaatagcttaagaaaacagaatcacttgactgggcgcggtggctcatgcctgtaatcccagcactttgggaggccaaggtgggcggatcacaaggtcaggagatcgagaccatcctggctaacatggtgaaacccccg

SEQ ID NO: 272 - DNA, 252 bp, Homo sapiens
  misc_feature 1..252: note = U/M: U (0.08:0.86) in Gastric Epithelium
  misc_feature 1..252: note = source = chr16:11359108-11359359; Gene: TNP2 (Intergenic)
  source 1..252: mol_type = genomic DNA
cgctatgctgggcagcttatcacacaccaggctgctgggtaccccgccccccagtatgtcagaacgatgagcccattagacagagggggagagtgaggctcagagtggtctagtcccagccgccgcagctaggatagtgagaactagggcaaacttgagtctgaccctaaaaccaaggcttgtgggtatgaaggtcagaagccaatttacccaagaccctgaccattccccagtccttttgtctggcagccg

SEQ ID NO: 273 - DNA, 383 bp, Homo sapiens
  misc_feature 1..383: note = U/M: U (0.14:0.92) in Gastric Epithelium
  misc_feature 1..383: note = source = chr3:61924201-61924583; Gene: PTPRG (intron)
  source 1..383: mol_type = genomic DNA
cgttcagccctctatgatgaatatccccgtgtttgacacgtgtaagtgttccgcttatgttagttatttttcctaataacctttcagaagtgtctgctaatgaaagttgtacctgtttttttcacttaaggtgcggtcagttgaaatatttgctgttgctctatattttatgcagagtctaatgcttacgctacgttataaactgagtctaaatggaaaatgaaaattttcattatagttgtctttttttctaggagaaattaacaggtacatcttctggaatgagaaaaaagtaatagcattgcttaacattttcactattcaatatccaggtataattggtttcgagatttttgctttgggggtgaaatatttcatgagcg

SEQ ID NO: 274 - DNA, 456 bp, Homo sapiens
  misc_feature 1..456: note = U/M: U (0.11:0.89) in Gastric Epithelium
  misc_feature 1..456: note = source = chr15:38493152-38493607; Gene: SPRED1 (Intergenic)
  source 1..456: mol_type = genomic DNA
cgacctctgcgtctaaattttttcatccataaatacagataagataacctacttcatacaatcattgctaagattcaatgtgacaaaatctgcgaaagtgctttgtgaagtgtatgctgctacacacaaaaggagtgaatgctattaaccacatgtcaatattccagacccaactttctgttttctaatctgcttgaaataccttcatctttcctctccaagtacctgatactcttctttaatcaccaacttgtattcttctccagtaaaattaacaaacagatctcaggtatttgatgtgtactggggtgctgtgttgctgcataatgaagcccagtctctccgctctacccagggtgacctctccctccatccaacccccttatagtgattgtttattatctcatttgtcacttaccacatattgttagccacagccacctttttgctcttacg

SEQ ID NO: 275 - DNA, 90 bp, Homo sapiens
  misc_feature 1..90: note = U/M: U (0.04:0.81) in Gastric Epithelium
  misc_feature 1..90: note = source = chr19:1787588-1787677; Gene: ATP8B3 (intron)
  source 1..90: mol_type = genomic DNA
cgtggtagcaggcgcctgtaatcccagctacttgggaggctgagacaggagaatcgcttgaacccaggagacggaggttgcagtgagccg

SEQ ID NO: 276 - DNA, 107 bp, Homo sapiens
  misc_feature 1..107: note = U/M: U (0.14:0.91) in Gastric Epithelium
  misc_feature 1..107: note = source = chr15:99992318-99992424; Gene: MEF2A (Intergenic)
  source 1..107: mol_type = genomic DNA
cgagacggccaagttcagacacccatgcggcctggagcagggcagaggccctgccacctaatcgcagggcctggcggtgtgcgggacacagagacatcggaccctcg

SEQ ID NO: 277 - DNA, 158 bp, Homo sapiens
  misc_feature 1..158: note = U/M: U (0.19:0.96) in Gastric Epithelium
  misc_feature 1..158: note = source = chr8:117703911-117704068; Gene: EIF3H (intron)
  source 1..158: mol_type = genomic DNA
cgagaccagcctggacaacatggcgaaagcccgtctctactaaaaatacaaaaattagctgggtgtagttgtgcacgcttgtaattccagctacctgggaggctgaagcagaattgcttgaacccaggaggcggaggatgcagcaagcagagatcacg

SEQ ID NO: 278 - DNA, 225 bp, Homo sapiens
  misc_feature 1..225: note = U/M: U (0.16:0.93) in Gastric Epithelium
  misc_feature 1..225: note = source = chr10:120931928-120932152; Gene: PRDX3 (intron)
  source 1..225: mol_type = genomic DNA
cgtagtctcgggaaatctgcttagttaagtctgacaagagtgcgatgttcatgtggcccaaaccaccattctaatcaaaatgcaaacatgactgttagaatgtgtggcctcacaacattcttgaccacgtaccacaatgtttgagaccaacagtaacggcgataggtaacagtaattcaacaacgggccaagcactgcttactctattaacctactgcctcctcg

SEQ ID NO: 279 - DNA, 123 bp, Homo sapiens
  misc_feature 1..123: note = U/M: U (0.15:0.91) in Gastric Epithelium
  misc_feature 1..123: note = source = chr19:10593154-10593276; Gene: KEAP1 (Intergenic)
  source 1..123: mol_type = genomic DNA
cggaggatcctgggacatgtagtctaaaaagagtgttcctgctttaaaaggtggcaccggccgggcgcggtggctcacgcctgtaatcccagcgctttgagaggccgaggcgggcggatcacg

SEQ ID NO: 280 - DNA, 165 bp, Homo sapiens
  misc_feature 1..165: note = U/M: U (0.17:0.93) in Gastric Epithelium
  misc_feature 1..165: note = source = chr3:194184924-194185088; Gene: ATP13A3 (intron)
  source 1..165: mol_type = genomic DNA
cgtcgttttaataatttcactcctaactacgacattcttatcaaatatgtgaatacataaacattggtgcaaaaataaataaccagtaagatactgaactcagtgccattgtggaaaaggagaaaccttacacactatcgggtccgacttcctctaaacaagccg

SEQ ID NO: 281 - DNA, 173 bp, Homo sapiens
  misc_feature 1..173: note = U/M: U (0.08:0.84) in Gastric Epithelium
  misc_feature 1..173: note = source = chr8:39638417-39638589; Gene: ADAM2 (intron)
  source 1..173: mol_type = genomic DNA
cgatcaaataatctttgccttttacagttgaaactaaaacattgttatctctttcaattattgccctttggaattattataaagcttgttttgtgtggcgctttcataccttttcttttttttttttttgagatggaatctcgcactctcgcccaggctggagtgcagtggcg

SEQ ID NO: 282 - DNA, 216 bp, Homo sapiens
  misc_feature 1..216: note = U/M: U (0.12:0.88) in Gastric Epithelium
  misc_feature 1..216: note = source = chr5:54813736-54813951; Gene: PPAP2A (intron)
  source 1..216: mol_type = genomic DNA
cgcaatctcagctcaccgcaacctctgcctcccagtacaagtcattctcctgcctcagcctcctgagcagctgggattataggcgtgagccaccacacccagctaattttgtagttttagtagagatagggtttcaccatgttggtcagactactgatctcgtgatccgcctgcctcggcctcccagagtgctgggattacagtcatgggccaccg

SEQ ID NO: 283 - DNA, 237 bp, Homo sapiens
  misc_feature 1..237: note = U/M: U (0.1:0.86) in Gastric Epithelium
  misc_feature 1..237: note = source = chr3:196007281-196007517; Gene: PCYT1A (intron)
  source 1..237: mol_type = genomic DNA
cggtgtcgaatttgcatataatctataccccctatatactttcaatcttctctacattacttacaacacctaatacaatgtaaatactatgtaaccagttattatacaatattggttttttatttgtactgttttttattgttgtattggtatttttattgtttttttttttttttttttctgaatattttcgatccaagtttggctgaatctgcggatgtggagcccatggccacg

SEQ ID NO: 284 - DNA, 276 bp, Homo sapiens
  misc_feature 1..276: note = U/M: U (0.12:0.88) in Gastric Epithelium
  misc_feature 1..276: note = source = chr16:84599559-84599834; Gene: COTL1 (exon)
  source 1..276: mol_type = genomic DNA
cgttcccagctctccttaaattcccagtccccaccctgggcctctctccctaacgatcttgtcgctttgggagcccctgaagtgaaccctgaaatactccctccgtcaactctgggctcagacctttgcccttctctgtgtcacaaggaaatttcggtcaagagggtgggaacaggtggtttcagaccgtgcagcaaagccactgccaggtaagttttaaggcaaattttatctcttcttattcagtctgagccggacctaaccttctcaccaccg

SEQ ID NO: 285 - DNA, 285 bp, Homo sapiens
  misc_feature 1..285: note = U/M: U (0.13:0.89) in Gastric Epithelium
  misc_feature 1..285: note = source = chr5:141560806-141561090; Gene: NDFIP1 (Intergenic)
  source 1..285: mol_type = genomic DNA
cggccagtgagtgtgggtgacccaaagggaccgcagggcgtgcagggctggtgctgcaggccttgtctgcaggctcagggccatgaccgcccagaaccaaatggcctttacccagctgagcttgcctagctcctcactatcacaaaggctgctgtaggagccccacctggctctccctgagctggacccctgccagggctgcttgcggggctctcagcctaattctaagcttctttctgctcccctctcaaccagagcagtcagctacttcttagggagcagacg

SEQ ID NO: 286 - DNA, 206 bp, Homo sapiens
  misc_feature 1..206: note = U/M: U (0.05:0.8) in Gastric Epithelium
  misc_feature 1..206: note = source = chr22:49179647-49179852; Gene: MIR4535 (Intergenic)
  source 1..206: mol_type = genomic DNA
cggccgtcttgctgagcccttgggccgtcctggggctggggcgtggccggcttgtggaccttgctccagataagggaacttgaaggttccaggtacaagtcaggccctgctagctccattaagatacttccagggacatcggtcatgagcacagttcacaacaccctggttaaaccaacatcaagcttcagaccaaagtgcaggcg

SEQ ID NO: 287 - DNA, 414 bp, Homo sapiens
  misc_feature 1..414: note = U/M: U (0.1:0.85) in Gastric Epithelium
  misc_feature 1..414: note = source = chr5:149964103-149964516; Gene: SYNPO (Intergenic)
  source 1..414: mol_type = genomic DNA
cgtttactacatgccaggcccttcccaggcattgtccaagcctcctttcgttagcttcattgcaaggatgagagaaagtcacttgcctaaggtcacagagatgctgagcagaggagccccacccacagcacacactcctctcccaccactcagacacaacctggccccccaactccctgcacgctgccttcctgcccgggctgtggtagccgagtgttcaccacatgaaccccccacgcctcacccagcccttggtacacagtggaacagacctggcttgtccagattcaggcagctagagacacagtaactataataaacacaggctgtaaaccaccttcttggcttgtacagatgcggagttttccccagacctgcgcttctgaactggatggggggcagccccttgccccg

SEQ ID NO: 288 - DNA, 56 bp, Homo sapiens
  misc_feature 1..56: note = U/M: U (0.15:0.89) in Gastric Epithelium
  misc_feature 1..56: note = source = chr17:2710379-2710434; Gene: RAP1GAP2 (intron)
  source 1..56: mol_type = genomic DNA
cggggtttcgccgtgttggccaggctggtctcaaactcccgacctcaggtgatccg

SEQ ID NO: 289 - DNA, 74 bp, Homo sapiens
  misc_feature 1..74: note = U/M: U (0.15:0.89) in Gastric Epithelium
  misc_feature 1..74: note = source = chr20:61005077-61005150; Gene: RBBP8NL (Intergenic)
  source 1..74: mol_type = genomic DNA
cgatgtctgttgaatcctgatcagccaggagctggggggtgtgatggacacccaggcaccggcgtccgggctcg

SEQ ID NO: 290 - DNA, 248 bp, Homo sapiens
  misc_feature 1..248: note = U/M: U (0.18:0.92) in Gastric Epithelium
  misc_feature 1..248: note = source = chr1:163641818-163642065; Gene: NUF2 (Intergenic)
  source 1..248: mol_type = genomic DNA
cgaatgcgccattttataatacagtttggggaggcagtgtctgacttacatacggctcatagattggtttgattagttatgacatctacgtagtgtgtggggaaggctggtcccccacgctaatcttatcatgcaaatgggcattccagttgatcagcgccatcttatctgcttcttactgcacacatggctgacaaagagaagggaagatggagccgccatcttgaacttgattggcacaactgccg

SEQ ID NO: 291 - DNA, 273 bp, Homo sapiens
  misc_feature 1..273: note = U/M: U (0.16:0.9) in Gastric Epithelium
  misc_feature 1..273: note = source = chr15:34654963-34655235; Gene: LPCAT4,LPCAT4 (exon,intron)
  source 1..273: mol_type = genomic DNA
cgcccccacgggagccatacctccacatccacaatgctgcagggctgagaggctgtgagccagaggactttgagtctaagagaagagagatttcgatactcaccaatctctaactatgggctccttccctggctcccacaccccactccccttccccaacccaggtggggagtgggaaaagttctgcccattgataatagggacagactcctagccatacagtcaggtgggtgaatatgcagttgggagacacaaggaacggccagaaacgcg

SEQ ID NO: 292 - DNA, 313 bp, Homo sapiens
  misc_feature 1..313: note = U/M: U (0.18:0.92) in Gastric Epithelium
  misc_feature 1..313: note = source = chr16:80737588-80737900; Gene: CDYL2 (intron)
  source 1..313: mol_type = genomic DNA
cgcacctggtggtcaggggcttctccacggctattcctgggtacaggctcccctaagtcctgctggttaccaggacccctactgcagggtcctgccctcttgacctctgattccagaccacacctggccttgcctgagcttggatgacaagcctcacctgcggagccacgttagcatcaaactttgcacccaggtaagcagagcagccacctcccttctcttgcccagctgcgcagggtgggtgcgcccatcaccacactgcatactgaattccaaagtacacacaggccaacaattgagttacaggatagcg

SEQ ID NO: 293 - DNA, 338 bp, Homo sapiens
  misc_feature 1..338: note = U/M: U (0.12:0.86) in Gastric Epithelium
  misc_feature 1..338: note = source = chr1:232767194-232767531; Gene: SIPA1L2 (Intergenic)
  source 1..338: mol_type = genomic DNA
cggtccttcccacactatatttctctgtgatctgaagcatgtacacattatacaatctttcgtatctttttaaattataggtataatctgtgggattagatataactaaacaggtcaagaagcaatcctgtgacataatacaattcctgagcactccaggttttgatgagtttcccaattgtcaccccattatcagcatttacaagattgtcatgtattcatttaacaaacatttatgaagccgggcgcggtggctcaagcctgtaatcccagcactttgggaggctgaggcgggaggatcacaaggtcaggagatcaggatcttcctggctaacacg

SEQ ID NO: 294 - DNA, 131 bp, Homo sapiens
  misc_feature 1..131: note = U/M: U (0.09:0.82) in Gastric Epithelium
  misc_feature 1..131: note = source = chr17:46346042-46346172; Gene: SKAP1 (intron)
  source 1..131: mol_type = genomic DNA
cggggtctcaccatgttggccaggctggtcttgaactcctgatctcaaatgatctacccgcctcagcctcccaaagtgctggaatcgcaggtgtgagccactgtgcccggcctcaagttaatttttaaccg

SEQ ID NO: 295 - DNA, 224 bp, Homo sapiens
  misc_feature 1..224: note = U/M: U (0.17:0.9) in Gastric Epithelium
  misc_feature 1..224: note = source = chr1:100443241-100443464; Gene: SLC35A3 (intron)
  source 1..224: mol_type = genomic DNA
cgccacaatatctggctaattttttaaagtttgttgtaaagacagagtccgactatgttgcccaggctggtctggaactcctgggctcaagggatcctcccatcttggtctcccaaagtgctgggattataggtgtgagacaccgtgcctggccctcgtatgctttaatacctaaacatttgaaaaatcactggaaaatgctagaaccttgtaatgttagtacg

SEQ ID NO: 296 - DNA, 51 bp, Homo sapiens
  misc_feature 1..51: note = U/M: U (0.22:0.93) in Gastric Epithelium
  misc_feature 1..51: note = source = chr3:141945963-141946013; Gene: GK5 (Intergenic)
  source 1..51: mol_type = genomic DNA
cgcgggggctcacgactgtaatcccagcactttcggaggccgaggcgggcg

SEQ ID NO: 297 - DNA, 58 bp, Homo sapiens
  misc_feature 1..58: note = U/M: U (0.19:0.9) in Gastric Epithelium
  misc_feature 1..58: note = source = chr5:148991965-148992022; Gene: ARHGEF37 (intron)
  source 1..58: mol_type = genomic DNA
cgtgatccgcccacctcggcctcccagagtgctgggattacaggcgtgagccatggcg

SEQ ID NO: 298 - DNA, 143 bp, Homo sapiens
  misc_feature 1..143: note = U/M: U (0.11:0.82) in Gastric Epithelium
  misc_feature 1..143: note = source = chr3:47022705-47022847; Gene: NBEAL2 (intron)
  source 1..143: mol_type = genomic DNA
cgggcagatcacaaggtcaggagatcgagaccatcctggccaacatggtgaaaccccatctctactaaaatacaaaaattagccgggcgtggtggggtgtgcctgtaatcccagctactcgggaggctgaggcaggagaatcg

SEQ ID NO: 299 - DNA, 143 bp, Homo sapiens
  misc_feature 1..143: note = U/M: U (0.17:0.88) in Gastric Epithelium
  misc_feature 1..143: note = source = chr5:7766437-7766579; Gene: ADCY2 (intron)
  source 1..143: mol_type = genomic DNA
cgaaggctccgatttgatggtagagagttgaatgtatatatggtgatattggcttcaaaggtgatatcggtttcaaatgtaattctaaccacgccctctgcccagagctttgtgtacttttaatttactgtttgataaaggcg

SEQ ID NO: 300 - DNA, 197 bp, Homo sapiens
  misc_feature 1..197: note = U/M: U (0.12:0.83) in Gastric Epithelium
  misc_feature 1..197: note = source = chr16:1445513-1445709; Gene: UNKL (intron)
  source 1..197: mol_type = genomic DNA
cggctgggtgtgaacacagcctccctgtaccgtccataccctgcaccttctagtggaggcacaggcctggctccatctcaggctgccccttccgccccaggaacctcctgcctcggaagagtccttgtttacctggggcggggcccaggcgggagggtttatctccctcaggatttatggtgcggctgtggcccacg

SEQ ID NO: 301 - DNA, 210 bp, Homo sapiens
  misc_feature 1..210: note = U/M: U (0.18:0.89) in Gastric Epithelium
  misc_feature 1..210: note = source = chr5:35186960-35187169; Gene: PRLR (intron)
  source 1..210: mol_type = genomic DNA
cgctgtgtgataaacctgcctgccctcaagaagcagatcctggctcttgctgggtggggttggtgccagcctacactagagcacccgcggtggcatgtggctaggattatcaaagggagattggaggcagctggtgtgtaccaggaagcgcaccaaaccagcaaagttctggcccctctattcagtagctgcaggatcctgggcaagccg

SEQ ID NO: 302 - DNA, 230 bp, Homo sapiens
  misc_feature 1..230: note = U/M: U (0.2:0.91) in Gastric Epithelium
  misc_feature 1..230: note = source = chr7:128693099-128693328; Gene: TNPO3 (intron)
  source 1..230: mol_type = genomic DNA
cggggggcgatggctcacatctataatcccagcactttgggaggccgaggcgggcggatcacctgaggtcggagttagagaccagcctggccaacatggcgaaaccccgtttctactaaaaaatacaaaaattagctgggtgtggtggcgtgtgcctgtaatcccagctactcaggaggctgagacaggagaatcacttgaacctgggaggaggaggttgcagtgtgccg

SEQ ID NO: 303 - DNA, 60 bp, Homo sapiens
  misc_feature 1..60: note = U/M: U (0.24:0.94) in Gastric Epithelium
  misc_feature 1..60: note = source = chr6:131277389-131277448; Gene: EPB41L2 (exon)
  source 1..60: mol_type = genomic DNA
cggtatgaaccgagaaatacccctgctctccgatgtttccttctctctcttctggcggcg

SEQ ID NO: 304 - DNA, 62 bp, Homo sapiens
  misc_feature 1..62: note = U/M: U (0.21:0.91) in Gastric Epithelium
  misc_feature 1..62: note = source = chr1:80672272-80672333; Gene: ELTD1 (Intergenic)
  source 1..62: mol_type = genomic DNA
cgagctcccgacctcctgatctgcctcccaaagtgctgggattacaggcgtgagccaccgcg

SEQ ID NO: 305 - DNA, 105 bp, Homo sapiens
  misc_feature 1..105: note = U/M: U (0.24:0.94) in Gastric Epithelium
  misc_feature 1..105: note = source = chr12:122599860-122599964; Gene: MLXIP (intron)
  source 1..105: mol_type = genomic DNA
cgcggtgtctcacgcctataatcccagcactttgggaggccgaggcaggtggatcacctgaggtcgggagttcaagaccaccctggctaacatggtgaaaccccg

SEQ ID NO: 306 - DNA, 296 bp, Homo sapiens
  misc_feature 1..296: note = U/M: U (0.18:0.88) in Gastric Epithelium
  misc_feature 1..296: note = source = chr2:28718991-28719286; Gene: PLB1 (intron)
  source 1..296: mol_type = genomic DNA
cggccaggcattttcctcctggagctgctgctgcttctggggcaaggtaagcgtgccttttgctcagaggacaaccagtggtttagccccgctggtgtcccatgttgcttaggcaatgggtgtgtgagaggagtgtgtgcttttgaagagataaagcacaaagcgtacagttcaagaataagaagtctggtttgcctcctgcggaatgggatgcagaggctgcctacacagggttacatgtcccaaaggctgccgggagcgaggcagatcttgggacaggagagaagtgcagtccg

SEQ ID NO: 307 - DNA, 431 bp, Homo sapiens
  misc_feature 1..431: note = U/M: U (0.14:0.84) in Gastric Epithelium
  misc_feature 1..431: note = source = chr6:39076099-39076529; Gene: SAYSD1 (intron)
  source 1..431: mol_type = genomic DNA
cggatcctaggatggtctcctccaaaatatattttatttaattaggggcctttatggggggtggcaggagaaaggttagggagctagaggtagatgggtgtgggggtgggggggtaaacaaactgacgaagggaacaaacaagaggagagatacggacattcttctgcctcatttggaacttgtcggagtaccagttcccttctgctgtaaaacctgggtgaagaagtgtttgtgactgttacatcacacacaggcatggcccaaggaaggcactgccattcctcaaatatcaagctgcttcttaccttagggcctctgcacttgtggttccctctgagaggaatgctcccttcccctcatatcacttggttgacccctcctactacaaacggcaaaaatgtcaccgtatgtgcccttggcttagtccccg

SEQ ID NO: 308 - DNA, 106 bp, Homo sapiens
  misc_feature 1..106: note = U/M: U (0.18:0.87) in Gastric Epithelium
  misc_feature 1..106: note = source = chr16:11356838-11356943; Gene: TNP2 (Intergenic)
  source 1..106: mol_type = genomic DNA
cgaccccatgctccttaagaactgcatgatactcctcagcgtatgttcatttagccgtccccggtgggtggacacataggttgtatttttgctcttgcaaacagcg

SEQ ID NO: 309 - DNA, 364 bp, Homo sapiens
  misc_feature 1..364: note = U/M: U (0.26:0.95) in Gastric Epithelium
  misc_feature 1..364: note = source = chr6:107647431-107647794; Gene: PDSS2 (intron)
  source 1..364: mol_type = genomic DNA
cgagtagctgggacttacaggcaggtaccaccatgcctggctaatttttttttcttgtattttagtagagacgggattttgccatgttggccaggctggtctcaaactcctgacctcaagtgatctgcccatcttggcctcccaaagtattgggattacaggcgtaagccactgcacccagtccaatcatctgaactatgtttaaaagcacatagaggacacagtcttctcttatcagcattacaaataaatacagaaaatgttcggtcatgattttcttcttattcgccaactcacctgccacccagaagtcacataggtaataagataaaaatagttgttttggctgggcgcagtggctccg

SEQ ID NO: 310 - DNA, 78 bp, Homo sapiens
  misc_feature 1..78: note = U/M: U (0.18:0.86) in Gastric Epithelium
  misc_feature 1..78: note = source = chr17:1173324-1173401; Gene: BHLHA9 (promoter-TSS)
  source 1..78: mol_type = genomic DNA
cgaactcctgaactcaagtgatccgcccgcctcggcctcccaaactgctgggatgacaggcgtgagccccagtgcccg

SEQ ID NO: 311 - DNA, 159 bp, Homo sapiens
  misc_feature 1..159: note = U/M: U (0.14:0.82) in Gastric Epithelium
  misc_feature 1..159: note = source = chr11:107629594-107629752; Gene: SLN (Intergenic)
  source 1..159: mol_type = genomic DNA
cgaccctttggattgcgtgggagctgggtgaggcctgtgactgccggctttcccccactttcctgataacatgcgtgactcagcagaggcagccataatcctcctaggtacataactccattgacctaggaacctcacccccattccccacagcagccg

SEQ ID NO: 312 - DNA, 186 bp, Homo sapiens
  misc_feature 1..186: note = U/M: U (0.23:0.91) in Gastric Epithelium
  misc_feature 1..186: note = source = chr19:41677957-41678142; Gene: CYP2S1 (Intergenic)
  source 1..186: mol_type = genomic DNA
cgggcggatcacttgtgtccaggagttccagaccagcctggtcaacatggtgaaaccccgtctctacaaaaaatacaaaaattagcccagtctggtggcatgcgcctgtagtcccagctacttgggaggctaaagtgagaggatcactggagcttgggaggttgaggttgcagggagctgagatcg

SEQ ID NO: 313 - DNA, 405 bp, Homo sapiens
  misc_feature 1..405: note = U/M: U (0.22:0.9) in Gastric Epithelium
  misc_feature 1..405: note = source = chr6:148030997-148031401; Gene: SAMD5 (Intergenic)
  source 1..405: mol_type = genomic DNA
cgctatcttaactgctatacctcctccaccatacttctaaagcacaattgtgtcttgccgcttctgcctaaaactgtgcagtcacccctgattaccctccatataaagtttcaatccctcagtgaggtctacaaagtgctttacgatcaggcctctgtctacctccaaattcatttcctgcaactacctttttgtgcctgttgtcagtcagtcagaaatacctgcagttgcaggctttctcatgcctccgggcctttgcatgtgatgttcctgttgtgaacaagctctctgacatctagatttcttgatctagccacctactgctctccatcagctcaatctagactttccctgctatgagactgggttgaatgttacttccatgtgctcctcctacccaccccg

SEQ ID NO: 314 - DNA, 73 bp, Homo sapiens
  misc_feature 1..73: note = U/M: U (0.23:0.9) in Gastric Epithelium
  misc_feature 1..73: note = source = chr7:102882090-102882162; Gene: DPY19L2P2 (intron)
  source 1..73: mol_type = genomic DNA
cgtggtggctcacgcctgtaatccccagtactttgggaggccgaggcgggtggatcatgaggtcaggagttcg

SEQ ID NO: 315 - DNA, 121 bp, Homo sapiens
  misc_feature 1..121: note = U/M: U (0.12:0.79) in Gastric Epithelium
  misc_feature 1..121: note = source = chr7:953309-953429; Gene: ADAP1 (intron)
  source 1..121: mol_type = genomic DNA
cgcctataatctcagcactttgggaggccgaggcgggcgggtcacctgaggtcaggagttccagaccagcctggccaacatgatgaaatcctgtctctactaaaaatataaaaattagccg

SEQ ID NO: 316 - DNA, 124 bp, Homo sapiens
  misc_feature 1..124: note = U/M: U (0.2:0.87) in Gastric Epithelium
  misc_feature 1..124: note = source = chr21:18801510-18801633; Gene: C21orf37 (Intergenic)
  source 1..124: mol_type = genomic DNA
cgtatcttaatcacaacctctagaacagtgttgttctcatataggcacgcttggagaatttatgaatgaatgtgacttggcagccacctcttatgccggcgcctatgcacctacagagacttcg

SEQ ID NO: 317 - DNA, 175 bp, Homo sapiens
  misc_feature 1..175: note = U/M: U (0.15:0.82) in Gastric Epithelium
  misc_feature 1..175: note = source = chr13:99827379-99827553; Gene: UBAC2-AS1 (Intergenic)
  source 1..175: mol_type = genomic DNA
cgcaccacacaacgtaatatattgttaagacgcatttattgactgtgtgattcccaggtcaggttttatgttcctcctgatatgaggcagtgagaagtacaaaccatcacctacaaagtatatttgatctgaatccaaacatgaagcaactattatacgaattcagcatggagcg

SEQ ID NO: 318 - DNA, 66 bp, Homo sapiens
  misc_feature 1..66: note = U/M: U (0.14:0.8) in Gastric Epithelium
  misc_feature 1..66: note = source = chr1:178476143-178476208; Gene: TEX35 (Intergenic)
  source 1..66: mol_type = genomic DNA
cgggcttccttttgctcatggccacgagtcgaaattacctaccctgagaattcacgacatggcacg

SEQ ID NO: 319 - DNA, 193 bp, Homo sapiens
  misc_feature 1..193: note = U/M: U (0.25:0.91) in Gastric Epithelium
  misc_feature 1..193: note = source = chr7:97920858-97921050; Gene: BAIAP2L1,BRI3 (TTS,TTS)
  source 1..193: mol_type = genomic DNA
cggtgctttcagagacccaggaaagactggaacgacacccccatcgctcccccggccagtcctgaccacagttgtattcagcaggcgcttacagctcaagaaaatgttttcaagttctgctttattattaaagttgtaatcccttgatatttacagagcaggcacctcggtgccaaggaccaggccatgcccg

SEQ ID NO: 320 - DNA, 468 bp, Homo sapiens
  misc_feature 1..468: note = U/M: U (0.26:0.92) in Gastric Epithelium
  misc_feature 1..468: note = source = chr12:112694142-112694609; Gene: HECTD4 (intron)
  source 1..468: mol_type = genomic DNA
cgaagagcatctgctatcaaatctaaggtacaggcagcgagctcctgggatatggaccgtttctttaaatttatagttgtctctgacggggtggactgtttccacagtctttccagcagcccatggggcaggaatctttaaaccagtgagaaatcctggctcttccttctcttctaacattctaaacagaaaaagagaaagtgatttagcttagcagccaaggaaaggaaaaacaatgtaaacattaaattgctctttaattttccacagcatgcagtatgataacactgaggcttttaaatgcttgatatcagtggcaatcagaaacattttaaaaattcctacatttaagggttttttctttccttgttgtcagatattatacttgcttttttttttcttttttgcctttttccaggacaagaagcagagatatattttcatttttccctctttttttcaagggcg

SEQ ID NO: 321 - DNA, 254 bp, Homo sapiens
  misc_feature 1..254: note = U/M: U (0.28:0.93) in Gastric Epithelium
  misc_feature 1..254: note = source = chr13:27822174-27822427; Gene: RPL21 (Intergenic)
  source 1..254: mol_type = genomic DNA
cgggttttagtggggaacaccagagcctgtttgtacatggataaaaatgatggagttggctgggagcatgtttgtacactgataaaaatgaggcagttggctgggcgtggtggctcacacctgtaatcccagcactttgagaggctgagacaggtggatcacttgaggtcaggagtccaagaccagcctggccaacatggcgaaaccctgtttctaccaaaaataataaaattagccgggtgtggtggcacacg

SEQ ID NO: 322 - DNA, 267 bp, Homo sapiens
  misc_feature 1..267: note = U/M: U (0.16:0.81) in Gastric Epithelium
  misc_feature 1..267: note = source = chr1:7739328-7739594; Gene: CAMTA1 (intron)
  source 1..267: mol_type = genomic DNA
cggcctcactagaatgaacccaaggatgctgggaccactgtaggaccctgcctggcagatggagccttttcagagagcaaagtcacagtcaggcagtgccccagagctcaggacacatctgcaggccccctggaaacccagagagccagctgtaccccagaagctacggcacgggaggatgctgccatagaaaccggggggaaggggagccacccaactgcttcatgacagacacaccccgggacctcggccaccccaggcccctcg

SEQ ID NO: 323 - DNA, 119 bp, Homo sapiens
  misc_feature 1..119: note = U/M: U (0.25:0.89) in Gastric Epithelium
  misc_feature 1..119: note = source = chr10:134307344-134307462; Gene: INPP5A (Intergenic)
  source 1..119: mol_type = genomic DNA
cgcccagcacagcacctggcgcctggctatcctgccaatgactgtccccactcccccaaacttccgtgctgtgtgtcacccaagcccatgttcccagacaccagagccgtcttgccccg

SEQ ID NO: 324 - DNA, 49 bp, Homo sapiens
  misc_feature 1..49: note = U/M: U (0.16:0.79) in Gastric Epithelium
  misc_feature 1..49: note = source = chr8:8580340-8580388; Gene: CLDN23 (Intergenic)
  source 1..49: mol_type = genomic DNA
cgccgggctatatctccaggcaccgccttcacccttcgggaactgtgcg

SEQ ID NO: 325 - DNA, 124 bp, Homo sapiens
  misc_feature 1..124: note = U/M: U (0.21:0.84) in Gastric Epithelium
  misc_feature 1..124: note = source = chr3:13108236-13108359; Gene: IQSEC1 (intron)
  source 1..124: mol_type = genomic DNA
cgctctggcaggtgccaccaggtcttatttactgtgtcccttctctgggcggtagctccatgcaggcagggcgggcctggtccatttacaggcgtagcccacaggcctggcgtgtgtcaggacg

SEQ ID NO: 326 - DNA, 72 bp, Homo sapiens
  misc_feature 1..72: note = U/M: U (0.2:0.81) in Gastric Epithelium
  misc_feature 1..72: note = source = chr11:4197181-4197252; Gene: LOC100506082 (Intergenic)
  source 1..72: mol_type = genomic DNA
cgccgttttttaagcccgtcggaaaaacggagtattcgggtgggagtgacccgattttccaggtgctgtccg

SEQ ID NO: 327 - DNA, 259 bp, Homo sapiens
  misc_feature 1..259: note = U/M: U (0.3:0.89) in Gastric Epithelium
  misc_feature 1..259: note = source = chr2:44192489-44192747; Gene: LRPPRC (intron)
  source 1..259: mol_type = genomic DNA
cgcccagcctggacccttatcttatacaatacacaaaaatcaactcaaaatagattaaagacttaaacttgaaaccataaaactcctagaagaaaacactggccttgacaacgactttttggacttgagaccaaagcacagacaataaaaacaaacagtgaagtggaaccacatctaactaaaaagcttctgcacggtaaaggaaacaataaaatgaaaaggcgacctatggaatgcgagaaaatatttgcaaaccacg

SEQ ID NO: 328 - DNA, 342 bp, Homo sapiens
  misc_feature 1..342: note = U/M: U (0.26:0.84) in Gastric Epithelium
  misc_feature 1..342: note = source = chr18:19694915-19695256; Gene: GATA6 (Intergenic)
  source 1..342: mol_type = genomic DNA
cgcccagctgatttttttattttttttgtagggacggagtctcaccatgtttcctgggctgatctcgaaccctcaagcgatcctcccacctcagcctctcaaagtgctgggattgcaggcatgagccaccattccaggccaacacttaggtcttgagagaatgagaagctcaagcaattacttttttattgttgatactacaggttgtttgttttacagttggtctgtaaaagaagacaagggaatttaaactcttacacttctagttttctgaacagcctaatttgagtggcattttcgctgcatgggaaggcatagcccagagataatatatggggaacg

SEQ ID NO: 329 - DNA, 386 bp, Homo sapiens
  misc_feature 1..386: note = U/M: U (0.27:0.83) in Gastric Epithelium
  misc_feature 1..386: note = source = chr3:182444733-182445118; Gene: ATP11B (Intergenic)
  source 1..386: mol_type = genomic DNA
cgccccgccccttctgtgtccgagctgccttacctgagttttactgtctgctctttcaggccgcctgcttttagaagagaagtgacttccttgaactgcatgaagttagaaagggagctatctttgagctgctttttgttaaaaggaaagttttctgctggggactctctttaccctgtctacctaaataatttctttctgcctcctataacaacttgggcctggctgtggctcctggagatatgggttttaggggagtcatgaaacccctcccagcctcctctattcctctgtcagtttggagaatatcttcactgcctccttcacaggttgttggcacaagaaaatgaaatggtatgcattaaaacacctgtaaagcaataacg

SEQ ID NO: 330 - DNA, 143 bp, Homo sapiens
  misc_feature 1..143: note = U/M: U (0.32:0.86) in Gastric Epithelium
  misc_feature 1..143: note = source = chr12:125359949-125360091; Gene: SCARB1 (Intergenic)
  source 1..143: mol_type = genomic DNA
cgagtgtgacaggagtccgtgtcagcttccctgagcaacacagactcagacccagggtctgtcccagaaaggagtccccaccacacggggaggagggatcggagccgcccaagaggatttttgttatattcacactctgggcg

SEQ ID NO: 331 - DNA, 286 bp, Homo sapiens
  misc_feature 1..286: note = U/M: U (0.03:0.92) in Gastric Epithelium
  misc_feature 1..286: note = source = chr13:28625182-28625467; Gene: FLT3 (intron)
  source 1..286: mol_type = genomic DNA
cgcattcttctgatgaggcacagagagtaagtaacttgtccaaggccacacagctgctaagcaaaccagggttcaaacccaggctatctggctctggattctatatctttaaacaatcatattagactgctttcccagaacaaacaggataatcagaaattaaacattttgtcacaaggaatttctttcttcctttcttttctttttttttagatggagtctcactctgtcacccaggctggagtgcaatggcgcgatctcgggtcactgcaatctccgcctcccg

SEQ ID NO: 332 - DNA, 317 bp, Homo sapiens
  misc_feature 1..317: note = U/M: U (0.07:0.88) in Gastric Epithelium
  misc_feature 1..317: note = source = chr4:38397982-38398298; Gene: KLF3 (Intergenic)
  source 1..317: mol_type = genomic DNA
cggttgctcccttctgctatcaagggaaagggtaacctttcccttaataatgagatatataataatgggtaacctttcccttaataaaaagagctacctcagccaattgtcctccaggggagtgccagcggttttatctcgataggggataccattttggggaaacctattctttagaataaagtaaatggcttaaagagcccataggtgtaattcttcaaggtaaatgcatgttccaggaatcaagataatggccagagttctgctgtcacaagggagagctgaggttctggactgagcacgttcttgccttgccg

SEQ ID NO: 333 - DNA, 58 bp, Homo sapiens
  misc_feature 1..58: note = U/M: U (0.09:0.83) in Gastric Epithelium
  misc_feature 1..58: note = source = chr7:155791557-155791614; Gene: SHH (Intergenic)
  source 1..58: mol_type = genomic DNA
cgccagcagcgccaggtcacaggtcccagccctcagctggacgggccgtccctcctcg

SEQ ID NO: 334 - DNA, 94 bp, Homo sapiens
  misc_feature 1..94: note = U/M: U (0.18:0.91) in Gastric Epithelium
  misc_feature 1..94: note = source = chr3:12733015-12733108; Gene: RAF1 (Intergenic)
  source 1..94: mol_type = genomic DNA
cgggcgtggtggtgtgtgcctatagtcccagctactcaggaggctgaggcaggagaatcgctggaacccgggaggcagaggttgcagtgagccg

SEQ ID NO: 335 - DNA, 112 bp, Homo sapiens
  misc_feature 1..112: note = U/M: U (0.2:0.83) in Gastric Epithelium
  misc_feature 1..112: note = source = chr11:1084747-1084858; Gene: MUC2 (exon)
  source 1..112: mol_type = genomic DNA
cgctgggtgtgcacccaggctgtgtgccatggcacctgctccatttacgggagtggccactacatcacctttgatgggaagtactacgactttgacggacactgctcctacg

SEQ ID NO: 336 - DNA, 236 bp, Homo sapiens
  misc_feature 1..236: note = U/M: U (0.01:0.92) in Gastric Epithelium
  misc_feature 1..236: note = source = chr3:137717665-137717900; Gene: CLDN18 (exon)
  source 1..236: mol_type = genomic DNA
cgctgtccacttgtcgtgtggctctgtgtcgacactgtgcgccaccatggccgtgactgcctgtcagggcttggggttcgtggtttcactgattgggattgcgggcatcattgctgccacctgcatggaccagtggagcacccaagacttgtacaacaaccccgtaacagctgttttcaactaccaggggctgtggcgctcctgtgtccgagagagctctggcttcaccgagtgcc

SEQ ID NO: 337 - DNA, 439 bp, Homo sapiens
  misc_feature 1..439: note = U/M: U (0.04:0.95) in Gastric Epithelium
  misc_feature 1..439: note = source = chr9:71673940-71674378; Gene: FXN (intron)
  source 1..439: mol_type = genomic DNA
cgccactgcactccagcctgggcgacagagcgagacttcatcttaaaaaaaaagaaaagaaaaaggaaaatgaaagtgaggtacagaaacagccaggttggttacagcttggtgtttgccttaaacttggtttgaacagttggccgcctttgattagccaaaactcggtgattggtacaagagtagattgcagttcactatgtacagagaagcccttagatccgaactcaaaataggtaaggaggcagttttagctacacttaagttaacatactcaggagtaccattccagcttcaagctggaagtgtctgcagccccctgagaccacttaatcccaagttaaaaacccctgctcagaggcagcatctttttttttttttttttttttttttttgagagagatctcactctgtcacccaggctggagtgcagtggcac

SEQ ID NO: 338 - DNA, 493 bp, Homo sapiens
  misc_feature 1..493: note = U/M: U (0.02:0.91) in Gastric Epithelium
  misc_feature 1..493: note = source = chr2:103095409-103095901; Gene: SLC9A4 (exon)
  source 1..493: mol_type = genomic DNA
cggtcatggactccagcatctacttcctgtatctcctgccacccatcgttctggagggcggctacttcatgcccacccggcccttctttgagaacatcggctccatcctgtggtgggcagtattgggggccctgatcaacgccttgggcattggcctctccctctacctcatctgccaggtgaaggcctttggcctgggcgacgtcaacctgctgcagaacctgctgttcggcagcctgatctccgccgtggacccagtggccgtgctagccgtgtttgaggaagcgcgcgtgaacgagcagctctacatgatgatctttggggaggccctgctcaatgatggcattactgtggtgagatgtcatgtgcccgcccggcttccgggggagatgagggttcggggtggggctggggaccggaggctgtggagacggctccagtgtggctcagcgcagcaggacagggatgagcttcagcccatgcggtgtggtcc

SEQ ID NO: 339 - DNA, 93 bp, Homo sapiens
  misc_feature 1..93: note = U/M: U (0.07:0.91) in Gastric Epithelium
  misc_feature 1..93: note = source = chr15:59988949-59989041; Gene: BNIP2 (Intergenic)
  source 1..93: mol_type = genomic DNA
cggggtttacgtttgtaatcccagcactttgggaggccgaggctggcggatcacttgagattaggagtcccagatgaacctgttccagacggc

SEQ ID NO: 340 - DNA, 191 bp, Homo sapiens
  misc_feature 1..191: note = U/M: U (0.13:0.96) in Gastric Epithelium
  misc_feature 1..191: note = source = chr14:50604935-50605125; Gene: SOS2 (intron)
  source 1..191: mol_type = genomic DNA
cgctatctcggctcactgcaacctacccctcctaggctcaagtgattctcccacctcagactcctgagtagctgggactgcaggcacccagcaccatgcccagctaatttttttttatatttttagtagagacggggtttcgccatgctgcccaggctggtctccaactcctgatctcaagcgatccgccc

SEQ ID NO: 341 - DNA, 147 bp, Homo sapiens
  misc_feature 1..147: note = U/M: U (0.03:0.96) in Gastric Epithelium
  misc_feature 1..147: note = source = chr13:28837971-28838117; Gene: PAN3 (intron)
  source 1..147: mol_type = genomic DNA
cgatgataaaatatttaaaatttttttgtcacgttctctttcaaatatccatgagtactttacatgattcatcagtatgcacacaattttcaacttagacattttcaaacaaacaccgccctatgtttctgactatcccttcccgcg

SEQ ID NO: 342 - DNA, 381 bp, Homo sapiens
  misc_feature 1..381: note = U/M: U (0.02:0.92) in Gastric Epithelium
  misc_feature 1..381: note = source = chr22:41891370-41891750; Gene: ACO2 (intron)
  source 1..381: mol_type = genomic DNA
cgggttggtcttgaattcccggtctcaagcaatcttcctgtgtccgaaagtgctaggattacaggcatgagccaccgctcctggcccagcattatttcttaagcccatctacgtattgataagtagtctgtagtttgcttaaccgtgccctggctgttgggaattggggctttgccttttcccggtactatagataagattacaatgtattgtcttgcctactgaccaggcaataggtattgttacagttatttttatttcttttttttttttgagactgagtcttgctctgtcgtccaggctggagtgcagtgatgtgatctcggctcactgcaagctccacctcctgggttcatgccgttctcctgcctcagcctcccg

SEQ ID NO: 343 - DNA, 185 bp, Homo sapiens
  misc_feature 1..185: note = U/M: U (0.03:0.89) in Gastric Epithelium
  misc_feature 1..185: note = source = chr11:57550804-57550988; Gene: CTNND1 (intron)
  source 1..185: mol_type = genomic DNA
cggggtacttagactttggactctggtataagcactgataagaagccatagaaaggccgggctcacgcctgtaatcccagcactttggaaggccgcggcgggtggatcacgaggtcaggagatcgagaccatcctggctaacacggtgaaaccccgtctctactaaaaatacaaaaaattagccg

SEQ ID NO: 344 - DNA, 493 bp, Homo sapiens
  misc_feature 1..493: note = U/M: U (0.01:0.87) in Gastric Epithelium
  misc_feature 1..493: note = source = chr2:241544901-241545393; Gene: GPR35 (intron)
  source 1..493: mol_type = genomic DNA
cgtgtcccacccggtcctgatactgccgtcttctctttcacagtcctccaggcttgggccagccttgggggcagcagagcttctggggtgagtgtcgagatcctgtgtcctgagagcggtagtcagggagagggctggtcggggcagggctgcccgggcaggacacaggatgcggccggccaggctggggccaaggtgttcagacctggactttgggctcgtgctttcttcatggttgcgccttgctcgctgtcccttggagtcttcatttggttttgctttttttgtttgtttgttttcacctaatttttgccagacttaagctagttttgctgccttttgaaactagtggaagaatcattttattcctggggataatttggggccttttgatcccaacgtgaagccctgcacatggctgcttcatcaggggaagggtcttttctgctttggaggaaaggctttggcaggcaggctgacctgggagtctccg

SEQ ID NO: 345 - DNA, 154 bp, Homo sapiens
  misc_feature 1..154: note = U/M: U (0.03:0.88) in Gastric Epithelium
  misc_feature 1..154: note = source = chr1:1094990-1095143; Gene: MIR200B (Intergenic)
  source 1..154: mol_type = genomic DNA
cgccactctccatgtccacagcagcgagggtggagggccctgtgctgtgcagggcagagctcggctgcacctgggccaggacacagctgcccaggtgggaggaaccgtggacggggctggggccttcctcgtcccagggctggtgagctgctcg

SEQ ID NO: 346 - DNA, 174 bp, Homo sapiens
  misc_feature 1..174: note = U/M: U (0.06:0.91) in Gastric Epithelium
  misc_feature 1..174: note = source = chr22:31616670-31616843; Gene: LIMK2 (intron)
  source 1..174: mol_type = genomic DNA
cgggagcagtggctcacgcctgtaatcccagcactttgggaggccgaggtgggcagaccacctgaggttgggagtttgagaccagcctgaccaacatggagaaactccgtctctactaaaaatacaaaattagccgggcgtcgtggcgcatgcccacaatcccagctatactcg

SEQ ID NO: 347 - DNA, 185 bp, Homo sapiens
  misc_feature 1..185: note = U/M: U (0.02:0.87) in Gastric Epithelium
  misc_feature 1..185: note = source = chr17:57925572-57925756; Gene: MIR21 (Intergenic)
  source 1..185: mol_type = genomic DNA
cgatctccgctcactgcaggctccgcctcccgggttcaagccattctcctgcctcagcctcccgagtagctgggactacaggcgcccgccacctcgcccagctaattttttgtatttttagtagagacggggtttcaccgtgttagccaggatggtctcaatcgcctgacctcgtgatccgcccg

SEQ ID NO: 348 - DNA, 281 bp, Homo sapiens
  misc_feature 1..281: note = U/M: U (0.03:0.88) in Gastric Epithelium
  misc_feature 1..281: note = source = chr11:129742385-129742665; Gene: NFRKB (intron)
  source 1..281: mol_type = genomic DNA
cgattctttgaagttcgatgattattcttttatattcacaaccaagaaagtagaagcaaattctactttcacgagtggtaaactgagaagccaataaaatgtggccatgggaatttcactaaataaactcatgaacagtctattctaaatccagaaactcgactactgaatgctgaattaaacggaatgaaacagaagaaatctcttcagcatctatcaaagctgcactgcctttgcctttggtgggaactcacacctaagtatctataagctgagagtcg

SEQ ID NO: 349 - DNA, 357 bp, Homo sapiens
  misc_feature 1..357: note = U/M: U (0.04:0.89) in Gastric Epithelium
  misc_feature 1..357: note = source = chr20:6760589-6760945; Gene: BMP2,BMP2 (exon,TTS)
  source 1..357: mol_type = genomic DNA
cgtaagatttcttcattattgatattgtggtcatatatatttaaaattgatatctcgtggccctcatcaagggttggaaatttatttgtgttttacctttacctcatctgagagctctttattctccaaagaacccagttttctaactttttgcccaacacgcagcaaaattatgcacatcgtgttttctgcccaccctctgttctctgacctatcagcttgcttttctttccaaggttgtgtgtttgaacacatttctccaaatgttaaacctatttcagataataaatatcaaatctctggcatttcattctataaagtccaacctgtaagagaaaatggtgcatttgtatagcg

SEQ ID NO: 350 - DNA, 213 bp, Homo sapiens
  misc_feature 1..213: note = U/M: U (0.02:0.86) in Gastric Epithelium
  misc_feature 1..213: note = source = chr1:1062975-1063187; Gene: LOC254099 (Intergenic)
  source 1..213: mol_type = genomic DNA
cggccacgggaagccaccggccacccagacccccgtcctccccgggtgctgccctgggcctaggtggccaggtctggggggccgataccacgggctacgcccagccccacccggctcctgtgtggtgtcaggggctctggcatgccggcaggccagtgctctcgtgagaggtgggtccccaagccggccccagcgaaactcagttaaaggacg

SEQ ID NO: 351 - DNA, 395 bp, Homo sapiens
  misc_feature 1..395: note = U/M: U (0.07:0.91) in Gastric Epithelium
  misc_feature 1..395: note = source = chr14:69643149-69643543; Gene: EXD2 (Intergenic)
  source 1..395: mol_type = genomic DNA
cgctttgggattacaggtgtgagccatatctgacctcaattgagttttgattgagatttatttcattgttagactggggttatgtgcttttgggaggaaagctatagaggtgaaatgccattctcatgaaatcatatcaactacacatactgccagcgtgacttatcgccttgataagtagtgtttgtcaggtttctacactgtaaagccactctttatccccttctttttcatattatactctgaaagggagtctatacattgtctcttgacccacattgtctttgtcctctgtcaccccaggatcccatcacctccatcaaaatcagggaacccatctcaactataacatcttcctttatcatatctacctatagaaaacagcgaccatagcg

SEQ ID NO: 352 - DNA, 155 bp, Homo sapiens
  misc_feature 1..155: note = U/M: U (0.07:0.9) in Gastric Epithelium
  misc_feature 1..155: note = source = chr7:134116404-134116558; Gene: AKR1B1 (Intergenic)
  source 1..155: mol_type = genomic DNA
cgcttgaacctgggaagcggaggtggcagtgagccgatatagcgccactgcactccaggctgggcgacagagtgagactctatctcaaaaaataaataaataagaaaagaactgctgcacaagagtgaatgtttgaagcaagcaggagggaggcg

SEQ ID NO: 353 - DNA, 197 bp, Homo sapiens
  misc_feature 1..197: note = U/M: U (0.08:0.91) in Gastric Epithelium
  misc_feature 1..197: note = source = chr9:97369629-97369825; Gene: FBP1 (intron)
  source 1..197: mol_type = genomic DNA
cgggaggtgggctctcaggagagacgggccaccgcaggatcagtccctgagttacacccaagtgctcagcgctgttctcggctttacatttctaccttgatgggagttctcctttctgggcgttcttatagaacaaagtagaaccctgagttttgagtctggcgtacgtaacttccgatggcctttgctcgctggcg

SEQ ID NO: 354 - DNA, 218 bp, Homo sapiens
  misc_feature 1..218: note = U/M: U (0.08:0.91) in Gastric Epithelium
  misc_feature 1..218: note = source = chr6:41709978-41710195; Gene: PGC (exon)
  source 1..218: mol_type = genomic DNA
cggccgggggagcatcccgggaggtggggactggccagctggttgctcacttgctgaggtagacgctgaagacggggctggtgagggcgccctcctgcaccatgccctgcatagctgtggtggcctcatccacggacagagcagggtaggccaggcccatgatgccatcaaactgcgcatagacgaagttggtaccaggctcattctcactcaagccg

SEQ ID NO: 355 - DNA, 438 bp, Homo sapiens
  misc_feature 1..438: note = U/M: U (0.09:0.92) in Gastric Epithelium
  misc_feature 1..438: note = source = chr6:157431621-157432058; Gene: ARID1B (intron)
  source 1..438: mol_type = genomic DNA
cgcagccacccgggagccagtcagaatccagttcccatcccgccttgagccagtcaccaatgccacaggaaagaggttcgtctccagttcatgtcttacatgcctatagtgctttcaggcgataaggcgtacgtgagtttgcttacctatgcacctccttatcattaatttttttaaaggatattatgttttcttatcagacggaagaaataaaagcccttccaacaaatatggagaggagggaggatgctttcttgtaggttgggtgaagtgtggtcaaagtacagttcaaggcccaaagaatgtgtgtgtccacatagcaccatgaagcatggttcacatatgactgtagtctggtatttggtctagctgtgtaaaaataactgtgaatgactcaactagggtatcagtcccaatgtgtgtgtgtggcggttggcg

SEQ ID NO: 356 - DNA, 483 bp, Homo sapiens
  misc_feature 1..483: note = U/M: U (0.04:0.87) in Gastric Epithelium
  misc_feature 1..483: note = source = chr14:56508705-56509187; Gene: PELI2 (Intergenic)
  source 1..483: mol_type = genomic DNA
cgtaagaattatatgaatttatacatagaaagtacttgaggcaaagtagatatttaatatacctgaactattaacatatgctgatttgactaacggcactttgctgttaatttagacatccctaatcataatagcaaaaaaatgacaataacttggagtaaatggaagaatttttagaataaatcactgacagaactaaaataatgacatgtttccaaaacaaggccctttgatgatcggctttaaacagaagaaaataatctgtagttagcgtatcaatttttagagtgcttctaaagtacctgagtgttgaaaacactccagcacattagagacttaatctactttaaacattgcatactagatatatgcacaatgttttacaaaccaaataaatacaggtgcagttgtccatttaggaagaaaagtcactatattattctaaaagtacccagttacatgatgtctaaagggtgacaaacg

SEQ ID NO: 357 - DNA, 118 bp, Homo sapiens
  misc_feature 1..118: note = U/M: U (0.09:0.9) in Gastric Epithelium
  misc_feature 1..118: note = source = chr1:231104748-231104865; Gene: TTC13 (intron)
  source 1..118: mol_type = genomic DNA
cggtggctcacgcctgtaatcccagcactttgggaggctgaggtgggcggatcacgaggtcaggagatcgagaccacggtgaaaccccgtctctactaaaaatacaaaaacctagccg

SEQ ID NO: 358 - DNA, 290 bp, Homo sapiens
  misc_feature 1..290: note = U/M: U (0.1:0.9) in Gastric Epithelium
  misc_feature 1..290: note = source = chr6:24752424-24752713; Gene: GMNN (Intergenic)
  source 1..290: mol_type = genomic DNA
cgagtagttgggactacaggcacccaccactgcacccggctaattttttgtatttttagtagagatagggtttcaccgtgttagccagggtagtctcgatctcctgacctcgtgatccgcccgcctcagcctcccaaagtgctgggattacagggatgagccaccgagcacggcctggggtaaagtttttaatgtcttcaatagttcttcatattattttggctgaattttctgatatttttaattgaactaatacaatattgaggaaataataagtatctatacttacg

SEQ ID NO: 359 - DNA, 326 bp, Homo sapiens
  misc_feature 1..326: note = U/M: U (0.09:0.89) in Gastric Epithelium
  misc_feature 1..326: note = source = chr22:32805994-32806319; Gene: C22orf28 (intron)
  source 1..326: mol_type = genomic DNA
cgaagtttcacgtgttagccaggatggtctcgatctcctgacctcatgatccgcccatctcagcctcccaaagtgctgggattgcaggcgtgagccaccgcacccagccagtacagcccttatattctgataagaatatcagagtgcaatgaagcaagtgccataacattaagtacacagtgctatggaagaatctgatgaggaagtgcctcaacagtctagggagctgggagaggtttcacagagatcctgtagagctggttctttgaagacaagagacatcactggcgcagcagaacatctaggaactaaacgcaaaaatgacg

SEQ ID NO: 360 - DNA, 122 bp, Homo sapiens
  misc_feature 1..122: note = U/M: U (0.08:0.87) in Gastric Epithelium
  misc_feature 1..122: note = source = chr20:62662346-62662467; Gene: PRPF6 (intron)
  source 1..122: mol_type = genomic DNA
cgcccgccatcccttctccagcagcgggtgggggtgccatgcacacccttacctggcctctcatagcatggacctcttcgggcccggtttttcaggtgtgcatgtgtctggcaggcacggcg

SEQ ID NO: 361 - DNA, 194 bp, Homo sapiens
  misc_feature 1..194: note = U/M: U (0.14:0.93) in Gastric Epithelium
  misc_feature 1..194: note = source = chr9:114579556-114579749; Gene: C9orf84 (Intergenic)
  source 1..194: mol_type = genomic DNA
cgctgcctagacagagccgacttatcaagaaatttcaatggaggaaaagtataattcatgcagagccaactgtacgggagactagagttttattattactcaaacaaatcagtctccctgaaaaccagagaccagggtttttcaggataatttggtgggtaggtggttggaaagcggagagtgctgattggtcg

SEQ ID NO: 362 - DNA, 253 bp, Homo sapiens
  misc_feature 1..253: note = U/M: U (0.12:0.91) in Gastric Epithelium
  misc_feature 1..253: note = source = chr4:54357954-54358206; Gene: LNX1 (intron)
  source 1..253: mol_type = genomic DNA
cgatacttttttttgtttgtttgttttttgagaaaagtttcactctttttgcccaggctggagtacaatggcgcgatcttggctcactgcaaccttcacctcccgggttcaagtgattcttctgccaagtagctgggatcacaggcgtgcgcccccacccctggctaattttgtatttttagtagagataggatttcaccctgttgaccaggctggtctcgaactcctgacctcaggtgacccacccgcctcg

SEQ ID NO: 363 - DNA, 477 bp, Homo sapiens
  misc_feature 1..477: note = U/M: U (0.14:0.92) in Gastric Epithelium
  misc_feature 1..477: note = source = chr9:114651409-114651885; Gene: UGCG (Intergenic)
  source 1..477: mol_type = genomic DNA
cgagagaggttaagtgacttgcttaggtcacatggtggaccagaattcaaactcagcctgtctgactttcacagtattcaggcttagccaatagtttatactgtaacctaaaggaaagcattcttaagatagggaaggtattttgtagagattctaaagtcaggaggtctagtttatcttaacaacctttgtttcttagtaaatgttaaagtcgccgggcgtggtggctcaagcctgtaatcccagcactttgggaggccgaggtgggcggatcacgaggtcaggagattgagaccacggtgaaaccccgtctctactaaaaatacaaaaaattagctgggcgtggtggcgggcgcctgtagtcccagctactcaggaggctgaggcaggagaatggtgtgaacccgggaggcggagcttgcagtgagccgagattacgccactgcactccagcctgggcgacagagccagactccg

SEQ ID NO: 364 - DNA, 141 bp, Homo sapiens
  misc_feature 1..141: note = U/M: U (0.12:0.88) in Gastric Epithelium
  misc_feature 1..141: note = source = chr1:1062668-1062808; Gene: LOC254099 (Intergenic)
  source 1..141: mol_type = genomic DNA
cgcgtggatgctttatggttctttatggttgtgtttctttagtgcttggtggatattttcccaaatgcagctccctggaggcgcttgccttgtgaggagcaggagcctgagagtgcggaaccgagcgtgtccttctcgccg

SEQ ID NO: 365 - DNA, 292 bp, Homo sapiens
  misc_feature 1..292: note = U/M: U (0.18:0.92) in Gastric Epithelium
  misc_feature 1..292: note = source = chr9:94937344-94937635; Gene: LINC00475 (Intergenic)
  source 1..292: mol_type = genomic DNA
cgggtgcctgtagtcccagctactcgggagaatgaggcgggagaatgaggcagtagaacggtgtgaatccgggaggtggagtttgcgatgagcggagattgcgccactgcactccagcctgggcgacagagcgagactccatctaaaaaaaaaaaaaacctactcaaccctaataggctgcagtttatctttaaaaataaactaaaccaggataaggatactgagcacttacattggtttcaagaaacagggaaactaactgtgcaggaactgagatttgtttgatctgtcg

SEQ ID NO: 366 - DNA, 152 bp, Homo sapiens
  misc_feature 1..152: note = U/M: U (0.17:0.89) in Gastric Epithelium
  misc_feature 1..152: note = source = chr2:65413988-65414139; Gene: ACTR2 (Intergenic)
  source 1..152: mol_type = genomic DNA
cgcccaccaccgcacccagctaatttttgtatttttagcagagacggggttcaccatgttggccaggctggtctggaacccctgacctcaaatgatccgcccacctcggcctcccaaagtgctgggattacagacgtgagccaccgcgcccg

SEQ ID NO: 367 - DNA, 195 bp, Homo sapiens
  misc_feature 1..195: note = U/M: U (0.15:0.87) in Gastric Epithelium
  misc_feature 1..195: note = source = chr20:33628551-33628745; Gene: TRPC4AP (intron)
  source 1..195: mol_type = genomic DNA
cgtgtcaccatgcccagctaatttttgtcgcagatggcttatcatgggactcctccgcctgtgatcgtgtgagccaattcccctaacaaatcccacctcataaatcctactgcttctgtctctctggagactgctgcctaatacagggaagtaattaaggttaaatgaggttacaaagtgtggggccctaaaccg

SEQ ID NO: 368 - DNA, 283 bp, Homo sapiens
  misc_feature 1..283: note = U/M: U (0.21:0.92) in Gastric Epithelium
  misc_feature 1..283: note = source = chr6:2244189-2244471; Gene: GMDS (intron)
  source 1..283: mol_type = genomic DNA
cggactcaagtgatcctcctgcctcagcctcctgagtagctagcactacaggtgagcaccaacatgcctgcctcattttttaaatttttttgtagagacaacgtctcaatatgttgcccaggctggtctcaaactcctggcctcacctcgagcaatccttccacctctgcacaccgaagtgctgagatttcaagtatgagccgctgcctcctgcccacttagccctttctaacactagagaactttgagagtggtttcaataccaactggacacttcccagcg

SEQ ID NO: 369 - DNA, 191 bp, Homo sapiens
  misc_feature 1..191: note = U/M: U (0.17:0.87) in Gastric Epithelium
  misc_feature 1..191: note = source = chr20:30843838-30844028; Gene: KIF3B (Intergenic)
  source 1..191: mol_type = genomic DNA
cgaggtgggcggatcacttgaggtcaggagttcaaaaccagtctggccaacatggtgaaatgttgtctctactataattacaaaaattagccaggagtggtggtgcacgcctgtaatcccagatacttgggaagctgaggcacgagaatcgcttgaatctgggaggcaaaggttgcagtgagccaagatcg

SEQ ID NO: 370 - DNA, 457 bp, Homo sapiens
  misc_feature 1..457: note = U/M: U (0.18:0.88) in Gastric Epithelium
  misc_feature 1..457: note = source = chr16:88683395-88683851; Gene: ZC3H18 (intron)
  source 1..457: mol_type = genomic DNA
cgggaggagcgagagtcggccactgtttgggtgccatgggtgtcctgggtagagttgagggcctcccccgggaaggataatgctgagccccaataggaaacactgccctgagctatctgatggccagccctctgtccatgggggagccatttcttttccttatctctaagctaatacccctctttcctgaggttctctcttactgcctaagctgtttggctctgggagttactggctagcttgtccccgtcgggatctcatccccatcggtatctctggcagggcttcttgaccagctcccccctggacctgcggctggagacggagttgtgccgctctctccgtcctagtttgccttttgaggcttacccactcctccacctgggctgttttaaaatgattagagcagaacctttcaatcaattctatcaaatgcatctgtagagctaagggggcg

SEQ ID NO: 371 - DNA, 196 bp, Homo sapiens
  misc_feature 1..196: note = U/M: U (0.15:0.82) in Gastric Epithelium
  misc_feature 1..196: note = source = chr19:41673732-41673927; Gene: CYP2S1 (Intergenic)
  source 1..196: mol_type = genomic DNA
cgtcagaataggcaagagagtgtaacacagaaaacatcagctactcttcagggtggtgactgctccttagtctaggtatgtacacctggaagggtccgtgaacattttccatgggagagatggatacagagataagttaaaggaaattgccgggcgtggtggctcacatctgtaatcccagcactttgggaggtcg

SEQ ID NO: 372 - DNA, 197 bp, Homo sapiens
  misc_feature 1..197: note = U/M: U (0.29:0.96) in Gastric Epithelium
  misc_feature 1..197: note = source = chr9:98657066-98657262; Gene: ERCC6L2 (intron)
  source 1..197: mol_type = genomic DNA
cgggatttcaccatgttagccaggctggttttgaactcctaacctcaggtgatccgcccgcctcggcctcccaaaatgctgggattacaggcgtgagccactgcaccaggcccggtatgtcaactttggtaactatttcgtgggtacttaaaatgaaactgctttgcagtagtgtgcagtgttctagcaaatattcg

SEQ ID NO: 373 - DNA, 256 bp, Homo sapiens
  misc_feature 1..256: note = U/M: U (0.16:0.83) in Gastric Epithelium
  misc_feature 1..256: note = source = chr20:33997810-33998065; Gene: UQCC (intron)
  source 1..256: mol_type = genomic DNA
cgttggccaggctggtcttgaactcctggcctcaagtgatccacctacctcagcctcccaatgtgctgggattacaggtgtgagccacggcacctggccaggaatacctctctgtggttcagttttcttatctgtaaaatagaggaaataacacgccctcctttccaaagggatgttataaggattaggtaagtattttaaagtgcttagcacgtagtaagtgccctataaaatgatagttgtcaggccaggctcg

SEQ ID NO: 374 - DNA, 137 bp, Homo sapiens
  misc_feature 1..137: note = U/M: U (0.17:0.83) in Gastric Epithelium
  misc_feature 1..137: note = source = chr5:175832583-175832719; Gene: CLTB (intron)
  source 1..137: mol_type = genomic DNA
cgtttattcactgccctagcaggtgtgtggccataaaagaatgtgcactgaccaaatgaatgaacgaccaaacgtataaaccaaatgaataaacaagtagctgggtacacaggggcgtggagggcacgggacgagcg

SEQ ID NO: 375 - DNA, 404 bp, Homo sapiens
  misc_feature 1..404: note = U/M: U (0.25:0.89) in Gastric Epithelium
  misc_feature 1..404: note = source = chr9:100820273-100820676; Gene: NANS (intron)
  source 1..404: mol_type = genomic DNA
cggctcactgcaacctctgcctcccaggcttaagtgattctcccacctcagcctcccgagtagctgggacccacaggcgtgaaccaccatgctgggctaatttttttgtagagatggggtttggccatgttacccaggctggtctcgaactcctgagctcaagcaatctgcccaccttggcctccgaaagtgctgggattacaggtgtgagccaccaccctcggcccttgctgttccttcgggactggttttatggaaacctaatcactgaatcataaaaatactttacaaaaataacattgctaacattttttgagtgcttactctaccaggtactaagctaaatgctgtacatgcaccatctcatttaatttttacaacaacccaatgccatgatgctgccg

SEQ ID NO: 376 - DNA, 99 bp, Homo sapiens
  misc_feature 1..99: note = U/M: U (0.27:0.86) in Gastric Epithelium
  misc_feature 1..99: note = source = chr22:50885408-50885506; Gene: SBF1 (exon)
  source 1..99: mol_type = genomic DNA
cgggcggggcggggcggggacgggggctgtacacacaagtgctgggggctcggggcctcaatactgtcgagggccggggctgtaaacatggccggggcg

SEQ ID NO: 377 - DNA, 214 bp, Homo sapiens
  misc_feature 1..214: note = U/M: U (0.29:0.87) in Gastric Epithelium
  misc_feature 1..214: note = source = chr17:38844775-38844988; Gene: KRT24 (Intergenic)
  source 1..214: mol_type = genomic DNA
cgcctgcctcggcctcccaaagtgttgggattataggtgtgaaccaccacgcccggccttacctagtgcttatctccatagcttatgtttttcatcatgctgctaagggtaactatatcacacttttgtctgaagtccacagctgctagttttacgctgacgatctgtagcatgaagttgcattgtcagtgtttgcatctgaaatctggaaacg

SEQ ID NO: 378 - DNA, 240 bp, Homo sapiens
  misc_feature 1..240: note = U/M: U (0.26:0.82) in Gastric Epithelium
  misc_feature 1..240: note = source = chr9:97385813-97386052; Gene: FBP1 (intron)
  source 1..240: mol_type = genomic DNA
cggggggccgggagggctgggcagaggggccgaaggcactggacacggatgaggcactgaggcaggtgcagaaggaaagtcctatattaccttttggcccaagtcccatctgctcaggcacttccctcaggaacactcaggccatgtggtctcttttactcaaaatcttcctagacagctatctgagtgctcatttattctacaaatattcaccagggacctgctgtgcacggggaaccg

SEQ ID NO: 379 - DNA, 303 bp, Homo sapiens
  misc_feature 1..303: note = U/M: M (0.88:0.16) in Gastric Epithelium
  misc_feature 1..303: note = source = chr5:138729351-138729653; Gene: PROB1 (exon)
  source 1..303: mol_type = genomic DNA
cgagggacgggctcctttccccagcaacacactgattccactgggaaaggatcggaggggaagggcttctcctgctgacagtttcctcgacggcaggattttgattttcccactcggaggaggcttcagggaacaatgggctactcaccctccgagtagtccgatcccacggggacaggttctggggcgacgggcagcgaggaccccgtacagccccatttggagtctgccgtggcggggacgggctccttggcctcacagccctactcggaacctccgaggggatcctacactcaaaaggcg

SEQ ID NO: 380 - DNA, 207 bp, Homo sapiens
  misc_feature 1..207: note = U/M: M (0.8:0.12) in Gastric Epithelium
  misc_feature 1..207: note = source = chr15:82432262-82432468; Gene: EFTUD1 (intron)
  source 1..207: mol_type = genomic DNA
cgacacaaagccaaaatgtctgacttccaaacttttctctctgattcagatttccccctagtggcggttattaggaacggaaataggaaacaaatggcagaaaatctattgtgtcacaacgcctcaaggaaaaaacctaaactaaaatctctgatgagccttcaccatgtttaggtttagcttaaaaacaaattaacactccattcg

SEQ ID NO: 381 - DNA, 256 bp, Homo sapiens
  misc_feature 1..256: note = U/M: M (0.77:0.11) in Gastric Epithelium
  misc_feature 1..256: note = source = chr10:32665666-32665921; Gene: EPC1 (intron)
  source 1..256: mol_type = genomic DNA
cgtatttcaaagtgggtaaacacgctaaataataattcttgaaatgttcactctttcaaaaaataatctcttcaatcttatggaaaagtggtctagtgtactatttcagttgtttttattttatgtgaccaaaaaaaatacgctttagggttcaattactgattcgtcccactttctttttgaactaagggcacacttactatctccataaacagctaaaatgtttacagagaccagtaaaacctatgtcagatcg

SEQ ID NO: 382 - DNA, 64 bp, Homo sapiens
  misc_feature 1..64: note = U/M: M (0.79:0.23) in Gastric Epithelium
  misc_feature 1..64: note = source = chrX:105421549-105421612; Gene: MUM1L1 (intron)
  source 1..64: mol_type = genomic DNA
cgtgtgggaatgggcgatcaaattacagtttctaaattaagacttcggtgagacgtgctgttcg

SEQ ID NO: 383 - DNA, 247 bp, Homo sapiens
  misc_feature 1..247: note = U/M: M (0.71:0.15) in Gastric Epithelium
  misc_feature 1..247: note = source = chr3:181417368-181417614; Gene: SOX2-OT (exon)
  source 1..247: mol_type = genomic DNA
cgatttttcttgttgcaggggattgcagtggcaaagctaggctaggtcttggaggctggtgtaaggcgatgtgggtgaaggcaggaggctgatggaaagactggggggaagaaaagccgaaatggattcacggtgccttggatgaaggacgagaggggaactgcaagctccttcaactggttctgtccggtgagaagtgatcaagcttgggctgacaagaggctcagggagccctcacgttctttcg

SEQ ID NO: 384 - DNA, 315 bp, Homo sapiens
  misc_feature 1..315: note = U/M: M (0.67:0.12) in Gastric Epithelium
  misc_feature 1..315: note = source = chr19:33784296-33784610; Gene: CEBPA (Intergenic)
  source 1..315: mol_type = genomic DNA
cgcaccaggcaaaagagtgaagcaaacacacatttcctaacagcgagtagacaccgtgctgggagtgatctgtcatgcttagtcacggtaattgctctagcaaaactcaggaatcaaataaaacgtgtttgcaaattgtaaatcgctccaggaggctacttcagacgggtcctaacctgatgctgaaggtcacggcggctccctttggagcagacacccagccctgacgcccccttgacccatccccaccccctttctctgagcaggggttgagccggctgagaccattgcccaacatgtgcacgggaaaggccg

SEQ ID NO: 385 - DNA, 187 bp, Homo sapiens
  misc_feature 1..187: note = U/M: M (0.68:0.14) in Gastric Epithelium
  misc_feature 1..187: note = source = chr19:6057263-6057449; Gene: RFX2 (intron)
  source 1..187: mol_type = genomic DNA
cgcagctagaagcagccctggactacggccgtgatgaatgaatctgcctgggcacaaagggaagaggcttctgtttacagaaaaatactcccatcacctagtaaccagcaatgtcaggaaaggaaatgcagaaaacgctgagagcaatttctgggcccgttcctggctgagccgctgactcactgcg

SEQ ID NO: 386 - DNA, 111 bp, Homo sapiens
  misc_feature 1..111: note = U/M: M (0.65:0.13) in Gastric Epithelium
  misc_feature 1..111: note = source = chr7:158261071-158261181; Gene: PTPRN2 (intron)
  source 1..111: mol_type = genomic DNA
cgtcttgcccagagatcctcaactctgatagcacattacagtcacctcgggaagcttcagagaaaaagaaaggacggcaaagcctgggtcccgcccccaccccgcccctcg

SEQ ID NO: 387 - DNA, 69 bp, Homo sapiens
  misc_feature 1..69: note = U/M: M (0.73:0.23) in Gastric Epithelium
  misc_feature 1..69: note = source = chr1:207494170-207494238; Gene: CD55 (promoter-TSS)
  source 1..69: mol_type = genomic DNA
cgttttggggtctgtttgtttttattgttatcccaccccacaccgccccgaggcgcgcgcgcgcgcgcg

SEQ ID NO: 388 - DNA, 128 bp, Homo sapiens
  misc_feature 1..128: note = U/M: M (0.59:0.09) in Gastric Epithelium
  misc_feature 1..128: note = source = chr8:38644209-38644336; Gene: TACC1 (promoter-TSS)
  source 1..128: mol_type = genomic DNA
cggtcactcttgtggctttgccaagggattttcaaatcccgggaatgccagggatggagatgaacaggctgaaatcccccacgctgccagggttagggaggggaaaacaacagtccacagcggccgcg

SEQ ID NO: 389 - DNA, 156 bp, Homo sapiens
  misc_feature 1..156: note = U/M: M (0.69:0.2) in Gastric Epithelium
  misc_feature 1..156: note = source = chr8:144650650-144650805; Gene: MROH6 (exon)
  source 1..156: mol_type = genomic DNA
cggaggggaggcacggtgggagtggtgagtgttggatggcataggggtgggatggtgtcgggggctgctgacctcagcagcgtccctgctggggtcatgcaggcgcagcagcagcggcacgagactctgcagcaccagcttccgcagggggccgcg

SEQ ID NO: 390 - DNA, 164 bp, Homo sapiens
  misc_feature 1..164: note = U/M: M (0.64:0.15) in Gastric Epithelium
  misc_feature 1..164: note = source = chr12:103695910-103696073; Gene: C12orf42 (exon)
  source 1..164: mol_type = genomic DNA
cggcctagaaagggcctgtgaacaaaccgtatggaaacgccgggttgggcgggggggtgctgaggagcaaacctttattaacctcttggaggggaaatgggtggaagcaccggccagcagaggaaggggcgctcctgccagattgccatggagggaggtgtccg

SEQ ID NO: 391 - DNA, 27 bp, Homo sapiens
  misc_feature 1..27: note = U/M: M (0.73:0.29) in Gastric Epithelium
  misc_feature 1..27: note = source = chr1:228402009-228402035; Gene: C1orf145 (promoter-TSS)
  source 1..27: mol_type = genomic DNA
cgcgtggccatctccgcggagggcacg

SEQ ID NO: 392 - DNA, 129 bp, Homo sapiens
  misc_feature 1..129: note = U/M: M (0.68:0.24) in Gastric Epithelium
  misc_feature 1..129: note = source = chr13:70682525-70682653; Gene: KLHL1 (promoter-TSS)
  source 1..129: mol_type = genomic DNA
cgcatatagggaggcaaaagaaaaagcccgcctgtgaagctgtcaaggtcctcacagtacaattttctctctgcctcagcgcctcctcctcccctgtaagtgacgcagatgtgcactggggcctatacg

SEQ ID NO: 393 - DNA, 60 bp, Homo sapiens
  misc_feature 1..60: note = U/M: M (0.67:0.24) in Gastric Epithelium
  misc_feature 1..60: note = source = chr6:40722284-40722343; Gene: LRFN2 (Intergenic)
  source 1..60: mol_type = genomic DNA
cgtgcctgccttctgtcccgaaaagcaccagagagaggccaaggctcagcggcagcggcg

SEQ ID NO: 394 - DNA, 199 bp, Homo sapiens
  misc_feature 1..199: note = U/M: M (0.63:0.22) in Gastric Epithelium
  misc_feature 1..199: note = source = chr11:65184712-65184910; Gene: NEAT1 (Intergenic)
  source 1..199: mol_type = genomic DNA
cgagagcacaggcctcccatacagtatcgtcaaggtcagcagcctcccgggcaggggggttctactccccgcagaagccctggcaccatggccaacttgctcacagagggcactcagtcagaccaaggtgggttggggcagaaaaggctccttcagagattcaaggacagtcacaactggtgctgtgatggggccaccg

SEQ ID NO: 395 - DNA, 30 bp, Homo sapiens
  misc_feature 1..30: note = U/M: M (0.62:0.24) in Gastric Epithelium
  misc_feature 1..30: note = source = chrX:108843476-108843505; Gene: KCNE1L (Intergenic)
  source 1..30: mol_type = genomic DNA
cgcggagaggcaggcgcgggaagtcagccg

SEQ ID NO: 396 - DNA, 170 bp, Homo sapiens
  misc_feature 1..170: note = U/M: M (0.55:0.18) in Gastric Epithelium
  misc_feature 1..170: note = source = chr17:37400316-37400485; Gene: STAC2 (Intergenic)
  source 1..170: mol_type = genomic DNA
cggtacagatggggaaatggaggcctccagggctctgactgctgcaagcccatcacagccccctggggactccaccacttcctgcaaaggacactctctgccctgtctgtggttgttgaagcttccaggagctgacgccctccaggctgcctgtcctacgcgggccatcg

SEQ ID NO: 397 - DNA, 64 bp, Homo sapiens
  misc_feature 1..64: note = U/M: M (0.57:0.21) in Gastric Epithelium
  misc_feature 1..64: note = source = chr1:47999397-47999460; Gene: FOXD2 (Intergenic)
  source 1..64: mol_type = genomic DNA
cgggagaagccggagacagagagaggacggggacagtggcggcctgcagagccctaggaacccg

SEQ ID NO: 398 - DNA, 107 bp, Homo sapiens
  misc_feature 1..107: note = U/M: M (0.58:0.22) in Gastric Epithelium
  misc_feature 1..107: note = source = chr19:9832712-9832818; Gene: ZNF812 (Intergenic)
  source 1..107: mol_type = genomic DNA
cgccaggaaaccaccccctccctgctgtaacagctttacccgcagaaactgttcttccctgcgctcttctaattagctaattacatttagcttagactgtgcggccg

SEQ ID NO: 399 - DNA, 71 bp, Homo sapiens
  misc_feature 1..71: note = U/M: M (0.58:0.27) in Gastric Epithelium
  misc_feature 1..71: note = source = chr3:13908233-13908303; Gene: WNT7A (intron)
  source 1..71: mol_type = genomic DNA
cgttttattctcagaacaacaggaaaccgcgggagggttttacacagcaggatgccacacggagcaacacg

SEQ ID NO: 400 - DNA, 142 bp, Homo sapiens
  misc_feature 1..142: note = U/M: M (0.59:0.28) in Gastric Epithelium
  misc_feature 1..142: note = source = chr19:49112138-49112279; Gene: FAM83E (intron)
  source 1..142: mol_type = genomic DNA
cggttctctaattggcagggaaagtcgggggtatggggcgtgtgatgctactgacctctgctgggtggaggctgaagatgccgaggagcctcccacaatgcacccaacagctcctaaaacaaagacttacccagcccgagcg

SEQ ID NO: 401 - DNA, 420 bp, Homo sapiens
  misc_feature 1..420: note = U/M: M (0.58:0.27) in Gastric Epithelium
  misc_feature 1..420: note = source = chr17:7967499-7967918; Gene: ALOX12B (Intergenic)
  source 1..420: mol_type = genomic DNA
cgctcccccttaccagtggctggagggggcaggcaaagggcagggccggggctgcaggaggggcatggagggagcgagggggaccagggtggtcatgggtcaggggaggggggctggtgtggacacagtggggaggggggaggcagaaaggtgacatgaggggcacgggaaggaggaggtgggatggttgggaggaaccatactcagggaggggaggatggaagataagtgggggaggggagcaccggctctgacaagaggattaggtggggaagttgagtggtggatcagtgagtggaagagggagaagctggtggaaagagaacaggcctgtgaagcagaggggttgggggcagaacatcgtggcccagtattgggggtggtgggtgtagctatgtcttctctttcctcttcccaccg

SEQ ID NO: 402 - DNA, 129 bp, Homo sapiens
  misc_feature 1..129: note = U/M: M (0.84:0.1) in Gastric Epithelium
  misc_feature 1..129: note = source = chr8:86351007-86351135; Gene: CA3 (promoter-TSS)
  source 1..129: mol_type = genomic DNA
cgccccaccctcgctgacctaataaggccatgcagtgtgcgggggagctacataaaagcgcgggctcgcggcgactctgcaccacgcaggggaagagaaagcaggagccgtccagcacggaggaaggcg

SEQ ID NO: 403 - DNA, 294 bp, Homo sapiens
  misc_feature 1..294: note = U/M: M (0.92:0.09) in Gastric Epithelium
  misc_feature 1..294: note = source = chr6:1624957-1625250; Gene: GMDS (intron)
  source 1..294: mol_type = genomic DNA
cgcggttaagaatgtgctgtgcggacccgtgaggaccgtgaccgcgatccacccccagctacctccacacctcttctccccaaggcgtcccttgggctcttaatgctttttttttttttttttttttttttttataacatgaagttgtcagggacgctcctatgagaactgtttggaattgctgcacttctctggctaggagggaagtgagtaaatcaccaggcgcccctcccagctgcccgtgtccctgcgccgctcagctcctgccgcagggctggccgcgccaagcgcgcg

SEQ ID NO: 404 - DNA, 404 bp, Homo sapiens
  misc_feature 1..404: note = U/M: M (0.89:0.1) in Gastric Epithelium
  misc_feature 1..404: note = source = chr13:95360462-95360865; Gene: SOX21 (Intergenic)
  source 1..404: mol_type = genomic DNA
cgccaacttgttagcaagaccattggagtcagaatgggtgataaacgagtctgtggggcctgtggaggtcctcaaacagccgcacaatctgttggcgatatgacctcggtgctccccctcggcatcctcacccctcctcttacccatctttccagtcctcttctcattcatcaacaactccggagcgtttctcccagaaaacgctgatctttgggaaaaggggagggggcgggaggaggcggggagtcttcaggccgaggaggcggccgagctggaaggctcagggtggtaactaagatttagggctggggtgatttccagcgagccgcaggaagttccgtgttgagaagggatgggctgctacaaaagggaaagacgaagccttgaaaggatttaattaaccg

SEQ ID NO: 405 - DNA, 268 bp, Homo sapiens
  misc_feature 1..268: note = U/M: M (0.92:0.15) in Gastric Epithelium
  misc_feature 1..268: note = source = chr5:50674046-50674313; Gene: LOC642366 (exon)
  source 1..268: mol_type = genomic DNA
cgaactgaccgggcatttactgggatttgaggggtttttcttcagcttccaaactactgttacatgcagaatatactggtagatgccaccaatgattgcccacctctctttaaaagttgccccgtccacgcaccattcagcttacactaaactgtcccgacatgccttagccgtcagtttaattcataaagtagctgtaactcttgacatcacctccgcagcccacccgaggactccttcccaggacaccttatgaggctgttttccg

SEQ ID NO: 406 - DNA, 337 bp, Homo sapiens
  misc_feature 1..337: note = U/M: M (0.83:0.06) in Gastric Epithelium
  misc_feature 1..337: note = source = chr6:1625273-1625609; Gene: GMDS (intron)
  source 1..337: mol_type = genomic DNA
cgcggggaagggactcgggctgtggggcgcgaggccccaggactcggggacccctctacctcggcggcagcgtgcgaccctctttctaacgcggccgtggatgtttcttcccgggccgcagccaagcgcggttcttcctgggcggtggctttgggcttttcgtacccacagtcaagtcagttcacgtcgcctcccgcacacacgcgttcataaaacgaaactggagtttcacgaagcaattcttaggcttagcgtccaggaacgctgtagacggtctattctattctacccctattctactcggttcgattctgttcctaagaaaatgccgatctcg

SEQ ID NO: 407 - DNA, 304 bp, Homo sapiens
  misc_feature 1..304: note = U/M: M (0.82:0.06) in Gastric Epithelium
  misc_feature 1..304: note = source = chr8:86350667-86350970; Gene: CA3 (promoter-TSS)
  source 1..304: mol_type = genomic DNA
cgccgggatgtagattttagttcgtggccaagcacaactacgacaccctgtccctgcccccaccccatccccaagaatgcatggaggaaggagagaggacgaggtgagggccgcctgcatttctgcacgtcggcgccggttagaaaccctgcagttttgagagagaagaagaggagatggaggggccaggagccacgactcccgggagagcgcagggaggggcgtgggtgccccttcgcccacctccgcccccgtcacctcgacagctgtcccgctcttggaattcattggcttcctctacccg

SEQ ID NO: 408 - DNA, 313 bp, Homo sapiens
  misc_feature 1..313: note = U/M: M (0.82:0.08) in Gastric Epithelium
  misc_feature 1..313: note = source = chr5:138729829-138730141; Gene: PROB1 (exon)
  source 1..313: mol_type = genomic DNA
cggcctcggggccttggcgggggccgaattatctcgtacgcgaagtggccgagacttagccttctccaggaccacgtgggtgctgcgggccgtttcccgggtctcaggttccgaccgccccgtggacccgaaggtggcgctgctcggggccggggcctcggggctcagttttctggccaacgccgtctgcacgaagcccgcggcggcctgcagggggcccagcgactcgtccagggaaccggtgcgcaggagcagccgggggcgcggcgcgccggccgcccttgggggactctggggccgggggcgcagctcg

SEQ ID NO: 409 - DNA, 211 bp, Homo sapiens
  misc_feature 1..211: note = U/M: M (0.88:0.15) in Gastric Epithelium
  misc_feature 1..211: note = source = chr8:86350423-86350633; Gene: CA3 (promoter-TSS)
  source 1..211: mol_type = genomic DNA
cggacttggagggcctcttcaccctctcaccctgctccggaccctttcttcccatcctttgctcctaggattttacatgttgcctgcaaagggagtcaaacttagggggcaggcaaacaaacgagttctttccagcctctgtaaccggatcgctagagcgaaataaactcgcacaagtgtccagagatcgtagccagacagccagcctgcg

SEQ ID NO: 410 - DNA, 131 bp, Homo sapiens
  misc_feature 1..131: note = U/M: M (0.84:0.16) in Gastric Epithelium
  misc_feature 1..131: note = source = chr6:1625627-1625757; Gene: GMDS (intron)
  source 1..131: mol_type = genomic DNA
cgagcggagctgcagccagcagctctgcaggaccccgcactgcccgccaccgtcccctctggcagtgccttcctcctcccgctttccccaactgctccactcgaggaaacaagggcatttcatctccatcg

SEQ ID NO: 411 - DNA, 157 bp, Homo sapiens
  misc_feature 1..157: note = U/M: M (0.85:0.2) in Gastric Epithelium
  misc_feature 1..157: note = source = chr14:21091267-21091423; Gene: OR6S1 (Intergenic)
  source 1..157: mol_type = genomic DNA
cgtttatgcggtgctccctgagccctattttaaagctgctttttaagaacttcctttctgctcgcctcccccaactcctggcagcggtgaccgtgaactcgcaggaccttcgcccccgcggagacccagggaagaacgcttttttcctctctattcg

SEQ ID NO: 412 - DNA, 197 bp, Homo sapiens
  misc_feature 1..197: note = U/M: M (0.74:0.09) in Gastric Epithelium
  misc_feature 1..197: note = source = chr5:50695414-50695610; Gene: LOC642366 (Intergenic)
  source 1..197: mol_type = genomic DNA
cggaagggtggagggacagtgaaagaaagcttaggcgaggtgtctttgactaatccagtatctcctcttgctgcttggaaatgacagttttgcgccaaagccatttatggttcgcagggtcagtgggctctgactcaagggcaatcaataaaatatttagttcagtaataagctgagtttttttcccgaatgtaccg

SEQ ID NO: 413 - DNA, 155 bp, Homo sapiens
  misc_feature 1..155: note = U/M: M (0.77:0.15) in Gastric Epithelium
  misc_feature 1..155: note = source = chr15:96952287-96952441; Gene: MIR1469 (Intergenic)
  source 1..155: mol_type = genomic DNA
cgtgcacacgtgggacagaaaaactccaacagatcttcatgtttcagttccaggtttatgaaaataataataggatgggtttggctaattaggaaaatggtttgaaccagttacatcaccagcccagtgaaaagccgccgggatgccggctgacg

SEQ ID NO: 414 - DNA, 33 bp, Homo sapiens
  misc_feature 1..33: note = U/M: M (0.7:0.09) in Gastric Epithelium
  misc_feature 1..33: note = source = chr7:155595558-155595590; Gene: SHH (TTS)
  source 1..33: mol_type = genomic DNA
cgccccctcccgcgcccctcccccggccccccg

SEQ ID NO: 415 - DNA, 448 bp, Homo sapiens
  misc_feature 1..448: note = U/M: M (0.68:0.07) in Gastric Epithelium
  misc_feature 1..448: note = source = chr11:46317357-46317804; Gene: CREB3L1 (intron)
  source 1..448: mol_type = genomic DNA
cgggcggctgaggccaggctccaagagagggtgcagccgagaagaggggtacgcaggtctgcaagcaggagagctcgggaacctctcctccaagggagggaagccggcgccggctgcgcgtgacagccgagaaggagcttatattggcacgactataggaaaaagtctttaacgaggagggaaacaaatcataatatgtccttctccggcttcccacccccgttgcctggaaaggcacccctgtaggacgctcaccccctgcagaaccctgtcgccctcagagcgttgacacatggctcccctgaagttcgtgaactcctggccgccgaccccttgctcttgctccccaatttccatcggacaatctaaacctgaacttttgtgtgtgaagtggagggagggctgggtgtggttgggggtagaggggacaagggggcgtgctggagcg

SEQ ID NO: 416 - DNA, 180 bp, Homo sapiens
  misc_feature 1..180: note = U/M: M (0.75:0.15) in Gastric Epithelium
  misc_feature 1..180: note = source = chr5:50262917-50263096; Gene: PARP8 (Intergenic)
  source 1..180: mol_type = genomic DNA
cgctttggacttggggactgagggcgtggtgggcagacagctgttgaatccaaacaaagactattctggatctgacgccgtttcggtttccatctgggagtacttttcatttccttcttcccattccaaaggaaagaaatggattaggaatggggcagtcagaattatgtgtttatggcg

SEQ ID NO: 417 - DNA, 291 bp, Homo sapiens
  misc_feature 1..291: note = U/M: M (0.76:0.16) in Gastric Epithelium
  misc_feature 1..291: note = source = chr2:233755749-233756039; Gene: NGEF (intron)
  source 1..291: mol_type = genomic DNA
cgtcacgtgtctttcctgacccgcccccatcgctgcaactggcagtggccagccagccacccctgtcgtgtcggcccatttggctgtccccagggccatgcccacttcctggctgtgcatggttcggtctctcccctctgcgatgggctccctgggagcaggcgctgcatcctcactgcccaggaacgtgcttggcacacatgggaggagcttagtatctgttgaaccagtagacctcctagaaagctgacagggcccgggaatgaccacagcaaagcctgggaagccccg

SEQ ID NO: 418 - DNA, 42 bp, Homo sapiens
  misc_feature 1..42: note = U/M: M (0.81:0.23) in Gastric Epithelium
  misc_feature 1..42: note = source = chr14:21091179-21091220; Gene: OR6S1 (Intergenic)
  source 1..42: mol_type = genomic DNA
cgggggggcgcgggaggagagcctgcctccgacctccgaacg

SEQ ID NO: 419 - DNA, 224 bp, Homo sapiens
  misc_feature 1..224: note = U/M: M (0.68:0.11) in Gastric Epithelium
  misc_feature 1..224: note = source = chr5:7395532-7395755; Gene: ADCY2 (promoter-TSS)
  source 1..224: mol_type = genomic DNA
cggtgcccaccgcggggaggcgggaagggtgggaaatcctctccagctccccaaaagagtgaaaaggagggagaccccgctgtcctctgacccgcgtactaaaggagggaccccccgggtcctctgaccccggctgcgctctgtgactgtgggggagggtgggagcaggccccgcagcccactaaggggtggaggaaacaggagggtggcagcgtccctgcccg

SEQ ID NO: 420 - DNA, 45 bp, Homo sapiens
  misc_feature 1..45: note = U/M: M (0.74:0.2) in Gastric Epithelium
  misc_feature 1..45: note = source = chr12:1639108-1639152; Gene: LOC100292680 (Intergenic)
  source 1..45: mol_type = genomic DNA
cgctcgtgccaggatcgcggggcgcgggtacgggctccttgggcg

SEQ ID NO: 421 - DNA, 76 bp, Homo sapiens
  misc_feature 1..76: note = U/M: M (0.65:0.12) in Gastric Epithelium
  misc_feature 1..76: note = source = chr7:154705815-154705890; Gene: LOC100132707 (Intergenic)
  source 1..76: mol_type = genomic DNA
cggggtccgaagcgcacaggcttcgaaggaactagtgagccagccgagggcagcgggagccgcagaaatcagctcg

SEQ ID NO: 422 - DNA, 100 bp, Homo sapiens
  misc_feature 1..100: note = U/M: M (0.75:0.22) in Gastric Epithelium
  misc_feature 1..100: note = source = chr20:29550850-29550949; Gene: FRG1B (Intergenic)
  source 1..100: mol_type = genomic DNA
cgggcagccggacgtcgctccatccttcccgccagatggatgggtctgctgcgcaggcacaagctgtcgggccaggccctgccaaggcagaacagtggcg

SEQ ID NO: 423 - DNA, 46 bp, Homo sapiens
  misc_feature 1..46: note = U/M: M (0.71:0.22) in Gastric Epithelium
  misc_feature 1..46: note = source = chr3:128765012-128765057; Gene: GP9 (Intergenic)
  source 1..46: mol_type = genomic DNA
cgcccggccgtgcgcctcccggcccagggcgcgctggacgtggacg

SEQ ID NO: 424 - DNA, 137 bp, Homo sapiens
  misc_feature 1..137: note = U/M: M (0.65:0.17) in Gastric Epithelium
  misc_feature 1..137: note = source = chr19:1775351-1775487; Gene: ONECUT3 (TTS)
  source 1..137: mol_type = genomic DNA
cgcgcggcgccgctgcatgaaccgctgggctgaggagcccagcacggcccccgggggccccgccggcgccacggccactttctccaaggcctgaggcgccccggccccgcgccctccctgcctccacggcctgggcg

SEQ ID NO: 425 - DNA, 149 bp, Homo sapiens
  misc_feature 1..149: note = U/M: M (0.67:0.19) in Gastric Epithelium
  misc_feature 1..149: note = source = chr5:149461437-149461585; Gene: CSF1R (intron)
  source 1..149: mol_type = genomic DNA
cgttgcctctgcagcgtcagcatttttccagggcctaaaataggggcaaaggagggaagtgagagctgattcaagcctccgaggggctgccaggcgccccccagcctgtgtgggcggaaacacattgttggcgtcaggctcagcccccg

SEQ ID NO: 426 - DNA, 387 bp, Homo sapiens
  misc_feature 1..387: note = U/M: M (0.62:0.14) in Gastric Epithelium
  misc_feature 1..387: note = source = chr14:94226109-94226495; Gene: PRIMA1 (intron)
  source 1..387: mol_type = genomic DNA
cgggagccccacagaccagcgagagcaagcagtggggagggggaggtgtccctggcagaggagcttctaggaaggacgtggtgttcaccaccctgccctgcttggcagaggccccggcctggacatcacagtctggaagcttcccagacaggctggcctgagacacttgaacctttactgggctcctcctccaggggccgaagggcagcacagatgccacagccaggtcacagccggtgctgacaagctgcaggaaggcccttgccacagggcaacagctgccgtccccgagggctgcctgaccatatttagacaggagcagacggagaggcagcataaatcaagccccacagcctgggctgccagggggaacaaaacaaggcaacg

SEQ ID NO: 427 - DNA, 405 bp, Homo sapiens
  misc_feature 1..405: note = U/M: M (0.58:0.14) in Gastric Epithelium
  misc_feature 1..405: note = source = chr8:102038446-102038850; Gene: FLJ42969 (Intergenic)
  source 1..405: mol_type = genomic DNA
cggatggccgtctttgtagaggcggctcccccatggctgttttgttaggcagggacacttggctgtaaacagtaaaaactgactctgactctgatggatgctaatgaggggctcactggggggatactggccaagcccaaactctgggaaagcgagctggacaccagaccctgtgagggacgaagaggagcagctccgggaactgcgtggaattccctgtcccgggatgactcagcgccagctaacttcctgtgtgtctgcgtttgtctgtctgtgtgtagggttccagtccctgggagagagattttcactggccaacttggtcacttgcctgtcccctgtcacgaggggtccaagtcctgggattagctggacaccagaaccatgtatctgtgggagggggcg

SEQ ID NO: 428 - DNA, 141 bp, Homo sapiens
  misc_feature 1..141: note = U/M: M (0.57:0.15) in Gastric Epithelium
  misc_feature 1..141: note = source = chr3:128764857-128764997; Gene: GP9 (Intergenic)
  source 1..141: mol_type = genomic DNA
cgaaccccaagaatacaacccgaaccccaagagtacgtgcccctcagagactgcagcggctgctgagaggagcacatccagggcggctactgccccaaggggtcgccacctctgggactggcatccgttcaggggccctcg

SEQ ID NO: 429 - DNA, 363 bp, Homo sapiens
  misc_feature 1..363: note = U/M: U (0.01:0.93) in Small Intestine Epithelium
  misc_feature 1..363: note = source = chr10:19338949-19339311; Gene: ARL5B (Intergenic)
  source 1..363: mol_type = genomic DNA
cggttaattatccagaggcacgaattctattattgtaggtcacttaactcaaacatatgtcttcttttttttttttttttttttttgagacggagtctcgctctgtcgcccaggctggagtgcagtggcgggatctcggctcactgcaagctccgcctcccgggttcacgccattctcctgcctcagcctcccaagtagctgggactacaggcgcccgccactacgcccggctaattttttgtatttttagtagagacggggtttcaccgttttagccgggatggtctcgatctcctgacctcgtgatccgcccgcctcggcctcccaaagtgctgggattacaggcgtgagccaccgcgccc

SEQ ID NO: 430 - DNA, 295 bp, Homo sapiens
  misc_feature 1..295: note = U/M: U (0.05:0.95) in Small Intestine Epithelium
  misc_feature 1..295: note = source = chr10:126496740-126497034; Gene: FAM175B (intron)
  source 1..295: mol_type = genomic DNA
cggcaaactttttttttttttttgagacggagtcttgctctgtcgcccaggctagagtgcagtggcacgatctcggctcactgcaagctccgcctcccgggttcaggccattctcctgcctcagcctcccgagtagctgggactacaggtgcctgcaaccacgcccggctaatttttttgtatttttagtagagacgggttttcaccgtgttagccaggacggtcttgatctcctgacctcgtgatccgcccacctcagcctcccaaactgctgggattacaggcgtgagccacc

SEQ ID NO: 431 - DNA, 304 bp, Homo sapiens
  misc_feature 1..304: note = U/M: U (0.02:0.91) in Small Intestine Epithelium
  misc_feature 1..304: note = source = chr11:65594327-65594630; Gene: SNX32 (Intergenic)
  source 1..304: mol_type = genomic DNA
cggggtttcaccatgttggccaggctggtcttaaactcttgacctcaggtgatccgcccgcctcggcctcccaaagtgctgagagtacaggtgtgagctaccgcaccccaccaacatttatattcttaaatacttgccactgaagcgctcatccagtaagtatgcgccgaatgaatggaggggttgctgcacagcctcattccctacccccattcaggatcccaggccttgctttggcaggtgaggaagccaaggttcagggcttgtctggtaggaatagaggaggccattcagcagacagagc

SEQ ID NO: 432 - DNA, 425 bp, Homo sapiens
  misc_feature 1..425: note = U/M: U (0.04:0.93) in Small Intestine Epithelium
  misc_feature 1..425: note = source = chr13:30110150-30110574; Gene: SLC7A1 (intron)
  source 1..425: mol_type = genomic DNA
cgggccacagctccagccaggacgtagacaccagcacccagtgtgctgcccaccccgagggccaccagatcaaaagtgttcaggcagcgagacagccgcgtctcctcccggctacagtccaccaccttccgccgcagcatctgctgcccaatgttgagcaggactttgcaccccatgttgctgttcagagctgttgaaaaagaacaaagatgtttcctgattgctcctcatttcacccattactctaatcttatcacattatggaaacacagacagtgatcaggtccttcataatcatttcctgctaaaacgctttaattcgtagaattccaccatcaattgtcagaagcacgcagacttctccagtttcaccagcacatacagaattaacccagcaggccaacagatacagatgacttcatttc

SEQ ID NO: 433 - DNA, 106 bp, Homo sapiens
  misc_feature 1..106: note = U/M: U (0.06:0.94) in Small Intestine Epithelium
  misc_feature 1..106: note = source = chr11:440653-440758; Gene: ANO9 (intron)
  source 1..106: mol_type = genomic DNA
cggagtagctgggaccgcaggctcatgccaccacgcccgggttccagcagtcctcctgcctcagcctcccgagtagctgggagcgcaggcacgcgccaccacgccc

SEQ ID NO: 434 - DNA, 142 bp, Homo sapiens
  misc_feature 1..142: note = U/M: U (0.06:0.94) in Small Intestine Epithelium
  misc_feature 1..142: note = source = chr2:136594907-136595048; Gene: LCT (promoter-TSS)
  source 1..142: mol_type = genomic DNA
cgggcgtggtggctcacacctgtaattccagcactttgggaggccgaggtgggcggatcacgaggtcaggagatcgagaccgtcctagctaacatggtgaaaccccatctctactaaaaatacaaaaaattagccaggcatc

SEQ ID NO: 435 - DNA, 236 bp, Homo sapiens
  misc_feature 1..236: note = U/M: U (0.07:0.94) in Small Intestine Epithelium
  misc_feature 1..236: note = source = chr4:178322231-178322466; Gene: AGA (Intergenic)
  source 1..236: mol_type = genomic DNA
cgggagcggtggctcacacctgtaatcccagcactttgggaggttgaggcaggcggatcacgaggtcaggagatcaagaccatcctggctaacacggtgaaaccctgtctctactgaaaaatacaaaaaattagccgggcatggtggtcggcgactgtagtcccagctactcgggaggctgaggcaagagaatggcgtgaatccgggaggcggaacttgcagtgagccgagatagc

SEQ ID NO: 436 - DNA, 373 bp, Homo sapiens
  misc_feature 1..373: note = U/M: U (0.02:0.88) in Small Intestine Epithelium
  misc_feature 1..373: note = source = chr11:272256-272628; Gene: NLRP6 (Intergenic)
  source 1..373: mol_type = genomic DNA
cgctttctctctgggtctctgtggggaagggaaagaccttccttaaggagcactggacgcccagcacctgccttggaggacagtttgctttcgtggaagattgggccacagagagcattgctgtggaaggaggcgtcagaagtggggccaagtgcacgttgcccttccacctgcggccttggagacaggtccaaggtgtacgagttacgaaggccttgggccgcatgaaaccgaaacccacaggagagtcgttctcccagaacaaagccccgaggtggcctcccagctgccagagtcatctcctctggctcctgggcctgggcattgctcgtggacctccaagttttgtgtccatgtccaagaggacaaagac

SEQ ID NO: 437 - DNA, 460 bp, Homo sapiens
  misc_feature 1..460: note = U/M: U (0.07:0.92) in Small Intestine Epithelium
  misc_feature 1..460: note = source = chr1:227290003-227290462; Gene: CDC42BPA (intron)
  source 1..460: mol_type = genomic DNA
cgaaaaaatacttttcatgtgccagatccagatcgtccaatggtttatgaggcagcctaacatgcaaaagtctgcttaacttgagaagaaccagagcaaggcagattcttgctctgaagcatcgctatgaaaatgagaactaaattgacatctgtggcacttaccactgacccgtactattcttgcatttttctaactacttaaagaaaagaacacttttagtttgatgttctgtttattgtgatgactgttgggatggcagcagcatgtacagtaagtttcaagaaaaaaaaattcccctgaaatcaaaacctaacaaagataccaacaattatggttacagatgcatatcacttattgataagaatgtgaaaagccaaatagaacacaaatgatattattaaaccatctgtaaaaaagaaaaacctaccaagaaataataggttttattgcagacacc

SEQ ID NO: 438 - DNA, 76 bp, Homo sapiens
  misc_feature 1..76: note = U/M: U (0.05:0.9) in Small Intestine Epithelium
  misc_feature 1..76: note = source = chr11:440819-440894; Gene: ANO9 (intron)
  source 1..76: mol_type = genomic DNA
cgacgcccgggttcaagcaatcctcttgcctcagcttccggagtagccgggaccacaggcatgcgccaccaggccc

SEQ ID NO: 439 - DNA, 147 bp, Homo sapiens
  misc_feature 1..147: note = U/M: U (0.04:0.89) in Small Intestine Epithelium
  misc_feature 1..147: note = source = chr11:283462-283608; Gene: NLRP6 (intron)
  source 1..147: mol_type = genomic DNA
cgccactacgcccggctaattgtttgtatttttagtagagacagggtttcaccgggttagccaggatagtctcgatctcctgacctcgtgatccacccgcctctgcctcccaaagtgctgggatcacaggcatgagccaccgcgccc

SEQ ID NO: 440 - DNA, 269 bp, Homo sapiens
  misc_feature 1..269: note = U/M: U (0.03:0.88) in Small Intestine Epithelium
  misc_feature 1..269: note = source = chr2:163772524-163772792; Gene: KCNH7 (Intergenic)
  source 1..269: mol_type = genomic DNA
cgaatcagaaggtctcattgtgaagacttctgacggctgccgccccatcaggtgagagtttagagttttgctttcattttcagtcttctggaggacaaactctaatagccctctggcaattgatgacacctggtgtagcctgaagaacaggaggtgaacaggtgtggctgccttgccagggagggaggaaggctctctcctatccttactggtcaaaagtccccaggccgtatgtgcggcgtgattggcagtggaatttcgaccagggc

SEQ ID NO: 441 - DNA, 233 bp, Homo sapiens
  misc_feature 1..233: note = U/M: U (0.02:0.86) in Small Intestine Epithelium
  misc_feature 1..233: note = source = chr5:79658542-79658774; Gene: CRSP8P (Intergenic)
  source 1..233: mol_type = genomic DNA
cgacctcccaaagtgatgggattacaagcgtgacccaccacgcccagctccgtacactcttaaccaggagattgtttgttttttcgcacacaatatctaatgatgagctgttttatagcatgaatttagttaatgccaaagtacagcatttatttttagcaaatgaatcagcaagaacaataaagctgttttaatcagaccaaatatgaaatcaagtgttatagatggccttc

SEQ ID NO: 442 - DNA, 196 bp, Homo sapiens
  misc_feature 1..196: note = U/M: U (0.06:0.89) in Small Intestine Epithelium
  misc_feature 1..196: note = source = chr5:1368683-1368878; Gene: CLPTM1L (Intergenic)
  source 1..196: mol_type = genomic DNA
cgggagagcggtggggcttatttcttggtcacagccttgctgaccaaagccggacccggtccagatgaggtgaagtggagaagctggcaaagaccagcagatggtaagagggcaaaacctggctgcccttgttggtcactagcctaagacatgcctaccagtgccatgacagtttacaaatgccatgacagtttac

SEQ ID NO: 443 - DNA, 160 bp, Homo sapiens
  misc_feature 1..160: note = U/M: U (0.14:0.93) in Small Intestine Epithelium
  misc_feature 1..160: note = source = chr6:42964029-42964188; Gene: PPP2R5D (intron)
  source 1..160: mol_type = genomic DNA
cgtctctactaaaaaatacaaaaaattagccgggcgtggtggcgggcgcctgtagtcccagctactcgggaggctgaggcaggagaatggctgaaactgggaggcggagcttgcagtgagccgagatggcgccactgcactccagcctgggtgacagagc

SEQ ID NO: 444 - DNA, 195 bp, Homo sapiens
  misc_feature 1..195: note = U/M: U (0.15:0.94) in Small Intestine Epithelium
  misc_feature 1..195: note = source = chr2:39376566-39376760; Gene: SOS1 (Intergenic)
  source 1..195: mol_type = genomic DNA
cgcctggccagtactttaatatttgataatgccaatggtgaatattaacctttattactacttcatgagtacaattaacaaaggcatgaacactattaaccacggttgttaaagcatcgtggtatctttttccaaaggtaggcctcaatgcagcatgcctcctgttattcaggcgtctgtatggtcacctgccac

SEQ ID NO: 445 - DNA, 434 bp, Homo sapiens
  misc_feature 1..434: note = U/M: U (0.15:0.93) in Small Intestine Epithelium
  misc_feature 1..434: note = source = chr15:81668644-81669077; Gene: TMC3 (Intergenic)
  source 1..434: mol_type = genomic DNA
cggattacattttctatatgagaccagtgcctgtggttatagattgctgcattctaaggaagatgactttattactctgtgagaaggggtagtgatcctggtaggggggtgttatctctgatgccctttggcctttctaattatttacagggaagaaaaggcagaagttacagctgtgtgccacatgactcaggctgcaaagccacattcttctcaaggcttagaataatttcaagttacaacagcattaagtttaagttaattttaataattaagtaatttattggccgggcgcggtagctcacacctgtaatcccagcactttgggaggctgaggcgggcctcacaaggtcaggagattgagaccatcctggccaacatggtgaaactccgtctctactaaaaatacaaaaattagccggtcatggtgatgc

SEQ ID NO: 446 - DNA, 374 bp, Homo sapiens
  misc_feature 1..374: note = U/M: U (0.17:0.94) in Small Intestine Epithelium
  misc_feature 1..374: note = source = chr16:2216470-2216843; Gene: TRAF7 (intron)
  source 1..374: mol_type = genomic DNA
cgcaatcttggctcactgcaacctgtgcctcctgggatcagtcctgccacctcagcctcccaggtagctgggaccacaggcaccaccacacctggctaattttttttatgtttggtagagatgaggtctcaccatgttgcccaggatggtctcaaattcctgggctcacgtgatcctcctgccttggcctcccaaagtgctggaattacaggcatgagccagcaagccaagcccaataaatcttcacctgcacaagaccactgggcgggatacacgacagaaacctgaagcttccctgctgcttctcagtcctatcccctaaaaaccagagtgctgcgctttgaacgcaagcgccgtgctcagggagaccatgc

SEQ ID NO: 447 - DNA, 52 bp, Homo sapiens
  misc_feature 1..52: note = U/M: U (0.03:0.93) in Small Intestine Epithelium
  misc_feature 1..52: note = source = chr12:2506614-2506665; Gene: CACNA1C (intron)
  source 1..52: mol_type = genomic DNA
cgctctaggagcaagtcaggtaagcagcagcaacacacgtgccgcggaggcg

SEQ ID NO: 448 - DNA, 35 bp, Homo sapiens
  misc_feature 1..35: note = U/M: U (0.02:0.91) in Small Intestine Epithelium
  misc_feature 1..35: note = source = chr20:60397537-60397571; Gene: CDH4 (intron)
  source 1..35: mol_type = genomic DNA
cgcagcgaaggtgtggttcggcgacctcgctatcg

SEQ ID NO: 449 - DNA, 266 bp, Homo sapiens
  misc_feature 1..266: note = U/M: U (0.03:0.92) in Small Intestine Epithelium
  misc_feature 1..266: note = source = chr2:174574144-174574409; Gene: SP3 (Intergenic)
  source 1..266: mol_type = genomic DNA
cgctctgtcgcccaggttggagtgcagtggcgcgatctcggctcactgcaagctccgcctcccgggttcacgccattctcctgcctcagcctccagagcagctgggactacaggcgcccgccaacacgccaggctaattttttgtatttttagtagaaacagggtttcaccgtgttagccaagatggtctcgatctcctgacctcgtcatccgcctgcctcagcctcccaaagtgctgggattacaggcgtgagctaccgcgcccg

SEQ ID NO: 450 - DNA, 76 bp, Homo sapiens
  misc_feature 1..76: note = U/M: U (0.07:0.95) in Small Intestine Epithelium
  misc_feature 1..76: note = source = chr15:76793291-76793366; Gene: SCAPER (intron)
  source 1..76: mol_type = genomic DNA
cgtgaatcgcttgaacccaggaggcgcaagttacagtgagccgagatggcaccactgcactccagcctgggtgacg

SEQ ID NO: 451 - DNA, 153 bp, Homo sapiens
  misc_feature 1..153: note = U/M: U (0.03:0.91) in Small Intestine Epithelium
  misc_feature 1..153: note = source = chr1:200073859-200074011; Gene: NR5A2 (intron)
  source 1..153: mol_type = genomic DNA
cggctcactgcaacctccgccttccgggttcaagcaattctcctgtctcagcctcccgagtagctggaattacaggcacgtgccactatgtctggctaatttttgtatttttagtagagatggaatttcaccatgttggccaggctggtctcg

SEQ ID NO: 452 - DNA, 234 bp, Homo sapiens
  misc_feature 1..234: note = U/M: U (0.02:0.9) in Small Intestine Epithelium
  misc_feature 1..234: note = source = chr13:45339685-45339918; Gene: LINC00330 (Intergenic)
  source 1..234: mol_type = genomic DNA
cgacctcagctcactgcaacctctgcctcctgggttcaagcgattctcctgcctcagcctcatgactagttgggattacaggtgcccaccgccaccatgcccggctaattttttggatttttagtagagacagggttcaccatgttggccaggctggtctggaactcctgacctcaggtgatccacctgccttggcctcccaaagtgctgggattacaggcgtgagccactacg

SEQ ID NO: 453 - DNA, 353 bp, Homo sapiens
  misc_feature 1..353: note = U/M: U (0.06:0.94) in Small Intestine Epithelium
  misc_feature 1..353: note = source = chr3:23576826-23577178; Gene: UBE2E2 (intron)
  source 1..353: mol_type = genomic DNA
cgataaacacctactcagttgaatttaactggggagatagtatcgaatagtatctaacgccgtcacctcaacattgacacttggattttacaatcgaaaaaagctgaaccttgacttagtaggattatcactcaggtggcagatgtccaaacgttatcagccagtcgatgggtgcaccagcaataatcattctgttttcaatgcaattgtctaggtagatctaactgctggtcttattaggccaccacttcatgatggtgtttattgagcctgatagagcattctttttttttttttttttttttttgagatggagtctcgctctgtcgcccaggctggattgcaatggcacg

SEQ ID NO: 454 - DNA, 78 bp, Homo sapiens
  misc_feature 1..78: note = U/M: U (0.01:0.88) in Small Intestine Epithelium
  misc_feature 1..78: note = source = chr14:103002787-103002864; Gene: MIR4309 (Intergenic)
  source 1..78: mol_type = genomic DNA
cgtgcaatcactgcggagggtgaccagggacatcgataggacgctggagggattaccctatgtcccccgacccgcccg

SEQ ID NO: 455 - DNA, 94 bp, Homo sapiens
  misc_feature 1..94: note = U/M: U (0.03:0.9) in Small Intestine Epithelium
  misc_feature 1..94: note = source = chr5:137933890-137933983; Gene: HSPA9 (Intergenic)
  source 1..94: mol_type = genomic DNA
cgccctgagcgccacactcccctgggcagggtccggagctctctggaagaagcccagcacctgcccagggaaccggctgctctgaggaaaggcg

SEQ ID NO: 456 - DNA, 161 bp, Homo sapiens
  misc_feature 1..161: note = U/M: U (0.02:0.89) in Small Intestine Epithelium
  misc_feature 1..161: note = source = chr17:43342504-43342664; Gene: MAP3K14 (intron)
  source 1..161: mol_type = genomic DNA
cgtcagagtgtacctgccccccttacctggctgctgatgccagtggcgatgtctcccactttgacccggtggaactcccggatgtgcaggtgttcaccattaagagactgtatttggactttcacacctagaaggcggacaaggtgatagtcaggagagcg

SEQ ID NO: 457 - DNA, 180 bp, Homo sapiens
  misc_feature 1..180: note = U/M: U (0.05:0.91) in Small Intestine Epithelium
  misc_feature 1..180: note = source = chr3:100331802-100331981; Gene: GPR128 (intron)
  source 1..180: mol_type = genomic DNA
cggctcactgcaacctctgcctcctgagttcaagcgattctcctgcctcagcctcccgagtagctgggactacaggcactcaccaccacgcctggctattttgtgtatttttagtagagatgtggtttcaccatgctgaccaagctggtcttgaactcctgaccttaagtgatctgcccg

SEQ ID NO: 458 - DNA, 202 bp, Homo sapiens
  misc_feature 1..202: note = U/M: U (0.07:0.91) in Small Intestine Epithelium
  misc_feature 1..202: note = source = chr4:57133379-57133580; Gene: KIAA1211 (intron)
  source 1..202: mol_type = genomic DNA
cgggttcaagcaattctcctgcctcagcctcccaagtagctggaattataggcaccagccaccacgcccagctaattttttttgtatttttagtagagacggtgtttcacgatgttggccaggctggtctcaaactcctgacctcgtgatccgcctgcctcagccccgcaaagtgccgggattacaggcgtgagccaccacg

SEQ ID NO: 459 - DNA, 111 bp, Homo sapiens
  misc_feature 1..111: note = U/M: U (0.09:0.92) in Small Intestine Epithelium
  misc_feature 1..111: note = source = chr11:77304398-77304508; Gene: AQP11 (intron)
  source 1..111: mol_type = genomic DNA
cggccgggcgcggtggctcacgcctgtaatcccagcactttgggaggccgaggcgggcagatcacgaggtcaggtgatcgagactatcctggctaacacggtgaaaccccg

SEQ ID NO: 460 - DNA, 129 bp, Homo sapiens
  misc_feature 1..129: note = U/M: U (0.03:0.86) in Small Intestine Epithelium
  misc_feature 1..129: note = source = chr7:151585473-151585601; Gene: PRKAG2-AS1 (Intergenic)
  source 1..129: mol_type = genomic DNA
cggacaccaaagtttgtgtggtgagtacaaggagtggctgccttgtcttcccgcactcaggcaataaatacttattgagcgcatgctgtgcgatgagtcaccagaaacccatctgcactgattgagccg

SEQ ID NO: 461 - DNA, 194 bp, Homo sapiens
  misc_feature 1..194: note = U/M: U (0.08:0.91) in Small Intestine Epithelium
  misc_feature 1..194: note = source = chr16:46964009-46964202; Gene: GPT2 (exon)
  source 1..194: mol_type = genomic DNA
cgtgctttcatgcagagtgttttgccttcatgttagcttccggctcccctcccaggctgcagactctgacctgtggcatcaggcttctcccagtacaggagggtgccatcccccagcatgcggcttctctgccattagcagccctgggcgggccgaccacactcgaggctgcggtgctacgggcttagccctcg

SEQ ID NO: 462 - DNA, 239 bp, Homo sapiens
  misc_feature 1..239: note = U/M: U (0.12:0.95) in Small Intestine Epithelium
  misc_feature 1..239: note = source = chr14:90111701-90111939; Gene: FOXN3-AS2 (Intergenic)
  source 1..239: mol_type = genomic DNA
cgcgatctcggctcactgcaagctccgcctcccgggttcacgccattctcctgcctcagcctcccgagtagctgggactataggtgcccgccaccacgcccggataattttttgcatttttagtagagacggggtttcaccgtgttagccaggatggtctcaatctcctgaccttgtgatccacccgccttggcctcccaaagtgctgggattacaggcgtgagccaccgcgcccggcg

SEQ ID NO: 463 - DNA, 259 bp, Homo sapiens
  misc_feature 1..259: note = U/M: U (0.08:0.91) in Small Intestine Epithelium
  misc_feature 1..259: note = source = chr5:77971393-77971651; Gene: LHFPL2 (Intergenic)
  source 1..259: mol_type = genomic DNA
cgaggggcctcaccacggtgtcttttgatggcctggctttctttgctttgatgtgcaccggttcttcaggcctggctcaatgtagtccccctggttcatgtttagaaggcagactttctcagtgtctctgtccaaactctaacaatctaaacagcatggctctcccatggcttttcttctttgaggtgagaaggcctgaaccatagccttctattctggtccagacagctgtggatggccaaggcggggaggataggcg

SEQ ID NO: 464 - DNA, 298 bp, Homo sapiens
  misc_feature 1..298: note = U/M: U (0.03:0.86) in Small Intestine Epithelium
  misc_feature 1..298: note = source = chr11:271883-272180; Gene: NLRP6 (Intergenic)
  source 1..298: mol_type = genomic DNA
cgttcacccatcaccatcgtccctctccagagctttctcatcttcccaaactgagactctctccccattaaacacccatttcccatccccttcccacagccctggcccctgctgttctactctctctgtgagtcggaggctctaggggcctcaggtaagtgctaacacacagcatttgtccttctgtgtctggcttattcaatgtcctcagggccgtccatgttgcagctgtgtccaggttcccttccgtgttgaggccgtcttacttttgagaccagtttgaacctttctttcttcg

SEQ ID NO: 465 - DNA, 58 bp, Homo sapiens
  misc_feature 1..58: note = U/M: U (0.07:0.89) in Small Intestine Epithelium
  misc_feature 1..58: note = source = chr7:155922310-155922367; Gene: LOC285889 (Intergenic)
  source 1..58: mol_type = genomic DNA
cgcaactttgcacttacaacaccgacggtttctcagtgcaggcccgagcacacgcacg

SEQ ID NO: 466 - DNA, 217 bp, Homo sapiens
  misc_feature 1..217: note = U/M: U (0.1:0.92) in Small Intestine Epithelium
  misc_feature 1..217: note = source = chr16:2221849-2222065; Gene: TRAF7 (intron)
  source 1..217: mol_type = genomic DNA
cgaggctccccatgccagggttggcaccctctggggaggcctttctcactggcgaggctgtcgtcctcccgcacggcgcccgctcctgcctgcctctccgcactctgccctctgccctcttggccccaccccacacttttccgggcacagctgagtgtcacaggtgacactccctcagcacctgctgctccttcttggtggcccacctgtgcccccg

SEQ ID NO: 467 - DNA, 231 bp, Homo sapiens
  misc_feature 1..231: note = U/M: U (0.05:0.87) in Small Intestine Epithelium
  misc_feature 1..231: note = source = chr1:148004493-148004723; Gene: NBPF14 (exon)
  source 1..231: mol_type = genomic DNA
cgtgcctataggtcctgcctgcaggaatgacacctctcggcttagtaagggctgcttattgtgggaatatgactcccatctggaacaccaggtggagacttgtcaccgtcaaagtaaaaaacctattgtccacgtaaagggcgaagctgatatgctcttcctcaaatgagtaaaacacacttctgtagtgctggaatgagtcaggtagttcaaagtacattgacggagtcg

SEQ ID NO: 468 - DNA, 372 bp, Homo sapiens
  misc_feature 1..372: note = U/M: U (0.04:0.86) in Small Intestine Epithelium
  misc_feature 1..372: note = source = chr17:76733982-76734353; Gene: CYTH1 (intron)
  source 1..372: mol_type = genomic DNA
cgatattttatatgtcgttttatagctacttatttttacttataacattttttcatgactgtaaatggacatctatcacatttattattcttctcagtctagacataatatttaaccagtcccatattgtaagacttctaagtgatttccaattcttctacgtatctcaatacacgtgtgcacacgtttcggcacatctctttaattatctccatagaaaaaaattctcacaagtagaactgctggatccagacatagcttcccacctcatcatcgtaatagataacatttattgcatgcttactctgtgcctagcttgatgtgacctaactcatctaatcctgaaaacatcccatggggtgagtgtcctcg

SEQ ID NO: 469 - DNA, 391 bp, Homo sapiens
  misc_feature 1..391: note = U/M: U (0.09:0.91) in Small Intestine Epithelium
  misc_feature 1..391: note = source = chr4:82368581-82368971; Gene: RASGEF1B (intron)
  source 1..391: mol_type = genomic DNA
cgtcctttatacccactatcatagactgataaatcccatttttggtttcagtgctgacctttgggtagactgattaccttgtcattatccaaagggtccttctgcacgaacgcctgaacaaattcttctggcccaatataattgagcctctcctgaaacacaaacccagaaggtcaacagtattaaagaaaatgaaaagaaatggactgtcaactccctctatgactattggcaccaccccccattttttaatgaagattataaaataaacctttagccctaaataatttcatcatcttcaaggtctgtgcggaggcaattttctgcttgggtcaatgttccacaagatagtgaaaggctgagcaggttttggaaaaactgattagaggcg

SEQ ID NO: 470 - DNA, 105 bp, Homo sapiens
  misc_feature 1..105: note = U/M: U (0.08:0.89) in Small Intestine Epithelium
  misc_feature 1..105: note = source = chr11:3170718-3170822; Gene: OSBPL5 (intron)
  source 1..105: mol_type = genomic DNA
cgctccatgagcttcccctgcccatgtgtgcctgtggcaggggtgccgcccgcgcaggccgtggggacagtttatgcgtcaggcagcagcagcagcaggtgcccg

SEQ ID NO: 471 - DNA, 320 bp, Homo sapiens
  misc_feature 1..320: note = U/M: U (0.07:0.88) in Small Intestine Epithelium
  misc_feature 1..320: note = source = chr19:46683676-46683995; Gene: DKFZp434J0226 (Intergenic)
  source 1..320: mol_type = genomic DNA
cgcctgccttggcctcccaaagtgctgagattacaagcgtgagccaccgcgcccagcagtattttgataattttaaaatagccttttatatttactacatttgtattagtcaaggttctctagaggacacaactaataggatatatgtatatatgaaagggagtttattaaggagaattgactcacatgactgtaaggtgaagtcccacaataggcatctgcaagctgaggagcaaggaagccagcagtggctcagtctgagtcccaaaacctgaaaaatatgacagtgaagctgacggtgcaggcttcagtctgtggcg

SEQ ID NO: 472 - DNA, 55 bp, Homo sapiens
  misc_feature 1..55: note = U/M: U (0.12:0.92) in Small Intestine Epithelium
  misc_feature 1..55: note = source = chr12:124678953-124679007; Gene: ZNF664-FAM101A (intron)
  source 1..55: mol_type = genomic DNA
cgggcggggtgcggggggcttcctttaagcagtccccgctctgcctcttccaccg

SEQ ID NO: 473 - DNA, 103 bp, Homo sapiens
  misc_feature 1..103: note = U/M: U (0.03:0.83) in Small Intestine Epithelium
  misc_feature 1..103: note = source = chr5:175977376-175977478; Gene: CDHR2 (intron)
  source 1..103: mol_type = genomic DNA
cgtggcggggagctgcgtgctcaggtcccacatccttgctccgggcacccaggctcggctggagtccgctctgtgggtgcaggcacggcctcctggatcaacg

SEQ ID NO: 474 - DNA, 141 bp, Homo sapiens
  misc_feature 1..141: note = U/M: U (0.08:0.88) in Small Intestine Epithelium
  misc_feature 1..141: note = source = chr12:9695085-9695225; Gene: KLRB1 (Intergenic)
  source 1..141: mol_type = genomic DNA
cggatgtcatgatactaagacccttcactttcttttgtcatctcaggccacatatgttcgacctgagagctgctatcttcccagctggttgacgcctcagtacttggatgctcacttcttagtctcacgcttttactcccg

SEQ ID NO: 475 - DNA, 156 bp, Homo sapiens
  misc_feature 1..156: note = U/M: U (0.08:0.88) in Small Intestine Epithelium
  misc_feature 1..156: note = source = chr8:81019211-81019366; Gene: TPD52 (intron)
  source 1..156: mol_type = genomic DNA
cgagtagctgggactacaggcgcctgccaccacacccagctaattttttgtatttttagtagatacggggtttcaccatgttacctagaattgtctagatctcctgacctcgtgatccgcccacctcagcctcccaaagtgctgggattacaggcg

SEQ ID NO: 476 - DNA, 160 bp, Homo sapiens
  misc_feature 1..160: note = U/M: U (0.04:0.84) in Small Intestine Epithelium
  misc_feature 1..160: note = source = chr5:173969345-173969504; Gene: MSX2 (Intergenic)
  source 1..160: mol_type = genomic DNA
cgtatggcaagtgggaggcatctgaagcctgtctggccccaaaatccccccctactccgctcatgtccttcccccaaaagcatcttccctggtggggtaaaagagcttacagagatcacaccgcatcccaacctgttccacacacgtgggtccgccagcg

SEQ ID NO: 477 - DNA, 276 bp, Homo sapiens
  misc_feature 1..276: note = U/M: U (0.02:0.82) in Small Intestine Epithelium
  misc_feature 1..276: note = source = chr16:2216894-2217169; Gene: TRAF7 (intron)
  source 1..276: mol_type = genomic DNA
cggggtggggttctggggtgactttgttctctctcctttctggcactctgccctttgtagaagcacactggctgctaattagctttttaattgctctgataaacctggccatggggtcatagggccgccaaggacacctgcttacagtagcgcctctttgctgctggtgatcccctcaggggctctccaggggccctctttttttttctaatcctaccccccaaaaaacggtgccttttcatctacccttagaagccccatggcccctgtcacacg

SEQ ID NO: 478 - DNA, 405 bp, Homo sapiens
  misc_feature 1..405: note = U/M: U (0.13:0.93) in Small Intestine Epithelium
  misc_feature 1..405: note = source = chr12:93223439-93223843; Gene: EEA1 (intron)
  source 1..405: mol_type = genomic DNA
cggctactcaggaggctgaggcacgagaattgcttggacccggaaaatggaggttgcaatgagccgagatcatgccactgcactccagcctgggtgacaaagtgaaactctgtcttaaaaaaaaaaaaaaaaaacaaaaaacaagccaaatgccaggcagtaaaaataaaaaatgagtaagagatggtctttgcacccgaagagttcagagtctattaaagaaagacataaattatgataataaactatattatggtataagtaaaatattaaagatatgtacatgcttaagctatcttgggtgtggggaagcagtggcatgtttagaaaggatttttagggagagtgtggggggggcgggtgagggttgaaaaattacctgttgggtacaatggttactatacg

SEQ ID NO: 479 - DNA, 452 bp, Homo sapiens
  misc_feature 1..452: note = U/M: U (0.12:0.92) in Small Intestine Epithelium
  misc_feature 1..452: note = source = chr13:30454758-30455209; Gene: LINC00297 (intron)
  source 1..452: mol_type = genomic DNA
cggggttaccctgggaacccagaaactcaggacagggagggggactttgctgcagatcaggatctacctcagaccttagggtgaaagcaagtgaaacactggctccaaacagttaacttcaacaagtctcaatttaaagagaagttctttgcatgtgtttgggtattatttgggcaggacgtagagaagcactttccatctcatgagaaaatgtatctgttctctgcttgggaaacctgatggtggtttaattatccccaattgaatattagcagcaggtgaggtttgaactgctcctcttttaactctgccaggtattaacatcaaagcctccttggactttgttactgtgttccacacgctggcttttccactccgctctctttcttccttttatgcctaaaaactgaagacatggagttatttcaaagttatgatctaaaaaattagcg

SEQ ID NO: 480 - DNA, 35 bp, Homo sapiens
  misc_feature 1..35: note = U/M: U (0.04:0.83) in Small Intestine Epithelium
  misc_feature 1..35: note = source = chr19:39350308-39350342; Gene: HNRNPL (Intergenic)
  source 1..35: mol_type = genomic DNA
cgaacggctgggcgcgctgatatttattgcatacg

SEQ ID NO: 481 - DNA, 85 bp, Homo sapiens
  misc_feature 1..85: note = U/M: U (0.12:0.91) in Small Intestine Epithelium
  misc_feature 1..85: note = source = chr5:133337095-133337179; Gene: VDAC1 (intron)
  source 1..85: mol_type = genomic DNA
cgacaatcatacttttatagcagacaaactcggccgggctcagtggctcacacctgcaatccccgcactttaggaggccgaggcg

SEQ ID NO: 482 - DNA, 100 bp, Homo sapiens
  misc_feature 1..100: note = U/M: U (0.09:0.88) in Small Intestine Epithelium
  misc_feature 1..100: note = source = chr5:180417016-180417115; Gene: BTNL3 (intron)
  source 1..100: mol_type = genomic DNA
cgggcatggtggtgagcgcctgtagtcccagctactcgggaggctgaggcacgagaatcacttaaacccaggaggcggaggttgcagtgtgccaagatcg

SEQ ID NO: 483 - DNA, 109 bp, Homo sapiens
  misc_feature 1..109: note = U/M: U (0.11:0.9) in Small Intestine Epithelium
  misc_feature 1..109: note = source = chr7:44370390-44370498; Gene: CAMK2B (Intergenic)
  source 1..109: mol_type = genomic DNA
cgggtgcagtggctcatgcctgtaatctcaacactttgggaggctgaggcgggcagatcgcctgaggtcaggtgttcgagaccaacctggccaacatattgaaaccccg

SEQ ID NO: 484 - DNA, 179 bp, Homo sapiens
  misc_feature 1..179: note = U/M: U (0.09:0.88) in Small Intestine Epithelium
  misc_feature 1..179: note = source = chr17:13201687-13201865; Gene: ELAC2 (Intergenic)
  source 1..179: mol_type = genomic DNA
cgcccaactctggcctaaatcagcccaaagtaaaccgacttgaactttctccagagattcagggagtaagaatgaaaccaacccagacacctttaggggtcaaaaatcattcagataggtacagaagaacaaagcaacgaatggctcctcatggcccggagggggaagggggccgtgcg

SEQ ID NO: 485 - DNA, 200 bp, Homo sapiens
  misc_feature 1..200: note = U/M: U (0.14:0.93) in Small Intestine Epithelium
  misc_feature 1..200: note = source = chr1:78404057-78404256; Gene: NEXN (intron)
  source 1..200: mol_type = genomic DNA
cgggtgcggtggctcacacctgtaatcccggcactttgggaggccgaggcgggcggatcaccaggtcaagagatcgagaccatcctggccaacatggtgaaaccccgtctctactaaaaatacaaaaattagctgggcgtggtggcacgggtctatagtcccagctactcaggaggctgagactgcactccagcctggcg

SEQ ID NO: 486 - DNA, 381 bp, Homo sapiens
  misc_feature 1..381: note = U/M: U (0.1:0.89) in Small Intestine Epithelium
  misc_feature 1..381: note = source = chr19:8097523-8097903; Gene: CCL25 (Intergenic)
  source 1..381: mol_type = genomic DNA
cgtgatctgcccgcctcagcctcccaaagtgctgggattacaggcgtgagccactgagcccggccgggaaaatgtgttttaagtttcagttaggccaggtgcagtggctcacgcctgtaatcccagcatgttgggaggcctgtaagaaataaagaggaaagaaacacaaaagttggcttgccagtcaacacaggtttattttagagaaaacaaacctgagaggagtattccaggcaagttgagtcagaggcaaactctcttacagactaagaggtttttttgtttttgggttgtttgtttgtttcttgtttttgttttgagacagagtttcgctcttgttgcccaggctggagtgcaatgacgtgatctcggctcactgcg

SEQ ID NO: 487 - DNA, 387 bp, Homo sapiens
  misc_feature 1..387: note = U/M: U (0.09:0.88) in Small Intestine Epithelium
  misc_feature 1..387: note = source = chr8:18219427-18219813; Gene: NAT2 (Intergenic)
  source 1..387: mol_type = genomic DNA
cgctaggcctctttatatgatgtaggcaattagctttctaataagcggcatttctatagaaagagaacagaaacaaaggttactgtctggagtaatccgtctatatgtcaggcctctgagcccaagctaagccatcatatcctccatgacctgcatgtatacatccagatggcctgacgcaactgaagatccacaaaagaagtgaaaatagccttaactgatgacattccaccattgtgatttgtttctgcccaaccctaactgatcaatgtactttgtaatcttccccacccttaagaaggttctttgtaatctcccccacccttaagaagcggttctttgtaattctccccacccttgagaatgtactttgtgagatccaccccg

SEQ ID NO: 488 - DNA, 426 bp, Homo sapiens
  misc_feature 1..426: note = U/M: U (0.09:0.88) in Small Intestine Epithelium
  misc_feature 1..426: note = source = chr6:168188398-168188823; Gene: C6orf123 (intron)
  source 1..426: mol_type = genomic DNA
cgttttccacccatgattacgagttgcatagatgatctacttccctttcgagattgtgacatctttgaatgtagaatccgtttccgtgtatctggtactccctgccggagtacttgctgcactgtggccatcaatgggtgtttgttcaacatttaataatggtgcaatttaacaaaattccattaaatttgtttctgtctacatggaaatgtaattttatcttattagaaccatttcacttttaaatgccctaaaatagcactcttggaatgaggaaatgaatataaactaagaagacacctgtggggacctttgtcccaatccccatcagttactcttccagccacctggcgaggatacaggctcaaaggcaggtgttaggctgaggtcgcccagtcaccagctctagggctctcggatgccccg

SEQ ID NO: 489 - DNA, 198 bp, Homo sapiens
  misc_feature 1..198: note = U/M: U (0.04:0.82) in Small Intestine Epithelium
  misc_feature 1..198: note = source = chr3:196363243-196363440; Gene: LRRC33 (Intergenic)
  source 1..198: mol_type = genomic DNA
cgtttgttctgtgtttgggaaaatcgtgatcagcccgggctgggtgaacccacctgcaggccatgtgtgcagtgatcatgaagcatgggcggtagtcgtgaagagaggctggaggcagctcaggccgaatggactttctcctccagccgggagccgcctgggttcttgctttcacttcggatcagagacgctgctgcg

SEQ ID NO: 490 - DNA, 241 bp, Homo sapiens
  misc_feature 1..241: note = U/M: U (0.13:0.91) in Small Intestine Epithelium
  misc_feature 1..241: note = source = chr1:7739607-7739847; Gene: CAMTA1 (intron)
  source 1..241: mol_type = genomic DNA
cgccaagctgggcacctgctccctagctgcccccccccccagaactttgagctctgaactctgtgggcctccaagttgaaataagcacccctgcacctgcaggatacacaggagggtgacaggaattggggcggcgatgacatcaaggcctgggcgtccagcagcatcgcctctgttaccaccagccagggcacagctaggggaacagtagctccgcagcttggacccccagctcagagcg

SEQ ID NO: 491 - DNA, 257 bp, Homo sapiens
  misc_feature 1..257: note = U/M: U (0.14:0.92) in Small Intestine Epithelium
  misc_feature 1..257: note = source = chr19:4843090-4843346; Gene: PLIN3 (intron)
  source 1..257: mol_type = genomic DNA
cgggcgtggtgacgcatgcctgtaatcccatctactggggaggtggagacaggagaaccacttgaacccaggaggcagaggttgcagtgagctgagattgtgccactgcactccagcctgggcaacagagcaataaataaataaataggcagggtgcggtggctcacgcctgtaatcccagcactttgggaggccgaggcgggcggatcacaaggtcagcagatcaagaccatcccgggtaacacggtgaaatcgcg

SEQ ID NO: 492 - DNA, 258 bp, Homo sapiens
  misc_feature 1..258: note = U/M: U (0.1:0.88) in Small Intestine Epithelium
  misc_feature 1..258: note = source = chr17:77959558-77959815; Gene: TBC1D16 (intron)
  source 1..258: mol_type = genomic DNA
cggctgggtcctcggggatgcccagctgtcctagagtatttgttctgctggctcccacctcgcagccacaacttcaatgcccacaacaaactgccaatcaaggctgtggaggtcaaaggggaccaaatcaggggccctctgctactaccaaactctcccggcaaagcttaatttaaataagaaagcagaaaggttatgaaaaaccatttttcccaacgaaactcttctgccaggcggcataaggggcgcggccctccg

SEQ ID NO: 493 - DNA, 287 bp, Homo sapiens
  misc_feature 1..287: note = U/M: U (0.13:0.91) in Small Intestine Epithelium
  misc_feature 1..287: note = source = chr17:4945025-4945311; Gene: SLC52A1 (Intergenic)
  source 1..287: mol_type = genomic DNA
cggcctcccaaagtgctgggattacaggtgtgagccaccacaccccaaaatttttttgtttttaatagagatgggtttcattatgttggtcaggctggtcttgaactcctgacctcaagtgatccacctgcctcggcctcccaaagtgctgggattacaggcgtgagccaccgcacccggcctatttttaaggatatggtctcactgtgtttcccagactggtctcaaacttctaggctcaagcaatcctcctgcctcagcctctcaaagtgctggtattacaggcg

SEQ ID NO: 494 - DNA, 324 bp, Homo sapiens
  misc_feature 1..324: note = U/M: U (0.11:0.89) in Small Intestine Epithelium
  misc_feature 1..324: note = source = chr12:115890506-115890829; Gene: MIR620 (Intergenic)
  source 1..324: mol_type = genomic DNA
cgagtccttgcctgtcctcctctctctgcatcttttctttctgcgtccccaactccctctcacttctccgttctttcactcatttgtctgtatcttcccttttcttttctcgccctgggctcctccccataactctgcgtgtcccctgcccatctcagcatcctgtggcactttctgcatggccggcccgcctgcagggacaaggccttcagagccagcggttgcaggaatagctggaccccacaaggggctaggctcagcaggtgtcctgacttcagggggcaggactgtgctcacctgtgcctttcatgtaaggctctggcg

SEQ ID NO: 495 - DNA, 178 bp, Homo sapiens
  misc_feature 1..178: note = U/M: U (0.16:0.93) in Small Intestine Epithelium
  misc_feature 1..178: note = source = chr2:197765431-197765608; Gene: PGAP1 (intron)
  source 1..178: mol_type = genomic DNA
cgaggtcaggagatcgagaccatcctggctaacatggtgaaaccccatctctactaaaaatacaaaaaaaattagctgggcatggtggcggacgcctgtagtcccagctactcgggaggctgaggcaggagaatggtgtgaaccagagaggcagagcttgcagtgagcggagatcgcg

SEQ ID NO: 496 - DNA, 260 bp, Homo sapiens
  misc_feature 1..260: note = U/M: U (0.15:0.92) in Small Intestine Epithelium
  misc_feature 1..260: note = source = chr4:24179596-24179855; Gene: PPARGC1A (Intergenic)
  source 1..260: mol_type = genomic DNA
cgtatgtcataaattcgttatcttacagtactatactcccgccaacagcatgcttaaatcgcctccacaggaaaacagcatggctgtaaacatccttggtgaaaatatttgagataaaagatggcctttgagcctattgtataaatgagatgcaactattcccccataaatcctattcattcattcattcttcattttaacatgcactgattaagcacctactgtttgcaactcactgagatttaagtaaaattgaatcg

SEQ ID NO: 497 - DNA, 288 bp, Homo sapiens
  misc_feature 1..288: note = U/M: U (0.17:0.94) in Small Intestine Epithelium
  misc_feature 1..288: note = source = chr15:52390924-52391211; Gene: BCL2L10 (Intergenic)
  source 1..288: mol_type = genomic DNA
cgcagataccctcctcttccaaagtcaactattaaagcctgagtcattcttctatcggtaacagttaattccaaaatgagctttgaagacaaagcaagaaaatggtttcctggtgctgtaaagaccatttgttgccaggtggacctttcaaacgaagacgcagaggggcgcccatctgctctgctgcccaagcccaggtgaacctctgggtggaataagagccgaggactttagaccaagcccctcccctcaaaaccccaaagccggggcctggcgcggtggctcacg

SEQ ID NO: 498 - DNA, 325 bp, Homo sapiens
  misc_feature 1..325: note = U/M: U (0.05:0.82) in Small Intestine Epithelium
  misc_feature 1..325: note = source = chr16:50848512-50848836; Gene: CYLD (Intergenic)
  source 1..325: mol_type = genomic DNA
cgggaaccccagaaaggtgcagggcttgaattctgactacacctgcctctccccacacaccagctgtcatgtcacaggcaccctttgcagtgtgatcgccttccttttggggcgcccgagctagcatatgaatttttgatcagcttgccttttgaatgagttgactatcatgaataacagggcaaagggcgccagcattgtgtctttaactataactgttccaattaattatgggtgtaattagcatacatcgtgagcagccctggaaaataatacttcatgggttatagatgccctggcagctgtaacatgaagtgtgataccg

SEQ ID NO: 499 - DNA, 88 bp, Homo sapiens
  misc_feature 1..88: note = U/M: U (0.08:0.84) in Small Intestine Epithelium
  misc_feature 1..88: note = source = chr1:199747283-199747370; Gene: NR5A2 (Intergenic)
  source 1..88: mol_type = genomic DNA
cgtctctattaaaaatacaaaaattagccgggcgtggtggtgcacgcctgtaatcccagctacttgggagactgaggcaggagaatcg

SEQ ID NO: 500 - DNA, 112 bp, Homo sapiens
  misc_feature 1..112: note = U/M: U (0.1:0.86) in Small Intestine Epithelium
  misc_feature 1..112: note = source = chr9:135481768-135481879; Gene: DDX31 (intron)
  source 1..112: mol_type = genomic DNA
cgtctttgagggactcggttccatgtttccaaggttgttcctgataagaaaagttcaagggtgctaaaaggttgaagttcacttttcgtactctcggttccgcgggtactcg

SEQ ID NO: 501 - DNA, 284 bp, Homo sapiens
  misc_feature 1..284: note = U/M: U (0.13:0.89) in Small Intestine Epithelium
  misc_feature 1..284: note = source = chr19:17441650-17441933; Gene: ANO8 (exon)
  source 1..284: mol_type = genomic DNA
cgtggctcctccacggcttccccaggtgagtccagcgtcccccacttatatgccagctcagcccctctccgcttccattcctctaggaacagcgtcgaccagatcacgttgaagagggcaaagaccacgcaggaaacatcccggcttgtctgtgagtggcagagaagagttgagtcattgtttgtgccagtccagaaaggagggcgcctctggatcccccagaccttgcagggtccctgcccagtacctgatcagcctctgtgaatgtgtacaggacagacccg

SEQ ID NO: 502 - DNA, 354 bp, Homo sapiens
  misc_feature 1..354: note = U/M: U (0.12:0.88) in Small Intestine Epithelium
  misc_feature 1..354: note = source = chr6:42352982-42353335; Gene: TRERF1 (intron)
  source 1..354: mol_type = genomic DNA
cgagattacaggtgtgagccactgcacccgacctgatcctggttttctgattcaaaagtaggatgatcaacataacaagaatacacaaggagctcaccagcttctcttcttaacagggttttgaaaatgttcttcctcaaaattaccttcccatcatctgaaaaatgtacagtcactgacactggggccaccaccaccctgaagttacgtggacaggcaggcagaaccctttagaaggtgcactataataaccactgccaggaacgcaggtgcactcacactttcgataatgcctccaagtactatcagctgagactgtgcagcacaaagtgacctggaccccgaaacctatcg

SEQ ID NO: 503 - DNA, 369 bp, Homo sapiens
  misc_feature 1..369: note = U/M: U (0.09:0.85) in Small Intestine Epithelium
  misc_feature 1..369: note = source = chr2:10163043-10163411; Gene: KLF11 (Intergenic)
  source 1..369: mol_type = genomic DNA
cgtacatgcatatccacgtgtaaacatgtgcacacacacatacacacacaccacacacaccacacccctatcctgcaggttcctttctctgctgggaccctgcttgcttcaccaggggtgctgagcccctgtgtcaccagtggaggtctcagcagcacaagtccccaggcacagcccctcagcgccctgccctcagccgtggctccaggggtgaagtaggacctcagggtgtaaaggccagtgccacggttcttatggggtgtgctgcgggaacccttatcttcatgatcatgtgaactgtgcccccagtcctttctgtttccttgagggaggccttggcttctggagcccagagtcagaaagtgcccg

SEQ ID NO: 504 - DNA, 468 bp, Homo sapiens
  misc_feature 1..468: note = U/M: U (0.08:0.84) in Small Intestine Epithelium
  misc_feature 1..468: note = source = chr2:39456237-39456704; Gene: CDKL4 (intron)
  source 1..468: mol_type = genomic DNA
cgagcgtaaacactggggtgagtggacttaggatatttactaacaagaataaaagttcttttcagtataacaatctatagctgtattcatacacagacaaaatcagagtggccgaagtccaaagtgataatcaacttattacccaaaggtgctgatacaaaggaatttaagtccaatggggggaaaataactttaaaattctttgcaattttaacatgcatatttcactcaattccatgatattttacatatatataaagttaacttaccttcaacatacgtatttctcttagtgctattttcttaacaacaggatcatcttcagattccacaaattttttaacagctactacttgtccagaggttttgtttctgcatttgaatacaaccccataagacccttctccagtcttagctaatttttcatacttttccattatagctgaagtgacttaaattattgtatcg

SEQ ID NO: 505 - DNA, 168 bp, Homo sapiens
  misc_feature 1..168: note = U/M: U (0.14:0.89) in Small Intestine Epithelium
  misc_feature 1..168: note = source = chr20:61281101-61281268; Gene: SLCO4A1 (intron)
  source 1..168: mol_type = genomic DNA
cggccttccacaactgcctttcagcctcaccccatctgcagactcctcatttgcagcaccggggttcacctgcatctggcctcatcagcaggtgcagtcttatctgcgtataaaccagcccaccccatgcagccagcttgggatgagaggacggtcatggggtccccg

SEQ ID NO: 506 - DNA, 278 bp, Homo sapiens
  misc_feature 1..278: note = U/M: U (0.12:0.87) in Small Intestine Epithelium
  misc_feature 1..278: note = source = chr16:58690638-58690915; Gene: CNOT1 (Intergenic)
  source 1..278: mol_type = genomic DNA
cgagattgtgccactgcactccagcctggggcacagaggaagactccgtcttggggcggggtggggggcaggaaataaagaaagacacatggatgaatggatgaaggacagatggatacatgaatggatgcatggatacatatgtgcatgaactggctgaatggaatccagggtgacccgggaagagaaaagtcaagagctggccataggatcaccaacccaaagcacagcccatgaaatctcaaaatgggaatgctgaaaggttggagaagctcccg

SEQ ID NO: 507 - DNA, 289 bp, Homo sapiens
  misc_feature 1..289: note = U/M: U (0.1:0.85) in Small Intestine Epithelium
  misc_feature 1..289: note = source = chr11:270682-270970; Gene: NLRP6 (Intergenic)
  source 1..289: mol_type = genomic DNA
cgcctctggacaccaatgcacaagagagtaaacttggggagtaccttaggcaggtggtcagaggcctcgggagaggagacatttgagcagagaagggaggtggtgtggcagccgtgtggacctgctgtgggtgtgtgcaccagagctgtgctggtgagcgaggaggaactacccaggagggcacactggaccagggagagccagcccgacgggggccagctgcctttcccagcaggcagcggtgtgaccctcggggcaggggctcggtccactgtagcacaggggatcg

SEQ ID NO: 508 - DNA, 322 bp, Homo sapiens
  misc_feature 1..322: note = U/M: U (0.15:0.9) in Small Intestine Epithelium
  misc_feature 1..322: note = source = chr1:45558202-45558523; Gene: ZSWIM5 (intron)
  source 1..322: mol_type = genomic DNA
cgtgatccacccccccccccccgccagccttacaaagtgctaggattacaggcgtgagcccccgcacctggcccgatggttagttttatgtgttaatttgactaggctatggtacccagctattcaaccaaacactaatctaggtgttgctgtgcaggtaatttgtagatgtggttaatatttacaatcagttgactttatctaatgcagattatcctcaattatgtgggtgggcctcatacaattgactgaaaagtcttacaagcgaaagtctaaggtttctctgataaagaacaaattctgcctcaagtctgcagcaccg

SEQ ID NO: 509 - DNA, 205 bp, Homo sapiens
  misc_feature 1..205: note = U/M: U (0.19:0.93) in Small Intestine Epithelium
  misc_feature 1..205: note = source = chr7:148160083-148160287; Gene: C7orf33 (Intergenic)
  source 1..205: mol_type = genomic DNA
cgccctttgaagcatgtgatctttgtacctactctctgttcttacacacaccccccttttgaaacccttaataaaaacttgctggtctgagactcgggcgggcatcacggtcctaccgatatgtgatgtcacccctggcggcccagctgtaaaattcctctctttgtactatctcactttatttctcagccggccgacacttacg

SEQ ID NO: 510 - DNA, 206 bp, Homo sapiens
  misc_feature 1..206: note = U/M: U (0.16:0.9) in Small Intestine Epithelium
  misc_feature 1..206: note = source = chr19:7505487-7505692; Gene: ARHGEF18 (intron)
  source 1..206: mol_type = genomic DNA
cgtgctaagcagagaaattcccattaacgcttgcttccaggatccacgccttttttgcaaaaacgatgtgtcccggggtgtattcggcccctggtggagccagtttgcttagtgccctcgagggatccttggactcgctccttaggccgggctcctgacttactcaaggcgatgctcaaagtcctgctgggtgtgtggaggcggcg

SEQ ID NO: 511 - DNA, 480 bp, Homo sapiens
  misc_feature 1..480: note = U/M: U (0.12:0.86) in Small Intestine Epithelium
  misc_feature 1..480: note = source = chr11:271009-271488; Gene: NLRP6 (Intergenic)
  source 1..480: mol_type = genomic DNA
cgggacccaggtcctggtgggctcccgaagtgcagcaggaagggccctagtgcttccatgtcaccaccctgatggccttggcagctgggagagccccctgccctgcagggcaagagggattttccgccccaagggagagcgtcatatgcccaggaggcagttctgcctctggctctttgctcctcccaggcctcctgtcctctatgtccttggaagtaaaggggacaggtcctggggctccacaaagataggcacctcctctcatccacctaatgaggcaaaagagggggttctgcctctgaggctgaggggcccagccccctctggaaagagagtcccactcatgcccctccaccaggccccaccaacaggaggccctggcggcaaggccctgcctccccagtgaagaccaccagggcctgggggccagggagggaggctgcccccggctggtgaagggacaccccacagccaccagcg

SEQ ID NO: 512 - DNA, 169 bp, Homo sapiens
  misc_feature 1..169: note = U/M: U (0.14:0.87) in Small Intestine Epithelium
  misc_feature 1..169: note = source = chr14:100641770-100641938; Gene: DEGS2 (Intergenic)
  source 1..169: mol_type = genomic DNA
cggaatcccaattgcagaccacacacaaacacacccaagcaggtgcaggcattcggagcaggggacgtggtgccagccccacaggcaagagccaacaccaaggcagaaccgggctctactctgaattgtgccaccttcatccctgggccgacaaatacagtgcttcccg

SEQ ID NO: 513 - DNA, 169 bp, Homo sapiens
  misc_feature 1..169: note = U/M: U (0.07:0.79) in Small Intestine Epithelium
  misc_feature 1..169: note = source = chr19:17891999-17892167; Gene: FCHO1,FCHO1 (exon,intron)
  source 1..169: mol_type = genomic DNA
cgggcagcatctcagcagtgcctctttgtactcgctcctagacctgatgcctgcacctgctgaccccacagccagggagggcctggcagccccacccaggagacttcgctctaggaaggtgtcctgccctctcacacgtagcaatggggacctggtaggtgagggggcg

SEQ ID NO: 514 - DNA, 362 bp, Homo sapiens
  misc_feature 1..362: note = U/M: U (0.21:0.93) in Small Intestine Epithelium
  misc_feature 1..362: note = source = chr11:286423-286784; Gene: ATHL1 (Intergenic)
  source 1..362: mol_type = genomic DNA
cgcaatagcacaagtacgtatattatatgtatacgtgtgccaggtgtggtggcgcatgcctgtggtcccagatactcaggaggctgaggcaagagttcgaggcttgagcttaggagttcgaggatgcagtgagctattaggttggttggaaagtaagcaaaaaccgcaattacttttgcaccaacctaatatgattttgccaccacactctggcctgggccacagagagagaccccatcgctaataagtaataaataaatgtgtatctgatacataactacacaccacaatcaataggcctgtgatgtggccgggcgcggtggctcaagcctgtaatcccagcactttgggaggccgaggcg

SEQ ID NO: 515 - DNA, 370 bp, Homo sapiens
  misc_feature 1..370: note = U/M: U (0.17:0.89) in Small Intestine Epithelium
  misc_feature 1..370: note = source = chr8:126415624-126415993; Gene: TRIB1 (Intergenic)
  source 1..370: mol_type = genomic DNA
cggatagaggctgggctccaggggatggaaggagacagtggccctggagcaccagcctttagataaagcctttgcataaagctcagacctctctctcaccttacagaagagccaagtgaggctcctcaaatcaaggatctcactctagattcggagctgctgtgaggcagagccaggaagctgcccctaaggggccgctcagggctgggctcttctggagatggactctggcctgcccttctctgcctcctccttcccacccgaggagcctgcatccagctgtggctgaacactccagggaaggaaagacagcagatgacgggcagggcgcggtggctcacgcctgtaatcccagcactttgggaggccg

SEQ ID NO: 516 - DNA, 315 bp, Homo sapiens
  misc_feature 1..315: note = U/M: U (0.16:0.87) in Small Intestine Epithelium
  misc_feature 1..315: note = source = chr6:43390005-43390319; Gene: ABCC10 (Intergenic)
  source 1..315: mol_type = genomic DNA
cgccagttaaccagaagatctagctaagatcaatgatgaaggtggctacatgaaacaacagatttctcactctgtcgccaggctggagtgcagtggtgtgatcttggatcactgcaacctcagcctcccgggttcaagcaattctcctgcctcagcctccggagtagctgggattacagacacacaccaccacgcccagctgatttttgtatttttagtagagacacagtttcacaatgttggacagactggtctcgaactcctgatcttgtgatccaccctccttgacctcccaaagtgctgggattacaggcg

SEQ ID NO: 517 - DNA, 325 bp, Homo sapiens
  misc_feature 1..325: note = U/M: U (0.17:0.88) in Small Intestine Epithelium
  misc_feature 1..325: note = source = chr1:15547962-15548286; Gene: FHAD1 (Intergenic)
  source 1..325: mol_type = genomic DNA
cgttccccggcccactcctgagccgacccatggctctttgtgtctcatgtctctgggctgggcttgctttcctgttactttctgtgcttcttccaaaccagaggataaatgggaggaaaatagaagagaagagtaaggacccagatgagttgagaaatgactttctggaagagctctcaatctggcttctggtagaaaccttttggggtgtctccctagtctagatcctccacgggggagaaggagttgtgaggcttgggtgggctgattggtggtccccaaaggtatcagaccctaatccctggaaccagtgaatattacctcg

SEQ ID NO: 518 - DNA, 328 bp, Homo sapiens
  misc_feature 1..328: note = U/M: U (0.2:0.91) in Small Intestine Epithelium
  misc_feature 1..328: note = source = chr15:34636879-34637206; Gene: NOP10,C15orf55 (Intergenic,promoter-TSS)
  source 1..328: mol_type = genomic DNA
cgcagtttgatttttgaaccttgctaatgtatttattacctgttaaaaattttttaaaggccgggcacggtggctcacgcctagtaatcccagcactttgggaggctgaggcgggcggatcatgaggtcaggagatcgagactatcctggctaacacagtgaaaccccgtctctactaaaaatacaaaaaattagccgggcatggtggtgggtgcctgtagtcccagctactcaggagggtgaggcaggacaatggcgtgaacccggaaggcggagcttgcagtgagcagagatcacgccactgcactacagcctgggtgacagagcg

SEQ ID NO: 519 - DNA, 168 bp, Homo sapiens
  misc_feature 1..168: note = U/M: U (0.17:0.87) in Small Intestine Epithelium
  misc_feature 1..168: note = source = chr5:40417359-40417526; Gene: PTGER4 (Intergenic)
  source 1..168: mol_type = genomic DNA
cgttctagggtgcacgtgcacaacatgcaggtttgttacataggtacacgtgtgccaagttggtttgctgcacccattaactcgtcatttacattgtgcatttctcctaatgctatccctcccccagcccctcatcccccaaatggccccagtgtgtgatgttcaccg

SEQ ID NO: 520 - DNA, 246 bp, Homo sapiens
  misc_feature 1..246: note = U/M: U (0.24:0.94) in Small Intestine Epithelium
  misc_feature 1..246: note = source = chr9:123528706-123528951; Gene: FBXW2 (intron)
  source 1..246: mol_type = genomic DNA
cgaacttcataattaacatgttatcttttttaattatttttatttatttatttattgagatggagtctcgctctgtcaccaggctggagtgcagtggcgtgatctcggctcactgcaacttccacctcccggattcaagcgattctcgtgcctcagcctcccgagtagctgggattacagatgcccgccaccacgcccagctaatttttgtatttttagtagagatgaggttttaccatgttggcg

SEQ ID NO: 521 - DNA, 324 bp, Homo sapiens
  misc_feature 1..324: note = U/M: U (0.24:0.93) in Small Intestine Epithelium
  misc_feature 1..324: note = source = chr19:4907943-4908266; Gene: UHRF1 (Intergenic)
  source 1..324: mol_type = genomic DNA
cgaactcctgacctcaggtgatctgcctgcctcggcctcccaaagtgctgggattacaggtgtgagccaacgcgcccggcccttggcctgatcattgtaaagcctgcttccactttcccatctcctttgactttgaccttttgtatccctttttcacttattaggaccttttaaggacattgtgcccacctggatcacccaggagacgctccccaactcaaaatcattaactgaatcacacctgcaaagttgcaaagtccttttagctgtgtaaggcactgtattcacagatcctgggggcgaggacgtgggggtctagagacg

SEQ ID NO: 522 - DNA, 390 bp, Homo sapiens
  misc_feature 1..390: note = U/M: U (0.26:0.95) in Small Intestine Epithelium
  misc_feature 1..390: note = source = chr17:27167910-27168299; Gene: FAM222B (intron)
  source 1..390: mol_type = genomic DNA
cggaggttgcagtgaaccaagttcgcaccactgcactccagcctgggtgacagagcaagactccttcacccacctcaaaaaaaattataataaaataaaataaaaataaagataacaaaatagccaggcacggtggctcacgcctgtaatcccggcactttgagaggccgaggtgggtggatcacctgacgtgaggagttcaagaccagcctggccaacatggtgaaaccccatctctactaaaactacaaaaattagccaggcgtggtggtgggcatttgtaatcccagctactcaggaggctgagacaggagaatcgcttgaacccgggaggcggaggttgctgtgagccgagatgatgccactgcactcctgcctggcgacagagcg

SEQ ID NO: 523 - DNA, 379 bp, Homo sapiens
  misc_feature 1..379: note = U/M: U (0.15:0.83) in Small Intestine Epithelium
  misc_feature 1..379: note = source = chr6:105563790-105564168; Gene: BVES (intron)
  source 1..379: mol_type = genomic DNA
cgttagtgcatttaaaaaaaagaatacctgatacatattaggtggccaataaacataagctatgatttttattattagctattactataaatatattatacaaaatcaaatatacttagtagcctatttataataagctaaataattaactgaaataagcaccagcttaatttgataaacagtccagataagatgattttgaaagggcacatatactcaattgtcactgggtaacagtacttatcacagaaacgacgtttttaaaaattctctcttgtaatcattttaatttctttctaaaaagatacgggaaaattaagatcaaattgcaaattgctgaagatctatgcagctctacacctctcctttcactttctcg

SEQ ID NO: 524 - DNA, 171 bp, Homo sapiens
  misc_feature 1..171: note = U/M: U (0.28:0.95) in Small Intestine Epithelium
  misc_feature 1..171: note = source = chr10:116682964-116683134; Gene: TRUB1 (Intergenic)
  source 1..171: mol_type = genomic DNA
cgcagaggctgaagtacagtggtacgatctcagctcactgcaacatctgcctctcggcttcaagcgattctcctgcctcagcattccaagtagctggattatagccacgcgcccccatgcccaactaattttcatatttttagtagagatggagtttcgccatgttggccg

SEQ ID NO: 525 - DNA, 405 bp, Homo sapiens
  misc_feature 1..405: note = U/M: U (0.28:0.95) in Small Intestine Epithelium
  misc_feature 1..405: note = source = chr7:97834644-97835048; Gene: LMTK2 (exon)
  source 1..405: mol_type = genomic DNA
cggctcaggcggtgctgggctcaaaacacccgcttccgttcctgtggtgcagcgcacatgccatccacgccatgcctgtctgatcattttaaaaacccagctttgtcgtctcgcttcctctctcctcaacaggaagcagcgaagacggagaaaaggactaggtggctgccaacgcgcacgctcgggtccgaggctgctcccctggagcggcgcccctgcgccctcagcccgagcagcgacatccactcgccatttgctgacatgagattgggaggaagaatccagaggtgaagagggagacggctcttagctgcgttcaaggcggggccctcgggagcccaggtgcagagcgaggccgtgtccaggagccggcgtccctcagtgccccgtgcacccgcggccgcg

SEQ ID NO: 526 - DNA, 92 bp, Homo sapiens
  misc_feature 1..92: note = U/M: U (0.32:0.95) in Small Intestine Epithelium
  misc_feature 1..92: note = source = chr17:30135449-30135540; Gene: COPRS (Intergenic)
  source 1..92: mol_type = genomic DNA
cgtgttagccgggatggtctcgatctcctgacctcgtgatctgcccacctcggcctcccaaagtgctgggattacaggcgtaagccaccgcg

SEQ ID NO: 527 - DNA, 445 bp, Homo sapiens
  misc_feature 1..445: note = U/M: U (0.31:0.92) in Small Intestine Epithelium
  misc_feature 1..445: note = source = chr12:6654337-6654781; Gene: IFFO1 (intron)
  source 1..445: mol_type = genomic DNA
cgccactgcactccagcctgggcgacacagcgagactacgtctcaaaaaaataaataaataaataaataaatgaaaagaataaagtcactctctccttatccactggtttcactttccacggcttcaggtacccaaggtgaaccttgatctgaaaatattaaatgaaatattccagaaataaacaattcctaagttttaaattgcacgctgttctgagtggcctgataaaatctcactctctctgccgggcgcggtggctcacgcctataatcccagcactttgggaggccgaggtgggcggatcatgaggtcaggagatcgagatcatcctggctaacacggtgaaaccccatctctactaaaaaatacaaaagaaattagccgggcgtgatggcgggcgcctgtagtcccagctactcaggaggctgaggcaggagaatggcg

SEQ ID NO: 528 - DNA, 242 bp, Homo sapiens
  misc_feature 1..242: note = U/M: U (0.05:0.87) in Small Intestine Epithelium
  misc_feature 1..242: note = source = chr7:55162627-55162868; Gene: EGFR (intron)
  source 1..242: mol_type = genomic DNA
cggcaaccataaacctctccataggtgctgaacccaggtgatccctggcaccggcagccttatgtcagggctctcttatcgctggtttttatttctcctaataaaagtgattaaaagattcatcttttaaagaaagcaaggacacagaggtggattctccctgacgctagcacagctcatgcccaagccactcctgcagggctctggtctaagtgcaaaagctggaaaagctgcaggtcccg

SEQ ID NO: 529 - DNA, 52 bp, Homo sapiens
  misc_feature 1..52: note = U/M: U (0.09:0.85) in Small Intestine Epithelium
  misc_feature 1..52: note = source = chr1:3210411-3210462; Gene: PRDM16 (intron)
  source 1..52: mol_type = genomic DNA
cgatggcgtggcccggccccggcaggtgtctgagggcctgaaggcacccccg

SEQ ID NO: 530 - DNA, 44 bp, Homo sapiens
  misc_feature 1..44: note = U/M: U (0.04:0.95) in Small Intestine Epithelium
  misc_feature 1..44: note = source = chr7:2884997-2885040; Gene: GNA12 (Intergenic)
  source 1..44: mol_type = genomic DNA
cgtgagccgccgcgcctggcccagtgtgtagtcttttatctctc

SEQ ID NO: 531 - DNA, 126 bp, Homo sapiens
  misc_feature 1..126: note = U/M: U (0.06:0.92) in Small Intestine Epithelium
  misc_feature 1..126: note = source = chr9:79238335-79238460; Gene: PRUNE2 (intron)
  source 1..126: mol_type = genomic DNA
cgagtagctcggactataggcgtgcaccaccatgcccagctaatttttgtatttttagtagagacggggtttcaccatgttggccaggatggtctcgatctcctgacctcgtgatccacccatctc

SEQ ID NO: 532 - DNA, 345 bp, Homo sapiens
  misc_feature 1..345: note = U/M: U (0.06:0.92) in Small Intestine Epithelium
  misc_feature 1..345: note = source = chr7:100877583-100877927; Gene: CLDN15 (intron)
  source 1..345: mol_type = genomic DNA
cggtggccgccagcttggctttcctggagagctccaggcccccaatgttggtgcagcgcaggcccgctatgcctagcaagaggccgaggaagcccaggaggatggcggtgatcatgagtgcccggcaggcctgaatataccctgggggtgggcacagttgtcagcctttcccatctcccctctgcgacggagccagcccaacagcccctcaccatcccaggttcaagtgattctcctgcctcagcctccccagtagctgggattacagacacgcaccaccacgcccggctaatttttctgtttttagtagagacagggtttcaccatgttgtccaggctggtctc

SEQ ID NO: 533 - DNA, 129 bp, Homo sapiens
  misc_feature 1..129: note = U/M: U (0.03:0.88) in Small Intestine Epithelium
  misc_feature 1..129: note = source = chr17:9123039-9123167; Gene: NTN1 (intron)
  source 1..129: mol_type = genomic DNA
cggcttccccttgtgctcccacacaaatcactcctcccctaccttgacctttgttttcccctctgcgggataggacgctgccacctgcccctggagcagccgcccgtgtgtgtgcacgtgtgtgtgcac

SEQ ID NO: 534 - DNA, 318 bp, Homo sapiens
  misc_feature 1..318: note = U/M: U (0.06:0.87) in Small Intestine Epithelium
  misc_feature 1..318: note = source = chr20:40727554-40727871; Gene: PTPRT (intron)
  source 1..318: mol_type = genomic DNA
cgcatccctgtggccacgatgctgggcgaggttttgggtcggcctgaggccgagattctcccaaaggggcaggctcccttctgcctccaggctggagtgaggggctgagttgccctggcaaggtgggcactgtgtcatgtgagtcaatggggcagtggaaagtacacatgcattattaatagtccggtagacctggggttcaagtacagctttaccacttgtaagttatgagtcatccatctgtccatccatttgcccatttattcattcatccattcatccattcattcaaactttgtagagtgctttttttttggc

SEQ ID NO: 535 - DNA, 260 bp, Homo sapiens
  misc_feature 1..260: note = U/M: U (0.13:0.94) in Small Intestine Epithelium
  misc_feature 1..260: note = source = chr22:35759383-35759642; Gene: HMOX1 (Intergenic)
  source 1..260: mol_type = genomic DNA
cgcttttgttgctcaggctggagtgcaatggtgcgatctcagctcaccgcaacctctgcctcccgggttcaagtgattctcctgcctcagcctcccgagtagtgggattacaggcatgcgccaccatgcccagctaattttgtatttttagtagagacggatttctccatgttggccagactggtctcgaactccccacctcaggtgatccgcgcgccttggcctcccaaaatgctaggattacaggcctgagccactgc

SEQ ID NO: 536 - DNA, 283 bp, Homo sapiens
  misc_feature 1..283: note = U/M: U (0.13:0.92) in Small Intestine Epithelium
  misc_feature 1..283: note = source = chr6:4263418-4263700; Gene: ECI2 (Intergenic)
  source 1..283: mol_type = genomic DNA
cgaagtcccacaataggccatctgcaagctggggaagaaagcagccagtagcggcttagtccgagtccaaaagcctcaaaagcagggaagctgacagtgcagccttcagtttgcagccaaaggcccaaaagcccccagccaaccactagtgtaagtcccagagtccaaaggccgaagaacctggaatctgatgtccaagcaggaggaacaggaggaagcatccagcacaggagaaagatgaaagccagaagactctgcaagccagcttaccccaccttcttcc

SEQ ID NO: 537 - DNA, 186 bp, Homo sapiens
  misc_feature 1..186: note = U/M: U (0.05:0.94) in Small Intestine Epithelium
  misc_feature 1..186: note = source = chr6:34208627-34208812; Gene: HMGA1 (intron)
  source 1..186: mol_type = genomic DNA
cggggccggggcaggccgcgcaagcagcctccggtgagtcccgggacagcgctggtagggagtcaggtgggtgtccaaacctttgcttcacttggtttaccctttggggctagggaggtgcctggagtttcattcagcaggcgagaccatgcatggagggtgcagaatgattctgcgcagtaagcg

SEQ ID NO: 538 - DNA, 313 bp, Homo sapiens
  misc_feature 1..313: note = U/M: U (0.04:0.93) in Small Intestine Epithelium
  misc_feature 1..313: note = source = chr7:100883380-100883692; Gene: FIS1 (intron)
  source 1..313: mol_type = genomic DNA
cgtggggaagagcggggctgaacaaaggggccgaggctgtcacctttcttcatggccttgtcaatgagccgctccagttccttggcctggttgttctggggctctgtctgcagcaacccgcggacgtactttaaggccttctcgtattcctgcgctcggggaaacgcgcacgcgtcatacacaccgcagtgtttttttgtttgtttgttttttaataagagacggggtcttgctctgttgcccacgctggacggcagcgtcgcaatcacagcccactgcaacctcaaactcccaggctcaagcagtcctcccg

SEQ ID NO: 539 - DNA, 144 bp, Homo sapiens
  misc_feature 1..144: note = U/M: U (0.02:0.9) in Small Intestine Epithelium
  misc_feature 1..144: note = source = chr6:11753073-11753216; Gene: ADTRP (intron)
  source 1..144: mol_type = genomic DNA
cgggtttatcccctgcaacgcagaggagaatggagaagaggcgatggtgattccaagtcaataacgatttgcatgggtcgttaatgtatcactgatagcactttatattgcacatgtaatatatttgtttctgataacaatgcg

SEQ ID NO: 540 - DNA, 490 bp, Homo sapiens
  misc_feature 1..490: note = U/M: U (0.07:0.93) in Small Intestine Epithelium
  misc_feature 1..490: note = source = chr2:235894334-235894823; Gene: SH3BP4 (intron)
  source 1..490: mol_type = genomic DNA
cgggtgaagcagccctcgatgcacacctatgagctcagggactgtgcgcaggtgaaccagcctgtgacacacgcctacgagctcaaggagcacggtgcaggtgaaccagcctgtgacacacgcctacgagctcaaggagcatgatgcaggtgaaccagccctggatacacgcctatgagctcagggtccatgtgcaggtgaaccagccctcgacacacacctacgagaacagggaccatgtgcaggtgaaccagcccttgatatacatctatgagcgcagagaccacagtgcaggtgaaccagcctctgacactcatctacgagaatagggtccacgtgcaggtgtaccagcccttgatatacacctatgagctcagggtccatgtgcaggtgaaccagcccttgacacaaacctatgagctcagggtccatgtgcaggtgaaccagccctccactcacacctatgagcacagagaccatggtgcaggcg

SEQ ID NO: 541 - DNA, 223 bp, Homo sapiens
  misc_feature 1..223: note = U/M: U (0.08:0.92) in Small Intestine Epithelium
  misc_feature 1..223: note = source = chr9:36083406-36083628; Gene: RECK (exon)
  source 1..223: mol_type = genomic DNA
cgagaatactgtcaagccatttttcgaacagactcttctcctggtccatctcagataaaagcagtggaaaattattgcgcctctattagtccacaattaatacattgtgtgaacaattatactcaatcttatccaatgaggaacccaacggatagtaagtaaaagggacatattcttctcatttcaatctttggtaaaatcgtttgtaaaaagaagtgatacg

SEQ ID NO: 542 - DNA, 415 bp, Homo sapiens
  misc_feature 1..415: note = U/M: U (0.05:0.87) in Small Intestine Epithelium
  misc_feature 1..415: note = source = chr15:72081498-72081912; Gene: NR2E3 (Intergenic)
  source 1..415: mol_type = genomic DNA
cgaacagcctatgaatggacaccatatttggctctccatttgctgagagctggaacgggtgatgctacagattttatttctaaccagatagctagggaacttacacttaccgcgcctccacatgatcgacctcaccttgtatactcacagccacctcaacagctgggtgctgcaggtctctctgctttacagcggggaaaacaaagcctcagccaggtgagggaacttgctcgtgatcatgcaggtctcaagtgactggggactttgagcccaagtccgcctcatttcaaagcttatgctggttcctctgcatgctgcggcctttctgaaacaatcacacgaagccatcacgtagaagactaaactctctttaaaagtaaacttcagccagaactgacaccctgagcatggggcg

SEQ ID NO: 543 - DNA, 232 bp, Homo sapiens
  misc_feature 1..232: note = U/M: U (0.07:0.88) in Small Intestine Epithelium
  misc_feature 1..232: note = source = chr6:16178665-16178896; Gene: MIR4639 (Intergenic)
  source 1..232: mol_type = genomic DNA
cgaggaatcttacgtccataagtaacttgcccaaggtcaataggttagtaaggtagcataatcaggattccagctctagtctgctgattccaaagttcgtgatcttttcattgaagttatctgcttcgctgtgacaacaaatgaaacaacatatgggaaagagaaagtacttagtaggcactacgtccctaagtcttccatttccatcttcaaaactggccccaccgcaacg

SEQ ID NO: 544 - DNA, 238 bp, Homo sapiens
  misc_feature 1..238: note = U/M: U (0.1:0.91) in Small Intestine Epithelium
  misc_feature 1..238: note = source = chr13:114887133-114887370; Gene: RASA3 (intron)
  source 1..238: mol_type = genomic DNA
cggcttccccagagaaagactttgaacgcttcactcctctgtagccctgaggacgcgggcggccagaccagtccctgagtgcggcaccatggccgtgtgagtttatggcccattgcgctagccctgtacagtgaatgagatactagttgtttacagctgtgagcatacacaggccccccgccacacgctcaggaaggagcttctcggaatctctctcctgcctcgcaccatgcagccg

SEQ ID NO: 545 - DNA, 104 bp, Homo sapiens
  misc_feature 1..104: note = U/M: U (0.14:0.93) in Small Intestine Epithelium
  misc_feature 1..104: note = source = chr1:115184761-115184864; Gene: DENND2C (intron)
  source 1..104: mol_type = genomic DNA
cgggtttcaccctgttgggccggctggtctcaaactcctggtctcaagtgatccgtccgcctcggcctcccaaagtgctaggattacaggtgtgagccaccgcg

SEQ ID NO: 546 - DNA, 104 bp, Homo sapiens
  misc_feature 1..104: note = U/M: U (0.09:0.87) in Small Intestine Epithelium
  misc_feature 1..104: note = source = chr20:31074767-31074870; Gene: C20orf112 (intron)
  source 1..104: mol_type = genomic DNA
cgataagatgaaagagaaataacagccgggtgcagtggctcacacctgtaatcccagcactttgggaggccgaggcgggtggatcacctgaggtcaggggttcg

SEQ ID NO: 547 - DNA, 139 bp, Homo sapiens
  misc_feature 1..139: note = U/M: U (0.13:0.91) in Small Intestine Epithelium
  misc_feature 1..139: note = source = chr16:69630344-69630482; Gene: NFAT5 (intron)
  source 1..139: mol_type = genomic DNA
cgggtgcagtggctcacgcctgtaatcccagcactttgggaggctgaggcgggcagatcacgaggtcaggagttcaagactatgctggccaacatggtgaaaccccatctctactaaaaatacaaaaattagccgggcg

SEQ ID NO: 548 - DNA, 232 bp, Homo sapiens
  misc_feature 1..232: note = U/M: U (0.06:0.84) in Small Intestine Epithelium
  misc_feature 1..232: note = source = chr15:80279940-80280171; Gene: BCL2A1 (Intergenic)
  source 1..232: mol_type = genomic DNA
cggtttcctttagcactggaacaagaatccacgctctaatatgcctggaagagcccatgctatctggccctgactccttctactttattcttccctcccttcccgttgctcacctgactccaaccacgccattcgtcttgcagttcccagcacaccccatgcacaccctgcccctcagcacctttgtactcacagccctctgctgcctggagtgatctccttctgatatccg

SEQ ID NO: 549 - DNA, 237 bp, Homo sapiens
  misc_feature 1..237: note = U/M: U (0.14:0.9) in Small Intestine Epithelium
  misc_feature 1..237: note = source = chr22:37451029-37451265; Gene: KCTD17 (intron)
  source 1..237: mol_type = genomic DNA
cgagatcggggcactgtggcaggttctggtgaggactttcttccggattgcagactgctgacttctcgttgtgtcctcacatggcagaaagagagggagctagccctcgcccgccccttctcgagagcttgtttggaggttctagcaggggagcgcagctactcacatacccttgaccaaagtccggtcctcctctatcgggggtggtcgcccccttcgatggagctcacagcttcg

SEQ ID NO: 550 - DNA, 58 bp, Homo sapiens
  misc_feature 1..58: note = U/M: U (0.13:0.86) in Small Intestine Epithelium
  misc_feature 1..58: note = source = chr20:11964637-11964694; Gene: BTBD3 (Intergenic)
  source 1..58: mol_type = genomic DNA
cgctcgcctcggcctcccaaagtgctgggattacaggtgtgagccaccacacccggcg

SEQ ID NO: 551 - DNA, 499 bp, Homo sapiens
  misc_feature 1..499: note = U/M: U (0.14:0.87) in Small Intestine Epithelium
  misc_feature 1..499: note = source = chr22:25080123-25080621; Gene: POM121L10P (Intergenic)
  source 1..499: mol_type = genomic DNA
cgtcacactacaattaaatactataaattttattaattcctatctatattacaggcaataaaatcatctcattgctctttcaacttgaagtttctgattactgtaattccaaatgtaccgtgacatatttattatacggtttatattatattttgtgaactctattttcagtctcctttactacaaaagggagtatgtgtggaaacaaaattggtgttatacaagagtatcttttccttgtctaagatctgtttgaaataggcaagaaaaaaaatgacatattcattcaaacagtacaatatctgtgtccgtttcacagtagcaatacaatgtaaatagaatcacactcatatctcccatgacaaaactaatgccttatttacaacattcattttgcattgaaaaatcattttttattttttcagctacgtatggtcaatttctctttgtatgttgcatagcttccaattgcatgtagaagtcttttatttttcagtcg

SEQ ID NO: 552 - DNA, 128 bp, Homo sapiens
  misc_feature 1..128: note = U/M: U (0.03:0.74) in Small Intestine Epithelium
  misc_feature 1..128: note = source = chr7:151585286-151585413; Gene: PRKAG2-AS1 (Intergenic)
  source 1..128: mol_type = genomic DNA
cggtcctggaccggcgaccatcccatgccagacttggcaggcacgtgcctctctgagcctccaccgccttcatctgtgaagtgagaccgccaggtggggtgatttccaaggtccttgccatcagaccg

SEQ ID NO: 553 - DNA, 186 bp, Homo sapiens
  misc_feature 1..186: note = U/M: U (0.21:0.9) in Small Intestine Epithelium
  misc_feature 1..186: note = source = chr6:26256892-26257077; Gene: HIST1H2BH (Intergenic)
  source 1..186: mol_type = genomic DNA
cggctgattttgtatttttagtagagacagggtttctccatgttggtcggatggtcttgaactcccgacctcaggtgatcctcccgccttggcctcccaaagtgctgggattacaggcgtgagccaccacacccagccaccttttgctttaaacagttcagctttctcatttcaaggtactctgcg

SEQ ID NO: 554 - DNA, 277 bp, Homo sapiens
  misc_feature 1..277: note = U/M: U (0.33:0.94) in Small Intestine Epithelium
  misc_feature 1..277: note = source = chr9:36304087-36304363; Gene: GNE (Intergenic)
  source 1..277: mol_type = genomic DNA
cgggcgcagtggctcacgcctgtaatcccagtaatttgggaggccaaggcaggcggatcacctgaggtccagagttcaagaccagcctgaccaacatagagaaaccctgtctctactaaaaatacaaaaaattagccaggtgtggtggtgcatgcctgtaatcccagctactccagaggctgaggcaggagaatggcttgaacctgggaggcggaggttgctgtgagccgagatcgcacctttgcactctagcctgggcaacaagagcgaaactccg

SEQ ID NO: 555 - DNA, 183 bp, Homo sapiens
  misc_feature 1..183: note = U/M: M (0.83:0.1) in Small Intestine Epithelium
  misc_feature 1..183: note = source = chr6:40996092-40996274; Gene: UNC5CL (exon)
  source 1..183: mol_type = genomic DNA
cggccctgcccgctgggcgctcagagcttctcgtccagctccaggccctggttatcccgggcgcccccgcgctcggggcctgggctgccgccgtgtgtcccactcaggtagttctggatggcggaggcgcagtctagccgctccatgacggtcatgaggtagtgcagctcctgcaggctgccg

SEQ ID NO: 556 - DNA, 46 bp, Homo sapiens
  misc_feature 1..46: note = U/M: M (0.7:0.13) in Small Intestine Epithelium
  misc_feature 1..46: note = source = chr1:109806335-109806380; Gene: CELSR2 (exon)
  source 1..46: mol_type = genomic DNA
cgcgccaggccgacggtgtcctgctgcaggccatcaccagggggcg

SEQ ID NO: 557 - DNA, 246 bp, Homo sapiens
  misc_feature 1..246: note = U/M: M (0.69:0.14) in Small Intestine Epithelium
  misc_feature 1..246: note = source = chr12:13687748-13687993; Gene: C12orf36 (Intergenic)
  source 1..246: mol_type = genomic DNA
cgggcagaaagccatcctgggatgggggaactgcccacgagagttagggagacgtcaggagccagatgcccacagaggggctggcttgctaactgaacaaaacaaaacaaaaaacctttcatccaccagtctcccaggctccctctggcgccctctattggcagagcctagcatagagaggctggcaaaggagagctgtagcttacagagaccaccaggatcacaaagtaaggcaagaaggacacg

SEQ ID NO: 558 - DNA, 113 bp, Homo sapiens
  misc_feature 1..113: note = U/M: M (0.63:0.11) in Small Intestine Epithelium
  misc_feature 1..113: note = source = chr1:243053546-243053658; Gene: LOC731275 (Intergenic)
  source 1..113: mol_type = genomic DNA
cgctgcctgctccggagccagagtcacttgcagccctgggcctcccacacatcgatccagcaccacggccagctccagagccacggtgctcctgccccggtcctgggactgcg

SEQ ID NO: 559 - DNA, 37 bp, Homo sapiens
  misc_feature 1..37: note = U/M: M (0.78:0.29) in Small Intestine Epithelium
  misc_feature 1..37: note = source = chr15:24722927-24722963; Gene: PWRN1 (Intergenic)
  source 1..37: mol_type = genomic DNA
cggatgtctgccgggtgcgcgttgggctttctggtcg

SEQ ID NO: 560 - DNA, 99 bp, Homo sapiens
  misc_feature 1..99: note = U/M: M (0.69:0.21) in Small Intestine Epithelium
  misc_feature 1..99: note = source = chr19:54496256-54496354; Gene: CACNG6 (exon)
  source 1..99: mol_type = genomic DNA
cgctgctgctggccgccgtgggcgccacgctggcggtgctgtccgtgggcaccgagttctgggtggagctcaacacctacaaggccaacggcagcgccg

SEQ ID NO: 561 - DNA, 255 bp, Homo sapiens
  misc_feature 1..255: note = U/M: M (0.62:0.15) in Small Intestine Epithelium
  misc_feature 1..255: note = source = chr20:2832800-2833054; Gene: VPS16 (intron)
  source 1..255: mol_type = genomic DNA
cgatgttgctgagggaccatgctttgcggatgtgtggctggggcggagcagtactagatattctcacaccctgactgctggctgaccaccaaccctggaagcacaggagggccccttcctagtgcagtgtccttccagcgccctctgctgagaaagcttaacatgctcactataaaggagaaatgtttaaaggaatgctgaccattaccacagaacatgggttaaagggtgaatttggagctgagaggcaatgcg

SEQ ID NO: 562 - DNA, 160 bp, Homo sapiens
  misc_feature 1..160: note = U/M: M (0.65:0.2) in Small Intestine Epithelium
  misc_feature 1..160: note = source = chr12:128866366-128866525; Gene: TMEM132C (intron)
  source 1..160: mol_type = genomic DNA
cggaagcttcccttgctttttgtcagcaatgaaaagcggtgggcagtctagcaacctcttaagaggaaaaggggagtttgcttttaagaggaagacaaccccgcaaaggggaaaccgtctcggatacactctgccctctcacctccttctctttgtcccg

SEQ ID NO: 563 - DNA, 152 bp, Homo sapiens
  misc_feature 1..152: note = U/M: M (0.63:0.19) in Small Intestine Epithelium
  misc_feature 1..152: note = source = chr15:24722995-24723146; Gene: PWRN1 (Intergenic)
  source 1..152: mol_type = genomic DNA
cggtgcctgcctgtgtcgtcgtccctgtttgttcttcttcaaacctcaggatttctccgtgtttcccagaccgtaacgtacatttaaaaaccttgctttctgtcacatatgcccttttatattatggacataacaattgttacttacctacg

SEQ ID NO: 564 - DNA, 38 bp, Homo sapiens
  misc_feature 1..38: note = U/M: M (0.64:0.26) in Small Intestine Epithelium
  misc_feature 1..38: note = source = chr19:54496412-54496449; Gene: CACNG6 (exon)
  source 1..38: mol_type = genomic DNA
cggacgtgcccgtggacagggacacctgcggccccgcg

SEQ ID NO: 565 - DNA, 17 bp, Homo sapiens
  misc_feature 1..17: note = U/M: M (0.79:0.21) in Small Intestine Epithelium
  misc_feature 1..17: note = source = chr20:3052397-3052413; Gene: OXT (exon)
  source 1..17: mol_type = genomic DNA
cgcgccggacctcgacg

SEQ ID NO: 566 - DNA, 178 bp, Homo sapiens
  misc_feature 1..178: note = U/M: M (0.92:0.04) in Small Intestine Epithelium
  misc_feature 1..178: note = source = chr14:21131479-21131656; Gene: ANG (Intergenic)
  source 1..178: mol_type = genomic DNA
cgcaaatggaggaagccaagtccttggaacgctggagtcaacacacttagagttgattggaacccgccttagaagagaaccttgcgctggttgccaccgcgcacctctcagggtggagcaaatcctccgagtgtggtttcctcgcgtcccagagcgctgatagccacaatccaggacg

SEQ ID NO: 567 - DNA, 307 bp, Homo sapiens
  misc_feature 1..307: note = U/M: M (0.95:0.19) in Small Intestine Epithelium
  misc_feature 1..307: note = source = chr1:47904946-47905252; Gene: FOXD2 (exon)
  source 1..307: mol_type = genomic DNA
cgggtctgcccaccgcacttctgcgccagggcctcaagacggacgcgggcggtggtgcaggcggcgggggcgccggggcagggcagaggccttccttctctatagaccacatcatgggccacggtggcggcggggcagcacccccgggcgccggcgagggctctccgggaccgccattcgcggcagccgcgggtcctgggggccaagcccaggtcttggccatgctgactgctccggccctggctcccgttgctggccacattcgcctctcgcatcccggggacgcgctgctgtcctcagggtcccg

SEQ ID NO: 568 - DNA, 91 bp, Homo sapiens
  misc_feature 1..91: note = U/M: M (0.83:0.08) in Small Intestine Epithelium
  misc_feature 1..91: note = source = chr14:38069639-38069729; Gene: FOXA1 (Intergenic)
  source 1..91: mol_type = genomic DNA
cgaccagtgtttagcttctccgtcccaggccggccagcccccgccaatccactcgcgcccctccccccacacacccaggagctttcccacg

SEQ ID NO: 569 - DNA, 181 bp, Homo sapiens
  misc_feature 1..181: note = U/M: M (0.87:0.13) in Small Intestine Epithelium
  misc_feature 1..181: note = source = chr14:38053893-38054073; Gene: FOXA1 (Intergenic)
  source 1..181: mol_type = genomic DNA
cgggctggtctttatttttaagcactggaacccagcatctaaggtaactggctcagctagagattaatgagtctgagtccgtgaaggtgtgcactcgtcaagaggccttcgtgcgacacgtagttaggacttttcacccgtgactccgcacatagcgcagcgcggcggagctctcggcccg

SEQ ID NO: 570 - DNA, 198 bp, Homo sapiens
  misc_feature 1..198: note = U/M: M (0.8:0.11) in Small Intestine Epithelium
  misc_feature 1..198: note = source = chr1:47904747-47904944; Gene: FOXD2 (exon)
  source 1..198: mol_type = genomic DNA
cgcgccgccgcgcctccacccggacctccgacggcctcggtgttcgcaggcgcgggatcggccccagctcctgcgcctgcctcaggctcgggcccgggcccgggccccgcaggcctgcccgccttcctgggcgcggagctgggctgcgccaaagccttctacgcggcgtccctgagtcctcccgcagccggcaccgcg

SEQ ID NO: 571 - DNA, 77 bp, Homo sapiens
  misc_feature 1..77: note = U/M: M (0.79:0.11) in Small Intestine Epithelium
  misc_feature 1..77: note = source = chr9:23820835-23820911; Gene: ELAVL2 (intron)
  source 1..77: mol_type = genomic DNA
cggcagagcgcccgcgcttcccgcgcagcgcacgcctcgcgcgcaaacccgagatgtgaccgcgagctgcgacctcg

SEQ ID NO: 572 - DNA, 84 bp, Homo sapiens
  misc_feature 1..84: note = U/M: M (0.81:0.13) in Small Intestine Epithelium
  misc_feature 1..84: note = source = chr20:21000837-21000920; Gene: PLK1S1 (Intergenic)
  source 1..84: mol_type = genomic DNA
cgtggctgctgtcgttttggcaatgctgttgccggggggcaggcccctggcccccagcttggattcgcagaccccacggggccg

SEQ ID NO: 573 - DNA, 138 bp, Homo sapiens
  misc_feature 1..138: note = U/M: M (0.76:0.1) in Small Intestine Epithelium
  misc_feature 1..138: note = source = chr14:21121138-21121275; Gene: OR6S1 (Intergenic)
  source 1..138: mol_type = genomic DNA
cggaaaggccttgctaggtttctcctgggagagtgtggatgctggctggcaaagcctttgaccaggcagagatgcagccacgtagttttggtgcgtgcgtgtgcaaaagaatacggcagctccttcgagccggaatcg

SEQ ID NO: 574 - DNA, 86 bp, Homo sapiens
  misc_feature 1..86: note = U/M: M (0.7:0.1) in Small Intestine Epithelium
  misc_feature 1..86: note = source = chr12:133481557-133481642; Gene: CHFR (Intergenic)
  source 1..86: mol_type = genomic DNA
cgcaccccatcagcgaaagaagcgcgcctccccgctcttttctgaaccgtatctcctaaactataattttggagatcaaaagtgcg

SEQ ID NO: 575 - DNA, 42 bp, Homo sapiens
  misc_feature 1..42: note = U/M: M (0.77:0.2) in Small Intestine Epithelium
  misc_feature 1..42: note = source = chr4:188916566-188916607; Gene: ZFP42 (promoter-TSS)
  source 1..42: mol_type = genomic DNA
cgtgccaacgccgggcgtctgggctctggaggcgctgccacg

SEQ ID NO: 576 - DNA, 57 bp, Homo sapiens
  misc_feature 1..57: note = U/M: M (0.72:0.16) in Small Intestine Epithelium
  misc_feature 1..57: note = source = chr2:947108-947164; Gene: SNTG2 (intron)
  source 1..57: mol_type = genomic DNA
cggctctttcgggcccaggcggtggctcggaccggagcgtcccccctgcagccttcg

SEQ ID NO: 577 - DNA, 106 bp, Homo sapiens
  misc_feature 1..106: note = U/M: M (0.65:0.11) in Small Intestine Epithelium
  misc_feature 1..106: note = source = chr1:181451403-181451508; Gene: CACNA1E (Intergenic)
  source 1..106: mol_type = genomic DNA
cgggcccgtggcaccgctcccggcaccgaacagggcacagcactggggacacctctctgcagggacccaagacgcgcgtgcgtgtgcgccccacgccaggccctcg

SEQ ID NO: 578 - DNA, 391 bp, Homo sapiens
  misc_feature 1..391: note = U/M: M (0.61:0.08) in Small Intestine Epithelium
  misc_feature 1..391: note = source = chr19:29284450-29284840; Gene: LOC148145 (Intergenic)
  source 1..391: mol_type = genomic DNA
cgcaccttcctcctcctccgcggcccccgagaagctgggcgcgcaggcaagggaggcgcggcggcccctgcggctggtcagttcaccaggtgcctgctcccgagcgagttgccaccgaccccgccgcgcccggccgagccccgcgctccgcagcgtgggaaggagccgagcagagacccttgctccgagagcccggggtcggcgcctgctcattcctcgcgcagccgtggggcagcgggtggccccgggcgcgcgcgagcagcctcttctctggcacgcagaggccggctccgtgtcctcggccagccgccgtgggggcctcctccgcgctgcctcgcgtggtgcccggctcggcctagatgcggctgctgagagatggcgcccacgcgcg

SEQ ID NO: 579 - DNA, 171 bp, Homo sapiens
  misc_feature 1..171: note = U/M: M (0.58:0.18) in Small Intestine Epithelium
  misc_feature 1..171: note = source = chr1:248021326-248021496; Gene: TRIM58 (intron)
  source 1..171: mol_type = genomic DNA
cgtctatatcgtaaacttgccataataattctcatttgtgcaatgctttgcttttgcacagtgtttacattaaatgagtgttgtcagcaaagcaaccctcgggtttgggcgttgttaagaagagtgtcgagctgggtacgggttccgacccctccaaagctcaggtgcacg

SEQ ID NO: 580 - DNA, 465 bp, Homo sapiens
  misc_feature 1..465: note = U/M: U (0.02:0.94) in Colon Epithelium
  misc_feature 1..465: note = source = chr15:40993737-40994201; Gene: RAD51 (exon,intron)
  source 1..465: mol_type = genomic DNA
cggggtagtctcgaactcctgagctcaggcgattcacctacctcagcctcccaaagtgctggattataggtgtgagctactgtgcctggcctatttatttttctagcttcatatagttctttaacatacatacttccccatggttacattttgttttatgaacctatttcttcagtgtttatatagttacacagttttattgcctttacccttgaagttttatgtagtataaagcagattttttttttttttttttttttttttgagacggagtctcgctctgttgccaggctggagtgcaatagcgtgatcttggtctactgcaccctccgcctctcaggttcaagtgattctcctgcctcagcctcccgagtagttgggactacaggtatgtgccaccacacccagctaatttttgtatttttattagagacagggtttcaccacgttggccaggatggtctc

SEQ ID NO: 581 - DNA, 79 bp, Homo sapiens
  misc_feature 1..79: note = U/M: U (0.01:0.92) in Colon Epithelium
  misc_feature 1..79: note = source = chr1:32781801-32781879; Gene: HDAC1 (intron)
  source 1..79: mol_type = genomic DNA
cgtgaagccgggaggcggagcttgcagtgagccgagattgcgccactgcactctagcctgggagacagagcgagactcc

SEQ ID NO: 582 - DNA, 36 bp, Homo sapiens
  misc_feature 1..36: note = U/M: U (0.02:0.92) in Colon Epithelium
  misc_feature 1..36: note = source = chr6:149588777-149588812; Gene: TAB2 (Intergenic)
  source 1..36: mol_type = genomic DNA
cgagaaatgcgtcgttaggtgatttcatcgttgtgc

SEQ ID NO: 583 - DNA, 46 bp, Homo sapiens
  misc_feature 1..46: note = U/M: U (0.02:0.92) in Colon Epithelium
  misc_feature 1..46: note = source = chr2:101641800-101641845; Gene: TBC1D8 (intron)
  source 1..46: mol_type = genomic DNA
cgcctcagccacccgcgtagctgggattacaggagtgcgtcaccac

SEQ ID NO: 584 - DNA, 236 bp, Homo sapiens
  misc_feature 1..236: note = U/M: U (0.02:0.91) in Colon Epithelium
  misc_feature 1..236: note = source = chr8:22101450-22101685; Gene: MIR320A (TTS)
  source 1..236: mol_type = genomic DNA
cgaagcgggtgggatcacttgacctcaggagttcaagaccagcctgggcaacatagtgaaaccccgtctctacgaaaaatacaaaaaaaaaaaaaaaaaaaaaaagaaaaagaaaaaattagccgggcgtggtggcatgcacttgtagtcccagctactcaggaggctgaggtggaagcatggcttgagcctgggaggcagaggttgcggtgtgttgatcgcaccactgcactccc

SEQ ID NO: 585 - DNA, 157 bp, Homo sapiens
  misc_feature 1..157: note = U/M: U (0.06:0.95) in Colon Epithelium
  misc_feature 1..157: note = source = chr12:105319208-105319364; Gene: SLC41A2 (intron)
  source 1..157: mol_type = genomic DNA
cgcctgtagtcccagctacttgggaggctgaggcaggagaacggtatgaacccgggaggcggagtttgcagtgagccgagatagcgccactgcagtccggcctgggtgaaagagcgaggctccatctcaaaaaaagaaaaaaaaaaatttatattac

SEQ ID NO: 586 - DNA, 358 bp, Homo sapiens
  misc_feature 1..358: note = U/M: U (0.01:0.89) in Colon Epithelium
  misc_feature 1..358: note = source = chr1:47905855-47906212; Gene: FOXD2 (exon)
  source 1..358: mol_type = genomic DNA
cgcaggcggagctgaacggagaggtgaagcagggggtctttatattccctgcagaaaccctggatcccactccactgaggaaaatcctttctcttttgtgtttgggtgcttttaaaggaatttctttcctttcccttggctggctgggtccagccatctccggccagcaaccctgtcagtgttccaccctgtcccaggccctgtgatatttattgtggctaaaggcaatgagattgggtggaagagaagggtctgggccagggactggagaggtgggggtggagtgggcaagggcacaccctgtggcagggggtcctataattttgtgtaaatatctgtacagcgcgctgctctcggc

SEQ ID NO: 587 - DNA, 417 bp, Homo sapiens
  misc_feature 1..417: note = U/M: U (0.04:0.92) in Colon Epithelium
  misc_feature 1..417: note = source = chr1:167870100-167870516; Gene: ADCY10 (intron)
  source 1..417: mol_type = genomic DNA
cgggcctaggttaaagaaggctgagaaacagttaattgtataactgctgatgatcctatcaggtatgacatgtgagaattctaagttttgcaaagtttagttaggcggaagctaacaccaacagcaccaaccataactctgttactcattacttatacctctcagaatctcatttttcatctatgaaatggatacaatgatgcctgtatctcaggactgtcatatagtgtgcgtaatgtttgcacgtgcatagtgtgtaatgtctgcaatgtaataaggaaatatgtgtgactattactatattatatgtataactttaagaagccttgtgtaaagctggagctgtgttgcaggctgacctgttaagcttttcctacacctcattcttatgaggtagggggtgaccagtctcatgtc

SEQ ID NO: 588 - DNA, 300 bp, Homo sapiens
  misc_feature 1..300: note = U/M: U (0.03:0.9) in Colon Epithelium
  misc_feature 1..300: note = source = chr2:208037779-208038078; Gene: KLF7 (Intergenic)
  source 1..300: mol_type = genomic DNA
cgtagaaaatgtgagtgtcagagaggcggaggttggtaaacaagactgcctgagaaacatggtttgaatttggaagaacatgagaacatgtatgtggccacttgtgagagctgtttcataattgagaaaaatgaaatggtggtctcatcaggcctctagtgtcctggataaaaatatttcttgaaaatacgtctctctgtcttcattctgtgctcactttctgcccataatttgacttcccgcttgttctgcctacaggaaaaaatgaactggttacaaccacaggagcctggtcaccgc

SEQ ID NO: 589 - DNA, 466 bp, Homo sapiens
  misc_feature 1..466: note = U/M: U (0.03:0.9) in Colon Epithelium
  misc_feature 1..466: note = source = chr10:105133978-105134443; Gene: TAF5 (intron)
  source 1..466: mol_type = genomic DNA
cgattagaataagagtaactgagaacccaaacaacagaggtttaaatacaataaaagtttgtttatttttctcgtaaatgtgggacattcgggattggtgtggtgggttcttcattaccagggccccaagctccctcggtcttgttgctctctcatgcttttcatgcaatttccaccttgtggcataagatggttttcctgctctaagcagtcacatcagtgtgccagtcagcaggtagggcacacggaaactgcacacacttcttccttttatatcttaacagtcagtggccacacctagctacaagggaaataagaaatgtagtctttacctaagtgtctatgtgcccagctgatattcaggttttcttttatggaggaagacaggaaaaatggatatttggggagagcgaagcctttttgctacagagtcatttctgctacagagtcattaaaggaccatgtc

SEQ ID NO: 590 - DNA, 491 bp, Homo sapiens
  misc_feature 1..491: note = U/M: U (0.07:0.93) in Colon Epithelium
  misc_feature 1..491: note = source = chr17:18878792-18879282; Gene: FAM83G (intron)
  source 1..491: mol_type = genomic DNA
cgggagttcaagaccagcctgaccaacatggtaaaaccccatctctactaaaaatacaaaaaaaaattagccgggcgtggtggctcatgcctgtaatcccagctacttgggaggctgaggcaggagaatcccttgaaccctggaaggcagaggttgcggtgacccgagattgcgccattgcactccagcctgggcaacaagagtgaaactccatctcaaagaaaaaaaaaatcatagaggcttcctgctcctgagttgcagctggtgacttaaactgtggaaccgcaaaggaaaactagttacgtttcagagtcataggtcgtacaactttgtgaacgtactaaaaaccatgggaacagtgtacactttgggtgaattatatggtctgtgaatatctcaataaagctgtttaaaaagtaactcttttgggctgggcacggtggctcacgcttgtaatcccagcactttgggaggtcgaggcgggcgatcac

SEQ ID NO: 591 - DNA, 79 bp, Homo sapiens
  misc_feature 1..79: note = U/M: U (0.04:0.9) in Colon Epithelium
  misc_feature 1..79: note = source = chr15:32993304-32993382; Gene: GREM1 (Intergenic)
  source 1..79: mol_type = genomic DNA
cggagtctcgctctgtcgcccagactggagtgcagtggcacgatctcggctcactgcaagctccgcctcctgggttcac

SEQ ID NO: 592 - DNA, 305 bp, Homo sapiens
  misc_feature 1..305: note = U/M: U (0.04:0.9) in Colon Epithelium
  misc_feature 1..305: note = source = chr5:80476007-80476311; Gene: RASGRF2 (intron)
  source 1..305: mol_type = genomic DNA
cgagagaacatgtgataaagagtttattatacggagaacggctaccaatcgagttctgaacgtcctccgtcactgggtctcaaagcacgcacaggtaagtcagtgccctcattaattacttgcaaggattttttaaaaaatcatctttttaagttgtgacacatgtaaaacacctccctactctttggagttcaatgtgaaaccttgacactggaacttaggaagggaagaaataggctaggcatacagatcaaagcagacacaagtgtcttgccaacatccactgtttcagatctgcaaatgac

SEQ ID NO: 593 - DNA, 343 bp, Homo sapiens
  misc_feature 1..343: note = U/M: U (0.08:0.94) in Colon Epithelium
  misc_feature 1..343: note = source = chr4:9148544-9148886; Gene: USP17L10 (Intergenic)
  source 1..343: mol_type = genomic DNA
cgcaccattgcactccagcctgggcgacagagcaaaactccgtctcaaaaaataaataaataattaaataaatgatgctataaacctcatgtgagggaagactgccccaggtacagcttgaagaacccttgctgtgaataggagccaaatgcgataattctgtttgcaacttccttcatgttagcttgttgcaactccggagtgtaataggtatgagaaaactcatggggttactgtttaatgctggcggaaatattcacattaaaatacaacagtttatcacctaagttatattttatccctgaagtggcccggaacactgattgctatacaccaatcgcac

SEQ ID NO: 594 - DNA, 204 bp, Homo sapiens
  misc_feature 1..204: note = U/M: U (0.06:0.89) in Colon Epithelium
  misc_feature 1..204: note = source = chr13:111093702-111093905; Gene: COL4A2 (intron)
  source 1..204: mol_type = genomic DNA
cgggccgtcttgacccagcattctgcttttgaccattcaaacttaacaccaatcttgatgacttcctgcaacctccaatgatcatactgttcccatttctgttattttatgctaaactcagcccagggagccaatgccaggctttgccgtaatcacacccagcctttcataacatcagttactgatcggagtactcccaaaggc

SEQ ID NO: 595 - DNA, 241 bp, Homo sapiens
  misc_feature 1..241: note = U/M: U (0.11:0.94) in Colon Epithelium
  misc_feature 1..241: note = source = chr5:75774174-75774414; Gene: IQGAP2 (intron)
  source 1..241: mol_type = genomic DNA
cgagatcgtgccactgcacttcagcctaggagacagtgagactccgcctcaagaaaaaaaataatttagcataccctaagtgtacgatgtttataaagtctacagtagtgtacggtaatgtcctagggcttcacattcactatcctaaaggacagtgacacaagtcctgtcctcaagtgatccgcccaccttggcctcccaaagtgttgggattacaggcgtgagccaggcgtggttgtgc

SEQ ID NO: 596 - DNA, 186 bp, Homo sapiens
  misc_feature 1..186: note = U/M: U (0.24:0.95) in Colon Epithelium
  misc_feature 1..186: note = source = chr12:132423352-132423537; Gene: PUS1 (intron)
  source 1..186: mol_type = genomic DNA
cgcctcccgggttcacgccattctcctgcctcagcctcccaagtagctgggactacaggcgcctgtcaccatgcccggctaattttttgtatttttagtagagactaacaatacatttagtagagactaacatttcatgttagccaggatagtctcgatctcctgacctcgtgatccacccgcctc

SEQ ID NO: 597 - DNA, 164 bp, Homo sapiens
  misc_feature 1..164: note = U/M: U (0.01:0.93) in Colon Epithelium
  misc_feature 1..164: note = source = chr4:187629328-187629491; Gene: FAT1 (exon)
  source 1..164: mol_type = genomic DNA
cgacttcccggcggtacggcaagccccagtctgatgcacgaatcctcagagtataaacccgaggcatcagttcgtagtccaggttttctgacgtactcacggcaccagtgaaatggtcaatcgcaaacggcacatgatttaaatttgcgatactgtatgtcacg

SEQ ID NO: 598 - DNA, 107 bp, Homo sapiens
  misc_feature 1..107: note = U/M: U (0.03:0.94) in Colon Epithelium
  misc_feature 1..107: note = source = chr12:92716429-92716535; Gene: CLLU1 (Intergenic)
  source 1..107: mol_type = genomic DNA
cgggcgcggtggctcacgcctgtaatcccagcactttgggaggccgaggcgggcggatcacgaggtcaggagatcgagaccatcctggctaacacggtgaaaccccg

SEQ ID NO: 599 - DNA, 107 bp, Homo sapiens
  misc_feature 1..107: note = U/M: U (0.03:0.94) in Colon Epithelium
  misc_feature 1..107: note = source = chr15:23037878-23037984; Gene: NIPA2 (Intergenic)
  source 1..107: mol_type = genomic DNA
cgggtgcggtggctcacacctgtaatcccagccctttgggaggccgagatgggcggatcacgaggttaggagattgagaccatcccggctaacacggtgaaaccccg

SEQ ID NO: 600 - DNA, 49 bp, Homo sapiens
  misc_feature 1..49: note = U/M: U (0.03:0.93) in Colon Epithelium
  misc_feature 1..49: note = source = chr7:104898593-104898641; Gene: SRPK2 (intron)
  source 1..49: mol_type = genomic DNA
cggtggatcacgcctgtaatcccagcacttcgggaggccgaggcaggcg

SEQ ID NO: 601 - DNA, 98 bp, Homo sapiens
  misc_feature 1..98: note = U/M: U (0.03:0.92) in Colon Epithelium
  misc_feature 1..98: note = source = chr1:32781649-32781746; Gene: HDAC1 (intron)
  source 1..98: mol_type = genomic DNA
cgaggcgggcggatcacgaggtcaggagatcaagaccatcctagctaacacggtgaaaccctgtctctactaaaaatacaaaaaaaattagccgggcg

SEQ ID NO: 602 - DNA, 145 bp, Homo sapiens
  misc_feature 1..145: note = U/M: U (0.03:0.92) in Colon Epithelium
  misc_feature 1..145: note = source = chr12:10803321-10803465; Gene: STYK1 (intron)
  source 1..145: mol_type = genomic DNA
cgggcgcagtggctcacccctgtaattccagtactttgggaggcggaggcaggcggatgacctgaggttaggagttcgagaccagcctggccaacatggcagaaccccgtctctactaaaaaaaaatacaagaattagccgggcg

SEQ ID NO: 603 - DNA, 139 bp, Homo sapiens
  misc_feature 1..139: note = U/M: U (0.03:0.91) in Colon Epithelium
  misc_feature 1..139: note = source = chr3:73097647-73097785; Gene: PPP4R2 (intron)
  source 1..139: mol_type = genomic DNA
cgcccacctcagcctcccacagtgttgggattacaggcgtgagcccccgcgcccagccaggactttgtatttttacggtttcctttattgaagggaagaagtgtttgtgaagttgaattattcgatatttagtttggcg

SEQ ID NO: 604 - DNA, 207 bp, Homo sapiens
  misc_feature 1..207: note = U/M: U (0.06:0.94) in Colon Epithelium
  misc_feature 1..207: note = source = chr4:114581784-114581990; Gene: CAMK2D (intron)
  source 1..207: mol_type = genomic DNA
cgatccttctgcctcacccctccaaagtgctgggattataggcgtaaaccaccgcacctggcctaaagtaaactttctacaggatatatggaatgtaatttagctgagtaaagtgatgacataaatcctgtctttccatacttcagcagcagtagctgaacaattctttttttttttttttttttgagacagagtctcgctctctcg

SEQ ID NO: 605 - DNA, 141 bp, Homo sapiens
  misc_feature 1..141: note = U/M: U (0.03:0.9) in Colon Epithelium
  misc_feature 1..141: note = source = chr15:102284616-102284756; Gene: TARSL2 (Intergenic)
  source 1..141: mol_type = genomic DNA
cgggcagacacctgtacgggactcttacctgccgccttgactgtacaatgagcccttccagaacacagcagcgcgcggccaggccccggggagagggatcgctcaaacagcaccagaggctgcattccaacttttcctccg

SEQ ID NO: 606 - DNA, 96 bp, Homo sapiens
  misc_feature 1..96: note = U/M: U (0.03:0.89) in Colon Epithelium
  misc_feature 1..96: note = source = chr13:66804770-66804865; Gene: PCDH9-AS2 (Intergenic)
  source 1..96: mol_type = genomic DNA
cgacaagaattatttagattttgcagggcggaaaaattcaaagtgccgttttctggctatttggaactactgtcgagtttgtactggggtcaagcg

SEQ ID NO: 607 - DNA, 178 bp, Homo sapiens
  misc_feature 1..178: note = U/M: U (0.05:0.91) in Colon Epithelium
  misc_feature 1..178: note = source = chr10:6295071-6295248; Gene: LOC399715 (Intergenic)
  source 1..178: mol_type = genomic DNA
cggggtttcaccatcttggccaggctggtcttgaactcctgaccttgtgatccacacgcctcggcctcctaaagtgctgggattataggcatgagccaccatgcccggcctatatttggatcttttacaacaagaacatttacatcgattgcccttgtaattaaaaatcataaaatcg

SEQ ID NO: 608 - DNA, 406 bp, Homo sapiens
  misc_feature 1..406: note = U/M: U (0.03:0.89) in Colon Epithelium
  misc_feature 1..406: note = source = chr1:48167839-48168244; Gene: FOXD2 (Intergenic)
  source 1..406: mol_type = genomic DNA
cgtgcagtgtctgacccacagcgtgcacttgtaagtggtagttctcgccacccctgatgacagggcctctggacggacggtgcaatgaggagggtgtgctgggtgtggatggcatgggcaagcagctgggggtgcagtggtgtagagtgaatggacagggtgtggccaggccctgcacaccaattttagtaggaggatcctgggacgccaggtgagaggattggttgggatcagatcccagaaggtattgactgtaaaagtgagagctctgccccattctgcaggcaatgggaaacctctgtgagctccttcaacaaactcaacatgttgccaagcactgattgtgagtaagtgctataatgggcactctcatgggcaggcttcaatagtatcctgtaccaatccg

SEQ ID NO: 609 - DNA, 89 bp, Homo sapiens
  misc_feature 1..89: note = U/M: U (0.06:0.91) in Colon Epithelium
  misc_feature 1..89: note = source = chr13:67133641-67133729; Gene: PCDH9 (intron)
  source 1..89: mol_type = genomic DNA
cggatcaggaggccgggcacagtggctcacgcctgtaatcccagcacttcgggaagctgaggtgggtggatcatgaggtcatgagatcg

SEQ ID NO: 610 - DNA, 107 bp, Homo sapiens
  misc_feature 1..107: note = U/M: U (0.05:0.9) in Colon Epithelium
  misc_feature 1..107: note = source = chr12:77637780-77637886; Gene: E2F7 (Intergenic)
  source 1..107: mol_type = genomic DNA
cgggcgctgtggctcacgcctgtaatcccagcactttgggaggccgaggcgggcggatcataaggtcaggagatcaagaccatcctggctaacacggtgaaaccccg

SEQ ID NO: 611 - DNA, 256 bp, Homo sapiens
  misc_feature 1..256: note = U/M: U (0.03:0.88) in Colon Epithelium
  misc_feature 1..256: note = source = chr15:102283250-102283505; Gene: TARSL2 (Intergenic)
  source 1..256: mol_type = genomic DNA
cgcctgtaatcccagcattttaggaggcagaggcaggtggatcacgaggtcaggagttcaaaaccagcctggccaagatggtgaaccccgtctctactaaaaccacaaaacttagccaggtggggtggcaggtgcctgtaatcccagctactcgggaggctgaggcaggagaatcgcttgaacctgggtggcggaggttgcagtgagaccagatcgtgccactgcactccagcctgggtgacagagtgagaatccg

SEQ ID NO: 612 - DNA, 193 bp, Homo sapiens
  misc_feature 1..193: note = U/M: U (0.02:0.86) in Colon Epithelium
  misc_feature 1..193: note = source = chr6:149588877-149589069; Gene: TAB2 (Intergenic)
  source 1..193: mol_type = genomic DNA
cgtatagcctattgctcctaggtgacaagcccgtacagcatattactgtactgaatactgtaggcaactgtaacataatggtaaatatttgtctacctaagcatatataaacatagaaaacgtacagtgaaaatatggtattataaccttacgggaccactgtcgtatacgcagtctattgttgaccaaaacg

SEQ ID NO: 613 - DNA, 224 bp, Homo sapiens
  misc_feature 1..224: note = U/M: U (0.04:0.88) in Colon Epithelium
  misc_feature 1..224: note = source = chr2:7426795-7427018; Gene: LOC100506274 (Intergenic)
  source 1..224: mol_type = genomic DNA
cgttaccaacaggaaattttcacagacttttagggtcatttagataaaacttccatttcaacgtgtaacaccttatagtcagcgtggtagaataaactgcaataaacatgaagtaaccagactagttagcaatcacccgcagacacacacctgtctcctccataagctgttagacttcaacaggacacaaaaacaagcccttgaaaaacccgtggccctttacg

SEQ ID NO: 614 - DNA, 231 bp, Homo sapiens
  misc_feature 1..231: note = U/M: U (0.04:0.88) in Colon Epithelium
  misc_feature 1..231: note = source = chr15:100349643-100349873; Gene: DNM1P46 (Intergenic)
  source 1..231: mol_type = genomic DNA
cgacggattctcactctgtcacccaggctggagtgcagtggcacgatctggtctcactgcaacctccgccacccaggttcaagcgattctcctgcctcagcctcccgagtagctgggattacaggcacctgccaccccacctggctaagttttgtggttttagtagagacggggttcaccatcttggccaggctggttttgaactcctgacctcgtgatccacctgcctcg

SEQ ID NO: 615 - DNA, 352 bp, Homo sapiens
  misc_feature 1..352: note = U/M: U (0.04:0.88) in Colon Epithelium
  misc_feature 1..352: note = source = chr8:101231738-101232089; Gene: SPAG1 (intron)
  source 1..352: mol_type = genomic DNA
cgctgccttttgacttaacatattttcagtttaccatgggattattgggacataaccatattgtaaatcgaggattatatgtacagtttttttattgttttacttcagaatataatgaagtacgttaaatgctgaagtagctttaaacacttcaaacaaaaccaaaaaacacaaccatgagatacatctttagtgatattggaaacacttcatagactaaaacgtgcaagatgaaaattcataacttagaagaaatcattgtaggtttagttccttgattcccctttggtctgtttttgaagcccttttgcagcaagtgaatcataatgaactaataagttttagagtgccg

SEQ ID NO: 616 - DNA, 405 bp, Homo sapiens
  misc_feature 1..405: note = U/M: U (0.05:0.89) in Colon Epithelium
  misc_feature 1..405: note = source = chr16:14970553-14970957; Gene: NOMO1,NOMO1 (exon,intron)
  source 1..405: mol_type = genomic DNA
cggtgacctcacagaaggagggctatgttctgactgcggtggaaggaaccatcggagacttcaaggcctatgccctggcaggcgtaagctttgaggtaactaacactgtattttcaaaaggcagttatactgaggtataattaacatataataaactgcacaaaaagggtacagtgtggtagtcttgacctaggaatacacccatgaaaacacctccacaattaaaatagcacatctgtggccctcaaggtttcctcttgccccttggtaatccctccctgccacccttccgctgagctgatgatctgcttttcatcaccattggttagtttgcattttcgagtttttataggttggtgcaaaagtgattgtggtttttgccattgagaataatggcagaaaccg

SEQ ID NO: 617 - DNA, 474 bp, Homo sapiens
  misc_feature 1..474: note = U/M: U (0.04:0.88) in Colon Epithelium
  misc_feature 1..474: note = source = chr1:47907972-47908445; Gene: FOXD2 (Intergenic)
  source 1..474: mol_type = genomic DNA
cgtctacttaaatgtctctgagtttaattttgtttattttcacttgaggaagggtgactgtgactgaaggaacatgcacccacacaagtgagcatgtgtgtgtgtgtgtgtgtgtgtgtgtgtgtgcgctgtcagtaaagcactttgtagctatgtgatctcatttacaatgaatatgtcactcccagatattagatcggaggtttacgtaaaagatttattaattggtttttcctctttagaggagaaaattaagtcagcaagaattatgtctgatggtggatagttggatgagatacttccacaactgctatttataggagaagcagcagacccttgtgtgtgtgtgtgtgtgtgtgtgtgtgtgtgtgtgtgtgtgtgtgtgaatttatctgagcatattgcttggtgtctgtgtgttggaggatccatatcaggaaaaggtagaaaaaagagggctggggaacaagagcg

SEQ ID NO: 618 - DNA, 116 bp, Homo sapiens
  misc_feature 1..116: note = U/M: U (0.03:0.86) in Colon Epithelium
  misc_feature 1..116: note = source = chr8:95645196-95645311; Gene: LOC100288748 (Intergenic)
  source 1..116: mol_type = genomic DNA
cgctctgtcgcccagactggagtgcagtggcacaatctcggctcactgcaagctccacctcctgggttcacgccattctcctgcctcagcctcctgagtagctgggactacaggcg

SEQ ID NO: 619 - DNA, 196 bp, Homo sapiens
  misc_feature 1..196: note = U/M: U (0.07:0.9) in Colon Epithelium
  misc_feature 1..196: note = source = chr8:70448201-70448396; Gene: SULF1 (intron)
  source 1..196: mol_type = genomic DNA
cgagattgtaccattgcactccagccccagcaaaaatacgagactccgactcaaaaaaaaaaagccataaaatccctgcaagcaatcaccagcacctcactctttttcatggtgaatgtcacttagatagtagaaacttcgatcaatttaatttgatcatgtactctttatagtatttacgctcaggtgttttgcg

SEQ ID NO: 620 - DNA, 276 bp, Homo sapiens
  misc_feature 1..276: note = U/M: U (0.05:0.88) in Colon Epithelium
  misc_feature 1..276: note = source = chr5:126016588-126016863; Gene: C5orf48 (Intergenic)
  source 1..276: mol_type = genomic DNA
cgtaatttcgctcttgttgcccaggctggagtgcaatggtgcaatctcggctcaccgtaacttccgcctcccaagttcaagcaattctcctacctcagcttcccgagtagctgggattacaggcatgtgccaccaagcccggctaatttttcgtatttttagtagagacggggtttctccatgttggtcaggccattcttgaaccccagcctcaggtgatccgcccacctagggctcccagagttctggagttacaggagtgagccactgcgcccg

SEQ ID NO: 621 - DNA, 323 bp, Homo sapiens
  misc_feature 1..323: note = U/M: U (0.1:0.93) in Colon Epithelium
  misc_feature 1..323: note = source = chr3:32785074-32785396; Gene: CNOT10 (intron)
  source 1..323: mol_type = genomic DNA
cgagatcgtgccactatactccagcctgggagacagactgagactctgtctcacatacacacacgcacaaaaagtagtatattgtcttacggtggttaaacatctgcagagttgtgtaatttaactttaccttctgagaatgtcattaaagagaagtgtacatacaggatgggattcctctcagagttttgtacctttcgtgggtacagctgtttgctttccatatgtcatagtaggaggattgatgattttcaaagaaaataatattacttccattttttttgtgtgtgaaaaggagcatagggcttccatagggaatgccg

SEQ ID NO: 622 - DNA, 348 bp, Homo sapiens
  misc_feature 1..348: note = U/M: U (0.11:0.94) in Colon Epithelium
  misc_feature 1..348: note = source = chr11:77389954-77390301; Gene: RSF1 (intron)
  source 1..348: mol_type = genomic DNA
cgcaagaaataaatttctgttgattataggctatccagtttacggttactttctgatagcagccaaattagactgaggcaatgtcagcaaaaatttttataaagggccagatggtaaatattttaggcttttcagacaatgcagtctctgttgtaactactcaactctgctattgtagtgcaaagcagctacggacaacatgtaagtaaatgatacagacgtgtttcaataaaactttatgagcattaaaatttgaattataggtaatttccatataattttcacaggatatcatttttcttttgatccttttcttcaaacatttataaaaaccactttgaggtcacg

SEQ ID NO: 623 - DNA, 64 bp, Homo sapiens
  misc_feature 1..64: note = U/M: U (0.08:0.9) in Colon Epithelium
  misc_feature 1..64: note = source = chr13:102331535-102331598; Gene: ITGBL1 (intron)
  source 1..64: mol_type = genomic DNA
cgtgagccaccgcgcctggccgagaaacactttctatagaaacatttatctgattatatcaacg

SEQ ID NO: 624 - DNA, 145 bp, Homo sapiens
  misc_feature 1..145: note = U/M: U (0.08:0.9) in Colon Epithelium
  misc_feature 1..145: note = source = chr17:77006672-77006816; Gene: CANT1,CANT1 (promoter-TSS,Intergenic)
  source 1..145: mol_type = genomic DNA
cgttcagtaaaagatacacaagaggaggaattcaaattatataaatggtacgcaatgaaaaataagcctcccattgccgttctgtattccctgcccagaggcgatcactagatgttatatggtatccaaacaagtcataaacacg

SEQ ID NO: 625 - DNA, 178 bp, Homo sapiens
  misc_feature 1..178: note = U/M: U (0.08:0.9) in Colon Epithelium
  misc_feature 1..178: note = source = chr8:17168987-17169164; Gene: MTMR7,MTMR7 (exon,intron)
  source 1..178: mol_type = genomic DNA
cgcctgtgggaatcgcccagtggccacactcaccatgaagcccttcagagtccggtagtgagggtccagcagcaggcttgccaccgagcacacctgagcggtcctgtcccagccatcagaacagtgaacaagcacacttgccccttcctctgacactgcctagaaaacacacgatccg

SEQ ID NO: 626 - DNA, 216 bp, Homo sapiens
  misc_feature 1..216: note = U/M: U (0.1:0.92) in Colon Epithelium
  misc_feature 1..216: note = source = chr1:226074373-226074588; Gene: LEFTY1 (exon)
  source 1..216: mol_type = genomic DNA
cgaacacttcagaaacacacacaagtcaagtccctcgatggctacactaggcgcctatggctggagcctccttggcacgagcgcaccatccgaggcacagctgcacttctgcaccctcatgttgggcaggctgaccacctggggcctggtcctgcctccctccttgatgctgacgatcatgggcagcgagtcagtctccgaggcgatgcactgtcg

SEQ ID NO: 627 - DNA, 222 bp, Homo sapiens
  misc_feature 1..222: note = U/M: U (0.07:0.89) in Colon Epithelium
  misc_feature 1..222: note = source = chr1:17841376-17841597; Gene: ARHGEF10L (Intergenic)
  source 1..222: mol_type = genomic DNA
cggcctctgagcctctcgtgccagcggccccgtccagcccacctcggcccggcacctcttgtccttccggccccttgagggagcgacttgttccctttccagcttctttttgcggagcatgagccactgactatttgaaatgggacaccctcttgatagcaccaagcctctgctttcctatggataaaatgcccagcctgctttcttcagaaagttggtgcg

SEQ ID NO: 628 - DNA, 403 bp, Homo sapiens
  misc_feature 1..403: note = U/M: U (0.09:0.91) in Colon Epithelium
  misc_feature 1..403: note = source = chr21:39491396-39491798; Gene: DSCR4 (intron)
  source 1..403: mol_type = genomic DNA
cgtgttagccaggatgatctggatttcctgacctcgtgatccgcccgcctcggcctcccaaagtgctgagattacaggtgtgagccaccctgcccggccagtaagcggaatattcaattggattccagagtttatgcttttagctatcaagctatactctttctcactatatttccctgagctttggtttccttatctataaaactggaaccgcactgcctgtttgcctttagagctataggtaataaatgttatgcatttattatggtaaataacatgtagtagagcaaagcatggaaattcaggaagtaacaaagagcagtcataagaatgtctatgtggtaaatctagataaaaattacttgtatacacatttacagtagcgcctttaaaacacacaccg

SEQ ID NO: 629 - DNA, 472 bp, Homo sapiens
  misc_feature 1..472: note = U/M: U (0.1:0.92) in Colon Epithelium
  misc_feature 1..472: note = source = chr6:88204364-88204835; Gene: SLC35A1 (intron)
  source 1..472: mol_type = genomic DNA
cgatctcctgacctcatgatccgcctgcctcagcctcccaaagtgctgggattacaggcatgggccactgcacccggccaaatatttgaattttaagttatcaatttctaagctataatttggttgaaagataaacaatacaacatttaaaagtactttttcataaaattaattactgctgcaattcacgggaaaattgttataatgctttactagactctatcacagctgttaacactaacagtttagatttaaacctgtcattgttagtataaagaaaaggaagtgaaaacactttcatattgccttggaacaaaggaacaaagtcaactttttttttttgagacagggtatcactctgtcacccaggctggagtgcagtagcgtgatcttgacttgctgcaaccatcgcttcctgggctcaagcaatccttctgcctcagcctccccagtagctgggattataggtgcg

SEQ ID NO: 630 - DNA, 135 bp, Homo sapiens
  misc_feature 1..135: note = U/M: U (0.05:0.86) in Colon Epithelium
  misc_feature 1..135: note = source = chr4:165692647-165692781; Gene: LOC100505989 (intron)
  source 1..135: mol_type = genomic DNA
cgacataaattttaaagaatccacttgctgggcgcggtgactcacgcctataatcccagcactttgggaggccgaggcaggcggatcacgaggtcaggagatcaagaccatcctggctaacacagtgaaaccccg

SEQ ID NO: 631 - DNA, 170 bp, Homo sapiens
  misc_feature 1..170: note = U/M: U (0.06:0.87) in Colon Epithelium
  misc_feature 1..170: note = source = chr12:131750166-131750335; Gene: LOC116437 (Intergenic)
  source 1..170: mol_type = genomic DNA
cgaatacgccccgaggtctgctgcaggcgtggagcctcgtctccaagtcatgttgtgtgctaagagggtagatcttatgtaaaatgttcttatcactctcagaaaaaaaacaataaacacacagggtgggaggaactttttagagggtttttatggcatcggccgtggcg

SEQ ID NO: 632 - DNA, 203 bp, Homo sapiens
  misc_feature 1..203: note = U/M: U (0.09:0.9) in Colon Epithelium
  misc_feature 1..203: note = source = chr4:20637093-20637295; Gene: PACRGL (Intergenic)
  source 1..203: mol_type = genomic DNA
cgaggtcgtaggtggatctttttcacggagcaaagagcaggaggaaaggggattgatctctgaagggaggtcccccgatccgagtcacggcaccaaatttcatacacatccatgtgaagagaccatcaaacaggctttgtgtgagcaataaagcttttaatcacctgggtgcaggcgggctgagtctgaaaagagagtcagcg

SEQ ID NO: 633 - DNA, 494 bp, Homo sapiens
  misc_feature 1..494: note = U/M: U (0.06:0.87) in Colon Epithelium
  misc_feature 1..494: note = source = chr13:74228143-74228636; Gene: KLF12 (Intergenic)
  source 1..494: mol_type = genomic DNA
cgatagtggagaaaagattttttcatgcataagagcaagatgtgaaaaaagatactaactatgctacttctctgcctttgctctctgaaacccatatctccaggcaaaacccctctcctgaatccatacccacagaaccagccatgaccagagacttccacctggaggtcacacagcgtgatagaatccataatcatctcactattttcttgctcacccttatggctcttttcctgtgtttcctcccagaaaataccacgattacctagttgtgtaggctggaaacataaaaaccattgctgtctgacctgttcaatcaccacagccagtcaacacccaagtgcttttcaacagtcacttaatgcttatatcagacttagagagttcatcattttataactattttaaacatgaaaaaattgaggttgggaaagtttcaaggttcaagttacgtatgtaaggatggccaagctagttatgataaatgaatcacg

SEQ ID NO: 634 - DNA, 94 bp, Homo sapiens
  misc_feature 1..94: note = U/M: U (0.07:0.87) in Colon Epithelium
  misc_feature 1..94: note = source = chr3:54357008-54357101; Gene: CACNA2D3 (intron)
  source 1..94: mol_type = genomic DNA
cgcttgatgctcgagcctgtaacatcttggttaattggtccagtgttatatggatttccccacgcccgtctttaaagagagtttgtatgtcacg

SEQ ID NO: 635 - DNA, 120 bp, Homo sapiens
  misc_feature 1..120: note = U/M: U (0.12:0.92) in Colon Epithelium
  misc_feature 1..120: note = source = chr8:69769182-69769301; Gene: LOC100505718 (Intergenic)
  source 1..120: mol_type = genomic DNA
cgcctgtaatcccagcactttgggaggccgaggcgggcagatcacctgaggtcgggagttcaagatcagcctgaccaacatagagaaaccccgtctctgctaaaaatacaaaattatccg

SEQ ID NO: 636 - DNA, 194 bp, Homo sapiens
  misc_feature 1..194: note = U/M: U (0.12:0.92) in Colon Epithelium
  misc_feature 1..194: note = source = chr7:2086704-2086897; Gene: MAD1L1 (intron)
  source 1..194: mol_type = genomic DNA
cgtgccaccctcctgggcaaacagtcttcggctaaggccctcccttcccagattctcaggttctacaagtcagtgtctttcctccgttcaccccagctccccagggctgctgatgagctgacctaaggcaaagcaggcaatgagaactgtggaaagggaccctgagacaccgcttgctctgagccgcagctgcg

SEQ ID NO: 637 - DNA, 239 bp, Homo sapiens
  misc_feature 1..239: note = U/M: U (0.02:0.82) in Colon Epithelium
  misc_feature 1..239: note = source = chr19:42213576-42213814; Gene: CEACAM5,CEACAM5 (intron,exon)
  source 1..239: mol_type = genomic DNA
cgatgctctctgctctctcctagcctcacttctaaccttctggaacccgcccaccactgccaagctcactattgaatccacgccgttcaatgtcgcagaggggaaggaggtgcttctacttgtccacaatctgccccagcatctttttggctacagctggtacaaaggtgaaagagtggatggcaaccgtcaaattataggatatgtaataggaactcaacaagctaccccagggcccg

SEQ ID NO: 638 - DNA, 241 bp, Homo sapiens
  misc_feature 1..241: note = U/M: U (0.04:0.84) in Colon Epithelium
  misc_feature 1..241: note = source = chr2:240940330-240940570; Gene: NDUFA10 (intron)
  source 1..241: mol_type = genomic DNA
cgatgatgaaatcgcctaacgacacctttcttagaacatatccctgtcgttaagcaacacagaactacatacacaaagcagtgctaagccctgtggtgctcaatcctgcaagggtggtgagcacatcactcggaaggtcagctctcccaccaaggggcagggcacactgggaatctggcttacaacaatcaactgcactggggcatgcacagaaaaaaatatgaatagcatcttcaacacg

SEQ ID NO: 639 - DNA, 342 bp, Homo sapiens
  misc_feature 1..342: note = U/M: U (0.06:0.86) in Colon Epithelium
  misc_feature 1..342: note = source = chr22:44430886-44431227; Gene: PARVB (intron)
  source 1..342: mol_type = genomic DNA
cggccaccatgtgtaacttttgactcccacaaaacttaactagtgatagcctgctgttgactggaagcctcactgataacataaacaattaacaatattttgtatgttctatgcattatgtgctgtattcttactacaaagtgagcctgaggaaagaaaatgttattaggaaaatcataaggaagagaatatgcatttatagtactgtgctgtgtttattgatgctgcacgtttacaacatgcgtttacaagatgaatgctctgaagtggccggcaactgcagctgcagacctcaccctaccatacaacatctcaagctattcagcttcttggaatgtcacg

SEQ ID NO: 640 - DNA, 176 bp, Homo sapiens
  misc_feature 1..176: note = U/M: U (0.13:0.92) in Colon Epithelium
  misc_feature 1..176: note = source = chr2:204437085-204437260; Gene: RAPH1 (Intergenic)
  source 1..176: mol_type = genomic DNA
cgaactcctgacctcagttgatccaccagccttggcctcccaaagtgctaggattacaagcatgagccaccttgcccggccttttttgctctttttttatggcaacttataaaacacgtgcctcgtgcttgtttatgacacagcttatggaaattatgtagtaacgccactgtacg

SEQ ID NO: 641 - DNA, 255 bp, Homo sapiens
  misc_feature 1..255: note = U/M: U (0.07:0.86) in Colon Epithelium
  misc_feature 1..255: note = source = chr5:17324319-17324573; Gene: LOC401177 (Intergenic)
  source 1..255: mol_type = genomic DNA
cgtgaagtaataagtaaatgaagagttggttcctcactgtgatactgtacacgctaacgattcaccctagaatatcctttctgactatggtgcttcaactgcctttaggtgtaaagttaattttaaccaggcgcattacattatgtgtgcacaaggaaacattgttttaacagccagtcctagtttccatgggatatagtgagaggaaaaccagagagtcagtgtatcagtatcaatgtatcagttgatataacg

SEQ ID NO: 642 - DNA, 465 bp, Homo sapiens
  misc_feature 1..465: note = U/M: U (0.09:0.87) in Colon Epithelium
  misc_feature 1..465: note = source = chr2:1644300-1644764; Gene: PXDN (intron)
  source 1..465: mol_type = genomic DNA
cggagcccacaaacagtcccactgaatgtgtttatttccgcagttaactatacagcttctgagtaaacccagctggctggacccctcgcttcttccacccacaaatcgtctcaggagcagagaagagcagagtttcttaaaactcctgggcacacaaatacatcataaaacagcagctgcctcccagactaccgcagcccctcccagcaacacctggggtcaagaatgagcctcactggcaggtggggtccacccagggctgtgcaggtctggggtgggtccctggtagaattacagggcgacagggaagcagcagggccaggacacggtcccaggcactgtggggtccctgccaaagcgcacaccagccccaaccccagaactctttgatgggacctccgtccctccaggatggccgtctcttcctcacaccccagggcacggctgggccacacctgctcagcg

SEQ ID NO: 643 - DNA, 282 bp, Homo sapiens
  misc_feature 1..282: note = U/M: U (0.14:0.91) in Colon Epithelium
  misc_feature 1..282: note = source = chr15:75473667-75473948; Gene: C15orf39 (Intergenic)
  source 1..282: mol_type = genomic DNA
cgccattctcctgtctcagcctcccaagtagctgggactacaggcgcccaccaccacgcctggctaattttttgtatttttagtagagagggggtttcaccgtgttagccaggatggtctccatctcctgacctcgtgatctgcccatctcggcctcccaaagtgctgggattacaggcatgagccacagtgcctggccgggatcttacatgtattaattcatttaaggctgggtgcggtggctcacgtctgtaatcccagctactcaggaggctgaggacg

SEQ ID NO: 644 - DNA, 259 bp, Homo sapiens
  misc_feature 1..259: note = U/M: U (0.15:0.91) in Colon Epithelium
  misc_feature 1..259: note = source = chr6:158749703-158749961; Gene: TULP4 (intron)
  source 1..259: mol_type = genomic DNA
cgctgtgtggggaggagggacttttgccactagttctgttacaggtttgggattctaggacactggacactaatgtgcctaatctgtaaggcattctagactcatcttgtgcagttcattcatcttcccgcctcgcaagccagcagagcctgacttggggcctcagctctgcatggagctacctattgggccttcaacagcgagggttttagtcagaaacacagaaatgaatccttagtgcactgggcagtgggtatcg

SEQ ID NO: 645 - DNA, 334 bp, Homo sapiens
  misc_feature 1..334: note = U/M: U (0.08:0.84) in Colon Epithelium
  misc_feature 1..334: note = source = chr6:153448780-153449113; Gene: RGS17 (intron)
  source 1..334: mol_type = genomic DNA
cgtaggggatctaagataagcaaatatagagcttttataattgggaaacaaatcagtaatataaatgttgtattaaacacatatatattcccaaaacgacaattctgaaaattgcttcctccaaagatgtaggaccataaacacgagttttaggagcccaactagtgtacttggtaaacagtgtaagtgctgattttaaaaatgcaattcttaccttggaagacttttgcgagccatgtcgaccctgcaaaatttattaatttaggaaaaattattttacacctgcctttgccacatactgtgccaggtgctggcacaatagcaggaatgatcg

SEQ ID NO: 646 - DNA, 347 bp, Homo sapiens
  misc_feature 1..347: note = U/M: U (0.04:0.79) in Colon Epithelium
  misc_feature 1..347: note = source = chr21:35362161-35362507; Gene: LINC00649 (Intergenic)
  source 1..347: mol_type = genomic DNA
cggcaaataggccagttaggaggggtcgctgaggtttattacatgaaatcctcaatgggtgggcactgcagcacagagcaacctggagtgtgtggggtgggtaccccagtcaacacacacaggactcttgcaaacaggctccttgactgacatgcttctgtataactttcataaaaagatattgatgttcagagtaatcctggggctatgtagatccagaaaccgtcaaagaaagtttagattctactcagtagatttttaccatgaagcacatttcaccgtgttctcattcttggaaacttagggatggatgagtgatgttaattgcagtttgcaattctctgtcg

SEQ ID NO: 647 - DNA, 431 bp, Homo sapiens
  misc_feature 1..431: note = U/M: U (0.14:0.89) in Colon Epithelium
  misc_feature 1..431: note = source = chr2:101641230-101641660; Gene: TBC1D8 (intron)
  source 1..431: mol_type = genomic DNA
cgtcacccatgacccaacagttccacctcaaggaacccattctacagaatcagcagcactggggtccaggaaatgcacaggtgctcagtgtcaagcagcaacgaccggaagcaacacaaatgtcactcaagagatgaataattaaatatatcagagttcggccctacaaggaaactgcaatcactaaaaaagtatgagaaaagatctatagattctcatctagaacaaagttcatcatacatggtcaactgaaacaaacaaacctgcaggtattatatataccataatctcacttctatgtgggaaagaaaagtaagtgtgtgtgtatgtattgtaggcatgtgtgtatttatagatagatacaagagggaaaattctggaaagatacgcacattgttaaccgtaattatctgtacagggagggtaatacg

SEQ ID NO: 648 - DNA, 253 bp, Homo sapiens
  misc_feature 1..253: note = U/M: U (0.17:0.91) in Colon Epithelium
  misc_feature 1..253: note = source = chr3:125474843-125475095; Gene: MIR548I1 (Intergenic)
  source 1..253: mol_type = genomic DNA
cgatgtgatgaaagcaaaagccaagtatcttcatgtatccaacgtaaaaatataaaaagttacgcccgtcggctgcagttggagctatggcggcggcagctgtcactgggcctagcccggggtgtggacctggggactccccagaagggcccgagggggaggctcacggagcgtcggcggaaggcacacaggatgttaaagctttacaacggcctctcggaaggggaggcggtgagactcctcgcggggaccg

SEQ ID NO: 649 - DNA, 399 bp, Homo sapiens
  misc_feature 1..399: note = U/M: U (0.18:0.91) in Colon Epithelium
  misc_feature 1..399: note = source = chr3:117070041-117070439; Gene: LSAMP-AS3 (Intergenic)
  source 1..399: mol_type = genomic DNA
cgggaggcagaggttgcagtgagccaagatcgcgccattgcactccagcctcggcaacaagaacaaaactctgtctcagcaaaaaaaaaaaaaaaaaaaaaaagtatactttcaggtgctgttatgggcagatacttaggctgggtggaactttgtcaatagcagtaaagattctagtgcccagagcagcaaaaccagggctgtaatgccttctacacaacagataaagccctaacaattcctggctgggttggtgtgtatgtgcttctacaaatatatgttaaattgccagtagaaaggaaaggtgtaaagttgaaaagaatgtcatataatattttctgtgaacttcactaagaaaattggctttattgccaagaaaacacaccttattattgatcg

SEQ ID NO: 650 - DNA, 487 bp, Homo sapiens
  misc_feature 1..487: note = U/M: U (0.18:0.91) in Colon Epithelium
  misc_feature 1..487: note = source = chr6:108453540-108454026; Gene: NR2E1 (Intergenic)
  source 1..487: mol_type = genomic DNA
cgggggaaatagagattctttggatatgggaatggtggggttttgtttaaactatggtgttggtgacaaatagagctctggcttatgtttcataatgtatgtagttgtttccatgcacttatcatcatttagctgattttttttgtttgtttgttttttgtttttgagatggagtttcgctctcgttgcccaggctggagtgcaatggctctatcttggcttactgaaacctccgcctcccaggttcaagtgattctcctgctcagcctcccaaataactgggattacaggctaatttttgtgtttctagtagagacggggtttcaccatgttggccaggctggtcttgaactcctgacctcaggtgatccactcccctcggcctcccaaagtgctaggattacaggcgtgagccactgcacccaggcccagcccattaggctgatttttgacaattactactttttcttctgggaagttgggagcg

SEQ ID NO: 651 - DNA, 136 bp, Homo sapiens
  misc_feature 1..136: note = U/M: U (0.19:0.91) in Colon Epithelium
  misc_feature 1..136: note = source = chr16:79462842-79462977; Gene: MAF (Intergenic)
  source 1..136: mol_type = genomic DNA
cggtgatggacagggcaacggaggctccacagaatgcctgaataagtcgctctggaaatagttcatttcgagtccatccttgggcaagcatgaggctaggatgtgctgtaagcaatgcggatgtctttaaatgccg

SEQ ID NO: 652 - DNA, 165 bp, Homo sapiens
  misc_feature 1..165: note = U/M: U (0.21:0.92) in Colon Epithelium
  misc_feature 1..165: note = source = chr2:69419515-69419679; Gene: ANTXR1 (intron)
  source 1..165: mol_type = genomic DNA
cgccctccatttccaaagtcggcaacattgggttgagtccgtctcacacctaatcactgtgactctgcttctatccgcacatctccttctctggatttgaccctcctgccaaaagccaccatgggtcttctaggaaggacccatgcagttagactgagcccaccg

SEQ ID NO: 653 - DNA, 275 bp, Homo sapiens
  misc_feature 1..275: note = U/M: U (0.21:0.91) in Colon Epithelium
  misc_feature 1..275: note = source = chr3:122070197-122070471; Gene: CSTA (Intergenic)
  source 1..275: mol_type = genomic DNA
cggagactcgctctgtcgcccaggctagagtgcagtggcgtggtctcagctcactgcaagctccacctcccgggttcacgccattctcctgcctcagcctcccgagtagctggggctacaggcgcccatcaccatacctggccaattttttgtattttttaatagagacagggtttcaccgttttagccaggatggtcttgatctcctgacctcgtgatccacccaccttggcctcccaaagggctgggattacaggcgtgagccaccgcgcccg

SEQ ID NO: 654 - DNA, 142 bp, Homo sapiens
  misc_feature 1..142: note = U/M: U (0.22:0.91) in Colon Epithelium
  misc_feature 1..142: note = source = chr1:224986378-224986519; Gene: DNAH14 (Intergenic)
  source 1..142: mol_type = genomic DNA
cgccaccacgcccggctaattttttgtatttttagtagagacggggtttcactgtgttagccaggacggtctcgatctcctgacctcgtgatctgcccgccttggcctcccaaagtgctgggattacaggcatgagccgccg

SEQ ID NO: 655 - DNA, 467 bp, Homo sapiens
  misc_feature 1..467: note = U/M: U (0.14:0.83) in Colon Epithelium
  misc_feature 1..467: note = source = chr16:71461301-71461767; Gene: ZNF23 (Intergenic)
  source 1..467: mol_type = genomic DNA
cgcctccatcccagacccagcttccaagagccaggaagaccgaggcagtcagcacccagcctcaagagatctaggagagggggatgaggcgtggcttgaatgacaagctctgattctagctctagctgaatccttccatatttttcattacaataccttctatttattttgtagtttattctctattagttatttagaagcatatttaatttccaaaataggaaaattctagttttatttttattatttatatcttaattgcattgtggtcaaataatatattctgtaaaagttaaatcctttgaaatttatggctcaggtatatggtcgttgtaaatgctgtgtatgtgggtggggtgggggtgtgttctgtagtggttgtgtgccttgttctaagttttctttttttttttttgagactgagtctcgccctgtcgcccaggctggagtgcagtggtgcgatctcg

SEQ ID NO: 656 - DNA, 307 bp, Homo sapiens
  misc_feature 1..307: note = U/M: U (0.28:0.9) in Colon Epithelium
  misc_feature 1..307: note = source = chr6:109517041-109517347; Gene: CEP57L1 (Intergenic)
  source 1..307: mol_type = genomic DNA
cgagtagctgagattataggcacccgccaccatgcccagctaattttttgtatttttagtagagatggggtttcactatgttggccaggctggtctcgaactcctgacctcaggtgatccacccgccttggcttcccaaagtgctggggttacaggcgtgagctaccacgcccggccgagccagacttcttaatgttatggtcttcatatagaaaaatacatctttccggctgggcacagtggcttacgcctgtaatcccagcactttgggaggccgaggcaggcggatcacgaggtcaggagatcg

SEQ ID NO: 657 - DNA, 324 bp, Homo sapiens
  misc_feature 1..324: note = U/M: U (0.3:0.92) in Colon Epithelium
  misc_feature 1..324: note = source = chr7:97904665-97904988; Gene: BRI3 (Intergenic)
  source 1..324: mol_type = genomic DNA
cgagaagctgggattacaggcatgcgccaccactcccagctaatttttgtatttttgtattttttattttattttattttttttgagatggagtctcattctgtcgcccaggctggagtgcagtggcgcaatctcggctcactgtaaactctgcctgccaggttcaaacaattctcctgcctcagcctcctggggtagctgggactacaggtgtgtgccaccacgcctggctaatttttttttttgtatttttattagagacagggtttcaccatgctggccaggctggtctcaaactcctgacctcgtgatccgcctgcctcg

SEQ ID NO: 658 - DNA, 216 bp, Homo sapiens
  misc_feature 1..216: note = U/M: U (0.13:0.93) in Colon Epithelium
  misc_feature 1..216: note = source = chr10:88636293-88636508; Gene: BMPR1A (intron)
  source 1..216: mol_type = genomic DNA
cgctttgggaggccgaggtgggcggatcatgaggtcaggagttcaagaccagcctgggcaacatggcaaaacctcatctttaccaaaaaatacaaaaattagccgggggcctgtaatcccagctactcgggaggctgaggcaggagaatcacttgaaccccgggaggtggaagctgcagtgagctgagatcgcaccaatgcactctagcctgggcg

SEQ ID NO: 659 - DNA, 262 bp, Homo sapiens
  misc_feature 1..262: note = U/M: U (0.13:0.91) in Colon Epithelium
  misc_feature 1..262: note = source = chr1:108224264-108224525; Gene: VAV3 (intron)
  source 1..262: mol_type = genomic DNA
cgtaatggaaaacttttttttttttttttttgagacagagtctcgctttgtcaccaggctggagtgcagtggcgcgatctcggctcactgcaagttctgcctcccgggctcacgccattctcctgcctcagcctcccaagtagctgggactacaggcacccgccaccacccccagctattttttttttgcttgtatttttagtagagatggggtttcaccgtgttagccaggatggtctccatctcctgacctcgtgatccg

SEQ ID NO: 660 - DNA, 496 bp, Homo sapiens
  misc_feature 1..496: note = U/M: U (0.13:0.91) in Colon Epithelium
  misc_feature 1..496: note = source = chr1:184567735-184568230; Gene: C1orf21 (intron)
  source 1..496: mol_type = genomic DNA
cgcccttccaaaataaagtgcatgtgagaatgtttaaggtataatagacactcccaggacccaggactgtccttgcctattaaagtatgtgaagtcagttggaaagcaataagcagtctttttttctagaccgagcattctgaccactgcatgtcattttgcacccagtaccctgcactaacctccgactgcaagggggcccatagtacctgctgaaacctatcgagggcctatgcatggcactgatctgagttctttgcaagcatgttatacctaattcaatttatacttaggaaaatggcattgagacagatattatctacattttacagaaggaaacaggctcagaatgcttgagtaatttacccagatttgcaaggctaatagtggacaagttggaattccagcccaggtctgtctgactccaaagcagtgtctccaagttgcttctctggtagtgtgtggggatttatactgacagtaagatacaaagtcg

SEQ ID NO: 661 - DNA, 218 bp, Homo sapiens
  misc_feature 1..218: note = U/M: U (0.03:0.96) in Colon Epithelium
  misc_feature 1..218: note = source = chr10:114252502-114252719; Gene: VTI1A (intron)
  source 1..218: mol_type = genomic DNA
cgccactgcactccagcctggcaacagtctcaaaaaaaaaaaaagcaaaaaaaaaattgattgagttataattcacatagcataacattttccattataaatatacaattcagtgatttttttaggatatttatacagttgttcaaacataaccgtaatcgagttttatgacacttcttagaggctccctcacgatcatgtgcagtccgtcctcattc

SEQ ID NO: 662 - DNA, 237 bp, Homo sapiens
  misc_feature 1..237: note = U/M: U (0.04:0.95) in Colon Epithelium
  misc_feature 1..237: note = source = chr4:48679336-48679572; Gene: FRYL (intron)
  source 1..237: mol_type = genomic DNA
cggttgattctctcacaaacgtacaactgtcagtacagattacaatcttacctaaaatatcttaggaaaaaataacgattttttgtgtgtgtgtttttgtttttttttttgagacagagtctctctctgttgcccaggctggaatgcagtagtgcgatctcggctcactgcaacctcatcctcccgggttcaagcgattctcctgcctcagcttcccaagtagctgggattacaggc

SEQ ID NO: 663 - DNA, 208 bp, Homo sapiens
  misc_feature 1..208: note = U/M: U (0.03:0.93) in Colon Epithelium
  misc_feature 1..208: note = source = chr6:4909889-4910096; Gene: CDYL (intron)
  source 1..208: mol_type = genomic DNA
cgcctcccgtcttcatgccattctcctgcctcagcctcccgatttagctgggactacaggctcccaccaccacgcctggctatttttttttttttatttttagtagagatggggtttcaccgtgttagccaggatgatctcgatctcctgatcttgtgatctgccttctcggcctcccaaagtgctgggattacaggcatgagccacc

SEQ ID NO: 664 - DNA, 286 bp, Homo sapiens
  misc_feature 1..286: note = U/M: U (0.04:0.94) in Colon Epithelium
  misc_feature 1..286: note = source = chr16:81453443-81453728; Gene: CMIP (Intergenic)
  source 1..286: mol_type = genomic DNA
cgggctccaattcaggaggtccgcgtggggccaagattctgcatttctaaggagcttgcagttgacgtggatgctaccagttcaggaatcacagtttgagtaacaaaggcctaacatttatatgtaagagctaaattgcagggaagattatttgaacattgttaactttacaaggtgtgttagttgacaagagctgccataataaaataccacagactaggtgtcttaaacaccggaaatttcttttctcaccgttttggtcgaaggtgtgggcagggggctgggc

SEQ ID NO: 665 - DNA, 195 bp, Homo sapiens
  misc_feature 1..195: note = U/M: U (0.05:0.93) in Colon Epithelium
  misc_feature 1..195: note = source = chr2:74323528-74323722; Gene: TET3 (intron)
  source 1..195: mol_type = genomic DNA
cgtaataaaacaccataataacaattgaaaggccaatacaaactggataccttgagttatccttgagttaagaaaagcaggtcaggccgggcgcaggggctcacgcctgtaatcccagcactttgggaggctgagatgggtggatcacctgaggtcaggagtttgtgaccagcctggtcaacatagtgaaacccc

SEQ ID NO: 666 - DNA, 407 bp, Homo sapiens
  misc_feature 1..407: note = U/M: U (0.1:0.93) in Colon Epithelium
  misc_feature 1..407: note = source = chr1:168057707-168058113; Gene: GPR161 (intron)
  source 1..407: mol_type = genomic DNA
cgcagaggtgtgattacccgacatagagaagaaacagtcctttgggaggtagaatatggtggttaaacacacaggcttgggtcggacagacctaggatcactggcaggttatttaatgcctcagtatctttccacgtctgtaaacctggggtcatcattcagtctacctcacggagttgtggggattttgagttgagacatgtaaacatctagcatagtgcttgcacacagcaggggctaaattgagggccatcattcctgataaggacacagcgaacaaagggcagggctgagactcacaccagatctgtgtgccccgaagcccatgctctttcttctgcctacagtgctgtcccctcactccttgcgccggggcaccttccacgtatgcttcagctttcgacatc

SEQ ID NO: 667 - DNA, 302 bp, Homo sapiens
  misc_feature 1..302: note = U/M: U (0.12:0.95) in Colon Epithelium
  misc_feature 1..302: note = source = chr3:195992869-195993170; Gene: PCYT1A (intron)
  source 1..302: mol_type = genomic DNA
cgaagtgctgggatgacaggcgtgagccactgtgcctggcctgcaagtgcccattaaaaaaaaataaataaactaatgagctctaggctatagaattctactctatgctcacatctcataaaaggaaggtcttgtttatctttacacgtctaccacctactgccatactagcgcattgtaaatatgcaataaaggccaggtgcagtagctcacgcctgtaatcccagcactttgggaggtcgaggcgggcggatcacgaggtcaagagatcgagaccatcctggctaacacggtgaaacccc

SEQ ID NO: 668 - DNA, 341 bp, Homo sapiens
  misc_feature 1..341: note = U/M: U (0.17:0.94) in Colon Epithelium
  misc_feature 1..341: note = source = chr8:141594714-141595054; Gene: AGO2 (intron)
  source 1..341: mol_type = genomic DNA
cgaaataggcaatagagtatttagcaataaaaataagctacaaatacacacaacggcgcaggtgggtctcataaattctgctgagtaaaagcagtcgggattgagggtgtgtcactatacagacctggaaactaatctatgtgacacacatcagaatgccgtgactttaggggctgggggtaaccggaagagggtatgaggcaactttctagggtgatcagtatatacatttgtcgaaattcttccagttgtgcatttacgatgtatgtatttcactatcctgaaactgtgtctcaatacaaaaacttggtatatatttatatatatatttttttcaatcc

SEQ ID NO: 669 - DNA, 21 bp, Homo sapiens
  misc_feature 1..21: note = U/M: U (0.05:0.96) in Colon Epithelium
  misc_feature 1..21: note = source = chr14:62106209-62106229; Gene: FLJ22447 (intron)
  source 1..21: mol_type = genomic DNA
cgccgggcgcggtggctcacg

SEQ ID NO: 670 - DNA, 171 bp, Homo sapiens
  misc_feature 1..171: note = U/M: U (0.03:0.93) in Colon Epithelium
  misc_feature 1..171: note = source = chr5:78264407-78264577; Gene: ARSB (intron)
  source 1..171: mol_type = genomic DNA
cgtgatccgcctgcttcggcctcccaaagtgctgggattacaggcgtgagccaccgcacccagcctggaaatattcttacattaggttttgccaggcattaaaaaaataaaaaatcaatccatatccctttttggtaataagggtctctgagagtacagcggtctccaacg

SEQ ID NO: 671 - DNA, 355 bp, Homo sapiens
  misc_feature 1..355: note = U/M: U (0.05:0.95) in Colon Epithelium
  misc_feature 1..355: note = source = chr3:123667213-123667567; Gene: CCDC14 (intron)
  source 1..355: mol_type = genomic DNA
cgagtagctgggattacaggcatgtgccaccatgcccagctaatttctgtatttttcgtagaggtggggtttcaccatgttggccaggctggtcttgaactccagacctcgtgatccacccacctcggcctcccaaagtgccgggattacaggcgtttagccacggcgctcggccataaacatgtaaaacttttatagcaaaaaaaaataaacaactggtctttaaatcctagtgcattaagttataagcaataaattcaacagtccctcctgaatgactgctataagcaaatagttacttatgtagtataagaactgtacgcacagaatgaacctttggagggcagggtggccg

SEQ ID NO: 672 - DNA, 103 bp, Homo sapiens
  misc_feature 1..103: note = U/M: U (0.06:0.95) in Colon Epithelium
  misc_feature 1..103: note = source = chr3:195990693-195990795; Gene: PCYT1A (intron)
  source 1..103: mol_type = genomic DNA
cggggtttcaccatgttggccaggatggtctcgatcacttgacctcgtgatccaccctcctcggcctcccaaagtgttgggattacgggcatgagccactgcg

SEQ ID NO: 673 - DNA, 199 bp, Homo sapiens
  misc_feature 1..199: note = U/M: U (0.04:0.93) in Colon Epithelium
  misc_feature 1..199: note = source = chr2:242735211-242735409; Gene: GAL3ST2 (intron)
  source 1..199: mol_type = genomic DNA
cgcatggccctctctgctctgcggcccctctcgctctcctctctgtgcctgggaattctagtgtttactgggccttggccgctgggagcctcttcaaggtggttccattttgacgtaaggactggaggggtgcattgaagaattgtagagtgcaggtgaagggagggcctggaagctcctgtcccgtctcctagaagcg

SEQ ID NO: 674 - DNA, 440 bp, Homo sapiens
  misc_feature 1..440: note = U/M: U (0.05:0.94) in Colon Epithelium
  misc_feature 1..440: note = source = chr18:77459409-77459848; Gene: CTDP1 (intron)
  source 1..440: mol_type = genomic DNA
cgccaccacacctggctaattttttgtattttttttagtagagacggggtttcaccgtgttagccaggatggtctcaatctcctgactttgtgatccgcctgcctcggcctcccaaagtgctgggattacaggcatgagccaccgcgcccgcccaaggttttttttttaatgcctattttctgacaaactaggtattttgaaggatgtaaggactttatgaaaatacattctgcacacatataccttcatgagttgctgtggctgtttcctgcttttattgtgcctttgaagttgggcattgagtgagttttacaggcacacctcattttatggtgcttcactgatactgtgttcacagggaggaggctcggagcaacctggcgagcacgtctgcaggtgccattttccagcagcatgtgcccccaggtgttgtgccacg

SEQ ID NO: 675 - DNA, 492 bp, Homo sapiens
  misc_feature 1..492: note = U/M: U (0.04:0.93) in Colon Epithelium
  misc_feature 1..492: note = source = chr16:18884841-18885332; Gene: SMG1 (intron)
  source 1..492: mol_type = genomic DNA
cgagaactttctttacaaaaacaggcgctagtgttgtgatggttgtacacttctgtgaatatactaaaaatcagtgaattatacatttaaaataacaaacaaaaaacaagtgctgggctgtatttggcccatggaccatagtttgccgatctctggtctaaacaaagccctctgtatgtgccttttgcggaagtagactgtatttcctcaattttccatatactgcaaatggcaaggtgccctgttcaataaggaaacaaaggcacaccctgccactctacaccttttccatccatctttttcctttacactgccaagacactccattccacctgactgccccatccccacccactttctccttatttctagagtacaggacataaacatctctgaatctgtaaataatgtgaattcctcaaaaatcaagctttcgtgttcgaagaagaatttattgtgacttcaaacataagctgtaactggtaataagcg

SEQ ID NO: 676 - DNA, 221 bp, Homo sapiens
  misc_feature 1..221: note = U/M: U (0.03:0.91) in Colon Epithelium
  misc_feature 1..221: note = source = chr16:66781322-66781542; Gene: DYNC1LI2 (intron)
  source 1..221: mol_type = genomic DNA
cggtgctggaaaggaccttggttcaactttgtcattttagcaataaggaaatgggggactagaggtggtaggatcagccctcattatataatcgcccatacatcgtaatctttactgtttaaatgagtaaaggcaaatataaagaaagtaattttttttttttttttttaagaaggagtctcgttttatcgcctaggctggagtgcagtggtgcaatctcg

SEQ ID NO: 677 - DNA, 343 bp, Homo sapiens
  misc_feature 1..343: note = U/M: U (0.03:0.91) in Colon Epithelium
  misc_feature 1..343: note = source = chr15:93364434-93364776; Gene: ASB9P1 (Intergenic)
  source 1..343: mol_type = genomic DNA
cgatccgcctgcctcggtctcccaaagtgctgggattacaggcgtgagccaccgcgcccggccctatttttctttttcttgaaatattagtttacggccgggcccagctactcgggaggctgagacagaagaatcgcttgagcccgggaggctgaggttgcagtgagccgagatcgcgccattgcactccagcctgggcaacaagagccagactctgtctcgggggaaaaaaaaaaaaaaaaacttacacctagatctgatcttatggcaccactataattattattagattataaattccttggggataggaactttgtttcttatccatctttgtatcccg

SEQ ID NO: 678 - DNA, 407 bp, Homo sapiens
  misc_feature 1..407: note = U/M: U (0.05:0.93) in Colon Epithelium
  misc_feature 1..407: note = source = chr10:86176410-86176816; Gene: CCSER2 (intron)
  source 1..407: mol_type = genomic DNA
cgcggtagctcaagtctgtaattccagcactttgggaggccgaggcaggcagatcatgaggtcaggagatcgagaccatcctggccaacacagtgaaaccccgtctctaccaaaaatacacaaaaaaattagccaggcatggtggtgggcgcctgtagtcccagctactcgggaggctgaggcaggagaatggcgtgaacccaggaggcggagcttgcagtgagccgagatcgcgccattgcactccagcctgggtgacagcgagactccgtctcaaaaaaaaaagagttttttatgaccatgatgtctcagtcttttaaaagtttgttggacttttgatctttttacttgtatatactaaggaaaggtcttatgatatttggattcattcttggattgtaaggacg

SEQ ID NO: 679 - DNA, 148 bp, Homo sapiens
  misc_feature 1..148: note = U/M: U (0.09:0.94) in Colon Epithelium
  misc_feature 1..148: note = source = chr3:157866761-157866908; Gene: RSRC1 (intron)
  source 1..148: mol_type = genomic DNA
cggggtttcaccatgttggtcaggctggtctcgaactcctgacctcaggtgatccacccacctcagccttccaaagtgctgggattacaggcgtgagccactgcgcccagtcacaaatgtatgcttttatgtatttgctgtactttcg

SEQ ID NO: 680 - DNA, 185 bp, Homo sapiens
  misc_feature 1..185: note = U/M: U (0.03:0.88) in Colon Epithelium
  misc_feature 1..185: note = source = chr12:132423840-132424024; Gene: PUS1 (intron)
  source 1..185: mol_type = genomic DNA
cggccacacacctggttgtagatggtcttgcagagacacgaggctatgcatgctcctgccttttccaactgtctctgatgcagaagcgtagtcagagttgctttgcagctggttctgaccttcagaaacgggagccactagacaggagtagaaagctgttcatttgcagtgcttgttgctacacg

SEQ ID NO: 681 - DNA, 244 bp, Homo sapiens
  misc_feature 1..244: note = U/M: U (0.09:0.94) in Colon Epithelium
  misc_feature 1..244: note = source = chr12:89772149-89772392; Gene: DUSP6 (Intergenic)
  source 1..244: mol_type = genomic DNA
cgttgtttgttttactctaggatgcatttggataaaatattgggataaaatttagagaggtctgtttagaaaagggaattaaacatgattggctattattgtgtctttgttttctcatttaaaaaaattacagaggccgggtgtggtggctcacacctgtaattccagcactttgggaggccaaggtgggcggatcacgaggtcaggagatcgagaccatcctggctaacacggtgaaaccccg

SEQ ID NO: 682 - DNA, 295 bp, Homo sapiens
  misc_feature 1..295: note = U/M: U (0.09:0.94) in Colon Epithelium
  misc_feature 1..295: note = source = chr3:33689049-33689343; Gene: CLASP2 (intron)
  source 1..295: mol_type = genomic DNA
cggcctttccatgcaactactcaattatgacattatagctccaaagcagttatatacacacaatatgtaaacaaacgagtgcagttgtgcttcaataaaattttatatacaaaaacaggagggcagatggttttgatccgcaagcaacagtttgccaatctctgctctaggctaactactaaaagaagagtaagtaggccgggcgcggtggctcacgcctgtaatcccagcactttgggaggccgaggcaggtgggtgacgaggtcaggagattgagaccatcctggctaacacg

SEQ ID NO: 683 - DNA, 272 bp, Homo sapiens
  misc_feature 1..272: note = U/M: U (0.1:0.94) in Colon Epithelium
  misc_feature 1..272: note = source = chr3:72618758-72619029; Gene: RYBP (Intergenic)
  source 1..272: mol_type = genomic DNA
cgtcagttgggctcaacgtgaagtaatgtacatcaccagtcccgttactggacactgtgtatgtataccgcacagcctgccttataagctgctttttaaatttaaaatatcgtgaacatctttccatgtcatagctgtgggatgttgaccaagtcatttcacctctctaaagctccatttcctcctttgcggaatagggggtgtactgtgagaatcaatgaccaggacaagtgttctgtgcttagcgcagactctggcacaggaggcacccg

SEQ ID NO: 684 - DNA, 110 bp, Homo sapiens
  misc_feature 1..110: note = U/M: U (0.1:0.93) in Colon Epithelium
  misc_feature 1..110: note = source = chr6:35109390-35109499; Gene: TCP11 (promoter-TSS)
  source 1..110: mol_type = genomic DNA
cgcaggggcgcaggggccgcgctctttcctcacatgtgggagaagcggaggagccgccagggctggggccaggctctgcccactggggttccgcccgttgtcgccctccg

SEQ ID NO: 685 - DNA, 167 bp, Homo sapiens
  misc_feature 1..167: note = U/M: U (0.09:0.92) in Colon Epithelium
  misc_feature 1..167: note = source = chr7:107483770-107483936; Gene: SLC26A3 (Intergenic)
  source 1..167: mol_type = genomic DNA
cgcatgggcagaggggcggtggtgggacacgcgactgtttgggattgagcgaggccacctaagcagattgcggtgagtgagcgcggaatgacgtcactgacctccaatcaactgtcacatgaaaataccaaaagcggcagtgttcctttagtcatgtggatcacgcg

SEQ ID NO: 686 - DNA, 279 bp, Homo sapiens
  misc_feature 1..279: note = U/M: U (0.09:0.92) in Colon Epithelium
  misc_feature 1..279: note = source = chr2:240940021-240940299; Gene: NDUFA10 (intron)
  source 1..279: mol_type = genomic DNA
cggtgatgtcctagaccttcacattcacccaccactcactcactgactcacccagaacaactgccagtcccgtcagctccactcacggtacatgccccagacgggtggaccattttcaccttttataccatattattttttatgtttagatacacaaatacttaccgtcgtgttacaactgccaacagtattcagtactgtaccatgctgtacaggtttatggcctaggagcaacaggctccaccacaccacctaggtgtgcaggttatagcatctacg

SEQ ID NO: 687 - DNA, 285 bp, Homo sapiens
  misc_feature 1..285: note = U/M: U (0.11:0.94) in Colon Epithelium
  misc_feature 1..285: note = source = chr11:14564373-14564657; Gene: PSMA1 (intron)
  source 1..285: mol_type = genomic DNA
cgaagctaatggattccttctcagaatgatttttttctttctttcttgagacggagtctagctctgtctcccaggctggagtgccgcggcaagatctcggctcactgtaacctccgcctcccaggttcgagtgattctcctgcttcagcctcccgagtagctgggattataggtgcccgccaccacacccagctaattttcaccctgttacccaggctggttttgaactcctgagtttaggcaatccacccaccttggcctcccaaagtgctgggattacaagcg

SEQ ID NO: 688 - DNA, 235 bp, Homo sapiens
  misc_feature 1..235: note = U/M: U (0.05:0.87) in Colon Epithelium
  misc_feature 1..235: note = source = chr14:74114572-74114806; Gene: DNAL1 (intron)
  source 1..235: mol_type = genomic DNA
cgtcatagggtctatgtatacttaatttgcctaggtacttttcaggctgctttccagaatggcttgaccagtgtttacttcctccggcagtgcaggagagttccatttcttcttgtttgttcgttttgatacagagtctcgttctgtcgcccaagctggagtgcagtggcacaatctcggctcactgcagcctctgcccctagggctcaagtgattcttctgcttcagcctcccg

SEQ ID NO: 689 - DNA, 380 bp, Homo sapiens
  misc_feature 1..380: note = U/M: U (0.05:0.87) in Colon Epithelium
  misc_feature 1..380: note = source = chr9:35248546-35248925; Gene: UNC13B (intron)
  source 1..380: mol_type = genomic DNA
cgttgtgtctttgttctcgttggtttcaaagaacatctttatttctgccttcatttcattatgtacccagtagtcattcaggagcaggttgttgagtttccatgtagttgagcggttttgaatgagtttattactcctgagttctagtttgattgcactgtggtctgagagacagtttgttataatttctgttcttttacatttgctgaggaatgctttacttccaactatgtggtcaattttagagtaagtgcggtgtggtgctgaggagaatgtatattctgttgatttggggtggagagttctgtagatgtctattagatctgcttggtgcagagctgagttcaattcctggatatccttgttaactttctgtctcg

SEQ ID NO: 690 - DNA, 350 bp, Homo sapiens
  misc_feature 1..350: note = U/M: U (0.11:0.92) in Colon Epithelium
  misc_feature 1..350: note = source = chr7:65938591-65938940; Gene: LINC00174 (Intergenic)
  source 1..350: mol_type = genomic DNA
cggatggctgcaccgaatgttcctcctttcaacgaggctgggccgagttgggctcccagcggctagggcatttttagtccatcttggtctctcacctctgcctcctgcttagctgtcagaatgccaggtggctgtgcagcccaaagcagcccactccgttttaaacttgctcagtttgcaatcaggtaacccgctactgacaacagaaccctcaaggcctgtttatatgcggttctcaggtttaggtctagggaagtttccaggaagcttagtgttcagggaggaattcgttttgcttttgctaatcaaagagacacaaaagcacagctgagtcccgaagctggcacacg

SEQ ID NO: 691 - DNA, 189 bp, Homo sapiens
  misc_feature 1..189: note = U/M: U (0.13:0.93) in Colon Epithelium
  misc_feature 1..189: note = source = chr2:17830574-17830762; Gene: VSNL1 (intron)
  source 1..189: mol_type = genomic DNA
cgacaacgcccaggagcacctgtgatgccgtcattaggaacctacctcgtcgccccgattccatcccctcccgacacctgactgcgcgtgttctcctttgcagttctttccttatggagacgcctccaagtttgcccagcatgccttccgaaccttcgacaagaatggggacggcaccattgacttccg

SEQ ID NO: 692 - DNA, 270 bp, Homo sapiens
  misc_feature 1..270: note = U/M: U (0.14:0.93) in Colon Epithelium
  misc_feature 1..270: note = source = chr20:13203947-13204216; Gene: ISM1 (intron)
  source 1..270: mol_type = genomic DNA
cgaaaaactttaccgtaaagagaaaactaataaaacacttccattgtgtttactacgtgccaccgttttaagtactttacagaatttaactcacttaatttaaccataatcttacaagacatggtactgttaatatagcctcatttacagatgcaaaaactgaggtacagagaggttaaaaaacttgtcaaagttcagacattccaaactcttgattacaccaaattttgtctctaccaggatagactaaagcaaggtgattattgcacg

SEQ ID NO: 693 - DNA, 292 bp, Homo sapiens
  misc_feature 1..292: note = U/M: U (0.12:0.91) in Colon Epithelium
  misc_feature 1..292: note = source = chr15:28365155-28365446; Gene: HERC2 (intron)
  source 1..292: mol_type = genomic DNA
cgtgcggttttgagggaggtgcaagtcaaggtgcactcaatcgcgggggttagacaacgcagaagccatcagctggccttgcctacaagctataatgtttatgatgcacagcaaactgaagccatcgtccaaggtagggaaataaaagcttttttatgaacctagttaaacaacctatttatgtgaggacgtgactgacgtacagcttagcattaaacactctgacgtcagtgaagagaccagctccatcaatgtggtcacatgagctgtccaacaaaggacaagagtttcg

SEQ ID NO: 694 - DNA, 433 bp, Homo sapiens
  misc_feature 1..433: note = U/M: U (0.13:0.92) in Colon Epithelium
  misc_feature 1..433: note = source = chr17:27056518-27056950; Gene: NEK8 (intron)
  source 1..433: mol_type = genomic DNA
cgtgcgccaccatgcccggctaaattttttggattttttttttttttttttttttttgaggcagtctcactctgtcgcagtggcgcgatctcgagtgcagtggcactatctcagctcactgcaacctctgcctccctggttcaagcgcttctcctgcctcagcctcccgagtagctgggactacaggcacgcgccaccatgcccagctaatattttttgtgtttttagtacagatggggtttcgccatgttggccaggctggtctcaaattcctgacctcaggtgatccgcccgcgccggcctccctaagtgctggaattacaggcgtgagccaccgcgacaggccagaagtgagatttaaggccaagacttgaggaatgaggaccagtagtctgcaggtgaagggagaacttttcaggcaaaggaaatagcg

SEQ ID NO: 695 - DNA, 242 bp, Homo sapiens
  misc_feature 1..242: note = U/M: U (0.17:0.94) in Colon Epithelium
  misc_feature 1..242: note = source = chr7:65937750-65937991; Gene: LINC00174 (Intergenic)
  source 1..242: mol_type = genomic DNA
cggctgcttcctcttctctattttttttttttttttttgagacggagtctcactctgtcgcccaggctggagtccagtgacatgatctcggttcactgcaacctccacctcccgggttcaagcgattctcctgcctcagcctcccgagcagctgggaatacaggcgcccgccattacgcctggctaattctttgtatttttagtagagacggggtttcactatgttggccaggctggtctcg

SEQ ID NO: 696 - DNA, 292 bp, Homo sapiens
  misc_feature 1..292: note = U/M: U (0.18:0.94) in Colon Epithelium
  misc_feature 1..292: note = source = chr21:33058281-33058572; Gene: SCAF4 (intron)
  source 1..292: mol_type = genomic DNA
cgaggcaggcggatcacctaaggtcaggagttcaagaccagcctggtcaacatggcgaaaccctgtctgtactaaaaatacaaaaattagctgggtgtggtggcaagcacctgtaatcccagctactccggaggctgaggcaggagaattgcttgaactcgggaggtggaggttgcagtgagccgagattgcaccactgcactccagcctgggcgacagagcaagacttggtcttcaaaaaaaaaaaaagaaaaaaaaaaaaaaggaaagaaagaaagaaatcaaagttgcg

SEQ ID NO: 697 - DNA, 171 bp, Homo sapiens
  misc_feature 1..171: note = U/M: U (0.16:0.91) in Colon Epithelium
  misc_feature 1..171: note = source = chr9:115603152-115603322; Gene: SNX30 (intron)
  source 1..171: mol_type = genomic DNA
cgggtccatgccattctcctgcctcagcctcctgagcagctgggaccacaggtgccccccaccacgcctggctaattttttgtatttttttagtgtcagccaggatggtctcgatctcctgacctcgtgatccgcccgcctcggcctcccaaagtgctgggattacaggcg

SEQ ID NO: 698 - DNA, 441 bp, Homo sapiens
  misc_feature 1..441: note = U/M: U (0.22:0.95) in Colon Epithelium
  misc_feature 1..441: note = source = chr6:135676756-135677196; Gene: AHI1 (intron)
  source 1..441: mol_type = genomic DNA
cggctgggcgcggtggctcatgcctgtaatcccagcactttgggaggctgaggtgggcagatcacgaggtcaggagtttgaggccagcctgacctacacggtgaaaccccatctctactaaaaatacaaaaattagctgggcgtggttgtggacgcctgtaatcccagctacttaggaggctgaggcaggagaactgcttgaacccgggagacggacattgcagtgaactgagattgcgccacggcactccagcctgggcaacagagcgagactctgtctcaaaaaaacaaacaaacaaacaaacaaacatatctttcccttgaaaagaggtctgataaattctcatttgctcacttccctcacccatttaatggctgcaactagcatataccactctcctagaactgccattcatggcagtacttggagcaaggggaacg

SEQ ID NO: 699 - DNA, 150 bp, Homo sapiens
  misc_feature 1..150: note = U/M: U (0.19:0.91) in Colon Epithelium
  misc_feature 1..150: note = source = chr14:100591192-100591341; Gene: EVL (intron)
  source 1..150: mol_type = genomic DNA
cgcctggcggtcggggtgtgaacagcaggggacacacacacaagcacatacacttgtcccaaggcaggaccacacacatagctgcccccagacgagaccacgtacggacggacacacacacctgctgcaagacgagaccacacacatgcg

SEQ ID NO: 700 - DNA, 255 bp, Homo sapiens
  misc_feature 1..255: note = U/M: U (0.25:0.93) in Colon Epithelium
  misc_feature 1..255: note = source = chr19:56638704-56638958; Gene: ZNF787 (Intergenic)
  source 1..255: mol_type = genomic DNA
cgtggttggttggatccgggagcacaggggccccaggcctggcccgctgtctgggcttcgcggacctctttggtttccatccctccactgtggggaataaaggccactgcaaggccaaggccaccctcacttcctcaccctgctattatttccctgaatctgattggctcacctgaaccaatcacaggggccgggcaggggtgggagttctgattggccagtccagagtcacatgtccactcctggagcagggcg

SEQ ID NO: 701 - DNA, 327 bp, Homo sapiens
  misc_feature 1..327: note = U/M: U (0.26:0.94) in Colon Epithelium
  misc_feature 1..327: note = source = chr6:156909918-156910244; Gene: ARID1B (Intergenic)
  source 1..327: mol_type = genomic DNA
cggcagggcgcggtggctcacgcctgtaataccagcactttgggaggccgaggcgggcagatcacgaggtcaggagatcgagaccatcccggctaaaacggtgaaaccccgtctctactaaaaatacaaaaaattagccgggcgtagtggcgggcgcctgtagtcccagctacttgggaggctgaggcaggagaatggcgtgaacccgggaggcggagcttgcagtgagccgagatcccgccactgcactccagcctgggcgacagagcgagactccgtctcaaaaaaaaaaaaaaaaaaaaaaagatgaatgaatcttagaacgcg

SEQ ID NO: 702 - DNA, 489 bp, Homo sapiens
  misc_feature 1..489: note = U/M: U (0.22:0.89) in Colon Epithelium
  misc_feature 1..489: note = source = chr19:14005726-14006214; Gene: C19orf57 (intron)
  source 1..489: mol_type = genomic DNA
cgctgttgcccaggctggagcgtagtggcatgatctcagcttactgcaacctctgcctcctgggttcagtcgattctcctgccttagcctcctgagtatctgggattacaggtgcgccaccacacccagctaatttttgtatttttagtagagacggggttttgcagtgttggccagtcttgtctcaaactcgtgacctcaagtgatcttcccccctcggcctcccaaagtgttgggattacaggcattagccaccatgcccggctaaaacatcaacccttcttaccagcgaggaaagctaggagaagcgagatccgagggccctgagctctgggagggagtgggtcacagcactagataggttgtgggtctctttcccaaagcattgctgtctgctgagctgctgtgctatgtggactgtcagtggggagacctgccggaatgttcagagccacctacctggagacggcctttcctggttcctccccg

SEQ ID NO: 703 - DNA, 439 bp, Homo sapiens
  misc_feature 1..439: note = U/M: U (0.28:0.92) in Colon Epithelium
  misc_feature 1..439: note = source = chr7:2102632-2103070; Gene: MAD1L1 (intron)
  source 1..439: mol_type = genomic DNA
cggagcaatgtttaaagatatacacacaattaaactagaaagaaaaatgagggaagggactgctctacgtttagagcacggctccgtctgacagcggaggctgttctgtttcttacactgggactgagacacgggaacttgctgtattctttgagctgtatgtatatgttctatatgatctttgcacacgcaatgtgtttcacgagaacagtgaaaagaaagactggacgtggggtgggtgggacctcactgcgccaaaatcttgctctctgatccaagagtgggcagagtcctgggcccctgggagtccctggctccgcgtcctcactccaggctgtgccggatcccaggacttaaacagacaccatcagggaagatcagggctttgaaataaaggcaagccagtgacttgaagtggcactcagctggaggaacagcg

SEQ ID NO: 704 - DNA, 244 bp, Homo sapiens
  misc_feature 1..244: note = U/M: U (0.29:0.92) in Colon Epithelium
  misc_feature 1..244: note = source = chr10:5786546-5786789; Gene: FAM208B (intron)
  source 1..244: mol_type = genomic DNA
cgtgagccactgcccccagccagaaatggttggttggtttgtttgttttgttttgtttgagacagagtctcgtgagccactgctccagccagaaatgagtttgtttggtttggtttttttgagactgcagcctccgcctcccgggttcaagtgactctgcctcagcctcccgagtagctgggattacaggtgcatgccaccactcctgggtaatttttgtatttttagtagagactaggtttcg

SEQ ID NO: 705 - DNA, 171 bp, Homo sapiens
  misc_feature 1..171: note = U/M: M (0.96:0.17) in Colon Epithelium
  misc_feature 1..171: note = source = chr2:158453800-158453970; Gene: ACVR1C (intron)
  source 1..171: mol_type = genomic DNA
cggtccccagcgcgctccccaccccaaaaaggaccttggcaccccggcccgcccccggggagctccccttgcctggacttgcaggttggagctcggagccctcccccagagcagcggccaggagcttccgcctccccttcgcctgatgaatttgcgaagggacaccctgcg

SEQ ID NO: 706 - DNA, 295 bp, Homo sapiens
  misc_feature 1..295: note = U/M: M (0.88:0.09) in Colon Epithelium
  misc_feature 1..295: note = source = chr3:128787334-128787628; Gene: GP9 (Intergenic)
  source 1..295: mol_type = genomic DNA
cggcgagaaatcaagcacagcagctgctggcccaggtgctaagcccctcactgctccggactcgcggctccgagagcggggccgcggagcccacgcccacccggaacttgcgctggccggcaagcgcggcgcgcagccccggttcccgcccccgcctctccctccacacctcaccgcaagctgagggagccggctccggccttggccagcccagaaaggggctggccggggctcccatagtgtagcggcgggctgaagggctcctcaagcgcggccagagtgggcaccaaggccg

SEQ ID NO: 707 - DNA, 95 bp, Homo sapiens
  misc_feature 1..95: note = U/M: M (0.88:0.1) in Colon Epithelium
  misc_feature 1..95: note = source = chr1:47915410-47915504; Gene: FOXD2 (Intergenic)
  source 1..95: mol_type = genomic DNA
cgagtgagtgtctgaggatggagacgcgaagggaatggggaggggcgggctctgttgccgcttaccctggagctggggctccagttttccagtcg

SEQ ID NO: 708 - DNA, 158 bp, Homo sapiens
  misc_feature 1..158: note = U/M: M (0.85:0.08) in Colon Epithelium
  misc_feature 1..158: note = source = chr1:53651398-53651555; Gene: CPT2 (Intergenic)
  source 1..158: mol_type = genomic DNA
cgtttaggcctctggatggctgtgggtgggcctgattaatgtcaggccttccacaagaggtggtggagcagagtcttctctaactccccccggggaagggagacttcctttcccggtctgctaagtaacgggtgccttcccaggcactggcgctaccg

SEQ ID NO: 709 - DNA, 248 bp, Homo sapiens
  misc_feature 1..248: note = U/M: M (0.92:0.15) in Colon Epithelium
  misc_feature 1..248: note = source = chr4:74864368-74864615; Gene: CXCL5 (promoter-TSS)
  source 1..248: mol_type = genomic DNA
cgaagattggaggatccggagcactgtggcttcctcgtgccttctgcactccttttatctacactcatctctccccactgacaggaaactcaagctttgggatgctggggaaattccctgaactcatggggcagtgtggaaagaagaggttgggggaggggggccagacaatgggaactggtggggagggtggccaggaggagctgcgtgcacctctaccgagagggacgttgtaaccctgctccgcg

SEQ ID NO: 710 - DNA, 244 bp, Homo sapiens
  misc_feature 1..244: note = U/M: M (0.89:0.14) in Colon Epithelium
  misc_feature 1..244: note = source = chr7:100659999-100660242; Gene: MUC12 (intron)
  source 1..244: mol_type = genomic DNA
cgcagcctggtggagatgaggctgagtgggtgggagagggagagggagtgagggaggatttccgggattgtccgagctgacccttgggccccgaaggatgggggagaagcagccggtggagcacactgagttggggggctggtgggtgctgaggaggaggctgcaaggctcgtgcctgtctgaatctccgggaggggtctgcagcctgaaccacgtactggaatagaggtttgtccattcatcg

SEQ ID NO: 711 - DNA, 114 bp, Homo sapiens
  misc_feature 1..114: note = U/M: M (0.88:0.21) in Colon Epithelium
  misc_feature 1..114: note = source = chr10:27530422-27530535; Gene: ACBD5 (promoter-TSS)
  source 1..114: mol_type = genomic DNA
cggagggcaacttcccctacactaccctttccacccagccccagggagccaggcacctccagcgggatttaataggagactgggcatggggacggccgggcacagtggctcacg

SEQ ID NO: 712 - DNA, 257 bp, Homo sapiens
  misc_feature 1..257: note = U/M: M (0.79:0.16) in Colon Epithelium
  misc_feature 1..257: note = source = chr9:133809106-133809362; Gene: FIBCD1 (intron)
  source 1..257: mol_type = genomic DNA
cgggcgggtggggggggggcggctcaggaggaagggatttgatgccaaggcgctctgctaagctggcacacctcccttcctcctcacttcctaagagagctggctggcaggagtcccctggggagactgggaccacactccacagatgaaaggaggaagaagaaagtttccctccgggggaggccaggccaggttagacccaggtgagtgcccctcctgccgcccacccccatctcctaagagcacccagcccaacg

SEQ ID NO: 713 - DNA, 155 bp, Homo sapiens
  misc_feature 1..155: note = U/M: M (0.68:0.06) in Colon Epithelium
  misc_feature 1..155: note = source = chr17:19881550-19881704; Gene: AKAP10 (promoter-TSS)
  source 1..155: mol_type = genomic DNA
cgctggccggcacgagcagcttcaccctgcaccccagtccctgcttcctcaggagaacccgccacggcctgcgggttcgaggcgatgcagaaccctgattaggaaaaggcacaacctgccgcatgcggaaccagcagctccctggatcattagcg

SEQ ID NO: 714 - DNA, 127 bp, Homo sapiens
  misc_feature 1..127: note = U/M: M (0.72:0.13) in Colon Epithelium
  misc_feature 1..127: note = source = chr2:201829061-201829187; Gene: ORC2 (promoter-TSS)
  source 1..127: mol_type = genomic DNA
cgcatttcttttttaaagattttcttcatttggcgtgaaaggtaggatcttgtacatctccagggtttggggtagggagaagaagagacgttaggagaagcactgaatatggagatgggatcggacg

SEQ ID NO: 715 - DNA, 324 bp, Homo sapiens
  misc_feature 1..324: note = U/M: M (0.82:0.23) in Colon Epithelium
  misc_feature 1..324: note = source = chr11:56981037-56981360; Gene: APLNR (Intergenic)
  source 1..324: mol_type = genomic DNA
cggctggagcttccaggctccctcccttcccagcccctcctctctctcaagcgcccctgcaaatgggctttatggtttccacggaaaccagagaggcccaggagccagggggtcttttgcaaaaacactgtttgtgccaccatttggggtggcagagacagtgagaaagtgcaaaaacagcttacaaatgcctgcccatcatgctctcgatctggtttaagtggggaaagaggaactgagctcatttccacttcaaaggggctgtgttgggttaagtccaaactcagcctggcagccctaaaggaacacacatatgcacaggcg

SEQ ID NO: 716 - DNA, 272 bp, Homo sapiens
  misc_feature 1..272: note = U/M: M (0.95:0.05) in Colon Epithelium
  misc_feature 1..272: note = source = chr2:158453973-158454244; Gene: ACVR1C (promoter-TSS)
  source 1..272: mol_type = genomic DNA
cgccgggatgccccagctttccgctggaccttggcgcagtgaattcggccccgacgacagctcccgcggggctcggccacctgcccgacggcagcgcaacccccaggagacgttctccgacggcttcccggcgcacccgggtaccatctagtggcagcagaagcaggaggcaggctattttttacagaatgacctccactccggattagcatttctcaagcatttttaaaacctgtgtgtctttaaaataatcataaaatgtcgcactctcg

SEQ ID NO: 717 - DNA, 286 bp, Homo sapiens
  misc_feature 1..286: note = U/M: M (0.96:0.07) in Colon Epithelium
  misc_feature 1..286: note = source = chr4:74864044-74864329; Gene: CXCL5 (intron)
  source 1..286: mol_type = genomic DNA
cggcaggaccagctggggaagaaagagagacaccctttatagggcaggttgctgggagagttccctggaacgcagcgaccccgcagaggctgggatgcacctctgtgcccgagtgcgagtgcgtcccgcgcgccatgcgctctcaccgctggcgatgggccctggctgcgtcagcagcagcagcagcaccaacagcgcgcacaaggagctcgaaggaccggggacacgggccgcgcggctggacaggaggctcatagtggtcaagagagcgctgcgagcggtcgcg

SEQ ID NO: 718 - DNA, 236 bp, Homo sapiens
  misc_feature 1..236: note = U/M: M (0.96:0.13) in Colon Epithelium
  misc_feature 1..236: note = source = chr17:70215501-70215736; Gene: SOX9 (Intergenic)
  source 1..236: mol_type = genomic DNA
cggctccttggggactcccaggcattccttctaacaagagacatgttgcctgccagccagcagatgtggcccatgaataaacatccctgcagggctgggggctgtgggggggataataaatatgaagaaagtggtggcctgcccctccatgtccccctcccttgctcccagggcagcagacacgctctcccaaaggggcggacacagacgtcctcacaccgcggcccgaccggccg

SEQ ID NO: 719 - DNA, 258 bp, Homo sapiens
  misc_feature 1..258: note = U/M: M (0.9:0.1) in Colon Epithelium
  misc_feature 1..258: note = source = chr21:43181441-43181698; Gene: RIPK4 (intron)
  source 1..258: mol_type = genomic DNA
cggttggctgaggccctcatttgttatttaaaggaataccagcacaacttccaacccggcaactgccactaacttccaaaccatcggactgggacatggtaccagctgctgcttctcttttatgtcttgttaagaatcagagttatgatttgtctgtttccgattgctcaaatgtggccagcttgccgcccctcccctaccagtgtggcctccctcctccggacactctgccccggggcgctggcgaaagtccttccg

SEQ ID NO: 720 - DNA, 112 bp, Homo sapiens
  misc_feature 1..112: note = U/M: M (0.94:0.15) in Colon Epithelium
  misc_feature 1..112: note = source = chr6:26233551-26233662; Gene: HIST1H1D (TTS)
  source 1..112: mol_type = genomic DNA
cgctggccactgacagaaaaagacaatgggcacactttttattttgagacggagtctcgttctatcgcccaggccggagtgcaagtggcgcgatctcggcttacaacttccg

SEQ ID NO: 721 - DNA, 215 bp, Homo sapiens
  misc_feature 1..215: note = U/M: M (0.89:0.1) in Colon Epithelium
  misc_feature 1..215: note = source = chr14:102172344-102172558; Gene: LINC00239 (Intergenic)
  source 1..215: mol_type = genomic DNA
cgcggccgggcatggggaggtgaaggcctccgtggggtgacagggggcgcggggccgcttgtccccagcgcaggaggagccgggacccgacgcgcaccctccggcctgctggaggctgagccgccgcagggaaagcacgtgggtgaagggcccagcgcggcggttccttgaaaaagcgggagcctggtctcagctggggcctggggcctgccccg

SEQ ID NO: 722 - DNA, 86 bp, Homo sapiens
  misc_feature 1..86: note = U/M: M (0.9:0.12) in Colon Epithelium
  misc_feature 1..86: note = source = chr1:61509219-61509304; Gene: NFIA (Intergenic)
  source 1..86: mol_type = genomic DNA
cgggctcccgtctgggctttgtgggttggcggtgtctgaatcgccgacgggccgagccgtgccgggaaggcgcgcggccccgcgcg

SEQ ID NO: 723 - DNA, 273 bp, Homo sapiens
  misc_feature 1..273: note = U/M: M (0.8:0.05) in Colon Epithelium
  misc_feature 1..273: note = source = chr3:120169978-120170250; Gene: FSTL1,FSTL1 (promoter-TSS,intron)
  source 1..273: mol_type = genomic DNA
cggggagcccgcgggagtcctggcgccgccgaacccctctctccgcacggtccctcgtccggcgccccttcggccccctggacgtggagcggaggcagagggggtgtcccgtgggtccctgccacaaaggggtagggggaagggaaaccccaccccgggaggggctgctggctggcggcggcccgggcgggctgcggcggtggccaggtgggcggtgccgtggggggcccgggaaggtccgggactggaacctggaggaaaagacgtcccgcg

SEQ ID NO: 724 - DNA, 134 bp, Homo sapiens
  misc_feature 1..134: note = U/M: M (0.76:0.02) in Colon Epithelium
  misc_feature 1..134: note = source = chr8:38645085-38645218; Gene: TACC1 (exon)
  source 1..134: mol_type = genomic DNA
cggaggagccgcgctcatggcgttcagcccgtggcagatcctgtcccccgtgcagtgggcgaaatggacgtggtctgcggtacgcggcggggccgccggcgaggacgaggctggcgggcccgagggcgaccccg

SEQ ID NO: 725 - DNA, 176 bp, Homo sapiens
  misc_feature 1..176: note = U/M: M (0.8:0.07) in Colon Epithelium
  misc_feature 1..176: note = source = chr11:9112509-9112684; Gene: MIR5691 (promoter-TSS)
  source 1..176: mol_type = genomic DNA
cgaagccatcagcagaacttgccggcccccaaagaaagaaacggcaaagctgccaccgcctcgcggatgtgcccggcccggccctcagtttccccgcctacgctgaggcgcgggaccccaaggccagggtccgcaccctcctgcctgctcgccggcgacggtctgactagcaggcg

SEQ ID NO: 726 - DNA, 113 bp, Homo sapiens
  misc_feature 1..113: note = U/M: M (0.72:0.05) in Colon Epithelium
  misc_feature 1..113: note = source = chr20:42876648-42876760; Gene: GDAP1L1 (intron)
  source 1..113: mol_type = genomic DNA
cgggccgccttctggctagggcttggagggtctgtccccagtcgtcgcccaccccccactccgtgtcttgagctgagaaggaaggagttaaaccatcccctcacaccagctcg

SEQ ID NO: 727 - DNA, 387 bp, Homo sapiens
  misc_feature 1..387: note = U/M: M (0.69:0.05) in Colon Epithelium
  misc_feature 1..387: note = source = chr21:43181729-43182115; Gene: RIPK4 (intron)
  source 1..387: mol_type = genomic DNA
cgtgtgaggcacaccctcctcgccggagggttttgaggaaatgacaattcgggtgtttagaggccagccattcgcaagggtcatttttccacattaagtagacattctgagagtgaactctctaagccaaagctgactgataataaacacgtattctgagaacaatgtcaatcaaaggaaggctgagtagcttattaagtggaagctctgagccactccacaaatagtgttttcttttatttgcccaaagggcttaatacataaaaccccggtgacttctgattgcagagtgagctcattggcgactctaacagctacgggctggcagcagtgcacacccctccccagcgcaccgagttcagcaagtactttactctccctgccccg

SEQ ID NO: 728 - DNA, 365 bp, Homo sapiens
  misc_feature 1..365: note = U/M: M (0.66:0.04) in Colon Epithelium
  misc_feature 1..365: note = source = chr4:11429310-11429674; Gene: HS3ST1 (intron)
  source 1..365: mol_type = genomic DNA
cgaggaatcgctggctcccaggggagggaaagagatggaagacctatagcgcctataactgcagagttatagacctataactgcagagcccagcacaccccatcccgcgccggcacccggctttggctccagcttcttcttcccatcatccgcctacgttctgggtctgtcctccgcttcctgggacaggctggggctagaaggaggagcagcgcgccgtccgccccctggctggtagagcgcacctggagaggtcaagctccgcgaataagacccttcctgggagctggggtctaggcgttccaaccgcgggttcgcaccccgccatccctcacctccatccgctgccactacccaagggcccg

SEQ ID NO: 729 - DNA, 205 bp, Homo sapiens
  misc_feature 1..205: note = U/M: M (0.65:0.04) in Colon Epithelium
  misc_feature 1..205: note = source = chr14:21341863-21342067; Gene: RNASE3 (Intergenic)
  source 1..205: mol_type = genomic DNA
cgtctacccgtgtcagcaaccaagaaacctgcagcctgtctcaaaggaaaccaagaaagaagttttggactcttgtgcaggaagcttgtggcgcggcgccccctgccgaccaatacgacggccacgggaactgggagaccacgaaggctctgggcctgcggagttgcccaagctcctccggcttctccggaaacggctttttccg

SEQ ID NO: 730 - DNA, 332 bp, Homo sapiens
  misc_feature 1..332: note = U/M: U (0.26:0.85) in Colon Fibroblasts
  misc_feature 1..332: note = source = chr1:232423115-232423446; Gene: SIPA1L2 (Intergenic)
  source 1..332: mol_type = genomic DNA
cgatgaagggtaatttttttttttttttttttttttttttttgagacggagtctcgctctgtcgcccaggtgggactgcggactgcagtggcgcaatctcggctcactgcaagctccgcttcccgggttcacgccattctcctgcctcagcctcccgagtagctgggactacaggcgcccgccaccgcgcccggctaattttttttgtatttttagtagagacggggtttcaccttgttagccaggatggtctcgatctcctgacctcatgatccacccgcctcggcctcccaaagtgctgggattacaggcgtgagccaccgcgcccggcc

SEQ ID NO: 731 - DNA, 108 bp, Homo sapiens
  misc_feature 1..108: note = U/M: U (0.3:0.84) in Colon Fibroblasts
  misc_feature 1..108: note = source = chr19:49961241-49961348; Gene: ALDH16A1 (intron)
  source 1..108: mol_type = genomic DNA
cgtgcagatcacttgaggtcaggagttcaagaccagcctgaccaacatggtgaaaccccgtctctactaaaaatacaaaaacaaaactagccgcatgtggtggcgggc

SEQ ID NO: 732 - DNA, 211 bp, Homo sapiens
  misc_feature 1..211: note = U/M: U (0.36:0.87) in Colon Fibroblasts
  misc_feature 1..211: note = source = chr15:38716228-38716438; Gene: FAM98B (Intergenic)
  source 1..211: mol_type = genomic DNA
cggccaggttggctcgcacctgtaatcccagcactttgggaggccaaagtgagtgggtctcttgagctcaggagttcaagagcagcgtgacccacatagtgaaatcccatctctaccacaaatacaaaaattagcagagtgtggtgatgcacacctgcagtcccagctacttggagggcttgaacgcaggaggtggaggctgcagtgagcc

SEQ ID NO: 733 - DNA, 58 bp, Homo sapiens
  misc_feature 1..58: note = U/M: M (0.67:0.18) in Colon Fibroblasts
  misc_feature 1..58: note = source = chr1:221065480-221065537; Gene: HLX (Intergenic)
  source 1..58: mol_type = genomic DNA
cgtggtctcggatccccaacctgcccgccgaatattcattcagttcacggtcagcgcg

SEQ ID NO: 734 - DNA, 416 bp, Homo sapiens
  misc_feature 1..416: note = U/M: M (0.63:0.18) in Colon Fibroblasts
  misc_feature 1..416: note = source = chr17:32624822-32625237; Gene: CCL11 (Intergenic)
  source 1..416: mol_type = genomic DNA
cggttctcagatctccagctgcgtgctgggagaaccactgctctcttcaaagctgtcagacagggacatttaagtctgcagaggttactgctgtctttttgtttgtctgtgccctgcccccagaggtggagcctacagtggcaggcaggcctccttgaactgtggtgggctccacccaggagcttcccggctgctttgtttacctaagcaagcctgggcaatggcgggtgcccctcccccagcctcgttgccgccttgcagtttgatctcagactgctgtgctagcaatcagcgagactccgtgggcgtaggaccctccgagccaggtgtggcatatagtctcgtggtgcgccgttttttaagccggcctgaaaagcgcaatattcgggtggtagtgacccaattttccaggtgcg

SEQ ID NO: 735 - DNA, 196 bp, Homo sapiens
  misc_feature 1..196: note = U/M: M (0.57:0.13) in Colon Fibroblasts
  misc_feature 1..196: note = source = chr17:46679079-46679274; Gene: HOXB-AS3 (intron)
  source 1..196: mol_type = genomic DNA
cgtcagctcctctagccctcggccagactctggcaacaccttggtttgcctggcaccgcaggcaatttcctggaaccccacccccacccaggaacggggaccacagcacctttaaaggaactgccagagcttcctcctacggcttgaaagcccaagctaatcagtaacccgtgagacaggggccaatattcaaacg

SEQ ID NO: 736 - DNA, 54 bp, Homo sapiens
  misc_feature 1..54: note = U/M: M (0.56:0.17) in Colon Fibroblasts
  misc_feature 1..54: note = source = chr4:13536606-13536659; Gene: LOC285547 (Intergenic)
  source 1..54: mol_type = genomic DNA
cgcaatcaccccgctgcccagctctcccgcgcctccctgggaggccttggtgcg

SEQ ID NO: 737 - DNA, 61 bp, Homo sapiens
  misc_feature 1..61: note = U/M: M (0.58:0.19) in Colon Fibroblasts
  misc_feature 1..61: note = source = chr1:233751029-233751089; Gene: KCNK1 (intron)
  source 1..61: mol_type = genomic DNA
cgaggctccccataaacttcgaagcgccacgtccccgtacgactcacccgcggggcgcccg

SEQ ID NO: 738 - DNA, 193 bp, Homo sapiens
  misc_feature 1..193: note = U/M: M (0.54:0.16) in Colon Fibroblasts
  misc_feature 1..193: note = source = chr3:134094044-134094236; Gene: AMOTL2 (promoter-TSS)
  source 1..193: mol_type = genomic DNA
cgccgccaggcgctctgtccagttcttccccaaggtgataataggcgcccctttacgcagagtgcaaggtgtgccaccgctggcttttcgcccagtcatccgattcagccctgccaagcaccctccaacggagttctgttatcatccctgtgttgtaaatgaggacaccagggctcagagagcttaagcagcg

SEQ ID NO: 739 - DNA, 69 bp, Homo sapiens
  misc_feature 1..69: note = U/M: M (0.59:0.5) in Colon Fibroblasts
  misc_feature 1..69: note = source = chr14:86352363-86352431; Gene: FLRT2 (Intergenic)
  source 1..69: mol_type = genomic DNA
cgaggctgggggaggggcgcccgccattgcccaggcttgcttaggtaaacaaagcagccgggaagctcg

SEQ ID NO: 740 - DNA, 186 bp, Homo sapiens
  misc_feature 1..186: note = U/M: M (0.64:0.22) in Colon Fibroblasts
  misc_feature 1..186: note = source = chr9:98514351-98514536; Gene: ERCC6L2 (Intergenic)
  source 1..186: mol_type = genomic DNA
cgactaacttgttcatcctgtgccaaagacatcacccccttctcagatgcgtggggcacgtcacgcacgatctgccccccctcccgctgccctctcagtgtcccgtcctcttacagacgggagcctcccggcgcgggttgggagcgagcagggagagtggcgccagcgcaggaggtccccaggccg

SEQ ID NO: 741 - DNA, 114 bp, Homo sapiens
  misc_feature 1..114: note = U/M: M (0.66:0.28) in Colon Fibroblasts
  misc_feature 1..114: note = source = chr9:98514556-98514669; Gene: ERCC6L2 (Intergenic)
  source 1..114: mol_type = genomic DNA
cgaggggagcgcaggagcgacctgcgggggccccgggaggcagagcggcgcctccggggagaaggtcccgcagagctgtgggggggcaggggactgcccgggaggagcccagcg

SEQ ID NO: 742 - DNA, 129 bp, Homo sapiens
  misc_feature 1..129: note = U/M: U (0.01:0.93) in Gallbladder Epithelium
  misc_feature 1..129: note = source = chr17:60217867-60217995; Gene: MED13 (Intergenic)
  source 1..129: mol_type = genomic DNA
cggtcttggtcttgctcctgggggctggcggatgagctcctcctggggccgcagacgccaccgacggtcccttctttggcggggagtcccgggcggccgcaaggccgcagggcccgtttgagccccgcc

SEQ ID NO: 743 - DNA, 232 bp, Homo sapiens
  misc_feature 1..232: note = U/M: U (0.01:0.93) in Gallbladder Epithelium
  misc_feature 1..232: note = source = chr3:149198710-149198941; Gene: TM4SF4 (intron)
  source 1..232: mol_type = genomic DNA
cgatctcggctcgctgcaacctccgcctcctggattcacgcgattctcctgtctcagcctcccgggtagctgggattacaggcgccggccaccacgcccagctaattttttgtatttttagtagagactgcatttcactatgttggccaggctggtctcaaacttctgacctcttgatctgcctgccttagcctcccaaagtgctgggattacagtagtgagccaccacgcc

SEQ ID NO: 744 - DNA, 332 bp, Homo sapiens
  misc_feature 1..332: note = U/M: U (0.01:0.93) in Gallbladder Epithelium
  misc_feature 1..332: note = source = chr6:111272867-111273198; Gene: GTF3C6 (Intergenic)
  source 1..332: mol_type = genomic DNA
cgcctcccgggttcatgccattctcctgcctcagctgggactacaggcatccaccaccatgcccggctaattttttatatttttagtagagacagggtttcaccatgttagccaggatggtcttgatctcctgacctcatgatctgcccgcctcagcctcccaaagtgctgggattacaggcgtgagccaccgtgcccagcctaatttttgtatttttagtagagatggggtttcaccatgttggccaggaaggtctcgatctcttgaccttgtgatccacccgcctcggcctcccaaagtgctggaattacaagtgtgagccatcgctccc

SEQ ID NO: 745 - DNA, 313 bp, Homo sapiens
  misc_feature 1..313: note = U/M: U (0.03:0.95) in Gallbladder Epithelium
  misc_feature 1..313: note = source = chr19:55738427-55738739; Gene: TMEM86B (exon)
  source 1..313: mol_type = genomic DNA
cgcctgcagacaggcgtcaggaagcttcgctgctgagggtatttctcaggctgggctgggctgggaggcccaggtccttgcaggaggagagggcctgaacaccggcccttcaagctccctagtcagtcagtcttgggcaccgggctcctgagggctgacagtgtgatgaggagctgggcagcatagtaggtggtcatgatcaccaggtgggcatggggcaggggctgggcgaaggtgtcccaggccagcacgccatcagagagcgtgaagagcagcgcgccccagccggcactcccgccctgggccaggccgc

SEQ ID NO: 746 - DNA, 111 bp, Homo sapiens
  misc_feature 1..111: note = U/M: U (0.05:0.96) in Gallbladder Epithelium
  misc_feature 1..111: note = source = chr1:167885483-167885593; Gene: MPC2 (TTS)
  source 1..111: mol_type = genomic DNA
cgcccaggctggagtgcaaaggcgcgatctcagctcactgcaacctccgcctcctgggttgaagtgattctcctgcctcagcctctggagtagctgggattacaggcgtgc

SEQ ID NO: 747 - DNA, 380 bp, Homo sapiens
  misc_feature 1..380: note = U/M: U (0.05:0.96) in Gallbladder Epithelium
  misc_feature 1..380: note = source = chr3:171469408-171469787; Gene: PLD1 (intron)
  source 1..380: mol_type = genomic DNA
cggaaaatttttccaagtataaaattacaatgtattggtgaggaaatggaactctcatgcactgctgtgaattaaaataaccttttagaaagtaatttcatggccaagcgcggtggctcacgcctgtaatcccagcactttggaaagccaagacaggcggatcacgaggtcaggagatcgagaccatcctggctaacacggtgaaaccccatctctactaaaactacaaaaaattagccgggcatggtgatgggcgcctgtagtgctagctactctttgggaagctggggcaggagaatggtatgaacctgggaggtggagcttgcagtgagccgagatcgcgccactgtactccagcctgggcgacagagcgagactcc

SEQ ID NO: 748 - DNA, 94 bp, Homo sapiens
  misc_feature 1..94: note = U/M: U (0.08:0.97) in Gallbladder Epithelium
  misc_feature 1..94: note = source = chr3:71157777-71157870; Gene: FOXP1 (intron)
  source 1..94: mol_type = genomic DNA
cgtggtggtgcatgcctgtagtcccaactacttgggaggctaagcaggagaatcgcttgaacctggaagacggaggttgcagtgagccgagatc

SEQ ID NO: 749 - DNA, 212 bp, Homo sapiens
  misc_feature 1..212: note = U/M: U (0.04:0.93) in Gallbladder Epithelium
  misc_feature 1..212: note = source = chr12:121412626-121412837; Gene: HNF1A-AS1 (Intergenic)
  source 1..212: mol_type = genomic DNA
cgctctgtcgcccaggctggagtacagtggcgcgatctcggctcactgcaagctccgcatcctgggttcacgccattctcctgcctcagcctcctaagtagctgggactacaggcgcccgccaccacgccaggctaatttcttgtatttttagtagagacggggtttcaccatgttaggcaggatggtctcaatctcctgaccttgtgatcc

SEQ ID NO: 750 - DNA, 273 bp, Homo sapiens
  misc_feature 1..273: note = U/M: U (0.03:0.91) in Gallbladder Epithelium
  misc_feature 1..273: note = source = chr17:60217549-60217821; Gene: MED13 (Intergenic)
  source 1..273: mol_type = genomic DNA
cgcctggtcagcgccttgaactccccgctctggaatggcatctgcagcttcgccttcaaccgctgcatacgcatctgctgggtccgcttatccttctccagtctctttgcccagcggccacagggcaccggggtggcatccttgacccccatctggaccttcctgggtggctggaggctaccacctccactgccacattctgggagccacgccacatccaccctgttcaccaccacctccgacacgctcccagcctgcagctgccgcacccgc

SEQ ID NO: 751 - DNA, 176 bp, Homo sapiens
  misc_feature 1..176: note = U/M: U (0.06:0.93) in Gallbladder Epithelium
  misc_feature 1..176: note = source = chr2:171783089-171783264; Gene: GORASP2 (Intergenic)
  source 1..176: mol_type = genomic DNA
cggctgggtgtggtggctcacacctataatcccagcactttgggagactgaggtgggagaatcatgtgagcccaggagttcgaaacaagcctggcagcataatgagacgtcgtctctgcaaaaaatcaaaaaaattagctgggtgtggtagtgcgtgcctgtagtcttagctactc

SEQ ID NO: 752 - DNA, 158 bp, Homo sapiens
  misc_feature 1..158: note = U/M: U (0.08:0.95) in Gallbladder Epithelium
  misc_feature 1..158: note = source = chr3:171463636-171463793; Gene: PLD1 (intron)
  source 1..158: mol_type = genomic DNA
cggaggccagagccaactccttctgcttgcagggaggtgtggagggagagacgccagtgggaaccaggctgcctgctgcactcacaggccagcgcgagttctgggtgggcgtgggctcggcaagtcccgcactcagagcggctggcgccaccggcccc

SEQ ID NO: 753 - DNA, 390 bp, Homo sapiens
  misc_feature 1..390: note = U/M: U (0.01:0.88) in Gallbladder Epithelium
  misc_feature 1..390: note = source = chr19:55738780-55739169; Gene: TMEM86B (exon,intron)
  source 1..390: mol_type = genomic DNA
cggcaggaccatatccggctcgaggtgctggagcacaaggctgaggtaggggccaggggccaggatgatgagcagcagcaggccgggctgcaggggagagaagccgaaggcccagacgtagaggaggtgggcggtggcaaaggcggccatgcctggcgggagaggggtggggtaccagtgaggaaggcccatcctgggaatggccccgaggtcacccctcagggcctaagagaaggaccatcccagagcaccaggccccaccctggccgagcctccttgcaggtctccccacatgcagtgtccatccttgctctgctcagaactgccaggaggccccaccttcccttggcctccaaagccccatggcctccagctctccagccactctgc

SEQ ID NO: 754 - DNA, 475 bp, Homo sapiens
  misc_feature 1..475: note = U/M: U (0.07:0.94) in Gallbladder Epithelium
  misc_feature 1..475: note = source = chr3:141737928-141738402; Gene: TFDP2 (intron)
  source 1..475: mol_type = genomic DNA
cggagatttactcttgttgcccaggctggactgcaatggcacgatctcggctcaccgcatcctccgcctcccaggttcaatggattctcctgcctcagcctcctgagtagctgggattacaggcatgtgtcaccatgcccaactaattttgtatttttagtagagacggggtttcaccgtgttgcccaggctgatcttgaactcctgacctcaggtaacccgcccgcctcagcctcccaaagtgctgggattacaggcgtgagccactgcgcccggcctatttgcacatttttaagaatgtagtcaattttgtaactttttaatgacttttgtgtcaaacttaaaaaggcctgtgtgtgtttaaatataaaaatgaaggaagtgagactaattgccagggttttcctaaatttacctttgctccctggaagtgtactttatacatgcactttaaacatgctgcattttacttatc

SEQ ID NO: 755 - DNA, 206 bp, Homo sapiens
  misc_feature 1..206: note = U/M: U (0.03:0.89) in Gallbladder Epithelium
  misc_feature 1..206: note = source = chr11:1243400-1243605; Gene: MUC5B (promoter-TSS)
  source 1..206: mol_type = genomic DNA
cggaggtgctaggcttctgcggctcccacctggggcaggcggaggaccccgggcaggtccaggaccccccggagcagctgcttcctcaaccctgccagggttaatgaggaggccccagagtgaggtggaggccaaatgggactcagggccggagcctctggcctggctggatcagggctggcattggacaagcgcagctgactccc

SEQ ID NO: 756 - DNA, 239 bp, Homo sapiens
  misc_feature 1..239: note = U/M: U (0.11:0.95) in Gallbladder Epithelium
  misc_feature 1..239: note = source = chr13:41833664-41833902; Gene: MTRF1 (intron)
  source 1..239: mol_type = genomic DNA
cgtctctactgaaatacaaaaaaaattagctgggcatggtggcaggggcctgtagtcccagctacttgggaggctgaggcaggagaatggcgtgaacccgggaggcggagcttgcagtgagccgagatcccgccactgcactccagcctgggcgacagagcgagactccgtctcaaaaaaaaaaaaaaaaaaaacataaaaataaaaaataaaagcttccttcctggttccactaatgc

SEQ ID NO: 757 - DNA, 481 bp, Homo sapiens
  misc_feature 1..481: note = U/M: U (0.07:0.89) in Gallbladder Epithelium
  misc_feature 1..481: note = source = chr19:55742007-55742487; Gene: PPP6R1 (exon)
  source 1..481: mol_type = genomic DNA
cggggcagagccattgggtatcggaggaggcgtgagggcctgggcactgtcaggggagagaggggatgtgcagaggtcacttcctgccccaccagccccacccccacccccccgccctgctgccctggtgctcacctctggctttggggaagccccaagggctctgggctcttctccccttctgtggtctgggggggctggtgggccccggaggctgggacagaggtagaggggtctctggttgcactgtgggtgagaggcaggtgcggctgtcagcgtggcccccaccgtcacctgctgacaccctcacatcccacccgactgaagtcggctcactgggtgtgtgtctgccacctgccccacggggaggggcctcccgaggacgcagctggctcagcgtggagggacagcacagccctggacaggaagacaagcacccctcttcccgcctcctgtccctgtggaggaggtactcgaggcc

SEQ ID NO: 758 - DNA, 214 bp, Homo sapiens
  misc_feature 1..214: note = U/M: U (0.14:0.93) in Gallbladder Epithelium
  misc_feature 1..214: note = source = chr19:16475134-16475347; Gene: EPS15L1 (intron)
  source 1..214: mol_type = genomic DNA
cgcgggcaggacaggaatgtggcccctctccttccgacagcgcctgccctctcagggcagtccccacacccgagctttctaggtgtctccctttttctatccccagatgtccctcccaccttcagctctactgcggcctcctcctaccccgacctccccggggctgcagagagcagggtgatctggcccagcccgcagaccccgggctggttcc

SEQ ID NO: 759 - DNA, 101 bp, Homo sapiens
  misc_feature 1..101: note = U/M: U (0.01:0.94) in Gallbladder Epithelium
  misc_feature 1..101: note = source = chr16:72996787-72996887; Gene: ZFHX3 (intron)
  source 1..101: mol_type = genomic DNA
cgcgcgcacagaggtaaagaagtctccccaatccgccacatcctgtggctcaagggtctcagggcatctaccactcccccgcaacagccggctctctctcg

SEQ ID NO: 760 - DNA, 397 bp, Homo sapiens
  misc_feature 1..397: note = U/M: U (0.02:0.95) in Gallbladder Epithelium
  misc_feature 1..397: note = source = chr3:171463829-171464225; Gene: PLD1 (intron)
  source 1..397: mol_type = genomic DNA
cggagggtacgccgggtcccccagcactgccggcccgccccactgcgcttgaattctcactgggcctcagccgcctccccgcggggcagagcttgggacctgcagcctgccatgcccgagcccctcccctccgcgggctcccgcacagccggagcctccacgggcaccaccccctgctccacagcacctggtaccattgactgcccaagagctgaggagtgcaggctcgcagcgcgggactggcgggcagctcagcctgcagcctgggcacgggatccactaggcaaagccagctgggctcctaagttgggtggtgacttggagaacatttatgtctagctggaggatcctatatgcaccaatcagcactctgtgtctagctaaaggtttgtaaacg

SEQ ID NO: 761 - DNA, 253 bp, Homo sapiens
  misc_feature 1..253: note = U/M: U (0.02:0.93) in Gallbladder Epithelium
  misc_feature 1..253: note = source = chr6:149238943-149239195; Gene: UST (intron)
  source 1..253: mol_type = genomic DNA
cgggagctcagatgggtggcaagttctagggcctaaggttgccctcagcttcctgggctaagatccgccaggtagaccgtggaactcattttcagaaatgaccgaagcagcatttcttgatctttcttaaaactctgtcgctcttgcttgatactctatactgccctctctgtgcattgataactgtgggtcccgggtggctgcaaaccacatgtgccatgcaccagaaggggcattgttgtgactgaggccg

SEQ ID NO: 762 - DNA, 479 bp, Homo sapiens
  misc_feature 1..479: note = U/M: U (0.03:0.94) in Gallbladder Epithelium
  misc_feature 1..479: note = source = chr2:232263444-232263922; Gene: B3GNT7 (exon)
  source 1..479: mol_type = genomic DNA
cgtgcagcccacggcccacgagggcttcaagactttcggcatctcccggaaccgcaacagccgcatgaacaaggagccgtgctttttccgcgccatgctcgtggtgcacaagctgctgccccctgagctgctcgccatgtgggggctggtgcacagcaatctcacctgctcccgcaagctccaggtgctctgaccccagccgggctactaggacaggccagggcacttgctcctgagcccccatggtattggggctggagccacagtgcccaggcctagcctttggtccccaaggggaggtggagggttgaggcctacgtgccactgggtgtggtggggtgcaggtagccagaaagggacctccctgtgtggataattctaggaaactgaggcccaggaacggttggagctgcccagtctggaggccctctctgaggagcgaggcgccaggccctggcagccctcctgacctgggtccg

SEQ ID NO: 763 - DNA, 127 bp, Homo sapiens
  misc_feature 1..127: note = U/M: U (0.03:0.93) in Gallbladder Epithelium
  misc_feature 1..127: note = source = chr10:111724743-111724869; Gene: LOC100505933 (intron)
  source 1..127: mol_type = genomic DNA
cggagtctcactctgtcgccaggctggagtgcagtggtgcgatcccggctcactgcaaccttcacctcccgggttcaagtgattctcctgcctcagcctccggagcagctgggactacaggcacccg

SEQ ID NO: 764 - DNA, 161 bp, Homo sapiens
  misc_feature 1..161: note = U/M: U (0.02:0.92) in Gallbladder Epithelium
  misc_feature 1..161: note = source = chr1:26188334-26188494; Gene: PAQR7 (exon)
  source 1..161: mol_type = genomic DNA
cgtctctactaaaaatacagaaaattagccaggcatggtggtgcatgcctgtaaccccagctactcgggaggctgaggcaggaaaatcgcttgaacctgggaggcggaggtgcagtgagccgagatcgcaccattttactccagcctagccaacaagagcg

SEQ ID NO: 765 - DNA, 184 bp, Homo sapiens
  misc_feature 1..184: note = U/M: U (0.01:0.91) in Gallbladder Epithelium
  misc_feature 1..184: note = source = chr18:4002742-4002925; Gene: DLGAP1 (intron)
  source 1..184: mol_type = genomic DNA
cgccacattattccggggtcaactattgtttaatcagcatggtcatattgacgtccatgcatgttgttaatacttgagccctcaacagagaatatgtgcacagttcagggatctattgatgtctttctacactgccaggtctctatctctctctccccttcccggtctgtgaaaagtctctgcg

SEQ ID NO: 766 - DNA, 65 bp, Homo sapiens
  misc_feature 1..65: note = U/M: U (0.08:0.97) in Gallbladder Epithelium
  misc_feature 1..65: note = source = chr3:171463730-171463794; Gene: PLD1 (intron)
  source 1..65: mol_type = genomic DNA
cgagttctgggtgggcgtgggctcggcaagtcccgcactcagagcggctggcgccaccggccccg

SEQ ID NO: 767 - DNA, 125 bp, Homo sapiens
  misc_feature 1..125: note = U/M: U (0.02:0.91) in Gallbladder Epithelium
  misc_feature 1..125: note = source = chr10:108487813-108487937; Gene: SORCS1 (intron)
  source 1..125: mol_type = genomic DNA
cggagtctggctctgtcgccaggctggagagcagtggtgcgatctcagctcactgcaacctccgcctcctgggttcaagtgattatcctgcctccacctcccaagtcgctgggacaacaggcacg

SEQ ID NO: 768 - DNA, 134 bp, Homo sapiens
  misc_feature 1..134: note = U/M: U (0.02:0.91) in Gallbladder Epithelium
  misc_feature 1..134: note = source = chr18:60670121-60670254; Gene: PHLPP1 (Intergenic)
  source 1..134: mol_type = genomic DNA
cgtgtgaggacagacgaacacagggcttaaacaacagaaacaggtggcctcatggttctggagctagaagtccaagagcaaggtatcggcagtgttggcgccttctgatgcttcgaggaagcatctgttccacg

SEQ ID NO: 769 - DNA, 190 bp, Homo sapiens
  misc_feature 1..190: note = U/M: U (0.03:0.92) in Gallbladder Epithelium
  misc_feature 1..190: note = source = chr4:91455381-91455570; Gene: CCSER1 (intron)
  source 1..190: mol_type = genomic DNA
cgccattctcctgcctcagcctcccgagtagctgggactacaggcgcccgccaccacgcctggctaattttgtgtatttttagtagagacggggtttcaccatgttagccagtatggtcttgatcttctgacctcgtgatccgcccgcctcggcctcccgaagtgctgggattacaggcgtgagccaccg

SEQ ID NO: 770 - DNA, 217 bp, Homo sapiens
  misc_feature 1..217: note = U/M: U (0.05:0.94) in Gallbladder Epithelium
  misc_feature 1..217: note = source = chr10:4161365-4161581; Gene: KLF6 (Intergenic)
  source 1..217: mol_type = genomic DNA
cgttctgcaagtccctaagccaggtgaatatctggaggaggatgtgagttcctcctccacctccctcacattgtcaggtaggggtggctgagctccagaaggattcacctctggacattgcccccatccatcgcttcctcctaaggccacccctgtaaccagtgcgaggctgccgagacaaggttcattccatcgctgggccaggccagagttaccg

SEQ ID NO: 771 - DNA, 433 bp, Homo sapiens
  misc_feature 1..433: note = U/M: U (0.02:0.91) in Gallbladder Epithelium
  misc_feature 1..433: note = source = chr15:96990472-96990904; Gene: MIR1469 (Intergenic)
  source 1..433: mol_type = genomic DNA
cggagtgatgcaaagctttttaccctggtggtgctaggagtgggtcccctccttcttggtgcctaaatggtcatggaatttctattaaatagctggagagaataccatgggaacctagagagaagcggacctttaaaatattgtgcttatttatttatctatttgagacagagtgtcgctgtgttgcccaggctggagtgcagtggtgcgatcttggctcacctctgcgtcctgggttcatgcgattctcctgcctcagcctcctgagtagctgggattacaggcatgcgccaccacacccagctaatttttgcatttttagtagagatggggctttaccttgttggccatgttgatcttgaactcctaacttcaactgatctacccaccttggactcccaaagtgctgggattacaggcgtgagctactgcg

SEQ ID NO: 772 - DNA, 109 bp, Homo sapiens
  misc_feature 1..109: note = U/M: U (0:0.88) in Gallbladder Epithelium
  misc_feature 1..109: note = source = chr11:1249946-1250054; Gene: MUC5B (intron)
  source 1..109: mol_type = genomic DNA
cgcccacgcggggggccagccgcggaactggaggtgccctgagctctgccgtgagtgctcccagggccttcgccagggattgtgccagagagaaggggcagggggagcg

SEQ ID NO: 773 - DNA, 116 bp, Homo sapiens
  misc_feature 1..116: note = U/M: U (0.03:0.91) in Gallbladder Epithelium
  misc_feature 1..116: note = source = chr7:156286975-156287090; Gene: LINC00244 (Intergenic)
  source 1..116: mol_type = genomic DNA
cgcgacttgctgatgtgcacgtgtatttcaaatcaataccgggtttacgtgtatacaaacacacagccagctaaacaccttctaaactcggaacattaatacctagacaggtgccg

SEQ ID NO: 774 - DNA, 372 bp, Homo sapiens
  misc_feature 1..372: note = U/M: U (0.01:0.89) in Gallbladder Epithelium
  misc_feature 1..372: note = source = chr12:93502354-93502725; Gene: LOC643339 (intron)
  source 1..372: mol_type = genomic DNA
cgccgacggctgcagacagcaggacaggcagcctgacggagctctgtattcactttattctaatctgttgggggcaggggaattcatgggtccacactctatgaatccatgggtccacagactaattacatcatacattgtctgattaatcctcccgataattgatcctgctctggcatgagatagctgtgtgaccttgaaccaatcattaacctttgggcctgtcctcttctaatgccagggtaagaattatcaacatatatgttgaaatccccaaggattatgccaaggaatggaacagagaggaagacagtgagacatgttgagggggtagaggacttggatagagaagagtgaggcagagaagcagcg

SEQ ID NO: 775 - DNA, 144 bp, Homo sapiens
  misc_feature 1..144: note = U/M: U (0.03:0.9) in Gallbladder Epithelium
  misc_feature 1..144: note = source = chr19:1293440-1293583; Gene: EFNA2 (intron)
  source 1..144: mol_type = genomic DNA
cggacgcaccccgagtgtccaacagccgggaggaccatccccttgcacggaggggaaagggagcctctgagaggaggccggacctcgagacccaagggttcaaatccagacgcaagcccagaactgcaagattccgaagccccg

SEQ ID NO: 776 - DNA, 300 bp, Homo sapiens
  misc_feature 1..300: note = U/M: U (0.04:0.91) in Gallbladder Epithelium
  misc_feature 1..300: note = source = chr2:365054-365353; Gene: FAM150B (Intergenic)
  source 1..300: mol_type = genomic DNA
cgtcgccttattctctgcctggcatctgagaaacctcgatgagcatagagcagatttagaagcctcatcagtcccatacggctggcctagaacagagaccggcgatgacctaatcccggccagagccgctcatgttgccgatgagaaagctcaggccagggagggaggggacggggctcgcctgggctgatgccccatggctctcatctccaggccttggtggctctctctgcatctttttgttttcttgcacatttatttccatgtgtcaagaaagaaggcatgttcaataccctgtcg

SEQ ID NO: 777 - DNA, 328 bp, Homo sapiens
  misc_feature 1..328: note = U/M: U (0.02:0.89) in Gallbladder Epithelium
  misc_feature 1..328: note = source = chr18:60672273-60672600; Gene: PHLPP1 (Intergenic)
  source 1..328: mol_type = genomic DNA
cggaagaatgttgatgccagggccttacccgagaccctggttccattggcatggggtggggccaacgtgagtatttccttaagcctctagtgagtctgttgtcctgccagggtagaagatcacagtgggtaaaggaccagaggagaaatggagagtccttttttccagctcttgctgaagaaaggacccaaggactctgtttaacacaaagctgaaaccagggcactggcgattccaagaagagtaggttccgaccaatgctgtcacctctacagcctgtggagagggaggacagggccctgcgcagctcgatgtcacagtgtcaccg

SEQ ID NO: 778 - DNA, 400 bp, Homo sapiens
  misc_feature 1..400: note = U/M: U (0.02:0.89) in Gallbladder Epithelium
  misc_feature 1..400: note = source = chr19:40472611-40473010; Gene: PSMC4 (Intergenic)
  source 1..400: mol_type = genomic DNA
cgtgtgtaggaaaatatcgaagaggattaatgattatgtgtcacacccaaaccttgatgggattttgctctcatgtaacttctgagaacatgagctgcagccacctgtataaaaaccgcaggctgaaaccctccggagcagtccaacggttactttgaaagactctcccaggttgtgatcctcagtaagacttctgaatcaaactaactttaattctctaaaagtaggtttttctctttccttttttttttttttttttttttttgagacagggtctctcactctgtcgcccatgctggagtgcagtggcacaatcttggctcactggcagccttgacctcctaggctcaagtgattctcccccctgagcctcctgagtggctggaactacgggcgcacg

SEQ ID NO: 779 - DNA, 169 bp, Homo sapiens
  misc_feature 1..169: note = U/M: U (0.03:0.89) in Gallbladder Epithelium
  misc_feature 1..169: note = source = chr13:24447224-24447392; Gene: MIPEP (intron)
  source 1..169: mol_type = genomic DNA
cgttcggatgaatacaaaattccacctgggggactgataaaagcttcgcaatgtggcgtgaggatgaagccttcatggggacttcagccagggaaacctggtgagcaggcctaggaggaggacagcaaacacatgggggaggacactgtgtatgaggggctgacagccg

SEQ ID NO: 780 - DNA, 181 bp, Homo sapiens
  misc_feature 1..181: note = U/M: U (0.03:0.89) in Gallbladder Epithelium
  misc_feature 1..181: note = source = chr17:16304390-16304570; Gene: TRPV2 (Intergenic)
  source 1..181: mol_type = genomic DNA
cgtcccacctgacgcgatatcccacaggtgtggaggggcaggccaccccttcactttgggaggccgaggcaggtggatcagtaggtcaggagaccgagaccatcctggctaacatggtgaaaccccgtctctactaaaaatacaaaaaaaaaaaaaaattagccaggcgtggtggcgggcg

SEQ ID NO: 781 - DNA, 219 bp, Homo sapiens
  misc_feature 1..219: note = U/M: U (0.05:0.91) in Gallbladder Epithelium
  misc_feature 1..219: note = source = chr10:12452740-12452958; Gene: CAMK1D (intron)
  source 1..219: mol_type = genomic DNA
cgtttaatgttgtgaccagaggcagagtcattctagatcttaggtgcgacctgagctttgtggagcctcagttctgtcttgaaagatattcttcactctgccctcttttattgattaattttaggcaatctctgcgggtatttccagtgctcttggcttttcttgactttgtactaattgccaaaggcggcagaggatgaggacttgttggggtggtcg

SEQ ID NO: 782 - DNA, 251 bp, Homo sapiens
  misc_feature 1..251: note = U/M: U (0.05:0.91) in Gallbladder Epithelium
  misc_feature 1..251: note = source = chr2:54918167-54918417; Gene: EML6 (Intergenic)
  source 1..251: mol_type = genomic DNA
cggtggctcacgcctgtaatcccagcacttcgggaggctgaggcgagtggatcacaaggtcaggagttcgagaccagcctggtcaatatggtgaaaccccatctctactaaaactacaaaaattagctaggcgtggtgacgggcacctgtagtcccagctactcgggagtctgaggcaggagaatcgtttaaacctgggaggcagacgttgcagtgagctgagatcgtcccactgcactccagcctgggcg

SEQ ID NO: 783 - DNA, 251 bp, Homo sapiens
  misc_feature 1..251: note = U/M: U (0.02:0.88) in Gallbladder Epithelium
  misc_feature 1..251: note = source = chr20:56510607-56510857; Gene: MIR4532 (Intergenic)
  source 1..251: mol_type = genomic DNA
cgcagggtgaggaggctgtgcacgctcactcaggcctctcttcctcttcttgtaaagccaccagtccccctcgcgtgataactcattaacccattaatctattaatccatgaatggatcagtccattcatgacggcagagctttcatgatcgaactggaaccgcctttgcaaaaattacgaggtgaaaaaattatgacagtgaaagagatctgatctaaccgacccccatcttgcctttaactccaaaccg

SEQ ID NO: 784 - DNA, 416 bp, Homo sapiens
  misc_feature 1..416: note = U/M: U (0.04:0.9) in Gallbladder Epithelium
  misc_feature 1..416: note = source = chr11:120407149-120407564; Gene: GRIK4 (Intergenic)
  source 1..416: mol_type = genomic DNA
cgccctgggctgcagacaggtggatgcggagctggttgaacaattggacctggaacattgattacagattgggggggcctggagagaggtcacatttatctgtttatttattcaggtactcgcttagtcacgtgacagatattaaccaaacccttcctttgggtctctggtgccagagggtgtcgtccttgggcctgttctggttgacgtatgtattgatggctcaggtgaggagggagaaggtggattatccaattgatatgaggctcggcagggaaagaagctaccctaccggatgagtggggagtgatcaataggaagaacaatggacccacaccaacaagatggaattaaccaccagcaaaggaagagtcctgcatctagagttctaaaaagtcaattacgtaaacagagcg

SEQ ID NO: 785 - DNA, 210 bp, Homo sapiens
  misc_feature 1..210: note = U/M: U (0.07:0.92) in Gallbladder Epithelium
  misc_feature 1..210: note = source = chr1:19704327-19704536; Gene: CAPZB (intron)
  source 1..210: mol_type = genomic DNA
cggagcaggaagaaatctcaacagatctagcaaaacgctttttaaggaaggtgccgaggccacaaacaactcaggattcaggaagatgtttgctgctctgctcctgctctgtaaggactgcacttatcttggcctgagagcagctggaggcagaggcccctgagctccaggtcagaagtgagcgtgtggtatggcaaaaaaatccatacg

SEQ ID NO: 786 - DNA, 246 bp, Homo sapiens
  misc_feature 1..246: note = U/M: U (0.08:0.93) in Gallbladder Epithelium
  misc_feature 1..246: note = source = chr3:101820487-101820732; Gene: LOC152225 (Intergenic)
  source 1..246: mol_type = genomic DNA
cgggacctgtcgggaggtaggggtaaggggagggagagcattaggacaaatacctaatgcatgcagggcttaaaacctagattatgggttgataggtgcaacaaaccaccatggcacatgtatacatatgaaacaaacctgcacattctgcacatgtatcccagaacttaaagtgaaataaaaaataaataggaccggccacggtggctcatgcctgtaatcccaacattttgggaggctgacgcg

SEQ ID NO: 787 - DNA, 329 bp, Homo sapiens
  misc_feature 1..329: note = U/M: U (0.05:0.9) in Gallbladder Epithelium
  misc_feature 1..329: note = source = chr15:59567074-59567402; Gene: MYO1E (intron)
  source 1..329: mol_type = genomic DNA
cgatactgaagattcctagccccagtctctaatgctcaaagaggactcattttccagtctgctgtctatataacaaggtgacagtggttacaatatgcaaaggaattagttatttgatttgtggagggtgttctacttactactgcaagcaatcctaggagagaggggttaacattcccatgccatataggaggaaactgagatctcccgactagtaagtagcaaaagccaagatgtgaaccgaagattcgatgactatggacgcatccaaacgtggtttcttcacagtctcatacatgaatgactgacttattggatatttctacccg

SEQ ID NO: 788 - DNA, 346 bp, Homo sapiens
  misc_feature 1..346: note = U/M: U (0.05:0.9) in Gallbladder Epithelium
  misc_feature 1..346: note = source = chr17:73524013-73524358; Gene: LLGL2 (intron)
  source 1..346: mol_type = genomic DNA
cgcgcagcaccatgcacagctaattttctattttttttttagaaagggggttttgccatgttgcccaggctagtcttgaactcctgggctcaagtgatcctcctgcctcccaaagtgttaggattacaggcatgaactgccacgccagacccgttagtataaataactttttattatttttatttatttatttatttattttgagacagagtctcgctctgtcacccaggctggagtgcagtggcgagatctcggctcactgcaagctcctcctcctgggttcacgccattctcctgcctcggcctcccgagtagctgggaccacaggcgcctgccatcacgcccg

SEQ ID NO: 789 - DNA, 358 bp, Homo sapiens
  misc_feature 1..358: note = U/M: U (0.05:0.9) in Gallbladder Epithelium
  misc_feature 1..358: note = source = chr6:158482805-158483162; Gene: SYNJ2 (intron)
  source 1..358: mol_type = genomic DNA
cgcaggcaagacgctctttgtgggttttgtccccccagggcctttgtcctgtgcttcccttttggggtcaactgcctggtccactgtgagcttccagctaaagcacgtcctgcggcgagtcaccttggttagccgcacgggtcaagctctgcaaggagcttgccctcctcgtcctcccttccctctgctcccctcaccgccctcccctcctcttttcagaagctgctctgggcttcttgccacgcgggcgacacgcctatgatcaattttgacttccatcagtttgccaaaggtgggaagctagagaaattggagaccctcttgaggccacagttaaagctgcactgggaagacttcg

SEQ ID NO: 790 - DNA, 393 bp, Homo sapiens
  misc_feature 1..393: note = U/M: U (0.07:0.92) in Gallbladder Epithelium
  misc_feature 1..393: note = source = chr8:28491963-28492355; Gene: EXTL3 (Intergenic)
  source 1..393: mol_type = genomic DNA
cgggtccctccgtttcccacccctccacaccttcccaacctggcggaatcctcagccttcaagattctgctgaagtgccacctcctcttccgggaggcccttcctggctctttctgcccatcctggaagagggaagagatgaccacatctgcttttttttttttttttgagatggagtctcactgtgttgcccaggctggagtgcagtggcggaatctcagctcattgcaacctccacccccgggttcaagtgattatcctgcctcagcctctggagtagctgggattacaggcgtgcaccaccacacccagctaattttctgtatttttagtagagacgggttttgccatgttggccaggctggtcttgaactcctgacctcaagtgatccg

SEQ ID NO: 791 - DNA, 426 bp, Homo sapiens
  misc_feature 1..426: note = U/M: U (0.08:0.93) in Gallbladder Epithelium
  misc_feature 1..426: note = source = chr18:60667371-60667796; Gene: PHLPP1 (Intergenic)
  source 1..426: mol_type = genomic DNA
cgcccagcctgggatacctggtgtctttggactcctgagagttcgtcatgtttatagctctgcagtatgctcctgaggacagatgctgtcactccaggtgcttctccacctggacagacagatctcagtgacaacgctgaagaaataaatttaaaaaggaattggagtccctgcgcagtggctcacgcctgtaaccccagcactttgggaggcggaggcggtcggatcacgaggtcaagagatcgagaccatcctggccaagatggtgaaatcttgtctctactaaaaatacaaaaattagctgggtgtggtggcgggcacctgtaatcccagcaacttgggaggctgaggcaggagaattgcttgaacctgggagtcagaggttgcagtgagccgagatcgtgccaccacactccagcctgggcg

SEQ ID NO: 792 - DNA, 254 bp, Homo sapiens
  misc_feature 1..254: note = U/M: U (0.06:0.9) in Gallbladder Epithelium
  misc_feature 1..254: note = source = chr8:29986696-29986949; Gene: LEPROTL1 (intron)
  source 1..254: mol_type = genomic DNA
cgtgagccactgcaccccaccaaggccactacaaatccttgccatctctgttcatcaagaccctcactgtgttatgttctgagtgctaagattgggctcgttgtttgccttcatgttaatcagtgatattgacctataactttctaagttatctataacttctaacttagtattatctttgcgaagttttaacgattaaaagtgtattagtctgttctcgtagtgctataaagaactacctgaggccgggagcg

SEQ ID NO: 793 - DNA, 311 bp, Homo sapiens
  misc_feature 1..311: note = U/M: U (0.05:0.89) in Gallbladder Epithelium
  misc_feature 1..311: note = source = chr16:48449938-48450248; Gene: SIAH1 (Intergenic)
  source 1..311: mol_type = genomic DNA
cgtgaaagtctagggttgggggcacgaggtgaaactagaaggcaaagctgaagagggaagcacagggcggttcttgaagggccttctttttttttttcaaagaacaaaaatgtgattggggttatttattagaagagctcgccaattcatttcatttttttttttttttagtatttattgatcattcttgggtgtttctcggagagggagatttggcagggtcataggacaatagtggagggaaggtcagcagataaacatgagaacaagggcctctggttttcctaggcagaggaccctgcggccttccg

SEQ ID NO: 794 - DNA, 160 bp, Homo sapiens
  misc_feature 1..160: note = U/M: U (0.04:0.87) in Gallbladder Epithelium
  misc_feature 1..160: note = source = chr11:1247043-1247202; Gene: MUC5B (intron)
  source 1..160: mol_type = genomic DNA
cgcctctccaagcagccatgcgtctgacagagaccctccctgggtcccctgcccaggacaatacccagcacccgaggcggagcttggtgctccaaagaagaggaaagtgcagagcagagagacatgcacacagaagcacacgcgtggacaggcacatgcg

SEQ ID NO: 795 - DNA, 262 bp, Homo sapiens
  misc_feature 1..262: note = U/M: U (0.05:0.88) in Gallbladder Epithelium
  misc_feature 1..262: note = source = chr4:100907155-100907416; Gene: LOC256880 (Intergenic)
  source 1..262: mol_type = genomic DNA
cgtctcgactaaaaacacacacaaaaagttagccaggagtggtggcaggagcctgtagtcccagctacttgggaggctgaggcaggagaatggcgtgaacccgggaggcagagcttgcagtgagctgagatcaagccaccgcactccagtctgggcaacagagtgagactctgtctggaaaaaaaaaaaaaaaaaaattagccgggtgtggtggcatgtgcctgtaatcccagcaactctggaggctgagagaggagaatcg

SEQ ID NO: 796 - DNA, 282 bp, Homo sapiens
  misc_feature 1..282: note = U/M: U (0.05:0.88) in Gallbladder Epithelium
  misc_feature 1..282: note = source = chr13:107388914-107389195; Gene: LINC00443 (Intergenic)
  source 1..282: mol_type = genomic DNA
cgtctagtttaggaggcgagggacacagaaacaaaattttgtattgaaaattaatatgtttcccataagccagttgatacatgtatttcctaacacttcttacattaaatattaattaactagaataattattagcttaaactgtttgggccaggtcctctctagtttgtaaattactaactggttatgaatcatagattcagggaccgcctcacttcttttcagcatctttcctggatacctaagggcctaagagttaacacggcacccctccgcctgccg

SEQ ID NO: 797 - DNA, 442 bp, Homo sapiens
  misc_feature 1..442: note = U/M: U (0.09:0.92) in Gallbladder Epithelium
  misc_feature 1..442: note = source = chr12:121413009-121413450; Gene: HNF1A-AS1 (Intergenic)
  source 1..442: mol_type = genomic DNA
cgcctcccaggttcaagtgattttcctgcctcagcctcctgaggttaatttttgtatttttattacagatggggtttcaccatattggtcagggtggtctcgaactcctgacctcaggtgatctacccaccttggcctcccaaaagtgctgggattacaggcgttagccaccacgcccggccaaaattttcttaatttaaaaatttaactcaatatattttttaaaaattatcatttcaagaagtgacattagccatctttcaagtgcttggtagccacatgtggctggtgggtgagggcagggcctgtttttttttttttttttttttttgagacagagttttgctcttgttgcccaaactggagtgcaatggcgtgatctcggctcactgcaacctccgcctcctgggttcaagtgattctcctgtctcagcctcctgcg

SEQ ID NO: 798 - DNA, 71 bp, Homo sapiens
  misc_feature 1..71: note = U/M: U (0.12:0.94) in Gallbladder Epithelium
  misc_feature 1..71: note = source = chr2:235857897-235857967; Gene: SH3BP4 (Intergenic)
  source 1..71: mol_type = genomic DNA
cgtatatatacccacacacatcacgcacatatgtatcatctacacatgcacgcacccaacgcgtgcaaacg

SEQ ID NO: 799 - DNA, 223 bp, Homo sapiens
  misc_feature 1..223: note = U/M: U (0.07:0.89) in Gallbladder Epithelium
  misc_feature 1..223: note = source = chr21:44880700-44880922; Gene: LINC00319 (Intergenic)
  source 1..223: mol_type = genomic DNA
cggcaggtgaggcacctgcacgcacacctagctcgactccccaggcccaccctgcagaccctcggccctctcccttcttcccacccaccactctggagacggggcctccggtcctggccgcccctgtggaagaatgagggtgagcgaggggctgggtcagcagcacggcagtgggggagccacccagcctcctggaggaagcggccgggcagcgctggcaccg

SEQ ID NO: 800 - DNA, 268 bp, Homo sapiens
  misc_feature 1..268: note = U/M: U (0.09:0.91) in Gallbladder Epithelium
  misc_feature 1..268: note = source = chr17:36088054-36088321; Gene: HNF1B (intron)
  source 1..268: mol_type = genomic DNA
cggctcactgcaacctccacttcccgcctcccgggttcaagcgattctcctgcctcagcctccggagtcgctgggattacaggcacctgccaccacgcccagctgatttttgtgtttttagtagagatggggtttcaccatgttggtcaggctggtctcaaactcctgacctcaagtgatctgcctgccttggccttccaaagttctgggatttcaggtgtgagccaccacacctagcccacagagcgttttttttttttttgagacg

SEQ ID NO: 801 - DNA, 352 bp, Homo sapiens
  misc_feature 1..352: note = U/M: U (0.05:0.87) in Gallbladder Epithelium
  misc_feature 1..352: note = source = chr8:29987038-29987389; Gene: LEPROTL1 (intron)
  source 1..352: mol_type = genomic DNA
cggtgaaaccccgtctctgctaaaaatacaaaaattagctgggtgtggtggcatgtgcccgtagtcccagctacttggaagggtgaggcaggagaatcgcttgaacctaggaggcagaggttgcaatgagctgagatcacaccactgcacaccactgcactccagcctgggtgacagagtgagaccctgtcacacacacacacacacacacacacacacacacacacacacacacaaagaactacctgagactgggtaattaataaagaaaagaggtttaattggctcacagttttacaggctatacaggaagcatggctggggaggtttcaggaaacttaaaatcgtggcg

SEQ ID NO: 802 - DNA, 392 bp, Homo sapiens
  misc_feature 1..392: note = U/M: U (0.09:0.91) in Gallbladder Epithelium
  misc_feature 1..392: note = source = chr16:81819407-81819798; Gene: PLCG2,PLCG2 (intron,exon)
  source 1..392: mol_type = genomic DNA
cgatgccttgccactagaaccttctcctaaaactcatcctgattgacatgagacaggattttggttcctgaagttcatgccctgttaactaaacccctttcagtactaaaatcagttcactctttaattctgccctttcagcttcctgatttctcccgattccttccttctccctggagcggccgacaatgtccaccacggtcaatgtagattcccttgcggaatatgagaagagccagatcaagagagccctggagctggggacggtgatgactgtgttcagcttccgcaagtccacccccgagcggagaaccgtccaggtgatcatggagacgcggcaggtggcctggagcaagaccgctgacaagatcgagggcttctgtgagtactcg

SEQ ID NO: 803 - DNA, 100 bp, Homo sapiens
  misc_feature 1..100: note = U/M: U (0.1:0.91) in Gallbladder Epithelium
  misc_feature 1..100: note = source = chr17:79914295-79914394; Gene: NOTUM (intron)
  source 1..100: mol_type = genomic DNA
cgcagcgactaggccccctggcacacagccggcctcctccctggtacacagccggcctcctccctggtacacagccggcctcctccctggtacacagccg

SEQ ID NO: 804 - DNA, 110 bp, Homo sapiens
  misc_feature 1..110: note = U/M: U (0.11:0.92) in Gallbladder Epithelium
  misc_feature 1..110: note = source = chr11:39868461-39868570; Gene: LRRC4C (Intergenic)
  source 1..110: mol_type = genomic DNA
cgcacctggaaaatcgggtcactcccacccgaatactgcgcttttcccaccggcttaaaaaatggcgcaccacgagattatatcccgcacatggctgggagggtcctacg

SEQ ID NO: 805 - DNA, 127 bp, Homo sapiens
  misc_feature 1..127: note = U/M: U (0.14:0.95) in Gallbladder Epithelium
  misc_feature 1..127: note = source = chr12:100969290-100969416; Gene: GAS2L3 (intron)
  source 1..127: mol_type = genomic DNA
cgctctgtcgcccatgctggagtgcagtggcgcgatctcggctcactgcaacctctgcctcccgggttcaagcgattctcctgcctcagcctcccgagtagttggactccaggtgtgtgccactacg

SEQ ID NO: 806 - DNA, 140 bp, Homo sapiens
  misc_feature 1..140: note = U/M: U (0.13:0.94) in Gallbladder Epithelium
  misc_feature 1..140: note = source = chr5:111559671-111559810; Gene: EPB41L4A (intron)
  source 1..140: mol_type = genomic DNA
cggagtcttactctgtcacccatactggagtgcagtggcgcgatctcggctcattgcagcctccgccccgcaggttcaagcgattcttctgcctcagcctcctgagtagctgggattacaggcgcctgccactgcgtccg

SEQ ID NO: 807 - DNA, 180 bp, Homo sapiens
  misc_feature 1..180: note = U/M: U (0.11:0.92) in Gallbladder Epithelium
  misc_feature 1..180: note = source = chr11:39868259-39868438; Gene: LRRC4C (Intergenic)
  source 1..180: mol_type = genomic DNA
cgtgagcgacgcagaagacgggtgacttctgcatttccagctgaggtactgggttcatctcactagggagtgccagacagtgggtgcaggtaagtgggtgcgcgcaccatgtgcgagctgaagcagggccaggcattgcctcacctgggaagcgcaaggggtcagggagttccctttccg

SEQ ID NO: 808 - DNA, 209 bp, Homo sapiens
  misc_feature 1..209: note = U/M: U (0.12:0.92) in Gallbladder Epithelium
  misc_feature 1..209: note = source = chr3:195071885-195072093; Gene: ACAP2 (intron)
  source 1..209: mol_type = genomic DNA
cgcccaggctggagtgcagtggtgtgatctcggctcactgcaacctccgcctcccaggttcaagtgattctcctgcctcagcctcccaagcagctgggattacaggggcatgccaccacgccagttaatttttgtacttttagtagagacagagtttcgccatgttgcccaggatggtcatgaactcctgacctcaagtgatccgcccg

SEQ ID NO: 809 - DNA, 220 bp, Homo sapiens
  misc_feature 1..220: note = U/M: U (0.09:0.89) in Gallbladder Epithelium
  misc_feature 1..220: note = source = chr15:85400424-85400643; Gene: ALPK3 (exon)
  source 1..220: mol_type = genomic DNA
cgagggccacagtcatcaggcccagtcgaggccaagcaggaggacagcccgttccagtgccccaaggaggagcggccagggggagtgccgtgtatggatcagggtggctgtcctctagctggcctgagccaggaggtacccacgatgccttctcttcctggaactgggctgacagctagcccaaaggcggggccgtgtagcaccccgacttctcagcacg

SEQ ID NO: 810 - DNA, 263 bp, Homo sapiens
  misc_feature 1..263: note = U/M: U (0.06:0.86) in Gallbladder Epithelium
  misc_feature 1..263: note = source = chr19:55717579-55717841; Gene: PTPRH (intron)
  source 1..263: mol_type = genomic DNA
cgacagagcaagactctgcctcaaaaaaaaaaaaaattgtatctgatggactacataaaatctctcatagtaatttagtttgtttttcttttcttttgttttcttttgttttcttttctttttttttttttgagacagggtttctctctgttgcccaggctggagtgcagcggtccaatcagagctcactgcaacctctgcctcccgggctcaagcgatcctctcacctcagcctcccgagtagatgggaccacgggaacacg

SEQ ID NO: 811 - DNA, 475 bp, Homo sapiens
  misc_feature 1..475: note = U/M: U (0.11:0.91) in Gallbladder Epithelium
  misc_feature 1..475: note = source = chr9:116673851-116674325; Gene: ZNF618 (intron)
  source 1..475: mol_type = genomic DNA
cgcccgccttggcctcccaacgtgctgggatcataggcgtgagccaccgtgcctggccggtattgttttttctttactaataggtgggatggatacaaattctctcctgatttttttaaaaaagctcaacattataagattcctgtttcccagtgttattgcaagccttgagggttttgactgcgggtattccatgaggtggctgtaccctcgacagcccaacagtggcctgttttgggggatgttttgctatttacaggttttccttattgtaaatattgctgaaaagaatatcttgtaagtgaattcattttcatgttttagattgtttctcagacttttcaatctagaaggagtcttgttgatcacccagaccacttctttagtgttagcttgtcctagaacgcgaaggagggcctgaaacacagattgctgggccccacccccagagattctgattcagcaggtgtgggcg

SEQ ID NO: 812 - DNA, 44 bp, Homo sapiens
  misc_feature 1..44: note = U/M: U (0.09:0.88) in Gallbladder Epithelium
  misc_feature 1..44: note = source = chr11:60527423-60527466; Gene: MS4A15 (intron)
  source 1..44: mol_type = genomic DNA
cggagaccggcgccggtgcagttcctcgcatgctgagtgtgccg

SEQ ID NO: 813 - DNA, 66 bp, Homo sapiens
  misc_feature 1..66: note = U/M: U (0.1:0.89) in Gallbladder Epithelium
  misc_feature 1..66: note = source = chr15:70929583-70929648; Gene: UACA (Intergenic)
  source 1..66: mol_type = genomic DNA
cgcggtggctcacacctgtaatcacagcactttggaaggcgggtggatctcgaggtcaagagatcg

SEQ ID NO: 814 - DNA, 314 bp, Homo sapiens
  misc_feature 1..314: note = U/M: U (0.14:0.93) in Gallbladder Epithelium
  misc_feature 1..314: note = source = chr12:50955346-50955659; Gene: DIP2B (intron)
  source 1..314: mol_type = genomic DNA
cgatactcccgaagatgctgtctataatttttgcatatataaatttgttgtattattgattgattgagacagagtcgctttgttgcctaggctggaatgcagtggcatgatctctgcttactgcaacctctgccttccgggttcaagtgattcttgtgcctcagcctcctgagtagctgggattacaggcgtgtgcaaccatgcttggctaatttttgtatttttagtagagactgggtttcacccatgttggccagggtggtctcgaacttctggcctcaagtgatccacccatgtcggcctcctaaaatgcg

SEQ ID NO: 815 - DNA, 378 bp, Homo sapiens
  misc_feature 1..378: note = U/M: U (0.13:0.92) in Gallbladder Epithelium
  misc_feature 1..378: note = source = chr1:16444223-16444600; Gene: EPHA2 (Intergenic)
  source 1..378: mol_type = genomic DNA
cgatagcttagagcaaagccctgtggcaaggggctgggctcgaaccttggcgctgccacttgctagctgtggagctctgggcaaacccttcacttctctgcgcttcatgatagggtgactggatcaattattgtccacttaaagacagaaggcgaaagggggagctattacaaccaattataccaggacaacaggccaaagccaggactgtcctggacagacgggagatatggcccccagcttatggggcagtagtaggactaggtcacagagtttttgggaggattaaatgagttaatccttgggaaacactttgaacagtggcagcacatgcaatgcgcttaataattattagctattggcattttattacatacg

SEQ ID NO: 816 - DNA, 110 bp, Homo sapiens
  misc_feature 1..110: note = U/M: U (0.11:0.89) in Gallbladder Epithelium
  misc_feature 1..110: note = source = chr11:64790716-64790825; Gene: ARL2-SNX15 (intron)
  source 1..110: mol_type = genomic DNA
cgtcaggtgggacgagagactgagaaaagaaataggacacaaagtatagagaaagaaaagtgggcccaggggaccggcgctcagcataccaaggacccacactgggaccg

SEQ ID NO: 817 - DNA, 301 bp, Homo sapiens
  misc_feature 1..301: note = U/M: U (0.16:0.92) in Gallbladder Epithelium
  misc_feature 1..301: note = source = chr16:57638222-57638522; Gene: GPR56 (Intergenic)
  source 1..301: mol_type = genomic DNA
cgctctgtcgcccaagctggtgtgcagtggtatgatctcagctcactgcggcctccacctcctgggctcaggcgagtctcccacttcagcctccccagtagctgggattacaggtgcatgccaccatacatggctaatttttttattttttgtagagatggcatttcaccatgtcacctaggttggtcttgaactcctgggctcaagccattcgccattcgctggccttggcctccccaagtgctgggattacaggcatgagccaccatgcccagcctccgaacattttaaaatgaaaacg

SEQ ID NO: 818 - DNA, 135 bp, Homo sapiens
  misc_feature 1..135: note = U/M: U (0.11:0.86) in Gallbladder Epithelium
  misc_feature 1..135: note = source = chr21:44838717-44838851; Gene: SIK1 (intron)
  source 1..135: mol_type = genomic DNA
cgaccacatgcagggcaggctctaaacatcaactgtgtggtctcagggattaaaacaaatggcaaatcctgagaagtccaacctgagaggctgccgggcaaaacgtccattctaaattagcccaccctcacgtcg

SEQ ID NO: 819 - DNA, 363 bp, Homo sapiens
  misc_feature 1..363: note = U/M: U (0.15:0.9) in Gallbladder Epithelium
  misc_feature 1..363: note = source = chr18:3176288-3176650; Gene: MYOM1 (intron)
  source 1..363: mol_type = genomic DNA
cgtgaagtgcaccagcaatacatcacacttcttgatgaagtgctttcccctcctctataaacttacatgaaaaatgttgacgattcacagcaatatggctgaatatcatgtaacatagttaccgaaaaaagccagttacaaaacagtgcacagcagaatgattgcttttatatagaatacaaaaacaaaaaactaattaatgctactagaaatcagtagtgtgttgggacgcaagaaggaggcttcttgggtgtcaataatgtttattgatttgggtgtcagttacatgggtgtgtgcaatctacaaaaattcactaaagcaattcatttgtaaaagtgtgcagtctttgggaagccgaggcg

SEQ ID NO: 820 - DNA, 258 bp, Homo sapiens
  misc_feature 1..258: note = U/M: U (0.21:0.95) in Gallbladder Epithelium
  misc_feature 1..258: note = source = chr11:65607111-65607368; Gene: SNX32 (intron)
  source 1..258: mol_type = genomic DNA
cggctggaaaataagtaactaaaaaaattttttttgtgaaccatgatcacaccactgcactctagcctgggtgacacagtgagaccctgtcccaaaaaaaaaaaaaaaaattatcaagctgaataagcaatatataaaaggataatacttcatgaacaaggccttcttccaggaatgcaaggtggtttaacatttgcaaatcaatcaatgaaattcagcatataaacagataacaaaggccgggcgcggtggctcacg

SEQ ID NO: 821 - DNA, 226 bp, Homo sapiens
  misc_feature 1..226: note = U/M: U (0.19:0.92) in Gallbladder Epithelium
  misc_feature 1..226: note = source = chr5:131961615-131961840; Gene: RAD50 (intron)
  source 1..226: mol_type = genomic DNA
cggagtctctgtctcccaggctgaagtgcagtggtgtgatttcagctcactgcaacctccacctcagcctccgagtagctggaattacaggttcctgccaccacacctggctaatttttgtatttttagtagaaacagggttttgccatgtaggccatattgatctcgaactcctgacctcaaatgatccacccgcctcagcctcccacagtgctggaattagacg

SEQ ID NO: 822 - DNA, 200 bp, Homo sapiens
  misc_feature 1..200: note = U/M: U (0.19:0.91) in Gallbladder Epithelium
  misc_feature 1..200: note = source = chr11:1862243-1862442; Gene: TNNI2 (exon)
  source 1..200: mol_type = genomic DNA
cggctcccctgcccacagctggaggacatgaaccagaagctatttgatctgcggggcaagttcaagcggcccccactgcggagggtgcgcatgtcggccgatgccatgctcaaggccctgctgggctcgaagcacaaggtgtgcatggacctgagggccaacctgaagcaggtcaagaaggaggacacagagaaggtgcg

SEQ ID NO: 823 - DNA, 313 bp, Homo sapiens
  misc_feature 1..313: note = U/M: U (0.17:0.89) in Gallbladder Epithelium
  misc_feature 1..313: note = source = chr3:118961606-118961918; Gene: B4GALT4 (Intergenic)
  source 1..313: mol_type = genomic DNA
cgcccagccagccgccccgcccgggaggtgggggggcagcccccgcctggccagccgccccgcccggcaagtggggggcagcccccgcccggccagccgccccgtccgggaggtggggggcgcctctgcccagccgccgccccgtctgggaggtgggggcccctctgcccggccgccgccccgtctgggaggtggggggcccctctgcccggcagccccgtctgggaagtgaggagcccctctgcccggccaccaccctgtctgggaggtgtacccaacagctcattgagaacgggccatgatgacgatggcg

SEQ ID NO: 824 - DNA, 152 bp, Homo sapiens
  misc_feature 1..152: note = U/M: U (0.24:0.95) in Gallbladder Epithelium
  misc_feature 1..152: note = source = chr2:3205853-3206004; Gene: TSSC1 (intron)
  source 1..152: mol_type = genomic DNA
cgcccgccaccacgcccggctaattttttgtatttttagtagagacggggtttcaccatgttagccaggatggtctcgatcttctgaccttgtgatccgtccgcctcggcctcccaaagtgctgggattacaggcgtgagccaccgcacccg

SEQ ID NO: 825 - DNA, 258 bp, Homo sapiens
  misc_feature 1..258: note = U/M: U (0.2:0.91) in Gallbladder Epithelium
  misc_feature 1..258: note = source = chr19:2172333-2172590; Gene: DOT1L (intron)
  source 1..258: mol_type = genomic DNA
cgcccgccgccacgcccagctaattttttgtatttttagcagagatggggtttcaccatgttagccaggatggtctcgatctcctgacctcatgatccacccgccttgggctcccaaagtgctgggatcacaggtgtgagccaccgtgcccggccagccacttttctttctttctttttttttttttgaagacagagtctcactctttttactcaggctggagtgcagtggcgccatctcggcttactgaaacctccg

SEQ ID NO: 826 - DNA, 237 bp, Homo sapiens
  misc_feature 1..237: note = U/M: U (0.25:0.95) in Gallbladder Epithelium
  misc_feature 1..237: note = source = chr17:16187347-16187583; Gene: PIGL (intron)
  source 1..237: mol_type = genomic DNA
cggtgcgatctcggctcactgcaacctccgcttcccaggttcaagcgattctcctgcctcagcctcctgagtagccgggattacaggcgcccgccaccacacccaggtaattttttgcatttttagtagagacgtagtctcaccatgttggccaggctggtcttgaactcctgacctcaggtgatctacccgccttggcctcccaaagtgctgggattacaggcatcagccactgcg

SEQ ID NO: 827 - DNA, 429 bp, Homo sapiens
  misc_feature 1..429: note = U/M: U (0.27:0.96) in Gallbladder Epithelium
  misc_feature 1..429: note = source = chr4:111004479-111004907; Gene: ELOVL6 (intron)
  source 1..429: mol_type = genomic DNA
cggggacatgtgatctgataactgatcaatgaaaaggggccaggctggccaagacctagagaagaacataccaggtagagggataaatcactaagcactaatcagctgggcacgcttggtacgagcccagaggctggcggtgatggggactaaagagagacatggtttaacaggtgggcatggactacagcttatagggcctttgaggatcctgacacagagatagtaataattatacaattcattttattctaactgcactgtacaagcattggtaggttttaagcaggtaatgacatgatttgtatttttaataatacaggctgctgtgtggtgaaaggactgtagtaattactacattaatataaatgttaaaatattcatattattataaaagtagtcaggcacttaaaaatatattgtgtcccg

SEQ ID NO: 828 - DNA, 398 bp, Homo sapiens
  misc_feature 1..398: note = U/M: U (0.34:0.96) in Gallbladder Epithelium
  misc_feature 1..398: note = source = chr7:30824632-30825029; Gene: INMT-FAM188B (intron)
  source 1..398: mol_type = genomic DNA
cgtgggctctctcttgttctttctcactctgtgcttattctcactgtctcttgccttctttttttttttttttaattgatccacactttattcaatggtgtgcccaacacagtctcagagacaaagagcagtctgaaatttccagatgctttggtaggtcagaagcacatgccatccaccctcttacactccgctcaactcccctcaccttcttttgttctttcttgctctcttacttcctctctctctctctgacacacacacacacacacacacacacacacacccattggcacacctgacttcagctttagctgaacagtggggaatgccaagtttgctatgggtcttctccacgcctctcagtggtgtgcggcaaggctgggcttcgcataccg

SEQ ID NO: 829 - DNA, 242 bp, Homo sapiens
  misc_feature 1..242: note = U/M: U (0.33:0.94) in Gallbladder Epithelium
  misc_feature 1..242: note = source = chr4:1306280-1306521; Gene: MAEA (intron)
  source 1..242: mol_type = genomic DNA
cgatctcagctcactgcagcctccacctccggggttcaggcgattctcctgcctcagcctcacgagtagctgggactacaggcgcccaccaccacgcccgtctaatttttgtattgttagtagagacagggtttcaccatgttagccaggctggtctcgaactcctgacctcaggtgattcacctgccttggcctcccaaagctgaaattacaggtgtaagccactgcacgcggcctgatcg

SEQ ID NO: 830 - DNA, 442 bp, Homo sapiens
  misc_feature 1..442: note = U/M: U (0.15:0.92) in Gallbladder Epithelium
  misc_feature 1..442: note = source = chr2:223540221-223540662; Gene: MOGAT1 (intron)
  source 1..442: mol_type = genomic DNA
cggagtctcactctgtcgcccaggctggagtgcagtggcgcgatctcggctcactgcaagctccgcctcccgggttcatgccattctcctgcctcagcctcctgagtatctgggactacaggcgcccaccaccacgcccggctgattttttgtatttttagtagagacggggtttcaccgtgttagccaggatggtctcggtctcctgaccttgtgatctgcctgcctcggcctcccaaagggtaattttcttattctatcatttattcttcatttattagctagaatttctgcagttaaaaattttgtctcatcatgtagcaccatttgactaccctacaattcaattcttacaggaaataaaggataaatactcttctttccatttaattatcaagtttcaagtaaggagttgatacaatagttacttccagtggtgacg

SEQ ID NO: 831 - DNA, 175 bp, Homo sapiens
  misc_feature 1..175: note = U/M: U (0.16:0.91) in Gallbladder Epithelium
  misc_feature 1..175: note = source = chr20:53260018-53260192; Gene: DOK5 (intron)
  source 1..175: mol_type = genomic DNA
cgggccgcctcgctgagcaccatggtgcccctgcctcgcagcgcctactggcagcacatcacacggcagcacagcacgggacagctctaccgcttgcaaggtaagcgtggggctacctgtgtccagggtgtgggccaggcctgggagtactggggagggggctcagctcaactcg

SEQ ID NO: 832 - DNA, 478 bp, Homo sapiens
  misc_feature 1..478: note = U/M: U (0.01:0.95) in Gallbladder Epithelium
  misc_feature 1..478: note = source = chr18:3214677-3215154; Gene: MYOM1 (intron)
  source 1..478: mol_type = genomic DNA
cgggcgtggtggtgcacgcctgtaatcccagctactcgggaggcggaggcaggagaatcgattgaacccaggaggcagcagaggttgcagggagccgagatcacgccattgcactccagcctgggcaacaagagcgaaactctgtctcaaaaaaccaaaaccgaaccgaaacaaagcgagaagtaactgggagggttactcagagcacacgcctcttcctgaggttggaaggttggaggagggcgtccgacatacccatgggaggagccataatcgtaggctgaggctgccttccgactgacttcagagctcagggcgtgctgcgaggcctgctgctgggaggaggaggcggacgcccgacggaaggcctcggactcccggcggtgcgcggcggaggagcggctgctgtaggccgtggagccctgggtgtagacggcggagcgtttcttctcccgctggtagtgactcacggtgctgc

SEQ ID NO: 833 - DNA, 282 bp, Homo sapiens
  misc_feature 1..282: note = U/M: U (0.01:0.93) in Gallbladder Epithelium
  misc_feature 1..282: note = source = chr14:51491780-51492061; Gene: TRIM9 (intron)
  source 1..282: mol_type = genomic DNA
cggcttgttggcaaaaagtaactacctcaagaaggggtatgtttgaagttgatctctatgtgtttgtatgtaaagaacaacaacaaccacaaaataggaattttcccacgacacataaaaataaaagaggagaaggaaactctcccgccacacagttacgtattaaccggcgggtttccttgcgtcccaggtaacacccatacctggatctgctggaccatgttgcgcagctgtaccagaaactccttggcttctttggccctgtctgacagtccgttcagc

SEQ ID NO: 834 - DNA, 88 bp, Homo sapiens
  misc_feature 1..88: note = U/M: U (0.03:0.94) in Gallbladder Epithelium
  misc_feature 1..88: note = source = chr11:1249809-1249896; Gene: MUC5B (exon)
  source 1..88: mol_type = genomic DNA
cgcaccctgctggggccggcctttgcggagtgccacgcactggtggacagcactgcgtacctggccgcctgcgcccaggacctgtgcc

SEQ ID NO: 835 - DNA, 471 bp, Homo sapiens
  misc_feature 1..471: note = U/M: U (0.04:0.94) in Gallbladder Epithelium
  misc_feature 1..471: note = source = chr21:44838854-44839324; Gene: SIK1 (exon,intron)
  source 1..471: mol_type = genomic DNA
cgtaagcctatccaccggtgtcctcctgggcccccggggacacttacatggcgcggtgagtggggagaggcgggtggagacctcggccagggtgtgcctccggcccgtgctgctgggcagggactcctgcgtgtcctgctcctcctctaggcccggcccctgcctggcctcctcactgatggctgtgtccagcaggctgcttggggacacgggccggggccggaacactccgctgcagctggcatccaccgggaagaacaagggctgcgttggagagacacaagccagtgacttctcggactccaggtgacccgggcacaccgggggcaccagggctgggctgaggcgagccctctgcacacccgctgtgggcactcacccactgcagcgagctctggagctcacagtccatctcggcctggaggacggactgcaccaaggtctgcggctgcgggcacagcaaggcaggtc

SEQ ID NO: 836 - DNA, 189 bp, Homo sapiens
  misc_feature 1..189: note = U/M: U (0.04:0.93) in Gallbladder Epithelium
  misc_feature 1..189: note = source = chr6:43752334-43752522; Gene: VEGFA (exon)
  source 1..189: mol_type = genomic DNA
cgggaaccagatctctcaccaggaaagactgatacagaacgatcgatacagaaaccacgctgccgccaccacaccatcaccatcgacagaacagtccttaatccagaaacctgaaatgaaggaagaggagactctgcgcagagcactttgggtccggagggcgagactccggcggaagcattcccgggc

SEQ ID NO: 837 - DNA, 104 bp, Homo sapiens
  misc_feature 1..104: note = U/M: U (0.07:0.94) in Gallbladder Epithelium
  misc_feature 1..104: note = source = chr14:64107269-64107372; Gene: WDR89 (intron)
  source 1..104: mol_type = genomic DNA
cgatcttggctcactgcaacctctgcctcccgggttcaagcgattctcctgcctcagcctcccgagtagctgggactacaggcgcccgccacatttttgcattc

SEQ ID NO: 838 - DNA, 233 bp, Homo sapiens
  misc_feature 1..233: note = U/M: U (0.07:0.94) in Gallbladder Epithelium
  misc_feature 1..233: note = source = chr8:90768568-90768800; Gene: RIPK2 (Intergenic)
  source 1..233: mol_type = genomic DNA
cggtggctcacgcctgtaatcccagcactttgggaggacaaggtgggcggatcacgaggtcaggagttcgagaccagcttggccaacacggtgaaaccccgtctctactaaaaatacaaaaattagctgggtgtggtggcgggcgcctgtaatccaagctacttgggaggctgaggcagaagaattgcttgaaccagggaggcagaggttgcaatgagcagagcagagatcgc

SEQ ID NO: 839 - DNA, 245 bp, Homo sapiens
  misc_feature 1..245: note = U/M: U (0.09:0.95) in Gallbladder Epithelium
  misc_feature 1..245: note = source = chr8:90768318-90768562; Gene: RIPK2 (Intergenic)
  source 1..245: mol_type = genomic DNA
cgcaagagaaaaaccccctttaactgtaattttccactacctacccaaatcctataaagactgcctcacccctatctccctttgctgactcctttttcgaactaagtcggcctacacccacatgattaaaagctttattgctcacccaaagcctgtttggtggtctcttcacactgacgcgcgttaacagaatgaatggatagaaaagtcttctgagtactttttaagaaaaaagcttattggcc

SEQ ID NO: 840 - DNA, 460 bp, Homo sapiens
  misc_feature 1..460: note = U/M: U (0.03:0.93) in Gallbladder Epithelium
  misc_feature 1..460: note = source = chr4:57082657-57083116; Gene: KIAA1211 (intron)
  source 1..460: mol_type = genomic DNA
cggttggaatcatagtcccagtaactgtaggaacttccgatctattcaagaccaaatagagggatacactctctgtggggtgtgtgtgtgtgtgactgtgttccatatcctggtttggcaaaagtggtaatgtagtatttggagagaagcggcatttaaaatcggcctttgcaaaaatatgaaaattattctgaagtagaaaatgtcaggccgggcgcggtggctcacgcctgtaatcccagcactttgggaggccgaggcgggtggatcatgaggtcaggagatcgagaccatcctggctaacaaggtgaaaccccgtctctactaaaaatacaaaaaattagccgggcgcggtggcgggcacctgtagtcccagctactcgggaggctgaggcaggagaatggcgtgaacccgggaagcggagcttgcagtgagccgagattgcgccactgcagtccg

SEQ ID NO: 841 - DNA, 462 bp, Homo sapiens
  misc_feature 1..462: note = U/M: U (0.02:0.92) in Gallbladder Epithelium
  misc_feature 1..462: note = source = chr2:60642332-60642793; Gene: MIR4432 (Intergenic)
  source 1..462: mol_type = genomic DNA
cgctcattttcattgtgttgcattgatttcttactattgacttttgagagtgctttatttattccggatacaagttctttatcagatgtattttttgcaaaaactttctcccagtctgtcttgtctttttactttattaacagtgtctttcgaagagcaaaagttttaaacttcgataatgcctgatttatcaattttttatttaatagtttggtttgtgtgtgcatgtgtgtcctatttaaaaattatttctcaggccgggcacggtggctcacgcctgtaatcccaacactttgggaggccgaggctggcggatcacctgaggtcgggagtttcagaccagcctgaccaacatggagaaaccccgtctctactaaaaatacaaaattagctaggcatggtggcacatgtctgtaatcccagctactcaggaggctgaggcaggagaatcgcttgaacccg

SEQ ID NO: 842 - DNA, 261 bp, Homo sapiens
  misc_feature 1..261: note = U/M: U (0.04:0.93) in Gallbladder Epithelium
  misc_feature 1..261: note = source = chr10:6781345-6781605; Gene: LINC00707 (Intergenic)
  source 1..261: mol_type = genomic DNA
cgacggccccaagtttagcaatctaaagcttgcatagccgggctcggtggctcaacgcctgtaatcccagcaacttgggaggccaaggcgggcagatcacctgaagtcaggagtttgagaccagcctggccaacttgatgaaaccccatctctactaaaaaatacaaaaattagccggtcatggtggtgggtacttgtaatctcagctacttgggaggctggagaatcacttgaacccagaggcggaggttgcagtgaccg

SEQ ID NO: 843 - DNA, 98 bp, Homo sapiens
  misc_feature 1..98: note = U/M: U (0.04:0.92) in Gallbladder Epithelium
  misc_feature 1..98: note = source = chr20:36008159-36008256; Gene: SRC (intron)
  source 1..98: mol_type = genomic DNA
cgtggtattcggtgactgtaatcccagctacttgggaggctgaggcaggagaaccgctggaacccgggaggcggaggttgcagtgagccgagatcgcg

SEQ ID NO: 844 - DNA, 120 bp, Homo sapiens
  misc_feature 1..120: note = U/M: U (0:0.88) in Gallbladder Epithelium
  misc_feature 1..120: note = source = chr9:92976862-92976981; Gene: LOC286370 (Intergenic)
  source 1..120: mol_type = genomic DNA
cgtccatcctctgagactcagcactctcatctgagttgatttctagttgatccaatggaagtgagcaatgattaaaccgaccgtgggtgcccgctgcgtgatctctatgtgatggatgcg

SEQ ID NO: 845 - DNA, 358 bp, Homo sapiens
  misc_feature 1..358: note = U/M: U (0.04:0.92) in Gallbladder Epithelium
  misc_feature 1..358: note = source = chr14:23748661-23749018; Gene: HOMEZ (intron)
  source 1..358: mol_type = genomic DNA
cgggtgagtggtttggtggggaaaatggttatggcagagcaggaaatcggaaggagtcagggtggagaatgagtcagggcagagcaggtaatcggaatgagtcagggtggagcaggtgatcgaaaaaggttgctttacaaggaagttaagtttaaaagtagaaggcaaagaattgaacatactgacatattgattctttgaagagaaatttagaactcatatctaatgctatgttggccaggctggtctcgaactcctgacctcaggtgatccacctgccttggcctcccaaagtgctgggattacaggcatgagccaccgcgcctggccactatttttttttagagacaagttctcg

SEQ ID NO: 846 - DNA, 254 bp, Homo sapiens
  misc_feature 1..254: note = U/M: U (0.05:0.92) in Gallbladder Epithelium
  misc_feature 1..254: note = source = chr14:64106921-64107174; Gene: WDR89 (intron)
  source 1..254: mol_type = genomic DNA
cggccataggttgcagtgcagtccaggctccacaagaaagaatttgaaaagcagaaacagtcacgtggctttcatcggtaacatattttgtatctattaaattatttaatcctcagaactctaagtagtcaagtttggtatttatttcaattatacaggtgaaaaagctgatgctgacttgtccagtcaaaggtcagtaactggtgcctactgcgatgtctttcctctagatcattttaccttggtaacaatcg

SEQ ID NO: 847 - DNA, 325 bp, Homo sapiens
  misc_feature 1..325: note = U/M: U (0.05:0.92) in Gallbladder Epithelium
  misc_feature 1..325: note = source = chr1:220012556-220012880; Gene: RNU5F-1 (Intergenic)
  source 1..325: mol_type = genomic DNA
cggagctgctgttccttcggcactactgaatgcaaattcttggtatgttcctaaggatgctagacttcccagtctacagaatttgagatctttctgttgaaaaataagaaatgttgggggggtggcgccaagatggctgaataggaacagctcccgtctacagctcccagcttgagcgacacagaagacgggtgatttctgcatttccatctgaggtaccgggttcatctcactagggagtgccagacagtgggcgcaggacagtgggtgcagcacaccgtgcgcgagacgaagcagggcgaggcattgcctcgctcgggtagcg

SEQ ID NO: 848 - DNA, 409 bp, Homo sapiens
  misc_feature 1..409: note = U/M: U (0.04:0.91) in Gallbladder Epithelium
  misc_feature 1..409: note = source = chr5:500073-500481; Gene: SLC9A3 (intron)
  source 1..409: mol_type = genomic DNA
cgtcggagccaccacaggcgcagggcacagcctcctcggcccagagctgttgggcaggagctgcagggtggctgggacgcaacaggcagcgacatcttcaaccttctaccagaagagcctcaggtccaccgcactgactgcggcaaccccggccctgtgggttgaaagggcagagggtgtctgaggccttaaggaaatgaagagaatagaactcgccccatggcacacactgtgagggaaccaggcggtgtgggaccctcccgagacgcactatgcagagcctgggctcagccacacaactgcagaagccaaaccacgagaagctccacagacggaaccggcttccggcaccactgggacacgccacgaggctcccccagctaggtgcacacacggcatgcgactggcg

SEQ ID NO: 849 - DNA, 416 bp, Homo sapiens
  misc_feature 1..416: note = U/M: U (0.06:0.92) in Gallbladder Epithelium
  misc_feature 1..416: note = source = chr11:64784378-64784793; Gene: ARL2-SNX15 (intron)
  source 1..416: mol_type = genomic DNA
cgcatgtgctggggaggagggtgagccactccatcaggtgctgagtggggaacagaagatgactgagcgctgtcccagcactagagggccacagggaggtctttggggactgaccttggtaaggacagttttggccacagcagcagcaaaagcctgatgggagtgtgttcttgaaagagcaagaaggcagaaatgggggtgagcacaaacaactattttgagatttcctgtaaaaggaaagatataaatgaataactagatggggcagagagatcaagggctttgtttgctctttttttttttttaatcagacggggtctcgctgagtcgcccaggctggagtacagtggtgtgatctcggctcattgcaacctctgcctgccgggttcaagcaattctcctgtctcagcctcccg

SEQ ID NO: 850 - DNA, 420 bp, Homo sapiens
  misc_feature 1..420: note = U/M: U (0.03:0.89) in Gallbladder Epithelium
  misc_feature 1..420: note = source = chr22:37971997-37972416; Gene: LGALS2 (intron)
  source 1..420: mol_type = genomic DNA
cggtgacaaccaagaatgtctccagacagggtccgttgtctcctgggagcaaaacctccctgctttagagaaagtggggtttggaggctggacacctaactccccatgtctttgcttaacacaacggggttgggtccagattttggagccagacagacgggattaaaatcagtctcttgctggccaggggcggtggctcacacctgtaatcccagcactttgggaggccgaggggggcggatcacgaggtcaggagagtgagatcatcctggctaacacggtgaaaccctgtctctactaaaaatacaaaaaattagccgggcgtggtggcaggcgcctgtagtcccagctactcgggaggctgaggcaggagaatggcgtgaacccgggaggcggtgcttgcagtgagccaagatggcg

SEQ ID NO: 851 - DNA, 197 bp, Homo sapiens
  misc_feature 1..197: note = U/M: U (0.09:0.94) in Gallbladder Epithelium
  misc_feature 1..197: note = source = chr19:55740650-55740846; Gene: PPP6R1,TMEM86B (TTS,promoter-TSS)
  source 1..197: mol_type = genomic DNA
cggggaacaagcaccctctcctgttagctgagcgagcccccaggtgacctccaagccaactgccaccccagtgaggacgctgtcctcatggcccggtccacacgctccggtttcccagcgccgctcaccggtgccactcgctgcacacgcagcctacacttctaccttctacctgaaagactcagacctactgggcg

SEQ ID NO: 852 - DNA, 340 bp, Homo sapiens
  misc_feature 1..340: note = U/M: U (0.04:0.89) in Gallbladder Epithelium
  misc_feature 1..340: note = source = chr8:117667019-117667358; Gene: EIF3H (intron)
  source 1..340: mol_type = genomic DNA
cgcaatggaaggcggcgcttcaaccacagtcctacccgtgccagagcatagagaagaacattgatgtctctggcccttctgggttcatcccacttgccttatatcgaggaagtacaaagtctgtacacttttttttttttaacaagtctctatctaagataactagaaatctgataaataatttagtctgctccaaactggttgcttaagaaaacacaccttgtttctttcagccaacaagcatatattgattctttacctactctgaccatttaatttcattccacaagtctgctgctagcctccttccaccacagacaaaataatcactaacataacg

SEQ ID NO: 853 - DNA, 220 bp, Homo sapiens
  misc_feature 1..220: note = U/M: U (0.09:0.93) in Gallbladder Epithelium
  misc_feature 1..220: note = source = chr5:1161093-1161312; Gene: SLC6A19 (Intergenic)
  source 1..220: mol_type = genomic DNA
cgccactgcactccagcctgggtgacagagcgagactccgtctcaaaaaaaaaagaagaaaagaaaagaaacacatcccaggtaaggctgccggcccctggagggtgagagacctggagagaggtctcagcccagagcacggcccagaagggccgataagcctagaccagctggccctgacagtgagcagggataagtaactgcagctcgacttgttacg

SEQ ID NO: 854 - DNA, 55 bp, Homo sapiens
  misc_feature 1..55: note = U/M: U (0.05:0.87) in Gallbladder Epithelium
  misc_feature 1..55: note = source = chr7:1586104-1586158; Gene: TMEM184A (exon)
  source 1..55: mol_type = genomic DNA
cgccggcctgcggcgcccggagctgctgactgtgtcagagcccggctgcccagcg

SEQ ID NO: 855 - DNA, 232 bp, Homo sapiens
  misc_feature 1..232: note = U/M: U (0.07:0.89) in Gallbladder Epithelium
  misc_feature 1..232: note = source = chr5:600978-601209; Gene: CEP72 (Intergenic)
  source 1..232: mol_type = genomic DNA
cgcccaccatggcgttagggccacagcctcctgccccatgtgccaggcccggctctgcccagctccctgcagctgcgccagtgtgtgctgtgactcgtgctcctggtttgtcatctgcctctcagtagacaccacggccttcaagctttctccgctccgtgaccagcagctgggacgggaccagcagtgcatgcggctctggattcatgtttgttgaatgactgactgaacg

SEQ ID NO: 856 - DNA, 314 bp, Homo sapiens
  misc_feature 1..314: note = U/M: U (0.03:0.85) in Gallbladder Epithelium
  misc_feature 1..314: note = source = chr6:18338103-18338416; Gene: RNF144B (Intergenic)
  source 1..314: mol_type = genomic DNA
cgtaaggttaaacattattatattgatcaactttttatggattaggaaatggagatgtaggaaggttatgttaaaagggaaactttagaaaattaaattcagcagagcttaattgagcaatggatgattcaagaatagggcagccccccaaaacccgaacagggtcagagcactgtggcctgcaatatggtcaggtggcatttatggacagaaaacaggagtgagatactgagactgctggattggttgcagctcagcgtttgccttagttgaagatggtctggtcaactggctccctgcgattgactaaagcg

SEQ ID NO: 857 - DNA, 310 bp, Homo sapiens
  misc_feature 1..310: note = U/M: U (0.12:0.93) in Gallbladder Epithelium
  misc_feature 1..310: note = source = chr19:53965476-53965785; Gene: ZNF813 (Intergenic)
  source 1..310: mol_type = genomic DNA
cggactcctgacctccggtgatccacctgcctcggccttccaaagcgctgtcaatacaggcgtaagccattgcgcctggccaaggatagctttaaatcaacaaagtaataagttttgttacagtgtcagcccacccgcaggtagacataccttagcttttacgtaggctttggccgggcgcggtggctcacgcctgtaatcccagcactttgggaggccgaggcaggtggatcacgaggtcaggagatcgagacaatcctggctaacacgatgaaaccccgtctctactaaaaatacaaaaaattagccg

SEQ ID NO: 858 - DNA, 291 bp, Homo sapiens
  misc_feature 1..291: note = U/M: U (0.13:0.91) in Gallbladder Epithelium
  misc_feature 1..291: note = source = chr3:193586951-193587241; Gene: DPPA2P3 (Intergenic)
  source 1..291: mol_type = genomic DNA
cgagggtcctctctgaaggatgcctgaaatgcctccgctgcagcttgctagaggccttctaattaacctgcgaagaaccgtctgcaggcccccagtccggtgttcactcgttcattcattcgctcttcactgggtgccctggcactccaagcctccagcgcacacccagccctaaccttgaccagggtgctgagcacgaggagccccaccctgagccaggcctggagaggcgcctttaagcgcaggtcctgcggctgctgacaggtcatcagagctgggaccaaagacccg

SEQ ID NO: 859 - DNA, 302 bp, Homo sapiens
  misc_feature 1..302: note = U/M: U (0.16:0.92) in Gallbladder Epithelium
  misc_feature 1..302: note = source = chr17:77919294-77919595; Gene: TBC1D16 (intron)
  source 1..302: mol_type = genomic DNA
cgctcacccagatctatcatcttccagagctgttttagggcaggaaggggacgtatctgagccccaggatgctcgattcctgccattaaggtcatctcccaatgatgtgggacaagatcggggctatttctggcagcactcgggcccaggccgctgacttcatcaatgccgctggaaaatcaatctccagcattcagtgagtcacccagccatgcgctgccatgagccgtcagaggcgaatggcgttggacactgtaactgcctccccaagcaatgtggacacccgacgtcacacacacccg

SEQ ID NO: 860 - DNA, 474 bp, Homo sapiens
  misc_feature 1..474: note = U/M: U (0.17:0.93) in Gallbladder Epithelium
  misc_feature 1..474: note = source = chr12:95561915-95562388; Gene: FGD6 (intron)
  source 1..474: mol_type = genomic DNA
cgaccaaggtcatacagttagtaagtgacaaatctaagactaaaacccaggtcttaggatgccaaatttcaagttttcccattaaacaaaatactaccttacatgtaaataagtttcatatttactcatcaaagataagaaaagccaagccagaaacaatatatttattggtaagattacagaaagcttgatttgagatgtttaagatttggcttgcttattttcataaaaatcgttaatagcagccaggcgcggtggatcacgcctgtaatcccggcactttgggaggccaatgtgggcagataacctgaggtcaggagtttgagaccagcgtgaccaacatggagaaactccgtctctactaaaaatacaaaatcagctgggtgtagtggcgcatgcctgtaatcccagctactcaggaggctcaggcaagagaatcacttgaaccctggaagcagaggttgcagtgagccg

SEQ ID NO: 861 - DNA, 450 bp, Homo sapiens
  misc_feature 1..450: note = U/M: U (0.15:0.9) in Gallbladder Epithelium
  misc_feature 1..450: note = source = chr11:1273472-1273921; Gene: MUC5B (exon)
  source 1..450: mol_type = genomic DNA
cgctgctccctcctgcgctgacctctgcctttgctctcccagaactctggcttacccatctctgggagtggcttatctttctatggtgttgttcttcacaggggaagtcatctacaataagaccgaccgagccggctgccatttctacgcagtgtgcaatcagcactgtgacattgaccgcttccagggcgcctgtcccacctccccaccgccagtgtcctccgccccgctgtcctcgccctcccctgcccctggctgtgacaatgccatccctctccggcaggtgggccccgcctgccctccacctcccgtgctgcgtgcacacggtctgggttggctggaggcacagccacagtccagctcccgaggcccgtctcagtgaccccgccgccagtatctccagttggaggaggcacacagggcctaggggccaggctagcatgggggccg

SEQ ID NO: 862 - DNA, 215 bp, Homo sapiens
  misc_feature 1..215: note = U/M: U (0.25:0.93) in Gallbladder Epithelium
  misc_feature 1..215: note = source = chr22:40578030-40578244; Gene: TNRC6B (intron)
  source 1..215: mol_type = genomic DNA
cgaggtcaggagttcgagaccagcctggacaatatggtgaacccttgtctctactaaaaatacaaaaaaactagccaagggtggtggcgcctgcctgtaatcccagctactcgggaggctgaggcaggagaatcgtttgaacccaggagtcggaggttgcagtgagccgagattgtgccactgcactccatcctgggcagtacagggagactccg

SEQ ID NO: 863 - DNA, 395 bp, Homo sapiens
  misc_feature 1..395: note = U/M: U (0.26:0.93) in Gallbladder Epithelium
  misc_feature 1..395: note = source = chr6:34870056-34870450; Gene: ANKS1A (intron)
  source 1..395: mol_type = genomic DNA
cgctcttgctgcccatgctggagtgcaatgcgtgatctcggctccctgcaacctccacctgccgggttcaaacaattctcctgcctcagcctcccaagtagctgggattacaggcatgcgccaccatgcccagctagttttgtatttttagtagagacgggatttctccgtgttggtcaggctggtctgggactcctgacctcagatgatccacccgcctcggcctcccaaagtgctgggtttacaggcgtgagctaccgcgcctggcccaagtttttctttttaaaagaaggagtgtataaaaaatcaggtccagtacttttactagatatgttttgtcgaccaaattgacagagctgtctttttaaaagatgtctttttccaggccaggtgcg

SEQ ID NO: 864 - DNA, 461 bp, Homo sapiens
  misc_feature 1..461: note = U/M: U (0.27:0.94) in Gallbladder Epithelium
  misc_feature 1..461: note = source = chr9:97661527-97661987; Gene: C9orf3 (intron)
  source 1..461: mol_type = genomic DNA
cgccatctcggctcactgcaagctccgcctcctgggttcacgccattctcctgcctcagcctccggagtagctgggactataggcgcccgccaccacgcccggctattttttttttttttttttagtagagacgaggtttcactgtgttacatttgctatttttttatattgacttttttttaaccgtgcaactgttagcttattaataattaaaattatgaaggccaggcacggtggctcacacttttattcccagcactttgggaagctaagatgggagaattacttgagcccaggagtttgagaccagcctgggcaacaaaatgagaccccatcactacaaaaaatttacaaattagccagacgtggcggtgtgcacctgtagtcccagctacttgggaggctgaggtgggaggattgcgtgaacccaggatgttgaagctgcagtgagccatgatcg

SEQ ID NO: 865 - DNA, 481 bp, Homo sapiens
  misc_feature 1..481: note = U/M: U (0.31:0.96) in Gallbladder Epithelium
  misc_feature 1..481: note = source = chr7:2067755-2068235; Gene: MAD1L1 (intron)
  source 1..481: mol_type = genomic DNA
cgagagaaaataagtatgacctaaggccgggcgcggtgactcacgcctgtaatcccagcactttgggaggccgaggcaggcggattacgaggtcaggagatcgagaccatcctggctaacacggcgaaaccccgtctccactaaaaatacaaaaaattagccgggcgtggtggtgggcgcctgtagtcccagctactcgggaggctgaggcaagagaatggcgcgaacccaggaggcagagcttgcagtgagccgagatcatgccattgcactccagcctgggcgacagagcaagactccatctcaaaaaaaaaaaaaaaaaaaagtatgacctaaacacatgttagcatatagtacgtccatggattagaagattcaatattgtgcagatgtcatttaatcaatgcattctcaataaaaactctagcaagtccactggtgagactgacaggttgagctgtaaaatctacgtgaagaggcg

SEQ ID NO: 866 - DNA, 248 bp, Homo sapiens
  misc_feature 1..248: note = U/M: U (0.33:0.93) in Gallbladder Epithelium
  misc_feature 1..248: note = source = chr5:78881963-78882210; Gene: PAPD4 (Intergenic)
  source 1..248: mol_type = genomic DNA
cggtggctcatgcctgtaatcccagcactttgggaggccgaggtgggcggatcacgaggtcaggagatcgagaccatcttggctaacacggtgaaaccccgtctatactaaaaataccaaaaagtagccgggcaggctaattagtagtggcgggcgcctgcagtcccagctactagggaggctgaggcaggagaatggcatgaacctgggaggcggagcttgcagtgagctgagatcgcgccactgcg

SEQ ID NO: 867 - DNA, 461 bp, Homo sapiens
  misc_feature 1..461: note = U/M: U (0.36:0.95) in Gallbladder Epithelium
  misc_feature 1..461: note = source = chr7:895051-895511; Gene: SUN1 (intron)
  source 1..461: mol_type = genomic DNA
cgggaccatttgttgctgggaatgccaggggagggactgggcctctgtgctgccctcagccatggggagtcgggtcgggctcaggttccggctctttgtgtctctggtgcttgacacagagcctggcgtgtcacatgtgcgtgtgtgtattgaactaccttgagaagtgtggtgagcctaagggttgtatgtagcacacccttttgggaatcttgggacccactcctggaccttggaccctgtgagatcaggcaggtttacctgggagggagaggtgggctgagaggagcaggcagaggcgagaatgtacccgcctgcgagggtctgcggggcgcctcctcctgtgtccgcctgagaaggtctgtggggcgcctcctcctctgtccacccgagagggtctgcggggcgcctcctcctctgtccgcccaagagggtccgcggggcgcctcctcctgtgtccg

SEQ ID NO: 868 - DNA, 101 bp, Homo sapiens
  misc_feature 1..101: note = U/M: M (0.73:0.14) in Gallbladder Epithelium
  misc_feature 1..101: note = source = chr7:101398194-101398294; Gene: CUX1 (Intergenic)
  source 1..101: mol_type = genomic DNA
cgccactcccgttacatgtgtttttgggtaatcgccagtcttttcacagatgaatgccagaacatggaacaaaggcttgaatgcaacgaaagcacgtcgcg

SEQ ID NO: 869 - DNA, 332 bp, Homo sapiens
  misc_feature 1..332: note = U/M: M (0.64:0.11) in Gallbladder Epithelium
  misc_feature 1..332: note = source = chr12:75874414-75874745; Gene: GLIPR1 (promoter-TSS)
  source 1..332: mol_type = genomic DNA
cgtaataggtgctgtgtcactgaaaaccactgaaaagacagggttaagaacacaaagtgagctgcacaccatatatggagaaacccgtttcttaaaactagtgatgaactcatgctctgttctgttttctcaaagctgaagtcggctaggtttgcaaagctgtgggctgagcactcaggcaatcacactctcagaaactgcggcggctctggactgcagcctcccaaggctccatgccagacaaagcatgcgtgtcacacttgctacaatagcctggatggtttcttttgtctccaattattcacacacagcaaatattttgccagatatcg

SEQ ID NO: 870 - DNA, 139 bp, Homo sapiens
  misc_feature 1..139: note = U/M: M (0.67:0.18) in Gallbladder Epithelium
  misc_feature 1..139: note = source = chr12:111708144-111708282; Gene: CUX2 (intron)
  source 1..139: mol_type = genomic DNA
cgacagagcctgatggctcagcaagtattttgataagtgtgcagcctggatgtctgtaattacgaaagaaaaccgtaaatcttttggatattgttcacacagatgtggcgtgaagtgagaaaaaaaaagcagtaaaacg

SEQ ID NO: 871 - DNA, 305 bp, Homo sapiens
  misc_feature 1..305: note = U/M: M (0.5:0.13) in Gallbladder Epithelium
  misc_feature 1..305: note = source = chr14:104390340-104390644; Gene: C14orf2 (Intergenic)
  source 1..305: mol_type = genomic DNA
cgtggagcggataaccagtttagtgcccgagctcactgccgcttccaggctggggtaattataggtctgggctggatgggtctgggcagtatggcttgctgcctggcaggatgtgataaggatgttcccgcagtcaggcagttgggcaggatgtttcttatggtcagagcccccatggaatgtttcactccgaccagggtctgtgaaatggtggggggtttataaaatggtgcagctaggactgaaataatcacaagcagatccacagtaaaataaatgttcattattcaggcacaaggaaaacg

SEQ ID NO: 872 - DNA, 167 bp, Homo sapiens
  misc_feature 1..167: note = U/M: M (0.9:0.55) in Gallbladder Epithelium
  misc_feature 1..167: note = source = chr14:106060773-106060939; Gene: TMEM121 (Intergenic)
  source 1..167: mol_type = genomic DNA
cgaaatccttgacaatccagggttccttcacctcgaaatccttgacaatccagggtgccctcacctcgaaatccttgacaatccagggttccttcacctcgaaatccttgacaatccagggtgccctcacctcgaaatccttgacaatccagggttccttcacctcg

SEQ ID NO: 873 - DNA, 215 bp, Homo sapiens
  misc_feature 1..215: note = U/M: M (0.52:0.17) in Gallbladder Epithelium
  misc_feature 1..215: note = source = chr4:46994535-46994749; Gene: GABRA4 (intron)
  source 1..215: mol_type = genomic DNA
cgtccaggcagctgagcccagagttcccatttttgactcttcctctccaacctcccccacccagcagtcaggtcccgggaggtaattagtgtgggggagaggcaaagcttctgagggggcagggagatgggaaagtacgggtggaggcggtcttcttgtcataggtctcaccaagagaggagagatagaaagagagagagatttatttttgcacg

SEQ ID NO: 874 - DNA, 402 bp, Homo sapiens
  misc_feature 1..402: note = U/M: M (0.89:0.56) in Gallbladder Epithelium
  misc_feature 1..402: note = source = chr10:17672985-17673386; Gene: STAM (intron)
  source 1..402: mol_type = genomic DNA
cgagttgcacggggcacagagactaggaagggactgatgtgtaaaagaatgcctggacgtcaggcacctcagaccatttgcccattttacgacaagaattatttagatcttgtaggatggaaaaattgaaagcgccgttttccagctatttggaactactgtcgagtttgtattggggtcaagcggcattgcagaagaaaataaggcatttaggttttaggtcaggtgtgagttgaagaggttttaagtttttgagaacacaggctaagggagaacaaggaggaatggaaggtggaagcctacccatagtgaaggaggcaagcccagagaaaagagtagagacatggagaaggggtggggagttcttgccctccagaaaagcagagaaagggttggggcacg

SEQ ID NO: 875 - DNA, 78 bp, Homo sapiens
  misc_feature 1..78: note = U/M: M (0.84:0.7) in Gallbladder Epithelium
  misc_feature 1..78: note = source = chr15:30537881-30537958; Gene: DKFZP434L187 (Intergenic)
  source 1..78: mol_type = genomic DNA
cgggggtcaggggtcagggacgcacttgaggaggcagtctgcccgttcttagatctccagctgcgtgctgggagaacg

SEQ ID NO: 876 - DNA, 369 bp, Homo sapiens
  misc_feature 1..369: note = U/M: M (0.87:0.74) in Gallbladder Epithelium
  misc_feature 1..369: note = source = chr9:65862749-65863117; Gene: SPATA31A5 (Intergenic)
  source 1..369: mol_type = genomic DNA
cgatggctggctaatttttttttttgtatttttagtagagacggggtttcaccatgttggccagactggtctcaaacacctgacttcaggccatctgcccacctcggcctcccaagtactgggattacaggcatgagccaccgtgcccagcctctgaagttcactttctgagattcctaaggaattaataaaataaaaccctggaaaatagcctatgtgtgcctgagtgtaagaaggaatgcacatgcatgtgcatatggagacacagaattccaccaaccctgccctgtcactcggtgggctcttgtcactgtcacacacgttcaagagctaagcatgatgcattcaacgagaatatgattagtctcg

SEQ ID NO: 877 - DNA, 198 bp, Homo sapiens
  misc_feature 1..198: note = U/M: U (0.02:0.93) in Liver Hepatocytes
  misc_feature 1..198: note = source = chr12:100869606-100869803; Gene: NR1H4 (intron)
  source 1..198: mol_type = genomic DNA
cgggttcaagcgattctcctgcctcagcctcctgagtagctggtactacaggcgtgcaccaccatgccactattttttgtatttttagtagagacggggtttcactatgttggccagactggtctcgaactcttgacctcaggtgatccgcccgcctcggcttcccagagtgctaggattacaggcgtgagccactgc

SEQ ID NO: 878 - DNA, 249 bp, Homo sapiens
  misc_feature 1..249: note = U/M: U (0.04:0.95) in Liver Hepatocytes
  misc_feature 1..249: note = source = chr1:9614272-9614520; Gene: SLC25A33 (intron)
  source 1..249: mol_type = genomic DNA
cgctctgtcacccaagctggagtgcaatggtgcgatcttggctcgctgcaggtgatctgcccaccttggcctcccaaagtgctggtattacaggcgtgagccaccgctcccagccgtgaatatttttaaaagaaacaaaatgtttgtttgtttgtttgtttttgagctggagttttgctctcgttgcccaaactggagtgcaatggcacaatctcagctcaccgcaacctctgcctcctggattcaagc

SEQ ID NO: 879 - DNA, 95 bp, Homo sapiens
  misc_feature 1..95: note = U/M: U (0.04:0.94) in Liver Hepatocytes
  misc_feature 1..95: note = source = chr15:42940421-42940515; Gene: STARD9 (intron)
  source 1..95: mol_type = genomic DNA
cgcgatctcggctcactgcaacctccgcctcctgggtttgagcaattctcctgcctcagcttcccgagtagctgggattacaggcacatgctacc

SEQ ID NO: 880 - DNA, 244 bp, Homo sapiens
  misc_feature 1..244: note = U/M: U (0.04:0.93) in Liver Hepatocytes
  misc_feature 1..244: note = source = chr2:231385134-231385377; Gene: SP100 (intron)
  source 1..244: mol_type = genomic DNA
cgccctaggattcaacaaaaactcctgtctagccaaggagaaaaccagcttcaaaaaaccagaacttccaccacgatgggaggttcattgattttgggaggaactcctctgcaacccccagccagggcatccaagttcaggaacacaatgtgttcattgccagtacctgcacaaaggtcggaggccgcatatgtcgtccagggaggtcactccaaaattctgccaactacaccggaatgttgac

SEQ ID NO: 881 - DNA, 265 bp, Homo sapiens
  misc_feature 1..265: note = U/M: U (0.06:0.95) in Liver Hepatocytes
  misc_feature 1..265: note = source = chr16:78590461-78590725; Gene: WWOX (intron)
  source 1..265: mol_type = genomic DNA
cgcagctggaccggcgtgcggtgagttgccgtgcccaccacgactgctgtctgtgtttaggacagagttcaaccaaacgtaccggtgtgtgattttgcacaacactgctttgtatttgttttccctgagaccggcaaacacattttttatttattttatttttatttttcgagatggactttcgcttttttgcccagcctggagtgaagtggcatgatctcggctcactgcaaactacccccgcccccgggttcaagcaattctc

SEQ ID NO: 882 - DNA, 250 bp, Homo sapiens
  misc_feature 1..250: note = U/M: U (0.08:0.96) in Liver Hepatocytes
  misc_feature 1..250: note = source = chr4:110434478-110434727; Gene: SEC24B (intron)
  source 1..250: mol_type = genomic DNA
cgcctaggctggagtgcagtggtgtaatctcagctcactgcaacctctgcctcccaggttcaagcaattctcctgcctcagcctcctgagtagctgggattacaggcgcacaccactatgcctggctaatttttgtttttttagtagagacgaggtttcaccatgttggtcaggctgttctcaaactcctgacctcgtgatccgcccgccgcggccgcccaaagtgctgggattgcaggcgtgagccacc

SEQ ID NO: 883 - DNA, 111 bp, Homo sapiens
  misc_feature 1..111: note = U/M: U (0.06:0.94) in Liver Hepatocytes
  misc_feature 1..111: note = source = chr4:3105910-3106020; Gene: HTT (intron)
  source 1..111: mol_type = genomic DNA
cgcctcccgggttcaaccgaactttgggctggtctcaaactcctgacctcaggtgatccgcccgcctcggcctcccaaagtgttgggattacaggcgtgagccactgtgcc

SEQ ID NO: 884 - DNA, 137 bp, Homo sapiens
  misc_feature 1..137: note = U/M: U (0.06:0.94) in Liver Hepatocytes
  misc_feature 1..137: note = source = chr15:91194697-91194833; Gene: BLM (Intergenic)
  source 1..137: mol_type = genomic DNA
cggctacgtgatttgctttggccggtgacatgctggagatacgaccaaacagcaaagccttgacatggggtcaggaggccttggagcccggcccactgggttcaggcccttgcaccttgacatgggctcggtgacac

SEQ ID NO: 885 - DNA, 93 bp, Homo sapiens
  misc_feature 1..93: note = U/M: U (0.06:0.93) in Liver Hepatocytes
  misc_feature 1..93: note = source = chr2:230936371-230936463; Gene: SLC16A14 (Intergenic)
  source 1..93: mol_type = genomic DNA
cgcagtggctcatgcctgtaatcccagcactttgggagtccgaggtgggcggatcgcctgaggtcgggagcttgagaccagcctggccaacac

SEQ ID NO: 886 - DNA, 337 bp, Homo sapiens
  misc_feature 1..337: note = U/M: U (0.07:0.93) in Liver Hepatocytes
  misc_feature 1..337: note = source = chr10:99062257-99062593; Gene: ARHGAP19 (Intergenic)
  source 1..337: mol_type = genomic DNA
cgtgggtggcatgggtgaccctgagcctgacagggtgagcgcgaaagcctgcaaacacaccaaacatttgaaatctctctggctgctgtggtttgaatgtccaatttaaaactcatgttggccaggtgcagtggctcactcctgtaatccttgccctctgggaagccgaaagggcggatcacctgaggtcaggagttctagaacagcctggccaacagagtgaaaccccgcctctactaaaaatacaaaaaaaaggaaaaagattagttgggcatggtggtgcgtgcctgtagtcccaactacctgggagtctgaggcaggagaattgcttcaaccc

SEQ ID NO: 887 - DNA, 341 bp, Homo sapiens
  misc_feature 1..341: note = U/M: U (0.06:0.92) in Liver Hepatocytes
  misc_feature 1..341: note = source = chr17:1648769-1649109; Gene: SERPINF2 (intron)
  source 1..341: mol_type = genomic DNA
cgcgtgctgaggctgaggctctggagtccagaggccagaagggagagagggtggggaggaccgaaggtgggcgccaggccccagaatgccagtgccctccgtctgacgctccctcttccctggggctgggacaaggccctgctgtcctcaggcacaggggctgtgacaaggccttcaacacagaacctggagctgaccccttgacctccctgacccctgatctgtccctgcaggagcctggtggccagactgccctgaagagtcccccaggagtctgcagcagagaccccaccccagagcagacccacaggctggcccgggccatgatggccttcactgcc

SEQ ID NO: 888 - DNA, 365 bp, Homo sapiens
  misc_feature 1..365: note = U/M: U (0.07:0.93) in Liver Hepatocytes
  misc_feature 1..365: note = source = chr17:79984007-79984371; Gene: LRRC45 (intron)
  source 1..365: mol_type = genomic DNA
cgccgtccctggcttcgcctcggcactgccctggttgttgtcatccctcctgacctctgccccctcgccacatgctacccagatctttccagaactgagctgggcacagcatttgcctcagcattgtgcagtgccccttgacctttgggatggtggccagatgccccaggatggcccttgccttttgcggtggagcagctcccaccacctctgccccacatgtgcacgcgctccccaacaccaggcggctcttgctcacagcccgaaccccacaaagcacttccacccccatgcactgagggggcacccctgacttgccgggtgagacgctgccccacacggcatagattcccaagcagccagcc

SEQ ID NO: 889 - DNA, 160 bp, Homo sapiens
  misc_feature 1..160: note = U/M: U (0.08:0.94) in Liver Hepatocytes
  misc_feature 1..160: note = source = chr9:133474347-133474506; Gene: FUBP3 (intron)
  source 1..160: mol_type = genomic DNA
cgaggccagcctgggcaacatagcaaaaccgtatttccgaaaaataaataaggccgggcactgtggctcacgcctgtaatcccagcactttgggaggccaaggcaggcaaatcacgaggtcaggagattgagaccatcctggctgacacggtgaaacccc

SEQ ID NO: 890 - DNA, 92 bp, Homo sapiens
  misc_feature 1..92: note = U/M: U (0.11:0.96) in Liver Hepatocytes
  misc_feature 1..92: note = source = chr16:58625432-58625523; Gene: CNOT1 (intron)
  source 1..92: mol_type = genomic DNA
cggatcacctgaggtcaggagttcgagaccagcctgaccaacatggtgaaaccccatctctactaaaaatacaaaaattagccggacgtggc

SEQ ID NO: 891 - DNA, 491 bp, Homo sapiens
  misc_feature 1..491: note = U/M: U (0.05:0.9) in Liver Hepatocytes
  misc_feature 1..491: note = source = chr19:45449520-45450010; Gene: APOC4,APOC4-APOC2 (TTS,intron)
  source 1..491: mol_type = genomic DNA
cgctatgtagcccaggctagactcaaactcctgggctcaagcaatcctcctgcctcagcctccccagtagctgggactacaggtgcaccaccacactccacaaatcacagaatttagaactgtagactatttgagcttctgcttagagttagggtggctgaggtggggaggatcccttgagcccaggagtttgaggatgcagtgagctgtgatcttgccaccgtgttccagcctgggtgacagagaaaccccatttctaaaaaagagaaagaaaaagggataggtacaatggctcatgcctgtaatcccagcactctgggaggccgaggcgggtggatcacttgaggtcaggagttcgacaccagccttaccagcatggtgaaaccgcatctatactaaaaatacaaaaattggccgggtgtggtagcatatgcctgtaatcccagctattccagaggctgagacaggagaattgcttgaacccaggaagc

SEQ ID NO: 892 - DNA, 458 bp, Homo sapiens
  misc_feature 1..458: note = U/M: U (0.1:0.94) in Liver Hepatocytes
  misc_feature 1..458: note = source = chr6:37114490-37114947; Gene: PIM1 (Intergenic)
  source 1..458: mol_type = genomic DNA
cggaggttgcagtgagcagagatcgcaccactgcactccagcctggtgacagagccagaatccgtcccccacaaaaaagaattttgttttgcctctacaaaactttatcagttcatccacctggtgaactcaactctgactgattgaattgtgaaataagaggaattcaaatgattcctttccctttgcttctttccttcaaacaacaaatatatttgcagtgcatatttgtttgttttagagacagagtctcatctgtctcccaggctttgttgcagtggcaccatcatagctcactgcagcctggaactcctggactcaagcgatcatcttcctactttaacctcctgagtaaatgggatgacagggttgcaccactatgtctggttaatttttttttttttttcgagacggagtctcgccctgtcgcccaggctggagtacagtgatgtgatcac

SEQ ID NO: 893 - DNA, 387 bp, Homo sapiens
  misc_feature 1..387: note = U/M: U (0.12:0.95) in Liver Hepatocytes
  misc_feature 1..387: note = source = chr3:52245330-52245716; Gene: ALAS1 (exon)
  source 1..387: mol_type = genomic DNA
cgccagcacgagttctctgattgacaccgtacggtcctatgctgctggcttcatcttcaccacctctctgccacccatgctgctggctggagccctggagtctgtgcggatcctgaagagcgctgagggacgggtgcttcgccgccagcaccagcgcaacgtcaaactcatgagacagatgctaatggatgccggcctccctgttgtccactgccccagccacatcatccctgtgcgggtaatggcctgtctctgattggacttgccgtggggtgtgcctctacacatgatgtacggatgttctgcttcataccttcctgaagttgggcttgagcggggtgactgccagggcaggggttgtagccagccaccctctgtcatgtttcc

SEQ ID NO: 894 - DNA, 244 bp, Homo sapiens
  misc_feature 1..244: note = U/M: U (0.12:0.93) in Liver Hepatocytes
  misc_feature 1..244: note = source = chr17:80440933-80441176; Gene: NARF (exon)
  source 1..244: mol_type = genomic DNA
cgtgtaatcccagcacttcaggaggctgaggcaggctggtcacctgaggtcaggagttcgagaccagtctggccaacatggtgaaacccccgtctctactaaaaatacaaaaattagccaggcgtggtagtgcacacctgtaatcacagctactcaggaggctgcggcaagagaatcacttgaacccgggaggcagaggttacagcgagacaagattgcaccactggactccagcctgggcggc

SEQ ID NO: 895 - DNA, 452 bp, Homo sapiens
  misc_feature 1..452: note = U/M: U (0.14:0.95) in Liver Hepatocytes
  misc_feature 1..452: note = source = chr16:67805212-67805663; Gene: RANBP10 (intron)
  source 1..452: mol_type = genomic DNA
cgtgggaggtcacttaaaaactttgatcttttttatttattttatttttttttttgagacggaatctcaccctgttgctcaggctggagtgcagtggcgcaatctcagctcactgcaacctccacctcccgggttcaagcgattctcctgcctctgcctcccaagtagctgagactacaggtgtgtgccaccacacccgactaattttttatttttagtagagacagggtttcaccatgttggccaggctggtctcgaactcctgacctcaggtgatccatccacctcggcctcccaaagtgggattacaggcgtgagccgctgtgcccggccaaaaactttgatctttaacacgatgaagtaacaaaggagccaaggttggcagcagtcttcctcccagtacatgcctgagtctgctcagcaaggccaatgggagcaagggctactgacgc

SEQ ID NO: 896 - DNA, 126 bp, Homo sapiens
  misc_feature 1..126: note = U/M: U (0.15:0.95) in Liver Hepatocytes
  misc_feature 1..126: note = source = chr15:40959187-40959312; Gene: LOC100505648 (Intergenic)
  source 1..126: mol_type = genomic DNA
cgtctctactaaaaatacaaaaattagccgggcgtggtggtgcgcgcctacgtcccagttgctcaggaggctgaggcaggagaatcgattgaactcgggaggcagaggttgcagtgaactgagatc

SEQ ID NO: 897 - DNA, 134 bp, Homo sapiens
  misc_feature 1..134: note = U/M: U (0.03:0.94) in Liver Hepatocytes
  misc_feature 1..134: note = source = chr4:74271468-74271601; Gene: ALB (intron)
  source 1..134: mol_type = genomic DNA
cggctaatcttttgtatttttagtagagatggggtttcaccgtgtgccaggatggtctcaatctcctgacatcgtgatctgcccacctcggcctcccaaagtgctgggattacaggagtgagccaccgcgcccg

SEQ ID NO: 898 - DNA, 157 bp, Homo sapiens
  misc_feature 1..157: note = U/M: U (0.05:0.95) in Liver Hepatocytes
  misc_feature 1..157: note = source = chr6:142606522-142606678; Gene: GPR126 (Intergenic)
  source 1..157: mol_type = genomic DNA
cgcgtagtacatggtaactaatacctccgctcagtgttttggcttttagtagctggtattttacttcaactggcatcttggaagtctccatagctcatgagaaaaaaaatcaatatgacaaaaggggtgtgcgtgtgtgcacgcgcgtgtgtgcacg

SEQ ID NO: 899 - DNA, 203 bp, Homo sapiens
  misc_feature 1..203: note = U/M: U (0.04:0.94) in Liver Hepatocytes
  misc_feature 1..203: note = source = chr11:116705312-116705514; Gene: APOA1 (Intergenic)
  source 1..203: mol_type = genomic DNA
cgattctcctgcctcagccttcctagtagctgggattacgggtgcaagccaccatgcccagctgattttttttgtatttttagtagagacagggtttcaccatattggccaggctggtctcaaactcctggcctgaagtgatacgcccacctcagcctcccaaagtgctgggattacaggcttgagccaccgcacccgacccg

SEQ ID NO: 900 - DNA, 276 bp, Homo sapiens
  misc_feature 1..276: note = U/M: U (0.05:0.94) in Liver Hepatocytes
  misc_feature 1..276: note = source = chr19:45792169-45792444; Gene: MARK4 (intron)
  source 1..276: mol_type = genomic DNA
cggcatctacattcggtcccactccctgctcttctgctctgcacatgttcagtagccgccccacgtggctgtgcccttggcctttcgaggctggtcacggcaggttactaccagtcaagtcccagccttgaccagggtgcacacaggtgtgagtctgagccaattgtgggcctaaacttttaaaagtatgggtcacctgccaggcgcggtggctcacgcctataatcccagcactttgggagtccgaggagggtggatcatgaggtcaagagatcg

SEQ ID NO: 901 - DNA, 129 bp, Homo sapiens
  misc_feature 1..129: note = U/M: U (0.04:0.92) in Liver Hepatocytes
  misc_feature 1..129: note = source = chr5:36403138-36403266; Gene: RANBP3L (Intergenic)
  source 1..129: mol_type = genomic DNA
cgctcttgttgcccaggttggggtgcaatggcgcgatctcagctcactgcaatatctgcctccctggttcaagcgattctcctgcctcagcctcccgagtagcttggattacaggcacccgccaccacg

SEQ ID NO: 902 - DNA, 372 bp, Homo sapiens
  misc_feature 1..372: note = U/M: U (0.07:0.95) in Liver Hepatocytes
  misc_feature 1..372: note = source = chr9:128347842-128348213; Gene: MAPKAP1 (intron)
  source 1..372: mol_type = genomic DNA
cggctcccgtccttcgcttgtatactgccagcagatgagcccgatcaggtcctgcaccctggcgctggccattgtcaccacggtcattggcagcagtctgtcctggctcgagtgcagagggaggtagacatcgatcttcttggttgctgttgtacctacatgaccctgtggacagaacaaacacgtgagagcaaagcacactgccagttatacagaccccactgctctccaggcctgtgggcagcacagccatttttcatccttgctctacagacctactgtgaccatggaatggtcccaaagtggaaacactgtctagtttcaaggattttttttccttaaattttcattttataataaactaatggatcg

SEQ ID NO: 903 - DNA, 430 bp, Homo sapiens
  misc_feature 1..430: note = U/M: U (0.05:0.93) in Liver Hepatocytes
  misc_feature 1..430: note = source = chr18:56112759-56113188; Gene: MIR122 (Intergenic)
  source 1..430: mol_type = genomic DNA
cgggcaactgagcgagactccatttcaaaaaaataagtaaataaaaaataaaaagcaataataatagccgacaacagaatacagctaggccgagcagcagcctcctctgctgtccgtgcggctcgcctgttgcctgcttcactgcctgactgtgggctctgtttgtcttggtccccgtggcattaccagagcttagcagataaggaggagcttcatacataattgttggcgtgaacaaaggaatgcatggttaactacgtcagaaatgaccagttcaagaggagaatgagattggcttccaaatgttggtcaagagctctacgtagcatgagccaaggatctattgaacttagtaggctcctgtgaccggtgactcttctgtctctagaaatctggggaggtgaccaggtcatacatggcagtcttcccg

SEQ ID NO: 904 - DNA, 66 bp, Homo sapiens
  misc_feature 1..66: note = U/M: U (0.06:0.93) in Liver Hepatocytes
  misc_feature 1..66: note = source = chr11:132221034-132221099; Gene: NTM (Intergenic)
  source 1..66: mol_type = genomic DNA
cggaggcaggagagtcgcttgaaccccggaggcagaggttgcagtgagccgagatcggagattgcg

SEQ ID NO: 905 - DNA, 176 bp, Homo sapiens
  misc_feature 1..176: note = U/M: U (0.05:0.92) in Liver Hepatocytes
  misc_feature 1..176: note = source = chr1:207263326-207263501; Gene: C4BPB (intron)
  source 1..176: mol_type = genomic DNA
cggaattccggccgggcgcagcggctcaagcctgtaatcccggcactttgagaggccgaggtgggcggatcacgaggtcaagagatcgagaccatcctggctaagacagtgaaaccccgtctctgctgaaaatacaaaaaattagctgggcgtggtggcgggtgcctgtagtcccg

SEQ ID NO: 906 - DNA, 176 bp, Homo sapiens
  misc_feature 1..176: note = U/M: U (0.04:0.91) in Liver Hepatocytes
  misc_feature 1..176: note = source = chr12:53571394-53571569; Gene: CSAD (intron)
  source 1..176: mol_type = genomic DNA
cgtggagacccatctatttatttatttatttatttatttattttttgagacagagtttcgctcttgttgcccaggctggagtgcaatggcacaatatgggctcactgcaacccccgcctcccgggttcaagtgattctcctgcctcagccacctggtaactgggattacaggcacg

SEQ ID NO: 907 - DNA, 302 bp, Homo sapiens
  misc_feature 1..302: note = U/M: U (0.05:0.92) in Liver Hepatocytes
  misc_feature 1..302: note = source = chr2:121239392-121239693; Gene: LOC84931 (Intergenic)
  source 1..302: mol_type = genomic DNA
cgctcaagagagggttggagacagggtctcactgcaccaccaaaggagctctccacagctcccttctctcctcggacccatcgcggctacagaatcgacagacgtgagccttggccaggtgagagcgctaacggaagaggccagagcctgacctctcacagggtcagagtccccccatggccttcctactgtagacttctggttccatctctctccttcaactgcagccagcttcccggacaaagggcccttctcggggaatgtccacattgcaaaagactttcactgtctccagtcctgcg

SEQ ID NO: 908 - DNA, 375 bp, Homo sapiens
  misc_feature 1..375: note = U/M: U (0.06:0.93) in Liver Hepatocytes
  misc_feature 1..375: note = source = chr1:173883833-173884207; Gene: SERPINC1 (exon)
  source 1..375: mol_type = genomic DNA
cgggaattggccttggacagttcccagacacgccggttggtggcctccgggatcttctgttctgagccctcatcctcagttgccttcttctccggggagcggtaaatgcacatgggattcatgggaatgtcccgcggcttggctgtgcagatgtccacagggctcccgtgacaggtcacgcagtcccagaagccaatgagcagcaaggacaaaagataaaccttcctgcaaggagacaaaatgccaagttaagctaggctgcaacccctagccccactgcccaccacagggttgccccagtaaagcagaggattccagcccacctggtgtggccaagagaaaggctaaatcctttgaaccaagtacaggggcccg

SEQ ID NO: 909 - DNA, 385 bp, Homo sapiens
  misc_feature 1..385: note = U/M: U (0.06:0.93) in Liver Hepatocytes
  misc_feature 1..385: note = source = chr2:119980538-119980922; Gene: STEAP3 (promoter-TSS)
  source 1..385: mol_type = genomic DNA
cggaaaagcccgggtctcctcacctgtaaagaaaataactgcagccggcaaatgtgaccacaggtgagaaggggcttcggaccagggcgcacacctctagagaggtgcccacagacagcctccccttacttacgccctgcttcgctgcagtgctgtgaagccatcggcattggaagtgcggagggcagcgggcagtgccccagggggaaggggggacgggtagggtttcagagcccagaaggcctagacagggaggcagctccgggagaaaggtacccgccatcccaccggtcttggaacctgaggactgctgggaagggtcaaaagtctgccctaagggtggacaagggacagagattggggggggaccacaaaggcctgggcg

SEQ ID NO: 910 - DNA, 458 bp, Homo sapiens
  misc_feature 1..458: note = U/M: U (0.06:0.93) in Liver Hepatocytes
  misc_feature 1..458: note = source = chr12:53564117-53564574; Gene: CSAD,CSAD (exon,intron)
  source 1..458: mol_type = genomic DNA
cggtaagggtctgatgccagagctttctggcggcaggaagttacgctgtgcaaagctaggtcacagccatgtgggcagaaggaccttcacctctcatcagccttgaccactcggacactgtcggtgccaagtcccagaaacgcagctcccttctggatggagtagtgacactgtgggggaaggcagagggcaagttagcacaacttgatgggggaggggagagaaggtaaaagtcaagtgtgagctccaacaaatgggatcctgtagaccagggcttctcaaatgtcagcgtgcatacgaatcgcctgggtgtctggttaaaatgaaatgcaggttctggtccactaggtctggggtctagggtggggcccaagattctgcatttgtttgttttttttttttttggagacaagagtctccctctgtcacccaggctggagtgcagtggtgtcatctcg

SEQ ID NO: 911 - DNA, 193 bp, Homo sapiens
  misc_feature 1..193: note = U/M: U (0.05:0.91) in Liver Hepatocytes
  misc_feature 1..193: note = source = chr10:54534928-54535120; Gene: MBL2 (Intergenic)
  source 1..193: mol_type = genomic DNA
cgggcgtggtggcgggtgcctgtaatcccagctacccaggaggctgaggcaggagaatggagtgagcccgggaggcggagcttgcagtgagctgagattgcaccactgcgctccagcctgggcgacagagcctctccgtctaaaaaaaaaaaaaactttccactttcctaacactgcttccattctggcagcg

SEQ ID NO: 912 - DNA, 236 bp, Homo sapiens
  misc_feature 1..236: note = U/M: U (0.06:0.92) in Liver Hepatocytes
  misc_feature 1..236: note = source = chr6:163617164-163617399; Gene: PACRG (intron)
  source 1..236: mol_type = genomic DNA
cgcacagcgtttccgcgagaacgttccctgatcatctagagttagggaagtagaaccgtgccctgcacatgataagcacatggagactctaatcaatgagagctactatgattgctgctcacggacagcgcccaacagctctgttgtccctgctaatgacaccgtcgtccctcccctggtcaaccacgacccaaatgttaaagtgacctttcactcttttcgccaacatgtatccg

SEQ ID NO: 913 - DNA, 278 bp, Homo sapiens
  misc_feature 1..278: note = U/M: U (0.07:0.93) in Liver Hepatocytes
  misc_feature 1..278: note = source = chr13:34183496-34183773; Gene: STARD13 (intron)
  source 1..278: mol_type = genomic DNA
cggaattgaaaagtcaagcggccaggtaccacttgaaaccgtcatgtcagcaaatacaattaatcgggtgcactaagttttggtgaaaatcttgatcattgctggtgagcttgaaaattaacatagccctcttggagagcaatttgtcaatatttggcaatgttgaaactgacctatggcccaggaattctacttctaatttctttctttctttttttttttttttgagatggagtctcgctgtgttgcccaggctggagtgcagtggcaggacctcg

SEQ ID NO: 914 - DNA, 421 bp, Homo sapiens
  misc_feature 1..421: note = U/M: U (0.06:0.92) in Liver Hepatocytes
  misc_feature 1..421: note = source = chr19:2790820-2791240; Gene: THOP1 (intron)
  source 1..421: mol_type = genomic DNA
cggaagcgtctggcaggtgctggtcactagaggtgtaggagagaggcagttcctcccgtgctccgctctgcttcacagcctcgtccattcaaaggactccctggttgtgtgatctgagagccggagatgagaaaatatgtctaaacagcacgcctctccagcctctcccagagccagcagccttgaaccctgaccccgtctggcctctttccctggcccgggaaggcgggtatttgtttctctctgaatgactgaacttggcccccttggcttctgcctctgcgccctccggcgggggtgacctcatgtcctcgggcgtcctcctcaccctcagcccgatcctcctcctctccttggggtccctgtgctcacggtgaggagtgaggtgcctagtgacaggggttagggacactgcttcccg

SEQ ID NO: 915 - DNA, 104 bp, Homo sapiens
  misc_feature 1..104: note = U/M: U (0.1:0.95) in Liver Hepatocytes
  misc_feature 1..104: note = source = chr11:116680030-116680133; Gene: APOA4 (Intergenic)
  source 1..104: mol_type = genomic DNA
cgcagaaaatcatgacccgatgaagagcacaatcatagaagcactaacagatgacaaggttgccagatcttcaccattggttttgggtttcgtgaaaacccgcg

SEQ ID NO: 916 - DNA, 178 bp, Homo sapiens
  misc_feature 1..178: note = U/M: U (0.07:0.92) in Liver Hepatocytes
  misc_feature 1..178: note = source = chr10:91168996-91169173; Gene: IFIT5 (Intergenic)
  source 1..178: mol_type = genomic DNA
cggtgttctataatagggaccaagaggaacaggccgaaaaggaaaagcgagatcagagaaagaccgcagccttagtcgtggccctcagacaaacaaaccttggtggttcagagaggacagaaaatggagcatgccaatcacccggtagggcttgttatcagtgtggtttacaaggacg

SEQ ID NO: 917 - DNA, 184 bp, Homo sapiens
  misc_feature 1..184: note = U/M: U (0.07:0.92) in Liver Hepatocytes
  misc_feature 1..184: note = source = chr5:32119151-32119334; Gene: GOLPH3 (Intergenic)
  source 1..184: mol_type = genomic DNA
cgcacggcccatcttaaccattttttaagtacacagttcagtgacattaagtctactgacattgtgtaatcaccaccatccatccctgcaactttttgtttgttttttgagacggagtcttgccctgtcacccaggctagagcgcaatggtgcaatgtcagctcactgcaacctccacctcccg

SEQ ID NO: 918 - DNA, 192 bp, Homo sapiens
  misc_feature 1..192: note = U/M: U (0.06:0.91) in Liver Hepatocytes
  misc_feature 1..192: note = source = chr11:116697148-116697339; Gene: APOA4 (Intergenic)
  source 1..192: mol_type = genomic DNA
cgcttctgtctcacccgcccgcctgggtgcacccatgctgggagcgcctgcaccatttgagcatgtccgagagcatccaccagagtgtgtgtggattcacagaagtgtgcaaatcactaagaaccaagggactggcacagcccatgcgtgcacccacgctcgcgaggggacctgctgcctttcaacgtggcg

SEQ ID NO: 919 - DNA, 202 bp, Homo sapiens
  misc_feature 1..202: note = U/M: U (0.06:0.91) in Liver Hepatocytes
  misc_feature 1..202: note = source = chr1:243619235-243619436; Gene: SDCCAG8 (intron)
  source 1..202: mol_type = genomic DNA
cgctgtggcccctaaggaaacaaacaagtgggtcagaatggcctctggaccgaagggatgcgtgttgcaggagcaaggactgttggcgtgggctgatcgctggtctacaggctgtgggagctcagagcatggacccagtcagttcagtctccatcatcctagttttctggatcttccaactccttattcatcgaatgaaccg

SEQ ID NO: 920 - DNA, 213 bp, Homo sapiens
  misc_feature 1..213: note = U/M: U (0.07:0.92) in Liver Hepatocytes
  misc_feature 1..213: note = source = chr1:93401410-93401622; Gene: FAM69A (intron)
  source 1..213: mol_type = genomic DNA
cgggaggatcaggagttcacgaccagcctgggtaacaaagcgagaccctgtctctacaaaaaataggaagataaaaattagccaggctggaacatctactctggtggctggaacagctactcaggtgtctgaggtgggatgatcgatcacctgggcccaagagttcaaggctgcaatgagctatgatcacgccactgcattccagcctgggcg

SEQ ID NO: 921 - DNA, 216 bp, Homo sapiens
  misc_feature 1..216: note = U/M: U (0.07:0.92) in Liver Hepatocytes
  misc_feature 1..216: note = source = chr17:38700428-38700643; Gene: CCR7 (Intergenic)
  source 1..216: mol_type = genomic DNA
cgggaggcagaggttgcagtgagccgagatcgcgccactgcactccagcctgggtgacggggtgagactccgtctcaaacagacaaacaaaaaagaaatctgatgaaatagtttcttgttggtggccacttggacgacctttcctctctcctgtgggtgactgtaattggaatggggcacactggcatgccccttagggcccattcgtttttcccg

SEQ ID NO: 922 - DNA, 222 bp, Homo sapiens
  misc_feature 1..222: note = U/M: U (0.06:0.91) in Liver Hepatocytes
  misc_feature 1..222: note = source = chr7:100163609-100163830; Gene: AGFG2 (exon)
  source 1..222: mol_type = genomic DNA
cgaaagagaaaacggcgcctgtggttttgcttcaggccactttgaggggttgcaggtcagtcaacatgactgatccttgacctggctctgctgggctggactgcctgggccagtgataatgctgccattggccagagacagggcagagcccgtccctgtctgaacaagagtcccgcattagcaatgagaagaagcgtggcgggagaggagccaccactgccg

SEQ ID NO: 923 - DNA, 228 bp, Homo sapiens
  misc_feature 1..228: note = U/M: U (0.05:0.9) in Liver Hepatocytes
  misc_feature 1..228: note = source = chr13:46015250-46015477; Gene: SLC25A30 (Intergenic)
  source 1..228: mol_type = genomic DNA
cgcttgtaatcccagcactttgtgggggctaaggcaggtggatcaccagaggtcagaagtttgagaccagcctggtcaacatggtgaaaccctgtctctactaaaaatacaaaaattagccgggtgtggtggtgggcacctgtagtcccagctactctggaggctgaggcagaagaatctcttgaacccaggaggcagaggttgcagtgagccgagattgcgccatcg

SEQ ID NO: 924 - DNA, 230 bp, Homo sapiens
  misc_feature 1..230: note = U/M: U (0.07:0.92) in Liver Hepatocytes
  misc_feature 1..230: note = source = chr19:33767237-33767466; Gene: CEBPA (Intergenic)
  source 1..230: mol_type = genomic DNA
cggtctagaggcgctggcctttctcacccccaccctggatcagcctaccgctgattcctgcccctggccccagcccattctctttggagcctttgaggtgggcttttcttcttggactggggcttgcccactggggtgtctcaagccctgacctcagccccttgcgtccacactgctggggcttgttgagactggccgcgtggagcatgctgtgtagacagtcaggaccg

SEQ ID NO: 925 - DNA, 233 bp, Homo sapiens
  misc_feature 1..233: note = U/M: U (0.06:0.91) in Liver Hepatocytes
  misc_feature 1..233: note = source = chr18:21641760-21641992; Gene: TTC39C (intron)
  source 1..233: mol_type = genomic DNA
cgggaggctgaggcaggagaatggctggaacctgggaggcggatgttgcagtgagccaagattgcacaattgcactccagcctgggtgacagagtgagactctgtttaaaaagaaaacaaaccaaggaccaagtgaaccatgttaggtcgagctcttctaacagcaagtgatgtgcagcctgagaggacgatcgcccgtcctgcagtgcattgtcacgtgcccgatgcacccg

SEQ ID NO: 926 - DNA, 302 bp, Homo sapiens
  misc_feature 1..302: note = U/M: U (0.1:0.95) in Liver Hepatocytes
  misc_feature 1..302: note = source = chr8:13083273-13083574; Gene: DLC1 (intron)
  source 1..302: mol_type = genomic DNA
cgccaccacgcccggctaattttttgtatttttagtagagatggggtttcaccgtgttagtcaggatggtttggatctcctgacctcgcgatccgcctgccttggcctccgactgtgctgggattacaggcgtgagccaccgcgcctggcctatttttttattttttgagaagcggtctccctgtgttgcccaaactggactgcagtggtgcaatcatggttcattgcagccttgaactccagggctcaattgatcctcccacatcagtctcctgagtagctgagaaaagaggcacatgtcg

SEQ ID NO: 927 - DNA, 323 bp, Homo sapiens
  misc_feature 1..323: note = U/M: U (0.07:0.92) in Liver Hepatocytes
  misc_feature 1..323: note = source = chr21:34677555-34677877; Gene: IFNAR1 (Intergenic)
  source 1..323: mol_type = genomic DNA
cgatgcgcaccaccacgacaggctaatttttttttctttttatagagacagggtttcgccatgttgcccaggtaggtctcaaactcctgagctcaagtgatcctcccatctcggcctctcaaagtgctgggattacaggcatgagccccatgcccggcccttcaactgttaacctgtattgatcacctacactggtaagcaaaggtcactctcacttcctaggtcatgacctatcaataggtcagagtcctaacgggaaacccatgacacactccaacagagtaactgagaaaggcataatgaaggatcttattgtagcagcg

SEQ ID NO: 928 - DNA, 324 bp, Homo sapiens
  misc_feature 1..324: note = U/M: U (0.03:0.88) in Liver Hepatocytes
  misc_feature 1..324: note = source = chr4:39435732-39436055; Gene: KLB (exon)
  source 1..324: mol_type = genomic DNA
cgctgcattaattttatccatgaaaaggccatttaccagccatgttacagcccttgtaagtgaggacaacaaagatcaataatattttcttcttttaggctcactcgaaagtttggcataactacaacacacatttccgcccacatcagaagggttggttatcgatcacgttgggatctcattggatcgagccaaaccggtcggaaaacacgatggatatattcaaatgtcaacaatccatggtttctgtgcttggatggtttgccaaccctatccatggggatggcgactatccagaggggatgagaaagaagttgttctccg

SEQ ID NO: 929 - DNA, 401 bp, Homo sapiens
  misc_feature 1..401: note = U/M: U (0.04:0.89) in Liver Hepatocytes
  misc_feature 1..401: note = source = chr17:17485333-17485733; Gene: PEMT,PEMT (exon,intron)
  source 1..401: mol_type = genomic DNA
cgtgagcagagtaggagagtcctgggtcccacatccaggctctgcctccgggtgtcagagtctcccttgatggcctccccttcacacctgtgaccaaagggcggtctcccatccactcccagccccaacctccttcatacaacagaggtcccggctttctgctacccagtaattctaatggaacccccactccaaggctccaggttgcagaggcctcggaatctgactaaaggaaaggagctacccaccacggccaggaggtctgctgagctgcaggaatagctcgagtcccacaggtcaccgacgaatagcctcagctgttaacaccccaaagcatgggtaaggaagaggctttatggtaatttactccattgaggggtgcagggttctcgggagcagcg

SEQ ID NO: 930 - DNA, 415 bp, Homo sapiens
  misc_feature 1..415: note = U/M: U (0.06:0.91) in Liver Hepatocytes
  misc_feature 1..415: note = source = chr22:46528295-46528709; Gene: PPARA (Intergenic)
  source 1..415: mol_type = genomic DNA
cgtagctgggattacaggcatgtgctactacactcagccaattttttgtcttttgggtagagatggggtttcgccatgttggccaggctggtcttgaactcctgacctcaagtgatccacctgcctcagcctcccaaagtgctgggattagaggcgtgagccactgcacccggcctcatcttgtagttaatgctttctgtgtacctggcctgtgctggccagcgccatggtggtagccacccacttgacagcagctgggaggtccctgggcacaaggagaagaggtgacaaggccgggtgggaggagcttggtctcgcacagtcctgaggtgacagccaccttgggctgcataccactgacctggccctgcaatggaggcagttgcccaagtaccggctgctggctggtgctccg

SEQ ID NO: 931 - DNA, 438 bp, Homo sapiens
  misc_feature 1..438: note = U/M: U (0.08:0.93) in Liver Hepatocytes
  misc_feature 1..438: note = source = chr1:161207275-161207712; Gene: NR1I3 (intron)
  source 1..438: mol_type = genomic DNA
cgaggtgggcggatcaccaggtcatgagatcgagaccatcctggccatcatggtgaaaccccgtctctactaaaaatacaaaaattagctgggcatcgtggcatgtgcctgtagtcccagctatttgggaggctgaggcaggagaatcgcttcaacctgggaggcagaggttgcagcgagccgagattgcgccactgcactccagcttgggcgacagagcgagactccatctcaaaaaaaacccaaaaaaacaaaacaaaaaacaaaaaaacaaaaaaacaaattcctgacttcaagtgatcaatcctcccaccttggcttcccaaagtgctgggattacaggcatgagctcccgcgcctggcctcttttctttcttttttgtagagatggggtctgttatgtaacccaggttggtcttgaactcctgggctcaagcg

SEQ ID NO: 932 - DNA, 499 bp, Homo sapiens
  misc_feature 1..499: note = U/M: U (0.05:0.9) in Liver Hepatocytes
  misc_feature 1..499: note = source = chr2:110069888-110070386; Gene: SH3RF3 (intron)
  source 1..499: mol_type = genomic DNA
cgtgacagttttctggttttgaaactgtgtgagcacatcagcaccaggtgatacgaaccctcagggtacctaagtccaggggagagtcacccagaagagaagggtgcaatgggctgcgtgcagttggcatccctaaccacccgaccggccatcactcactctcttacttgtgccccaatccctgactcatctgtgtattgcaaagagcatgaggatgtacctggcagagcgcaggcacacggttcataatgatggaaaggtcaaccctggcctggaggagccagagtatagtacaggtcactgtacaggtaaacaggcgattgattgcaggagagggtgggtgattgacctgcgtgtgggaacagagggtcaccgacaaaggcgcctggtcagcccaggtcaggggagacttcccggggcacagatgggaggatccttggctgagggtcagcctgagcagaggccaggggacatggcccgaagatgagggccagggacg

SEQ ID NO: 933 - DNA, 102 bp, Homo sapiens
  misc_feature 1..102: note = U/M: U (0.07:0.91) in Liver Hepatocytes
  misc_feature 1..102: note = source = chr6:49493139-49493240; Gene: GLYATL3 (intron)
  source 1..102: mol_type = genomic DNA
cgtggtggcacacctgtaatcccacacgcacgtgaggctgagatacgagaatcgcttgaaccggggaggtggaggttgcagtgagccgagattgcaccaccg

SEQ ID NO: 934 - DNA, 118 bp, Homo sapiens
  misc_feature 1..118: note = U/M: U (0.04:0.88) in Liver Hepatocytes
  misc_feature 1..118: note = source = chr11:354147-354264; Gene: B4GALNT4 (Intergenic)
  source 1..118: mol_type = genomic DNA
cgggagcagagagggaaggcagcatacgtcagcgttttcttctatgcacttttaagaaagatcaaagacggccgggcgcagtggctcacgcctgtaatcccagcactttgggaagccg

SEQ ID NO: 935 - DNA, 186 bp, Homo sapiens
  misc_feature 1..186: note = U/M: U (0.1:0.94) in Liver Hepatocytes
  misc_feature 1..186: note = source = chr4:39561899-39562084; Gene: SMIM14 (intron)
  source 1..186: mol_type = genomic DNA
cgttctgtcaccaggctggagtgcagtggcgcgatctccgctcactacaacctctgcctcctgggttttatttgtagtagagctgggatttcaccatgttggccaggctgttctcaaactcctgacctcaggtgatccatctgccttggcctccgaaaatgctgggattacaggcatgagccaccg

SEQ ID NO: 936 - DNA, 208 bp, Homo sapiens
  misc_feature 1..208: note = U/M: U (0.06:0.9) in Liver Hepatocytes
  misc_feature 1..208: note = source = chr1:11106576-11106783; Gene: MASP2 (exon)
  source 1..208: mol_type = genomic DNA
cgcagactgagatgttgcaggacccctcttggctcaccctcggctgcatagaaggcctcgaaccccgtgaacggcttctcgttggagtagtcggagcggaaggtaatgtccaggctggagcccagcgagtagaaagtgtccttgccaggggcccgctccgtgtctgtgctctcctgcccgcacagcgtggccagcaccttggcccccg

SEQ ID NO: 937 - DNA, 226 bp, Homo sapiens
  misc_feature 1..226: note = U/M: U (0.06:0.9) in Liver Hepatocytes
  misc_feature 1..226: note = source = chr1:12585207-12585432; Gene: SNORA59B (Intergenic)
  source 1..226: mol_type = genomic DNA
cgatctcagctcactgcaacttctgcctcccaggttcaagcgattctcctgcctcagcctcctgagtagctgcgactacagaaatgtgccaccacgcctggctaatttttgtgtttttagtagagacgggggagacagtagtttaaataagtcctggcgtgaatgccttacccagagggggcataaaatgaggggtctaaggccagcaccctgggaaatgtcaacg

SEQ ID NO: 938 - DNA, 372 bp, Homo sapiens
  misc_feature 1..372: note = U/M: U (0.07:0.91) in Liver Hepatocytes
  misc_feature 1..372: note = source = chr16:72089070-72089441; Gene: HP (intron)
  source 1..372: mol_type = genomic DNA
cgctttgtcaccaggctgcagtgcagtggcatgatctcggctcactgcaacctccacctcccaggttcaagtgattctcctgcctcagcctcccaggtagctgggactacaggcgtgcgccactatgcccacctaatttttgtatttttagtagagacgggctttcaccatgttggccaggatgacctcgatctcttgacctcgtgatctgcctgccttggcctcccaaagtgctgggattacaggcatgagccaccgtgtctggcctagaaactattttaatagaagcaagtagtgcccgaatggttggcatttgttagtgagatggtgaactggcagacggcacctgtgggtcaatgcccatggccaccg

SEQ ID NO: 939 - DNA, 478 bp, Homo sapiens
  misc_feature 1..478: note = U/M: U (0.08:0.92) in Liver Hepatocytes
  misc_feature 1..478: note = source = chr3:50244816-50245293; Gene: SLC38A3 (intron)
  source 1..478: mol_type = genomic DNA
cgcctcactgcaaccgccgcctcccaggcccaagcaattctcccacctcagccttctgagtagccaggaccgcaagtgtgcaacatcaagcctgggtaattttttttgtatttttggtagagacagggtttcatcatgttgtccagactggtctcggactcctgacctcaagcagtctgcctgccttggcctcccaaagtgctggaattacaagtctaagccaccgcgcccggccattccattcatttaacatttgctgagcacctactgtgtgcccggggtacactcttgtctagtgggtgaagggtaggcctttgactctgggtggtaggacagacataggagaacagggtggggctctagaggaccaggcggggcttctgggggccaaagggaaggaccagctgctgggcaggaggggctttccggccagtggcctggggtggcttggttttgaatttccgctctgcgggccacg

SEQ ID NO: 940 - DNA, 172 bp, Homo sapiens
  misc_feature 1..172: note = U/M: U (0.08:0.91) in Liver Hepatocytes
  misc_feature 1..172: note = source = chr18:47360963-47361134; Gene: MYO5B (intron)
  source 1..172: mol_type = genomic DNA
cgttttccctaatacattttctttcaagcattttcctaaaagcaaatattgtcttttttttttgagacaagagtctcactctgtcgcccaggctggagttcagtggcgcaatctcggctcactgcaagctccgcctcccaggttcacgccattctcctgcctcagcctcccg

SEQ ID NO: 941 - DNA, 244 bp, Homo sapiens
  misc_feature 1..244: note = U/M: U (0.05:0.88) in Liver Hepatocytes
  misc_feature 1..244: note = source = chr19:58864286-58864529; Gene: A1BG (exon)
  source 1..244: mol_type = genomic DNA
cggctcacttggccctgtcagctccaggagcttgctcagctgggtccatcctgtggacaagcccgagcggcagcggtagcggccctgggtgtcacccgtcagcaggaactggtgcttgatggcaggtgagtcaaggtgcacaggctcctgggccaccccattcttgaacagctggaagtctggagtctccaggtgggcctggcacgtcagcgtcacattggccaagggtttcagcagtgattcg

SEQ ID NO: 942 - DNA, 307 bp, Homo sapiens
  misc_feature 1..307: note = U/M: U (0.08:0.91) in Liver Hepatocytes
  misc_feature 1..307: note = source = chr10:134158895-134159201; Gene: LRRC27 (intron)
  source 1..307: mol_type = genomic DNA
cgtaaataacgtgtggccttgcacttttgacccagatggactctatttggaaattgttttaaatgattaagagtcagctgttggccctgtgcttgctgagttgtttgtagacatattttaaccaggttatagtggctgcattggggcattgcgctgaagccgcctggctgtggcacccttgaccccgatgctgccaggatgttgtgataaaaataggaaaagaaaagtagccgctggactggcagtgtggagggcactgggcacctggcaggagtgggggcaggtagctgagggcatggggtggccg

SEQ ID NO: 943 - DNA, 341 bp, Homo sapiens
  misc_feature 1..341: note = U/M: U (0.08:0.91) in Liver Hepatocytes
  misc_feature 1..341: note = source = chr19:33990040-33990380; Gene: PEPD (intron)
  source 1..341: mol_type = genomic DNA
cgttccgtctattttagatcctgtactcaacgggatcaatatgataggtcacatgtgtattgacagaatcttcagatgttaagagtcacccccaaaagcttgggattgaaataacataacataaagatccatcaaaagcctcctctctccacagtccaaccaggcagaagatgctgtagagacaggcccccgtggccctgtagaggtgggcagtgcccttcacagaggctcttccagggatctctgcccaggcaccaccaccctgcggtgactgttcactcatgtggtcacctcctgcactggactgtgccctgggctgttgaggtcagccctgggtctcg

SEQ ID NO: 944 - DNA, 397 bp, Homo sapiens
  misc_feature 1..397: note = U/M: U (0.11:0.94) in Liver Hepatocytes
  misc_feature 1..397: note = source = chr1:12582917-12583313; Gene: SNORA59B (Intergenic)
  source 1..397: mol_type = genomic DNA
cgggaggcggaggttgcggtgagctgagatcgcgccgctgaactccagcctgggcaacagaacaagactctgtctcaaaaaagcaaacaaaccaacaaaaaacctgtaataagagtaagtaattgtgcccttttgtactgtcatacttttgtactgtgattgtgtatttttaaagttcaataaaaaattttcaccatccacatttattttattcttattgtttcattcattagtattagtgaagatattaggttgctgcagaggtaattgctgggtttttttttctttgagatagaatttcactcttgttgcccaggctggagtgcaatggcacaatctcggctcactgcaacctctgcctcctgggttcaagcgattctcctgcctcagcctcccg

SEQ ID NO: 945 - DNA, 231 bp, Homo sapiens
  misc_feature 1..231: note = U/M: U (0.13:0.95) in Liver Hepatocytes
  misc_feature 1..231: note = source = chr19:8487337-8487567; Gene: MARCH2 (intron)
  source 1..231: mol_type = genomic DNA
cgcagtctcagctcactgaaacctccgcctcccaggttcaagtgattttcctgccttagccacccgagtagctgggattacaggcacccgtcaccacacctggctagtttttgtacttctagcagagacggggtttcgccatgttggccaggctggtctcaaactcctgacctcaggtgatctgcccgtctcggcctcccaaactgctgggattataagtgtgagccaccg

SEQ ID NO: 946 - DNA, 459 bp, Homo sapiens
  misc_feature 1..459: note = U/M: U (0.11:0.93) in Liver Hepatocytes
  misc_feature 1..459: note = source = chr4:185272821-185273279; Gene: LOC728175 (intron)
  source 1..459: mol_type = genomic DNA
cgttactgttcttggtaatagtaacaaggctctggttataagttccgttaagttttgaatggtctgcccacctctacttttcccatgagctaattatttttcacccttcgttttccagaaacgagagttttcatgggcgatgaggcggatgaacgtatgagattgcagtagaagctccagtatgcggcgatttctggcttattgacctatgacactttttttctggattcttatctcatttaactttgctatttgtattagtttccaaatgctactatagcaaatttccacaagcttagtggcttaaaacaacccaactgtgttatcctacagtctgaaggtcagaagtccaagttaggtctcactggactaaaatcagggtgtagacagggctgtgttccctcccgccttggccagcttctagagatgctctcactccttggttcaaggcccctctcg

SEQ ID NO: 947 - DNA, 496 bp, Homo sapiens
  misc_feature 1..496: note = U/M: U (0.09:0.91) in Liver Hepatocytes
  misc_feature 1..496: note = source = chr11:77879061-77879556; Gene: KCTD21 (Intergenic)
  source 1..496: mol_type = genomic DNA
cggcttttttttttttttttttttgtatttttagtagagacagggtttctccatgttggtcaggctggtcttgaacttttgacctcaggtgatccgcctgccttggcctcccaaagtgctgggattacaggcgtgagccactgcacctggctggcagtatttctttgaaactgacgatggtgacggtatttagtgggaaattggcccacactacagatcagggctttgtttaccagtacagcactagctgtgaacaagtgcggtgtgatgacgaaagtgctcaccaggtatagggtggcacagcaggggctgggactgactttattgcgtggagctaaggaggcggggcttacacagtattgaaggatgagctgtgaagacagagtggtaaagggaggcccagacaagtgtgggatggcaagacgtatcctgtggttctgtgaaaggaaactgtggatgtgaaggcacttggcaacttaatacaaggtgtcaagcg

SEQ ID NO: 948 - DNA, 56 bp, Homo sapiens
  misc_feature 1..56: note = U/M: U (0.13:0.94) in Liver Hepatocytes
  misc_feature 1..56: note = source = chr15:31450558-31450613; Gene: TRPM1 (intron)
  source 1..56: mol_type = genomic DNA
cggtggctcacgcctgtaatcccagcactttaggaggccggagcgggcagatcacg

SEQ ID NO: 949 - DNA, 131 bp, Homo sapiens
  misc_feature 1..131: note = U/M: U (0.09:0.9) in Liver Hepatocytes
  misc_feature 1..131: note = source = chr19:13303265-13303395; Gene: IER2 (Intergenic)
  source 1..131: mol_type = genomic DNA
cgaactcctgacctcagattatccacgcgccttggcctcccaaagtgttgggattacaggcatgagccgccgtgcctggccaaaaccctgtctcttaaacaaacaaaaaaggttaggtgcggtggctcacg

SEQ ID NO: 950 - DNA, 183 bp, Homo sapiens
  misc_feature 1..183: note = U/M: U (0.11:0.92) in Liver Hepatocytes
  misc_feature 1..183: note = source = chr3:148942102-148942284; Gene: CP (Intergenic)
  source 1..183: mol_type = genomic DNA
cggtgagaccccgactctactaaaaatacaaaaaaaaaaaaaaaaaaaaaaaaattagccaggcgtggtggcgggcacctgtagtcccagctactcgggaggctgaggcaggagaatggcgtgaacccggaaggtggaacttgcggtgagccgagatcgcgccattgcactctagcctgggcg

SEQ ID NO: 951 - DNA, 220 bp, Homo sapiens
  misc_feature 1..220: note = U/M: U (0.13:0.94) in Liver Hepatocytes
  misc_feature 1..220: note = source = chr15:40674143-40674362; Gene: KNSTRN (promoter-TSS)
  source 1..220: mol_type = genomic DNA
cgctctgtcacccagggtgaagtgcagtggcgcgatctccgctcactgcaacctctgccccgcccagggtcacataattcccccacctcagcctccagggtagctgggactacaggagcatgccacgacacctggctaatttctgtattttttgtagagacggggttgcaccatgtcgcccagggtggtctcaaactcctggactcaagcaattcacccg

SEQ ID NO: 952 - DNA, 225 bp, Homo sapiens
  misc_feature 1..225: note = U/M: U (0.07:0.88) in Liver Hepatocytes
  misc_feature 1..225: note = source = chr16:83971779-83972003; Gene: OSGIN1 (Intergenic)
  source 1..225: mol_type = genomic DNA
cgtgttgaccaggctggtctcaaactcctgacctcgtgatccgcccacctcagcctcccagagtgctgggattacaggcgtgagccaccacgcccggccccaagactggttgttaaacatttgtcaacacagcactgtcctgaccacccactcctctcaccctctggactctgtcacagccacccattgatcaaaagcaaccagaagccagctggccaaagcgcg

SEQ ID NO: 953 - DNA, 245 bp, Homo sapiens
  misc_feature 1..245: note = U/M: U (0.12:0.93) in Liver Hepatocytes
  misc_feature 1..245: note = source = chr19:49332720-49332964; Gene: HSD17B14 (intron)
  source 1..245: mol_type = genomic DNA
cgcctcagcctcttgagtagctgggattacaggcacctgccaccacgcacagctaatttttgtatttttagtagagatggggtttcaccatgttggactcctgacctcaagtgatctgtccgccttggcctcccaaagtgccaggattacaggcatgagctaccaggcctggcttttttttttttttttttttttgtgagacggagtttccgctcttattgcccaggctggagtgcaatggcacg

SEQ ID NO: 954 - DNA, 391 bp, Homo sapiens
  misc_feature 1..391: note = U/M: U (0.06:0.87) in Liver Hepatocytes
  misc_feature 1..391: note = source = chr16:72096449-72096839; Gene: HPR (promoter-TSS)
  source 1..391: mol_type = genomic DNA
cgccttcaacatgcaggcactgcctcctctaaggagccatctgtacttacgtagctgtgagcataggatggggcatacagcaggcacttaacaaatacttgtggaatggaaagaaactaagataggatcaaaaatacaaatcaagatgtgagagaaagacgatcaaaagccctcacgagggggctgggcgtgatggctcacacctgtaatctcaacactttgggaggctaaggcgggtggatcacttgagggtgggagtttgagatcagccagagcaacatggagaaacctcgtctctactaaaaatacaaaaaattagccaggcatggtgatatatgcctgtaatcccagctactcgggaggctgaggcaggagaattgcttgaacctcg

SEQ ID NO: 955 - DNA, 453 bp, Homo sapiens
  misc_feature 1..453: note = U/M: U (0.09:0.9) in Liver Hepatocytes
  misc_feature 1..453: note = source = chr3:72524731-72525183; Gene: RYBP (Intergenic)
  source 1..453: mol_type = genomic DNA
cgtagactcttagagcagaaaaggacttggaagcttatcttgtccagtggctcccaaacacagctgatcttccaaagattcttttgaaaatccggatttccaacattcccccttccccttcaaagtctgggaccttgaaatctgcggctttgaaaagctctccaggtgaatgtgatggtcagccagatttgagctcctctgggccaacactgtcatttttcagagcaggaaattgaatcaacatcagccaactcagggaaagagcactacctagaacttagggcttttaggtcctcatgaatactctttcaagcctgtgttgtcaaaaagttctaatcattagaataaatactatatggaacctaagaattcagttgttgacaccagggtgtaagcctgtacacaaatggactgttagatgtaggtcagtctttgataccatcgatagtagcg

SEQ ID NO: 956 - DNA, 82 bp, Homo sapiens
  misc_feature 1..82: note = U/M: U (0.1:0.9) in Liver Hepatocytes
  misc_feature 1..82: note = source = chr4:1747210-1747291; Gene: TACC3 (TTS)
  source 1..82: mol_type = genomic DNA
cgctggagtgcagtggcgtgaactcggctcactgtaagctccgcctcccaggttcacgccattctcctgcttcagcctcccg

SEQ ID NO: 957 - DNA, 95 bp, Homo sapiens
  misc_feature 1..95: note = U/M: U (0.11:0.91) in Liver Hepatocytes
  misc_feature 1..95: note = source = chr1:8019114-8019208; Gene: PARK7 (Intergenic)
  source 1..95: mol_type = genomic DNA
cgggaggctgagacagagaatcgcttgaacccaggagacagtggttgcagtgagccaagattgcgccactgcactccagcctaggcggctgagcg

SEQ ID NO: 958 - DNA, 104 bp, Homo sapiens
  misc_feature 1..104: note = U/M: U (0.11:0.91) in Liver Hepatocytes
  misc_feature 1..104: note = source = chr7:71149382-71149485; Gene: WBSCR17 (intron)
  source 1..104: mol_type = genomic DNA
cgcccccgatggctctgcatctgctctctcaggtccctacagctgacccgcagcccagggtttgaacagtgcggcatacaatggactctggccccatagccgcg

SEQ ID NO: 959 - DNA, 207 bp, Homo sapiens
  misc_feature 1..207: note = U/M: U (0.08:0.88) in Liver Hepatocytes
  misc_feature 1..207: note = source = chr15:91425594-91425800; Gene: FURIN (exon)
  source 1..207: mol_type = genomic DNA
cggcagcagccatcataggaagggaccaaggcaaggcaggtgcctccaggtgtgcacgtggcatgtggcctgtggcctgtgtcccatgacccacccctgtgctccgtgcctccaccaccactggccaccaggctggcgcagccaaggccgaagctctggctgaaccctgtgctggtgtcctgaccaccctcccctctcttgcacccg

SEQ ID NO: 960 - DNA, 247 bp, Homo sapiens
  misc_feature 1..247: note = U/M: U (0.15:0.95) in Liver Hepatocytes
  misc_feature 1..247: note = source = chr12:109639260-109639506; Gene: ACACB (exon)
  source 1..247: mol_type = genomic DNA
cgcgtccctgggtagtgtcccggcgcgtccctgctccggcatcactagttctgggtggctctgggtgtcaatcccggtgggctctgtactatttcttctttttacgaaataggtgatgaagatgatcatgaccctgaacgttcaggaaagaggccgggtgaagtacatcaagcgtccaggtgccgtgctggaagcaggctgcgtggtggccaggctggagctcgatgacccttctaaagtccacccg

SEQ ID NO: 961 - DNA, 295 bp, Homo sapiens
  misc_feature 1..295: note = U/M: U (0.14:0.94) in Liver Hepatocytes
  misc_feature 1..295: note = source = chr14:103573762-103574056; Gene: EXOC3L4,EXOC3L4 (exon,intron)
  source 1..295: mol_type = genomic DNA
cgctcttcagggttgtgtgcaccagggactggctgacgcaggactggctgcatcccctcatggacaaggtggtgaccttcgccggtcatctccagcgtgtggcccggccgcgggcacaggtaccacaagggggagggccctggcagggctgtgcccaggattggggctgttgaccctgaccctgaccctgaccctgggccgcccaggagactctgcaggaggtgcaccggttcgtggtccgcgagtacctggcgcgggcgctgaggccacgggagcggttccggggcatggagcg

SEQ ID NO: 962 - DNA, 326 bp, Homo sapiens
  misc_feature 1..326: note = U/M: U (0.1:0.9) in Liver Hepatocytes
  misc_feature 1..326: note = source = chr4:1746776-1747101; Gene: TACC3 (TTS)
  source 1..326: mol_type = genomic DNA
cgtctgtctgtcctgtctgattctcttaggtgtcatgttcttttttctgtcttgtcttcaacttttttaaaaactagattgctttgaaaacatgactcaataaaagtttcctttcaatttaaacactgaagccgctctggtcttgatgaagcaaaggtttcccagctctagcctgaggctgagccgacccgcaggtgccctcccttcccctcagagctggccacttggtccctgcctaccccaggctcaggccaccctgccgaggggcagggacagccagtggatagaggaggctcaggcctgcccagtctgccccggccacctcg

SEQ ID NO: 963 - DNA, 349 bp, Homo sapiens
  misc_feature 1..349: note = U/M: U (0.1:0.9) in Liver Hepatocytes
  misc_feature 1..349: note = source = chr3:186333563-186333911; Gene: AHSG (intron)
  source 1..349: mol_type = genomic DNA
cgtgaggcagctgaaggagcatgtgagtacccttcttaggatgactgtaggtggcccttcggccagctccaccgattcacccagcgtctcagcctgccttcttggctagccagggtgcagtttctaaaattgccatttgtggccgagcgcagtggctcatgcctataatctcagcactttgggaggctgaggcaagtggatcgcctgaggtcaggagttcaagaccagcctggccagtatggtgaaaccccatctctactaaaaatacaaaaattagctggacgtggtgacgggcacctgtaaatcccagctcctcgggaggctgaggcaggagaatcgcttgaacccg

SEQ ID NO: 964 - DNA, 385 bp, Homo sapiens
  misc_feature 1..385: note = U/M: U (0.13:0.93) in Liver Hepatocytes
  misc_feature 1..385: note = source = chr16:58751782-58752166; Gene: GOT2 (intron)
  source 1..385: mol_type = genomic DNA
cggggtttcaccatgttggccaggctggtctcgaactgacctcaggtgatccacctgcctcgacctcccaaagtgctgggattacaggcgtgagccaccgcgcccagccaaaaaaaattactttcaaatactcatgcgtcatcaatcccagaactgctaatcacgcaaatggggagcccttttctggcagcttatccacctgtgtggacatttcacgcaggttcgaggttaagactctctgttgagacattgccaaattaagcctccaaagctggttactaaacacagaactgtcgccagtgagttcatcgtcctcaccttcaccactgttgctatttccttccactgttccggacgcgggtccactcccgtgggattgtgggcg

SEQ ID NO: 965 - DNA, 209 bp, Homo sapiens
  misc_feature 1..209: note = U/M: U (0.12:0.91) in Liver Hepatocytes
  misc_feature 1..209: note = source = chr8:22033325-22033533; Gene: BMP1 (intron)
  source 1..209: mol_type = genomic DNA
cgcacaaaaacacaaaaaacagggcactttaactagacctcaaaaaggacacttggttacacaatgagagccgaaagcagaaagcggagcgttgccttattccacctcagctgggaacatgcatgttgggtgactgaaatttttcactgctctgcaaatgtccacaaatgaccgtgaaagccctgagagtattgattttggggactacg

SEQ ID NO: 966 - DNA, 227 bp, Homo sapiens
  misc_feature 1..227: note = U/M: U (0.14:0.93) in Liver Hepatocytes
  misc_feature 1..227: note = source = chr4:6923492-6923718; Gene: TBC1D14 (intron)
  source 1..227: mol_type = genomic DNA
cggctcactgcaacctccacctcctgggttcaagcaattctcctgcctcagcttccctagtagctgagattacaggcgcacaccaccacgcctggctaatttttgtatttttagtagagatggggtttcaccatgttggccaggctgctcacaaactgctgacctctcgacctgcccgcctcagcctctcaaagtgttgggattacaggtgtgagccactgcgcccg

SEQ ID NO: 967 - DNA, 451 bp, Homo sapiens
  misc_feature 1..451: note = U/M: U (0.1:0.89) in Liver Hepatocytes
  misc_feature 1..451: note = source = chr3:126237039-126237489; Gene: UROC1 (promoter-TSS)
  source 1..451: mol_type = genomic DNA
cgggagcacccagcagcaggtgtgccctccttggctccccactggagggctgggtgacaggtgcagtgggggccctcagtggcaagtgtgctctcttcagctcccgctggggggcacaccactctaccccctcccaaagctctttttgaaggacctgcctgagggatgaccctcattcccaaatctgttaacaactctgccagaaagcactcttcatgagccctatgctatggatggagaaaccaaggcccgggtctccctcacacagccaagaagtggccgaagctgaattccagcagtccgggggaagcaacacacctgggtgtacccagtgcgagcctgaccagccctgtggcctttggccatgtcctgtctacacaagtgggtggcgatggacagctcagctgcaaggcggtggagtgccgttaggcaagccccagtgcagggcccg

SEQ ID NO: 968 - DNA, 136 bp, Homo sapiens
  misc_feature 1..136: note = U/M: U (0.09:0.87) in Liver Hepatocytes
  misc_feature 1..136: note = source = chr11:57364364-57364499; Gene: SERPING1 (promoter-TSS)
  source 1..136: mol_type = genomic DNA
cgcgcctgcactgcccagctaatttttgtacttttagcggaaacggggtttccccatattggccagagtggtctcaaactcctgacctcaagtgatccacccacctcggcctcccaaagtgctgggattacaggcg

SEQ ID NO: 969 - DNA, 183 bp, Homo sapiens
  misc_feature 1..183: note = U/M: U (0.08:0.86) in Liver Hepatocytes
  misc_feature 1..183: note = source = chr6:135444057-135444239; Gene: MYB (Intergenic)
  source 1..183: mol_type = genomic DNA
cgaggcaggtggatcacgaggtcaggagttcaagaccagcctgaccaaaatggtgaagccccgtctctactaaaaatagaaaaattagctgggtgtggttgtgcgtgcctataatcccagctactcaggaggctgggacgggagaattgcctgaacctgggaggtggaggttgcagtgagccg

SEQ ID NO: 970 - DNA, 248 bp, Homo sapiens
  misc_feature 1..248: note = U/M: U (0.14:0.92) in Liver Hepatocytes
  misc_feature 1..248: note = source = chr20:62254767-62255014; Gene: GMEB2 (intron)
  source 1..248: mol_type = genomic DNA
cgtatttctcaaatataatgttttcactagcataactttgttgttgtagacttaggcttcaaaataaagaactttaaacaaacatgaataaaaagccactttaggccgggcgcggtggctcacacttgtaatcccagcactttgggaggccgcggcgggtggatcataaggtcagaagttcaaagaccagcctgatcaatacggtgaaaccccgtctctactaaaaatacaaaaattagccgggcgcg

SEQ ID NO: 971 - DNA, 272 bp, Homo sapiens
  misc_feature 1..272: note = U/M: U (0.14:0.92) in Liver Hepatocytes
  misc_feature 1..272: note = source = chr11:610913-611184; Gene: PHRF1,PHRF1 (intron,exon)
  source 1..272: mol_type = genomic DNA
cggctcccttcctggccgcatcacacacatgtcccctctagtacatgaagaagctgcacatgcaggagcgtgctgtggaggaggtgaagctggccatcaagcccttctaccagaagagggaggtgaccaaggaggagtacaaggacatcctgcgcaaggccgtgcagaaggtgggctgtgtgcgagcctgtgtgtggggctcggggtcacgggcggtacgtcgctgctgtctcgtcagcatggactttggggtggccatgagtgcaggcccg

SEQ ID NO: 972 - DNA, 487 bp, Homo sapiens
  misc_feature 1..487: note = U/M: U (0.17:0.95) in Liver Hepatocytes
  misc_feature 1..487: note = source = chr1:1700329-1700815; Gene: NADK (intron)
  source 1..487: mol_type = genomic DNA
cggtcaaagccaacgggttctctgaatacccaaaagctggttctctctctggctgcattctacaatcaccttaggagcttcaaacaacaccaattcctacgtgccctccagactgaatgatcagaacctgaaggtacagcccaggcaccggcactttaaaagagctccccagaagattctaatgtttagcgagaattgacagtactgtcccagtgggtcaatatctccctagcttaagacataccaggcgggatgtggtggctcacgcctgtaatcccagtgctttgggagaccaaggtgggcggatcacttcaggccaggagttcaagaccagcctggccaacatgatgaaaccctgtctcgactaaaagtacaggctgggtgcggtggttcacgccagtaatcccagcactttggaaggccgaagcgggcagatcacctgaggtcagatgtttgtgaccagcctggccaacatggcgaaaccccg

SEQ ID NO: 973 - DNA, 191 bp, Homo sapiens
  misc_feature 1..191: note = U/M: U (0.14:0.91) in Liver Hepatocytes
  misc_feature 1..191: note = source = chr19:45438564-45438754; Gene: APOC4 (Intergenic)
  source 1..191: mol_type = genomic DNA
cgcctgtaatcccagcactttgggagtccgaggcgggcagatcacttgagctcaagagttcgaaaccaacctgaccaacatggtgaaactccatctttacgaaaaattaaaaaattagccaggcgtggtggcaagtgcctgtagtctcagctacttgggacgctgaggcgggagaatttcttgaacctgcg

SEQ ID NO: 974 - DNA, 181 bp, Homo sapiens
  misc_feature 1..181: note = U/M: U (0.14:0.9) in Liver Hepatocytes
  misc_feature 1..181: note = source = chr19:4003380-4003560; Gene: PIAS4 (Intergenic)
  source 1..181: mol_type = genomic DNA
cgctctgtcacccaggctggagtgcaatggcgcaatctcagttaactgcaacctccgcctcctgggttcaagctttttgtttgtttgtttgttttacatggagcgttgctcttgttgtctgggctggagtgtgatggcacaatctcggctcattgcaacctctgtctcctggggtcaagcg

SEQ ID NO: 975 - DNA, 218 bp, Homo sapiens
  misc_feature 1..218: note = U/M: U (0.18:0.94) in Liver Hepatocytes
  misc_feature 1..218: note = source = chr2:128539850-128540067; Gene: WDR33 (intron)
  source 1..218: mol_type = genomic DNA
cgcacatctgtaatatcagctactcaagaggctgaggcaggagaatcgcttgaacctgggaggcaggggttgcggcgagccgagattgcaccactgcactccagcctgggcatgatctcaaatttgcagatcaattttgagaaaattgatctcaaaaagaagatcaattttcattaaccaaatgtggcagttttctagctttctagcgttcaggtacg

SEQ ID NO: 976 - DNA, 319 bp, Homo sapiens
  misc_feature 1..319: note = U/M: U (0.19:0.95) in Liver Hepatocytes
  misc_feature 1..319: note = source = chr12:112014821-112015139; Gene: ATXN2 (intron)
  source 1..319: mol_type = genomic DNA
cgctggtctcgaactcctgacctcaggtgatctgcccgcctcggcctcccaaagtgctgggattacagtcgtgagccactgcgcctggccacgacaagttaattgataacttactaagcatacaaagttgtacaaaacacttgttcctactgtcaagatgctctaaatctagaaggaagataatgcaaatatttccaaacaagtcagatcgcaaataaacacatgcaccgcatgtttcaattatttatttatttatttatttattttgagacagagtctcgctctgttgcccaggctggagtgcagtggcacgatctcg

SEQ ID NO: 977 - DNA, 363 bp, Homo sapiens
  misc_feature 1..363: note = U/M: U (0.12:0.88) in Liver Hepatocytes
  misc_feature 1..363: note = source = chr17:39843528-39843890; Gene: EIF1 (Intergenic)
  source 1..363: mol_type = genomic DNA
cgaactcctgacctcgggtgatccgcccacctcagcctcccaaagtgctgggattacaggcataagccacagcgcccagcctcattatcttattatttgtttagtggctctctctcccgctggccttcaactccacaagggcagtgaccctgactgtcagggacataaaccagcagtccatgggcatgcatatttttgtttggcttgcagtgttgtatcaaaaattcaatttattcctgtaatcccagcactttggaaggccgaggcaggcagatcacctgaggtcaggagttcaagaccagcctggccaacatggtgaaaacccatctctactaaaaatatttttaaaaaactagccgggcg

SEQ ID NO: 978 - DNA, 387 bp, Homo sapiens
  misc_feature 1..387: note = U/M: U (0.13:0.89) in Liver Hepatocytes
  misc_feature 1..387: note = source = chr19:5871274-5871660; Gene: FUT5,FUT5 (promoter-TSS,Intergenic)
  source 1..387: mol_type = genomic DNA
cgcgatgccactgaattgtatgcttaaaaatgcctaaatgcgccaggtgcggtggctcacgcctgtcatcccagcactttgggaggctgaggcgggaggatcacctgaggtcaggagttcgagacaagcctggccaacatggtgaaaccccgtctctactaaaaatataaaaattagctgggcatggtggtgcacacctgtaatcccagctactcaagaggctgaggcagaagactcacttcaacccaggaggcagaggctgcagtgagcaacaagagcaaaactctctctcataaaaaaaaaaaaaaagcctaaatggtgaagtttatgttatacatatatgtatggatatatggaattacaatttaaaaataaggtggctgggcg

SEQ ID NO: 979 - DNA, 269 bp, Homo sapiens
  misc_feature 1..269: note = U/M: U (0.18:0.9) in Liver Hepatocytes
  misc_feature 1..269: note = source = chr12:122313379-122313647; Gene: HPD (intron)
  source 1..269: mol_type = genomic DNA
cgaagtgcagtggctcaatctcggctcactgcaacctccatctgccaggctgaagcaatcctcctacctcagcctcccaagtagctggaattataggtatgtgccaccaagcccggctaatttttgaatttcttatatagacagggtttcaccatgttgcccaggctggtggcaaactcttgggctcaagtacactgcccacttcggcgtcccaaagtgttgggattacaggcatgagccactgcacctggccggtatggtcaatttcg

SEQ ID NO: 980 - DNA, 195 bp, Homo sapiens
  misc_feature 1..195: note = U/M: U (0.35:0.95) in Liver Hepatocytes
  misc_feature 1..195: note = source = chr8:21858621-21858815; Gene: XPO7 (intron)
  source 1..195: mol_type = genomic DNA
cgagaccagcctggccaatatggcaaaaccctgtctctgtacaaaaattagctcggcgtggtggtgtgtgcctgtagtcccagctactctggaggctgaggcagaagaatcacttgaacccgggaagtagaagctgtggtgagccgagatcgtgccacttctgcactccagcccgggcgacagaacgagactccg

SEQ ID NO: 981 - DNA, 144 bp, Homo sapiens
  misc_feature 1..144: note = U/M: U (0.05:0.96) in Liver Hepatocytes
  misc_feature 1..144: note = source = chr6:134297765-134297908; Gene: TBPL1 (intron)
  source 1..144: mol_type = genomic DNA
cgataaattatgtcactacacttaaaaatacaagggacatgttaggcaatcagatgctttgtagaaactgagctatttgtcggcctggcgcggtggcccacacctgtaatcccagcactttgggaggccgaggcagtggctcac

SEQ ID NO: 982 - DNA, 464 bp, Homo sapiens
  misc_feature 1..464: note = U/M: U (0.04:0.95) in Liver Hepatocytes
  misc_feature 1..464: note = source = chr6:160500588-160501051; Gene: IGF2R (intron)
  source 1..464: mol_type = genomic DNA
cggccacgcatggtttttgtccaggtgactcgcgactcgcgcacctacagcgttggggtgtgcacctttgcagtcgggccagaacaaggaggctgtaaggacggaggagtctgtctgctctcaggcaccaagggggcatcctttggacggctgcaatcaatgaaactggattacaggcaccaggatgaagcggtcgttttaagttacgtgaatggtgatcgttgccctccaggtaaatatttgcaatgaggtaaataaacttcaagctcatagtaaactagaaattagacatagcagcagaaagaagctgcggagtggagctccacggtcctatgagtgctgtaaccttgggcgtgaatgtgagctgttcctctgtacacccccggtgtgaatgctggtgtgtgaatcacgctgtgttctctcagttgcctggtgagttttggcaggtgaatgccggttgtcac

SEQ ID NO: 983 - DNA, 121 bp, Homo sapiens
  misc_feature 1..121: note = U/M: U (0.04:0.94) in Liver Hepatocytes
  misc_feature 1..121: note = source = chr19:11347513-11347633; Gene: DOCK6 (exon,intron)
  source 1..121: mol_type = genomic DNA
cgcccttgtgaccgtccacccagcgcatgcccggaagcgccacctgtgggagggaggcaccaggtgggcactggtcagccctccctgactgatcaggtcacccagcggccccagccattgc

SEQ ID NO: 984 - DNA, 304 bp, Homo sapiens
  misc_feature 1..304: note = U/M: U (0.06:0.93) in Liver Hepatocytes
  misc_feature 1..304: note = source = chr22:50644655-50644958; Gene: SELO,SELO (exon,intron)
  source 1..304: mol_type = genomic DNA
cgcgttccctcctttccatgtgctgcccggaatcctggtgttgggtgacctcctgaccggcccacgtagtgaactctgtgtttggtttcagacaggccgacggtcgcaaggtcctacggtcaagcatccgggagtttctatgcagcgaagccatgttccacctgggagtccccaccacacgggccggcgcctgcgtcacgtccgagtccacggtggtgcgcgacgtgttctatgatggtaatcccaaatatgaacaatgcacggttgtgttgcgtgtagcttccactttcataaggtaatgccg

SEQ ID NO: 985 - DNA, 93 bp, Homo sapiens
  misc_feature 1..93: note = U/M: U (0.05:0.89) in Liver Hepatocytes
  misc_feature 1..93: note = source = chr3:52812520-52812612; Gene: ITIH1 (promoter-TSS)
  source 1..93: mol_type = genomic DNA
cgtgtgcgtgcctgcccaactcccatgccttctcccaggggtgccgcttactagtcccagcttaagaacaaggatcggagtggccagataacg

SEQ ID NO: 986 - DNA, 391 bp, Homo sapiens
  misc_feature 1..391: note = U/M: U (0.1:0.93) in Liver Hepatocytes
  misc_feature 1..391: note = source = chr1:65376254-65376644; Gene: JAK1 (intron)
  source 1..391: mol_type = genomic DNA
cgcctggaatcccagcactttgggaggctaaggcgggctgatcacttgaggtcaggagttcgtgaccagcctggccaacatggcgaaaccttgtctctactgaaaatacaaaaattagccaggcatggtggcgagcgcctgtagtcccagctactgagattacagtaggagactgacgcaggagaatagtttgaacctgggaggcagaggttgcactgagtcgagattgcgccactgcactccagcctggatgacaaagcaagactctgtctcaaaaaaaaaaaaaaaaaaaatcaacatagggcatttagattccaaaacaccaagtcagaacatcagcaaacaaactgtactcttcatttttagtgtacttccacaaagccatttcccg

SEQ ID NO: 987 - DNA, 277 bp, Homo sapiens
  misc_feature 1..277: note = U/M: U (0.06:0.92) in Liver Hepatocytes
  misc_feature 1..277: note = source = chr22:18214291-18214567; Gene: BCL2L13 (TTS)
  source 1..277: mol_type = genomic DNA
cgccagttgtttactgcataaggactgactggggacaaattccgacgtgcagcctgtgctctgctcaccatgctgtgggctctgggagaagcgaagtatttttctaatttgtacaaaggcaccatataggctcacttaaacattaagcatgttctactacaaaaaaacaagagtgagggttaggtccaggactggtctcagcttccaattatgtagctgttttccctgtagacattgagtgagatgctttgtggttacagaattcacagtcattgcc

SEQ ID NO: 988 - DNA, 320 bp, Homo sapiens
  misc_feature 1..320: note = U/M: U (0.11:0.96) in Liver Hepatocytes
  misc_feature 1..320: note = source = chr14:73628524-73628843; Gene: PSEN1 (intron)
  source 1..320: mol_type = genomic DNA
cggaaacttgttggcatgacccaatgcctcatgtaaacagcgcagtggctgtttataggccgggcgcagtggctcacgcctgtaatcccagcactttgggaggctgaggcgggcggatcacctgaggtcaggagtttgagaccagcctggctaacatggcgaaaccccgtttccactaaaaaaaaaaaaaaaaaaaaaaaatagaaaaagaaaccaaaccaggtgtggtgataagtgcctgtaatcccagctactcgggagactgaggcaggagaatcactctaacctgggaggccaaggttgcagtgagccaagattgc

SEQ ID NO: 989 - DNA, 466 bp, Homo sapiens
  misc_feature 1..466: note = U/M: U (0.05:0.94) in Liver Hepatocytes
  misc_feature 1..466: note = source = chr22:21128772-21129237; Gene: SERPIND1 (intron)
  source 1..466: mol_type = genomic DNA
cgggtgcagtggctcacgcctgtaatcccaacactttgggaggccgaggcgggtggatcacgaggtcaggagttcaagaccagcctgaccaacatggtgaagccaagtctctactaaaaatacaaaaattagctgggcgtggtggcacgcgcctgtaatcccagctactcaggaggctgaggcaggagaatcgcttaaacccgggaggcagaggttgcagtgagcggagatcgtgccactgcactccagcctggacaacagagttagactccgtcaaaaaaaaaaaaaaaaagaagaaaaaagaaaaaatgttagaggaacaagatataggagacctactctcaaatggtctagaagaaaaaatgtgtatgtgcatgcctgtgagaacacacacgtacgtacacacacacacagataatgacagggcaaaggttccaaaattttaaacctggtaaatctcggtacg

SEQ ID NO: 990 - DNA, 129 bp, Homo sapiens
  misc_feature 1..129: note = U/M: U (0.09:0.96) in Liver Hepatocytes
  misc_feature 1..129: note = source = chr6:25930165-25930293; Gene: SLC17A2 (intron)
  source 1..129: mol_type = genomic DNA
cgcgcactatgcatgcgcataggtgcacgcgccgctacgccctgctaatttttgtatttttagtggagacagggtttcaccatgttggccaggctggtctcaaactcctgacctcaagtgatctgcccg

SEQ ID NO: 991 - DNA, 229 bp, Homo sapiens
  misc_feature 1..229: note = U/M: U (0.05:0.92) in Liver Hepatocytes
  misc_feature 1..229: note = source = chr9:108180324-108180552; Gene: FSD1L (Intergenic)
  source 1..229: mol_type = genomic DNA
cggtggctcacgcctgtaatcccagtactctgggaggccgaggcgggcggatcacctgaggtcaggagttcaagaccagcctggccatggtgaaactccatctctactaaaaatacaaaaaattagtcgggtgtagtggtgcatgcctgtaatcccagctactctggaggctgaggcaggagaatctcttgaacctgggaagcggaggttgcagcgagccgagattgcg

SEQ ID NO: 992 - DNA, 230 bp, Homo sapiens
  misc_feature 1..230: note = U/M: U (0.05:0.91) in Liver Hepatocytes
  misc_feature 1..230: note = source = chr20:5164526-5164755; Gene: CDS2 (intron)
  source 1..230: mol_type = genomic DNA
cgggcgcggtggctcacgcctgtaacccaacacttttggaggccaaggtaggcggatcacgaggtcaggagttgaagaccggcctgggcaacatagtgaaatccccgtctctactaaaaatacaaaaaaatagctggtgtggtggcgtggcaggtgcctgtaatcctagctattccggaggctgaggcaggagaatcacttaacctgggggtggaggttgcagtgagccg

SEQ ID NO: 993 - DNA, 209 bp, Homo sapiens
  misc_feature 1..209: note = U/M: U (0.08:0.93) in Liver Hepatocytes
  misc_feature 1..209: note = source = chr9:17436967-17437175; Gene: CNTLN (intron)
  source 1..209: mol_type = genomic DNA
cgtggcttttgccagatgaagcacttttgattttgaggctgatgaaacacagtgcggttattgatctgtgcgtgacatagcctgtctctctcctagcagagtgtagcaacatttatccaggaatttgtgaaatgtcactcggatcatgttcgcaaggcaaactgtgcaaaacccaggatcagagctgagaatccatgtggaattggacg

SEQ ID NO: 994 - DNA, 376 bp, Homo sapiens
  misc_feature 1..376: note = U/M: U (0.07:0.92) in Liver Hepatocytes
  misc_feature 1..376: note = source = chr22:36694636-36695011; Gene: MYH9 (intron)
  source 1..376: mol_type = genomic DNA
cggagcctcctaggaagtctcagaagcttccaaaacccacggcacacaacagagcaatgccaaagctctctaaacacgcttcatgcagtgggggcatctagccacagagcaacaggggcctggaggctcaggttcccgcaggcaccagacacggctcccctcgacctggtgacctcaggtctaaagggcagcagccagtgctgtagtgtgacccaggctcacccgtgagctgagaaggcctcggtgttccggtcagacaggccggcccctgaccgccagcccttgcccgccagcccctgcccatcacctcctgctcgtcaccccctcaccttccaagtcagtgatcattgcctcatgcttgttcttgagcttggcg

SEQ ID NO: 995 - DNA, 155 bp, Homo sapiens
  misc_feature 1..155: note = U/M: U (0.1:0.94) in Liver Hepatocytes
  misc_feature 1..155: note = source = chr22:18244342-18244496; Gene: BID (intron)
  source 1..155: mol_type = genomic DNA
cgcccgccaccacgcccggctaattttttgtatttttagtggagacggggtttcaccgtgttagccaggatggtctcgatctcctgacatcgtcgtgatccacccgcctcggcctcccaaagtgctgggattacaggcataagccaccgcacccg

SEQ ID NO: 996 - DNA, 139 bp, Homo sapiens
  misc_feature 1..139: note = U/M: U (0.05:0.88) in Liver Hepatocytes
  misc_feature 1..139: note = source = chr22:40389141-40389279; Gene: FAM83F (Intergenic)
  source 1..139: mol_type = genomic DNA
cgggcacggtggcaggtgcctgtaaccccagctactcggaggctgaggcaggagaatcgcttgaacccagggggcagaggttgcagtgagccaagattgcaccacggcactgtaacctggtcgacagagtgagactccg

SEQ ID NO: 997 - DNA, 192 bp, Homo sapiens
  misc_feature 1..192: note = U/M: U (0.11:0.94) in Liver Hepatocytes
  misc_feature 1..192: note = source = chr20:32966074-32966265; Gene: ITCH (intron)
  source 1..192: mol_type = genomic DNA
cgagagcagcctggccaacatggtgaaaccccatttgtactaaaaataccaaaaaattagccgggtggggtggtggcgcacctataatcccagatactcggtgggctgaggctggagaattcctgaacccaggaggcagaggttgcagtgagcagagattgcgccattgtactccagcctgggcgatgagcg

SEQ ID NO: 998 - DNA, 331 bp, Homo sapiens
  misc_feature 1..331: note = U/M: U (0.09:0.92) in Liver Hepatocytes
  misc_feature 1..331: note = source = chr6:11057852-11058182; Gene: ELOVL2-AS1 (intron)
  source 1..331: mol_type = genomic DNA
cgagtagctgggactacaggcacctgccaccacgtccagctgatttttttgtatttttagtagagacggggtttcaccgtgttagccaggatggtctcaatctcctgacctcgtgatccacccgcctcggcctctcaaagtgctgggattacaggcatgagccaccgcgcccggccttttagtattgttagtagagatggggtttcgccatgttgaccaggatgttcttgaactcctgacctcagatgatccacccgcctcgacctcccaaagtgctgggattacaggtgagagtcactgtgcccagccagaaacactttaaagcaaaccg

SEQ ID NO: 999 - DNA, 448 bp, Homo sapiens
  misc_feature 1..448: note = U/M: U (0.07:0.9) in Liver Hepatocytes
  misc_feature 1..448: note = source = chr14:73570848-73571295; Gene: RBM25 (intron)
  source 1..448: mol_type = genomic DNA
cgtgggcatttttaaagttgctctttttgttgaagttctgtatactgagacatcagctctagcaccacgtctttttagcccctagcatttttatttgtttttgtagcccactgcactgccatagcttaatctttctgtctataaatttactatctacctctacctctggctcctagtaattttactctttggaaggttttattttttatttaaaattttttaattatattgatttttttttttttctgagacaagtttttgctctgttgcccaagttggagtgcagtggtacagtgttggctcattgcaacctttgcctcccaggcttaagcaattctgcttcagcctcccgagtaactgggactacaggcacacaccactgtcccggactaatttttgtattttttttgtagagtctaggttttgctatgttgcccagctggtctcg

SEQ ID NO: 1000 - DNA, 278 bp, Homo sapiens
  misc_feature 1..278: note = U/M: U (0.09:0.91) in Liver Hepatocytes
  misc_feature 1..278: note = source = chr22:21124715-21124992; Gene: PI4KA (intron)
  source 1..278: mol_type = genomic DNA
cgcttgaacccaggaggcagaggttgcagcaagctaagattgagccactgcactccagcctgggcaacagagcaaaaactccgtctcaaaaaaaaaaaaaaaaaaagagagagagagagatcggttttgctatgttgcccaagctggacacggacacacacacacacacacacacacacacacacacacacacacacacacacacaagctggacacagagacacacacagtgacagggcaaaggttccaaaattttaaacctggtaaatctgggtacg

SEQ ID NO: 1001 - DNA, 127 bp, Homo sapiens
  misc_feature 1..127: note = U/M: U (0.15:0.92) in Liver Hepatocytes
  misc_feature 1..127: note = source = chr22:41742512-41742638; Gene: ZC3H7B (intron)
  source 1..127: mol_type = genomic DNA
cgtggttgttttcgtttctcattcctagcctgatgcagtggctcacgcctgtaatcccagcactttgggaggctgaggcgggcaaatcaattgaggtcaggagtttgagaccagcctggccaacacg

SEQ ID NO: 1002 - DNA, 294 bp, Homo sapiens
  misc_feature 1..294: note = U/M: U (0.14:0.91) in Liver Hepatocytes
  misc_feature 1..294: note = source = chr19:19164989-19165282; Gene: ARMC6,ARMC6 (exon,intron)
  source 1..294: mol_type = genomic DNA
cgagctctgtggaaccctgtcccgcctggccattcgcaacgagttctgccaggaggtcgtcgacctcgggggcctgagcattctggtgtccctgctagccgactgcaatgaccaccagatgagggaccagagcggcgttcaggtatgaagtccccctggcccattgcgtgctgtccttctgggtcccagtcaaccggacgagctatagtcagaacaagccagccctgcctgccagtgtcggaaccaaagtgcagtttttcttttcacggacccaagggcaggaaccaaaggtcg

SEQ ID NO: 1003 - DNA, 144 bp, Homo sapiens
  misc_feature 1..144: note = U/M: M (0.91:0.08) in Liver Hepatocytes
  misc_feature 1..144: note = source = chr3:197281263-197281406; Gene: BDH1 (intron)
  source 1..144: mol_type = genomic DNA
cgaatatttattgtgtgacgcctgacaggaagtagaggctctgtaaatgtgtattgagtgaatatgaaagcttcacaaatttcaagggtcagcttccttggcggccagggatatatacgccctatgcagagcccggctccaacg

SEQ ID NO: 1004 - DNA, 478 bp, Homo sapiens
  misc_feature 1..478: note = U/M: M (0.86:0.05) in Liver Hepatocytes
  misc_feature 1..478: note = source = chr8:141607110-141607587; Gene: AGO2 (intron)
  source 1..478: mol_type = genomic DNA
cgttgctggtgaacatgttgtttgaaatagaagactaaagccacaaaatgggttttacgtcatggttaaagggaactcacagaggaactgtatagaagaaaaaaaaactcagcagaagagctgtttcgttcatttataaccacgcccctgcactgtgtcccagctctggcagggacgttccctccctcttcacacttgctgggctgaatcatctgcagaggtggcaggaaaaccgcctcatttacatacaccctttccggcaagcacagccagggattccaattcccagagcctcccagcctctccagtgccaacgcagcgcagcacggatgcagggcagcgtgggcagcggtggcataaggtgctcacacccagctggagttgaagtctggctgacattactttctctgactccgtttctggcagcagccacggacaccgatgggggctgggtggcccccccacccccccccccccg

SEQ ID NO: 1005 - DNA, 342 bp, Homo sapiens
  misc_feature 1..342: note = U/M: M (0.84:0.04) in Liver Hepatocytes
  misc_feature 1..342: note = source = chr6:143206485-143206826; Gene: HIVEP2 (intron)
  source 1..342: mol_type = genomic DNA
cgtccctcccccatcatcgctggagaataatatcactctgctacctgccttgagcaacaccgtgagcccctgtcttcaagcattcagggaatttaacagcctggaaattcctgttgtccattcgctgaggtcacagataaagctaaacaacaagccgtggttcccatcaatcataagtcactcactgatagaatgtatggtaggagacctgatggaagcgagtcaccagagaaaatacccactgatgacgcatatccaggcataaaaatagttacagggccctcaaagggattattcaacagcctacatttagactttcttacaagagacctgaagtcaacg

SEQ ID NO: 1006 - DNA, 480 bp, Homo sapiens
  misc_feature 1..480: note = U/M: M (0.83:0.07) in Liver Hepatocytes
  misc_feature 1..480: note = source = chr1:230560233-230560712; Gene: PGBD5 (intron)
  source 1..480: mol_type = genomic DNA
cggcctcccagcaggctgcagcatgatgcccagatccaagtccaggcaccagctggaggtcccttgggcctgccttcccatgtgccgtgttcctgaccggttgaacaataatcagagaaggccacaggaaaagccgcatcatgcccaccgcggccactccctggccctcatcaacaccggttgcgcgcacttctacggaagaacacagcatgcaggagcacgggcctgctacagaaggccgtggaacaagaaataccagcatgagagggcggctggtctgcagctttcaaagaaggcagaggctgcggagcttctgcagaggaagtggtgatatttcaacagccaactcccacaaaaacagacagtgaagaggagtggggcagccgcagctgccagcaccctagccaccttctccaggtattcggggcttgtctgtggccacagtggtaagcaggacacacctgaaagtaccttctggcg

SEQ ID NO: 1007 - DNA, 257 bp, Homo sapiens
  misc_feature 1..257: note = U/M: M (0.88:0.14) in Liver Hepatocytes
  misc_feature 1..257: note = source = chr4:7399806-7400062; Gene: SORCS2 (intron)
  source 1..257: mol_type = genomic DNA
cgatcttttctttcccggtgtgatctgcacttatacgacggagttgccggcttagtttacgtttgctggagtccttgtgcggtgggggtggggtgggactgactgtgtctggccccctggcatggggcccaaaaccacttacaggctccagacaggattcctcagaagcaggtggcagcagagaggccaaaccacccactcacagctgctccaagggtggggtggtggggacttccttctgctccagagagcctccg

SEQ ID NO: 1008 - DNA, 309 bp, Homo sapiens
  misc_feature 1..309: note = U/M: M (0.84:0.1) in Liver Hepatocytes
  misc_feature 1..309: note = source = chr2:23358544-23358852; Gene: KLHL29 (Intergenic)
  source 1..309: mol_type = genomic DNA
cgtgatggctcaccactctgccttgcactgcagatcgagagaggagggaaaaataatccagatcctaatttagttcaggagcttgttttcttacactgacaaatctttctaaaaatgatttcctgattagagtcaaacggctgaggccaaaactctctgagattgttgtgctgtcagcatgttaatggtgttccttagcaactccctcccctccacttttaggaagaaacaacacctctgccaggaatgcaaagctggagaagcgacagcacctctgatgattcatggcttggaagggaggcacagacg

SEQ ID NO: 1009 - DNA, 91 bp, Homo sapiens
  misc_feature 1..91: note = U/M: M (0.8:0.09) in Liver Hepatocytes
  misc_feature 1..91: note = source = chr2:44058696-44058786; Gene: ABCG5 (intron)
  source 1..91: mol_type = genomic DNA
cgtttcagtctggactagtgacatttcaagtctccaaaggcacatgtgactaggggcagcacagggtgcacggtgcaggacgcagggcgcg

SEQ ID NO: 1010 - DNA, 355 bp, Homo sapiens
  misc_feature 1..355: note = U/M: M (0.72:0.03) in Liver Hepatocytes
  misc_feature 1..355: note = source = chr16:5167435-5167789; Gene: FAM86A (Intergenic)
  source 1..355: mol_type = genomic DNA
cgaggcgggctcacccgggccgtgggttcgctctgattgcagcggtttcccaccagctctttggagagctggcagatggcccagccccaccgcaggagccacgaatggcagaacaagatacaacaatttgatatccacttgccagacgagccgggtgtcgtcagtcgcctggctctgtgcccaacctctttttgcataaacacttatgagttcagccaggaggaaaagcactctgattatgaattgagcagaaggaaacaaagttttgcagataaacaccaatgagacaaaaaaccacgaataagaaaaatgacagaaaaggagaaccttcccagaagcctcctgccagtgaacg

SEQ ID NO: 1011 - DNA, 317 bp, Homo sapiens
  misc_feature 1..317: note = U/M: M (0.73:0.07) in Liver Hepatocytes
  misc_feature 1..317: note = source = chr10:103880858-103881174; Gene: LDB1,LDB1 (exon,promoter-TSS)
  source 1..317: mol_type = genomic DNA
cgccctcctccgcctaagggcttgggatctgtgttttgctggggggagggggctgcggaatgaccaccagattggattacggaggggcgataggaggccatccttccttcttgcagactgacgcatcagtcaagacactctcttcccttcccccctttctccagccttggtgccttcacctccgtaccaaccgcccaaccccaccgcctccgacccccctgcctggaagctgctgtcctttgagggcttcggagatgagaacaggaaacaggcccctccagtgccccctaacccagagaggcagaggctgtgggccg

SEQ ID NO: 1012 - DNA, 244 bp, Homo sapiens
  misc_feature 1..244: note = U/M: M (0.69:0.04) in Liver Hepatocytes
  misc_feature 1..244: note = source = chr12:103272955-103273198; Gene: PAH (intron)
  source 1..244: mol_type = genomic DNA
cgtgtttttgaagccttcctacgtgccaggcacttctggtggagcatttctggtggagtagctacttgaatctgaggattgctgtgggcagtgatgagaaacaagcaaagggcgccgctcagcgtctggtacataaaacgtgactttcaatctgacacccatgattcatgattctgacctgcttagatggggcaggaaagagcatgtgtgctatctagtggccaatctggggaaattccctccg

SEQ ID NO: 1013 - DNA, 169 bp, Homo sapiens
  misc_feature 1..169: note = U/M: M (0.81:0.18) in Liver Hepatocytes
  misc_feature 1..169: note = source = chr3:10708410-10708578; Gene: LINC00606 (Intergenic)
  source 1..169: mol_type = genomic DNA
cggaggcccctacatgtgtttcctcttgctccactggaggagtgcccggaagtggcagagaggcacgaagccccgccctgagacctgcttttctgcagagcctgggtagtgacggctggccaggggaggctctctagccctttcaggaacacagtgttctgcccccacg

SEQ ID NO: 1014 - DNA, 279 bp, Homo sapiens
  misc_feature 1..279: note = U/M: M (0.64:0.02) in Liver Hepatocytes
  misc_feature 1..279: note = source = chr12:109729450-109729728; Gene: FOXN4 (intron)
  source 1..279: mol_type = genomic DNA
cgttgccatggccacactgctcagttgtcgcagggccgggccctgggcccacaaagctggcatcaggtgactgcctggctgcccccgcgattggctgcctcatagggaaacagggcctggaaacgatttgaaaacgcggccggccggccgtgtcagtggcagcagttggtccggctgctgtcccccggcatcccattgtgtgacaaacgactgttgcccctgtggcacgtggcccccattgtcccagggtctcagtgcaattgtttctgcagccccccg

SEQ ID NO: 1015 - DNA, 393 bp, Homo sapiens
  misc_feature 1..393: note = U/M: M (0.66:0.08) in Liver Hepatocytes
  misc_feature 1..393: note = source = chr18:55099898-55100290; Gene: ONECUT2 (Intergenic)
  source 1..393: mol_type = genomic DNA
cgtattagtattgatactccaaaaattgtcttgaagtaaaaaacaaatattgttcctttttagaaagaaagagaaaagggcatccaaacctaattcagtaaaaattagggtgctcactaaacaagcacatccattttccttttaaatggattttgggttgaaacataaaacctcaaaccaccattataaaaacaacgtgaaaaatctgctttaattctagtccaatgaaattatacacaaagaagccaatacgatttcatgatttccctgagatcgccaatattgatcgagggaaggcggagggatggtgggagtgagggaggagggagggaggaaggaaggaagcgaggcagcgagaaaatgcaactcacctttctgctcccaggcacaccg

SEQ ID NO: 1016 - DNA, 424 bp, Homo sapiens
  misc_feature 1..424: note = U/M: M (0.64:0.07) in Liver Hepatocytes
  misc_feature 1..424: note = source = chr7:100611297-100611720; Gene: MUC12 (Intergenic)
  source 1..424: mol_type = genomic DNA
cggattctccattcacccctttctctcacccctggagccccgtgggtgggggcagggcatgagttccccagtccccaaggaaaggcagccccctcagtctccctcctcctcattcccttccatctccctcccctctgccttttaaacccatcccctccgattcccctcctcccccctctctccctggtgtcaactcgattcctgcggtaactctgagccctgaaatcctcagtctccttggcggggaagattggctttgggaacaggaagtcggcacatctccaggtctccatgtgcacaatatagagtttattgtaaaaagcagcagctctctgtctcctttttatcccctcagtggtctccacttggttggagaacagggatttccagaggtggcactgtaggaggatcctgggagcacccg

SEQ ID NO: 1017 - DNA, 81 bp, Homo sapiens
  misc_feature 1..81: note = U/M: M (0.62:0.06) in Liver Hepatocytes
  misc_feature 1..81: note = source = chr13:46627427-46627507; Gene: ZC3H13 (promoter-TSS)
  source 1..81: mol_type = genomic DNA
cgtgagatgatcattgattaaacttgcttgagatggctagtcaaacgtcgaaacttgcttgagatggctagtcaaacgtcg

SEQ ID NO: 1018 - DNA, 491 bp, Homo sapiens
  misc_feature 1..491: note = U/M: M (0.59:0.07) in Liver Hepatocytes
  misc_feature 1..491: note = source = chr17:56591006-56591496; Gene: MTMR4 (intron)
  source 1..491: mol_type = genomic DNA
cggggggatccacgcgcctgggaggagccaggagacccaaggacagccaggggagagagagagaggaggcccggcagacacccacggggaaggtggggggacagctgagaggacagatgggggaagctgggaaggagcatcagccagagcgggaggaggggaggaccgggaatgatgcagaggtacggaaccctgcagaggcagggaagatggagaagagaggctgtctgggggacagtcaaggagaaaaggctggcatgccaggtgagggatggaatggtggaagagggaagggactggagccccaagccagctcaaagacatcccgtgctccccgaccaacctcctaacatcccattcagcctactagccacatcccacatccccaagcaaggattcagcgggtgggaccaagagggagaggcggaggtaaagggatgtacccctgcagggcggggcctagagatctgcagtcaagggcagtggctgcg

SEQ ID NO: 1019 - DNA, 204 bp, Homo sapiens
  misc_feature 1..204: note = U/M: M (0.8:0.02) in Liver Hepatocytes
  misc_feature 1..204: note = source = chr16:87943033-87943236; Gene: CA5A (intron)
  source 1..204: mol_type = genomic DNA
cgaaacgttcgttcttctaagaggataactgcaaaggaaggctgggccgctgcgttttcgggaacagcaggtgcaggggccgatggatcactcgggctgggctggagcggcccctggtggcagttcggtgaagagcaacgtagcccgcgcggggcgcacgcatttcaggaagacacagaggcctttttactggaaatgccagcg

SEQ ID NO: 1020 - DNA, 487 bp, Homo sapiens
  misc_feature 1..487: note = U/M: M (0.81:0.03) in Liver Hepatocytes
  misc_feature 1..487: note = source = chr3:55515250-55515736; Gene: WNT5A (promoter-TSS)
  source 1..487: mol_type = genomic DNA
cgctcgagtcccgcaccccctggcccccctctagttggtgctgtgctcagtccctcctgggtaattcactcaggaacccgctgcggccaccctccgtcctctccccaacctgggccgagcaacaagtggagccagaattaattccatgggcgagaggagcacggaggcgagtggagcgcgctgccgccagaggctgccaaggaggcggggtggccagcgcggggggtggaggatgggggcaggacgcgggagggaagggcagggggtggggggcgaggccccggggaccagcgcgcgagagtgcccagctgggaaatgcagctccgaattaacatcgtatgtttcataatcagtttacgagccgatgtggggaaagccacttccagatggggaagagcagcccggatttccttaaggacgttcttcagccagactagggaggggagaaggagatgggggccctaggggataatggagagagaggtcg

SEQ ID NO: 1021 - DNA, 310 bp, Homo sapiens
  misc_feature 1..310: note = U/M: M (0.8:0.03) in Liver Hepatocytes
  misc_feature 1..310: note = source = chr7:87848143-87848452; Gene: SRI (intron)
  source 1..310: mol_type = genomic DNA
cggctctttaatattaaagggaaaagctaacctgtccagctacagcagcaaagtaaccatacagcggatcctgagtttgtccgggaaacgcaggccctccgggagcccctccatactgtgaaacaggaaacacatacacgtcattctgccgaatcaagttttcttctttcaccactgagggcttttgtgcaaggccagacaactgcccgcctgcccgcccttcacaaggctcacctccccaccaccgggcacactctgccaacactccacccctctcttccattcacaccccgtaatttaaaaactggcg

SEQ ID NO: 1022 - DNA, 156 bp, Homo sapiens
  misc_feature 1..156: note = U/M: M (0.76:0.04) in Liver Hepatocytes
  misc_feature 1..156: note = source = chr4:10020842-10020997; Gene: SLC2A9 (intron)
  source 1..156: mol_type = genomic DNA
cgcaagttggggacctgcaagtagggttccagtccaggtccgcgtgcgcaggccgggcgccctcaggtttagcggccacgcccttgcgttccttccgggttgcgtgaggattcctgaaacgcagttttcagcagctgctctgggcagctccacacg

SEQ ID NO: 1023 - DNA, 422 bp, Homo sapiens
  misc_feature 1..422: note = U/M: M (0.71:0.02) in Liver Hepatocytes
  misc_feature 1..422: note = source = chr19:36389546-36389967; Gene: NFKBID,NFKBID (exon,intron)
  source 1..422: mol_type = genomic DNA
cgagggcccggcaagccgctgagtccctacgggacagcacggggcctccggagagctgtggctccctggcctcacctgcaccccgccagcgtcgggctgctgctgctggcggcgcctctgctcttccagaagcttcttcacggtttgcgttgggcagtggctgcgctcacccctgctcactgtgcgggagaggagagggggaagtcatcaagggtccttaagtcacctaaatgccgcgggggtggcgcgcggggagtgggtttgggcaccctcctcgccctcccgcgcggaaaaactggcacatagatgccgcctgactcctccaaagccattagaagatttggggtggggcatccgcctccgccgtttccttccttttgctccgcactttccctctgacccaactttccaccaccgtcgcg

SEQ ID NO: 1024 - DNA, 126 bp, Homo sapiens
  misc_feature 1..126: note = U/M: M (0.85:0.06) in Liver Hepatocytes
  misc_feature 1..126: note = source = chr13:113765195-113765320; Gene: F7 (intron)
  source 1..126: mol_type = genomic DNA
cggacactgcaggcggcggtgaaccaggccgcgtggggccgcctgcgtctctttggctgcggctgtgggcggcgaacacgcagcggcgcccgcgcggcgctttctgcgggggtcgctttccgcccg

SEQ ID NO: 1025 - DNA, 279 bp, Homo sapiens
  misc_feature 1..279: note = U/M: M (0.8:0.08) in Liver Hepatocytes
  misc_feature 1..279: note = source = chr14:59656966-59657244; Gene: DAAM1 (intron)
  source 1..279: mol_type = genomic DNA
cgtgccacacctcatcacgccacctctctccctgaaactaattgtttggcgcctttttcctgaggcaaactctgaaaattataatttgaaaaatctcttccccctttcgggctagccgcatcatttccccaataaggtagtttatggtgttggaggcagctttgtcatgaaaggcgccctcccctgttgtgcataaagagagctctctggtcaccagcaaaggccctcaatttgctctaggtgcagctgattggaagtgattagggacaattaataacg

SEQ ID NO: 1026 - DNA, 302 bp, Homo sapiens
  misc_feature 1..302: note = U/M: M (0.75:0.05) in Liver Hepatocytes
  misc_feature 1..302: note = source = chr19:15580657-15580958; Gene: PGLYRP2 (intron)
  source 1..302: mol_type = genomic DNA
cgggagttgtggccgagcgtgtgggcgcccacccagtgccagccgcgtccctcgtacacgtagccgtccgagcccaccacgaaactgcagaggggagggagaagcaagcaccatgcggcgtgagggggacccgggcccttatccgctcccctccccgattctgttggtgtgccaagggccaccgaccccaagacccgcgcggtcgcgctgcctgtgtcccatccagctctgttccactctcacaccagctgccactccaggaccgttcggtttctctggatccgcccttcagtactggcacg

SEQ ID NO: 1027 - DNA, 376 bp, Homo sapiens
  misc_feature 1..376: note = U/M: M (0.58:0.01) in Liver Hepatocytes
  misc_feature 1..376: note = source = chr4:10020419-10020794; Gene: SLC2A9 (exon)
  source 1..376: mol_type = genomic DNA
cgtgtcatcattgtctgtctctgtgcctcccctctcccccgagtgggggctaatctctgtccccgcggtgtcccgcgccgcgagcgcaacaggagggggcgctggagcccagggcccttgcgcacccgaaggtttccgcagggccgcagcgccctctgccgggccttggcgcgcactcaccggggtgggggcattcaccaccgacaggttgtagccgtagaggaaggaggagccgaaggcgcccgcgagggaggccacgaggagcgagcaggaccagtcctgaggggagaggaaaccacgtcagagccggcaccgggcgcgcagccagggccgagggaagacctggaacgttccctcagctgggggaggccttccg

SEQ ID NO: 1028 - DNA, 449 bp, Homo sapiens
  misc_feature 1..449: note = U/M: U (0.02:0.93) in Pancreatic Acinar cells
  misc_feature 1..449: note = source = chr14:81997731-81998179; Gene: SEL1L (intron)
  source 1..449: mol_type = genomic DNA
cgacctgccctgggtaaccactaatgttcaaacacaaaattataaccaaaaacttgattttaatactggagtaaaactttaaactttgaggccgaaaccctgtgaatgaaaatcacaattgaaaatccatagcttaatttacacaactttatttaacacagggttgtttttttttctttttttttgagacagggtctcgctctattgtccaggctggagtgcagtggcataatcacagctcagtgcagcctcaacctcctggggctcactccatcctgccacctcagcctcccgagtagctggaactacacgtgtgcaccatcacacctggagttacgtagagatggggtttcgccatgttgcccaggttggtcttgaactcctgggctcaagtgatccttccacttcagcctcccaaagtgctgggattacaggtatgagctgggccc

SEQ ID NO: 1029 - DNA, 116 bp, Homo sapiens
  misc_feature 1..116: note = U/M: U (0.04:0.95) in Pancreatic Acinar cells
  misc_feature 1..116: note = source = chr11:117183396-117183511; Gene: BACE1 (intron)
  source 1..116: mol_type = genomic DNA
cgcgaactcctgacctcaggtgatccgccggcctcagcctcccaaagtgttgggattacaggcgtgagccaccgcgtccagccataaatggttctcaaatttgaggcacaaactac

SEQ ID NO: 1030 - DNA, 460 bp, Homo sapiens
  misc_feature 1..460: note = U/M: U (0.03:0.93) in Pancreatic Acinar cells
  misc_feature 1..460: note = source = chr4:3179772-3180231; Gene: HTT (intron)
  source 1..460: mol_type = genomic DNA
cgtagctgctgtgcccctgtgccgtcgggtgccttctacctgctgcctccgaacctttacacatgtccctgctctgcgcgagggcacagatgggatgcactgtggcaggggtggggttagagtagatcacggacacctgttagcttgatgtgtgcttgctgtcaaggttgaatcatgaattattttatgttgcttatattgatatgtatcttaattttaaaagaaaggtctaaatggatgtttttgtttttagggaatcagaggcaatcattccaaacatctttttcttcttggtattactatcttatgaacgctatcattcaaaacagatcattggaattcctaaaatcattcagctctgtgatggcatcatggccagtggaaggaaggctgtgacacatggtaacgggacacacctttcactgtcgtcttcggtgtcgtgatgtgcttggcagtgttc

SEQ ID NO: 1031 - DNA, 475 bp, Homo sapiens
  misc_feature 1..475: note = U/M: U (0.05:0.95) in Pancreatic Acinar cells
  misc_feature 1..475: note = source = chr17:71025197-71025671; Gene: SLC39A11 (intron)
  source 1..475: mol_type = genomic DNA
cggtgagccaagatcacgccattgcactccagcctgggtgacagagtgagacgccgtcacacacacacaaaaaaaaattactgctgcatagtgcaaattagccaatgactgtttacaccgcccagagaaaatccctacattcagacagctgaccaaatacatctgataccgccccaccacccctactccccagtaacatagtaagacccacaaggattgcagagtcctttccaagagactatcttggaagcccagttgggtgcaggagagaagagtagaatgggatccagcaggagccatgcagagccactgagccagatctctgcctgctgctcagggattgaagccactggtcacctgtcagggcaagcagaatacactccaacaacaagttcacacaaaaccagggtggccttgagatcagaatatggcagcctgcattgagggccactggacgccactaccacacatagtc

SEQ ID NO: 1032 - DNA, 280 bp, Homo sapiens
  misc_feature 1..280: note = U/M: U (0.04:0.93) in Pancreatic Acinar cells
  misc_feature 1..280: note = source = chr7:97858311-97858590; Gene: TECPR1 (intron)
  source 1..280: mol_type = genomic DNA
cgcccaggaaggctccgggggggctgtgggccgccctcaccttggaagcagccgcctccatagccgcctgtgtatacccaggccgtgtggtcatagccgatgccccacaccacgccccggctgttggcctccaccatccgcaggtggcctcccatctgccgccaaaacctggaaggatgggagagggcaggtggaaacccctcagaccccaccttccaaccctgcctggctgcccttttgttccgtgtcctcctgtggttctgggattttcccagccctc

SEQ ID NO: 1033 - DNA, 265 bp, Homo sapiens
  misc_feature 1..265: note = U/M: U (0.06:0.95) in Pancreatic Acinar cells
  misc_feature 1..265: note = source = chr8:37891295-37891559; Gene: EIF4EBP1 (intron)
  source 1..265: mol_type = genomic DNA
cgctttgtcgcccaagctggagtgcaatggtgagatcttggctcactgcaagctccgcctcccgggttcacgccattctcttgcctcagcctcccaagtagctgggactacaggcgcccgcgatcaagcccggctgattttttgtgtttttagtagagacagggtttcaccgtgttagccaggatggtctcgatctcctgacctcgtgatccgcctgcattggcctcccaaagtactgggattacaggcgtgagccactgcaccc

SEQ ID NO: 1034 - DNA, 359 bp, Homo sapiens
  misc_feature 1..359: note = U/M: U (0.02:0.9) in Pancreatic Acinar cells
  misc_feature 1..359: note = source = chr1:230193999-230194357; Gene: GALNT2 (Intergenic)
  source 1..359: mol_type = genomic DNA
cgtagtgctatgagtgctggctggcggcacggcgacatattccctgggagcctgagatgagagggttacacagcggggaaggtgggaacaagaagactgcctttcagcagaatgtccccaggatcccctaagcccccgtgatgctgtgctcggtcgctttcctgccccaccctctccagatagctgctgtcctgcctaatgggaagattcctttcccccaccggcaagtgtgccaagtgcctcctagtgactcagtctccctgactctgctactcgctgagctgccttgggcaaggcacttaacagcaccctgctataaaactgaaatagtgagagcatttacttgataggactgttgc

SEQ ID NO: 1035 - DNA, 465 bp, Homo sapiens
  misc_feature 1..465: note = U/M: U (0.06:0.94) in Pancreatic Acinar cells
  misc_feature 1..465: note = source = chr16:630414-630878; Gene: PIGQ (intron)
  source 1..465: mol_type = genomic DNA
cgctctggagtgggcgaggccctatcctggccagtaagacaccctcactgccctggagcacgcagctgggtgcgtggtggaaggaccccacggcaggtggggtcacgcaagaggcctcccctggtgcctggcactggggcagacagtgggaggtgagcagaaccacctccagcacctgcttgattcccaggcctcgatcccctctgcatgtgaggctgtggggaggcacctctgacctggtgagagggccgggtgctccgcctccagctttgctccagagcaaggcccaatggcagactccgtgccctgctcagggtggggtccctgctctccccaggaccctgcagcctctgggcccccttcatcgtggcccaggatggggtcggactgctctgcccccaggcgcgtctggccgggccggtcctaaatgctcctctgccacagctccggctcctggtggtcgcc

SEQ ID NO: 1036 - DNA, 221 bp, Homo sapiens
  misc_feature 1..221: note = U/M: U (0.05:0.92) in Pancreatic Acinar cells
  misc_feature 1..221: note = source = chr7:2415447-2415667; Gene: EIF3B (intron)
  source 1..221: mol_type = genomic DNA
cgtttcctttgaagtctgaacagagttccataaccgcagacattaagatctgttttggggtcagtggttgagtccagctgccgcgttacccacaactcgtattccaaaactgctggttaagtttgtcaaggactttcagtatttagtgacttgtaaaaacattgatggaggcactgatacttgaactagtccatgccaatagagcctgtgaaaccaaacgc

SEQ ID NO: 1037 - DNA, 137 bp, Homo sapiens
  misc_feature 1..137: note = U/M: U (0.03:0.89) in Pancreatic Acinar cells
  misc_feature 1..137: note = source = chr7:97842283-97842419; Gene: BHLHA15 (TTS)
  source 1..137: mol_type = genomic DNA
cggtgacaccccacaaggacacggcctcagcggttccattttcccccgaacattcagccacttccctggagcaatttttcctgccccgctggggaccagcgagtggcctagttgcggctgtggccctggacagcggc

SEQ ID NO: 1038 - DNA, 231 bp, Homo sapiens
  misc_feature 1..231: note = U/M: U (0.08:0.94) in Pancreatic Acinar cells
  misc_feature 1..231: note = source = chr6:134540439-134540669; Gene: SGK1 (intron)
  source 1..231: mol_type = genomic DNA
cgtgcctggccctaaaatggctgttttgagttgacacagagccatgtccaaacacccgtttccacttcgcctatttaaatttccctcctggctctgcaggcattggagtttcgacctgagattctatgccaggccaagatatctagattgtttgcattctatatcaaaacatataattggccagccgcggtatctcacgcctgtaatcccagaactttgggaggctgaggc

SEQ ID NO: 1039 - DNA, 169 bp, Homo sapiens
  misc_feature 1..169: note = U/M: U (0.04:0.89) in Pancreatic Acinar cells
  misc_feature 1..169: note = source = chr12:120741847-120742015; Gene: SIRT4 (intron)
  source 1..169: mol_type = genomic DNA
cggatgcatggacaggtgcaggagctgtacacggtttgaacgcaaacccgtgtgttgttttgggagagtagggaccttggctgtcttgatcaccacagtcttagaccttgagaaaaggatttcagagcaagttgtttattttgcagttgattccagtaaattcattgac

SEQ ID NO: 1040 - DNA, 302 bp, Homo sapiens
  misc_feature 1..302: note = U/M: U (0.09:0.93) in Pancreatic Acinar cells
  misc_feature 1..302: note = source = chr15:90610401-90610702; Gene: ZNF710 (intron)
  source 1..302: mol_type = genomic DNA
cggacgccgtggtggtgctgtccttggctcaggccgccgtgcttggcctggtctccgaaaatgagctctttggagctaccataagcgccgaggccttctacccggacctggggcccgagctttcaggggcagccatgggagagcccgagccaccaggccccgacgtctaccagctggcctgcaacgggagggccttggaggagccggcggaggaggaggtgctggaggtggaggcagcctgtgagaagcacacccggcggaagacgcggccacctgtgcggttggtgcccaaggtcaagttc

SEQ ID NO: 1041 - DNA, 468 bp, Homo sapiens
  misc_feature 1..468: note = U/M: U (0.11:0.95) in Pancreatic Acinar cells
  misc_feature 1..468: note = source = chr16:25181855-25182322; Gene: LCMT1 (intron)
  source 1..468: mol_type = genomic DNA
cggggaggatcgcttgagcccggtgggtcaaggctgcagtgagctgtgatcacaccactgcacttcagcctgggcaacagaatgagaccttgtctctttaaaacaaaacagtgtcttagatttgtaagccggtgcctggtagttctctagttctccatttctcttcgttgcacattttagaaagaacggctcctgtcgaatgggtgggaaacagcatcggccgtcgacatgatggagttgtacaacaggttacctcgagctgaagtgagcaggtatggggttggtgagcgtcagcttgatgggcattcattgtgaactcaaggcatgattgcctgtattctttcatgcagaaaaacagaacaatatgtggagatttcattaaaaaacaaaaaacaaacaaacaaataaaaaacaaggccaggcacggtggctcacacctgtaatcccagcactttgggaggcataggc

SEQ ID NO: 1042 - DNA, 213 bp, Homo sapiens
  misc_feature 1..213: note = U/M: U (0.01:0.92) in Pancreatic Acinar cells
  misc_feature 1..213: note = source = chr7:97844610-97844822; Gene: TECPR1 (TTS)
  source 1..213: mol_type = genomic DNA
cgaacggcccgtgcccccactgtaattgtgctgaaaatgtttctcaaatgacccaaattggctcttattttttctaatggccctttcaaagtattcatgaaattgatgctgtgtcataaaacaaaaataaaagatttcacagcaatgtctgcttcaggcacacggggaaccacgcgttttaatcaacgtatcgataaaaaacaccagggcacg

SEQ ID NO: 1043 - DNA, 341 bp, Homo sapiens
  misc_feature 1..341: note = U/M: U (0.02:0.93) in Pancreatic Acinar cells
  misc_feature 1..341: note = source = chr12:120893218-120893558; Gene: GATC (intron)
  source 1..341: mol_type = genomic DNA
cgccttagccttccaaagtgctgggattacatgcaagagccaccacacctggcctttctcccccacaccccgccgcccccctccaagaaatttaatgtctgaaaagatcatacttgttcaaggccacacagttaagaatgtgccaggtcctgtaacagacttcaactttctaatattcataccatgagtaaatatttgttgtgtctagctttgggctgggtgccacaaaaaaagaactagtcctttcctaaaataatcttattgtgacaacttagttctctttttttttgaggcagagtatcgctctgtcgcccaggctggagtgcagtggcgcgatctcg

SEQ ID NO: 1044 - DNA, 357 bp, Homo sapiens
  misc_feature 1..357: note = U/M: U (0.03:0.94) in Pancreatic Acinar cells
  misc_feature 1..357: note = source = chr7:129910980-129911336; Gene: CPA2 (intron)
  source 1..357: mol_type = genomic DNA
cgatgcaatcggggcacagagccaggtgagagatgtgcttccgggctgccactgatgatggaatcagggaccaccttgacgcctctgacttccatccaagtgttactggtggagggtgtccaggttcttggcgtcttgaacaaataattggacaaaacgcacaaacaaaacaaggaaggaatgaagcaacaaaagcatatatttattgaaaacaaaagtacactccacaggttgggagcagcccgagcataggggcccaagagcccattacagaattttctgggatttaaatactctttagaggtttcccattggttacttggtgtacaccctacgtaaatgaagcagtagcctgcg

SEQ ID NO: 1045 - DNA, 118 bp, Homo sapiens
  misc_feature 1..118: note = U/M: U (0.03:0.93) in Pancreatic Acinar cells
  misc_feature 1..118: note = source = chr4:186605879-186605996; Gene: SORBS2 (exon)
  source 1..118: mol_type = genomic DNA
cgacattgtgtgagttagtgatattatacctgcagccaataggtttggagaactttgcactctcttcacagatgttagcgtaacagacatggcggcacgtttgcgagcacacccaccg

SEQ ID NO: 1046 - DNA, 198 bp, Homo sapiens
  misc_feature 1..198: note = U/M: U (0.02:0.92) in Pancreatic Acinar cells
  misc_feature 1..198: note = source = chr1:22331421-22331618; Gene: CELA3A (intron)
  source 1..198: mol_type = genomic DNA
cgtgtctactaaaaatacaaaattagccaggcacgacggcaggtgcctgtaatcccggttactgtggaggctgagacaggagaatcgcttgaacccgggaggcggaggttgaaatgagctgagattgccaccattgcactccagcctggggaacaagagcaaaactccatctcaaaaaaaaaaaaaactcacagggcg

SEQ ID NO: 1047 - DNA, 286 bp, Homo sapiens
  misc_feature 1..286: note = U/M: U (0.03:0.93) in Pancreatic Acinar cells
  misc_feature 1..286: note = source = chr2:182774084-182774369; Gene: SSFA2 (intron)
  source 1..286: mol_type = genomic DNA
cgagacttataattacctcaactgtgtgttggtcataatgtgctgtagtgagtgtattagtgtttctcctgggatttaccctactttgaagtttaacgtatagagaacttttccttatggatctgtttttcatataatagcaacattttttttgaatgaagcagttattaaaatttattcaaggttgaaaacccatatgttgggctagtttgcacacttgactacgatgttctttactatttaagaactaaccgttacagggtaaaatgatggaagctagtgcacg

SEQ ID NO: 1048 - DNA, 324 bp, Homo sapiens
  misc_feature 1..324: note = U/M: U (0.02:0.92) in Pancreatic Acinar cells
  misc_feature 1..324: note = source = chr1:22330036-22330359; Gene: CELA3A (intron)
  source 1..324: mol_type = genomic DNA
cggtggctcacgcctgtaatcccagctactcaggaggctgaggcaggagaatcccttgaacctgggagttggaggttgcagtgagacaagattgcaccactgcactccagccccgggcaacagagtgagactctgtctcaaaaaaaaaaattaaattaaattattattactattattattgagacagagtttcactcttgttgcccaggctgaagtgcaatggcacaatcttggctcactgcaaactctgccacccgggttcaagcaattctcctacctcacctcccaagtagctgggattacaggcacgcgccaccaagcccg

SEQ ID NO: 1049 - DNA, 445 bp, Homo sapiens
  misc_feature 1..445: note = U/M: U (0.03:0.93) in Pancreatic Acinar cells
  misc_feature 1..445: note = source = chr16:67963905-67964349; Gene: CTRL,PSKH1 (TTS,TTS)
  source 1..445: mol_type = genomic DNA
cgcgcacattgcagtttttggtgccccaggagacaataccaataagcacccatgtgtttcccttctggcagacaagagggcctccggagtcaccctgagagggaagagggagggagaattgagtagggggggttggggaggtataccacaggacagcgcagaggagcgggtgctggggcttacctggcacgaggaggcacctgcgccacctgcacagatcatggagtcagtgatacttgagccccagtactgccggcactgattcacagtgaccaggggcaaagccacctgctgcagatgtgctggtgtcacattgcctgtgggccaggaggggtggtcacatggggcccagaacactggtccccaccccagtcctcccaccctgagctttggcctgagtccctacccacgccactgaggcgaccccagccggtggtgacacacg

SEQ ID NO: 1050 - DNA, 486 bp, Homo sapiens
  misc_feature 1..486: note = U/M: U (0.03:0.93) in Pancreatic Acinar cells
  misc_feature 1..486: note = source = chr1:15767029-15767514; Gene: CTRC (intron)
  source 1..486: mol_type = genomic DNA
cgtgtggcgggactttgattgctagcaacttcgtcctcactgccgcccactgcatcaggtgtgcggggatgataccctgagacctggccatcgtccgggggcggaagcctgatactctgctttttctgagcagcttctccgcactccaggcactgggctacataatctactcacacccagtaactcagttgtgcatttagtcagtcaagtattcattgtgcatctattatgtgccaggaaccagcagtgaagacaaagtctgtgctctcgggaagcttatatttttgtggaagacagagcggcagacaattaaacaaatatatagcatctcaggtgatttaaaataatactaataataaggtattggccaggagcagtggctcacgcctgtaatcatagcactctgggaggccgacgcaggcggatcacctgaggtcaggagttcgagaccagcctggtcaacatagtgaaaccccgtctctaccg

SEQ ID NO: 1051 - DNA, 378 bp, Homo sapiens
  misc_feature 1..378: note = U/M: U (0.03:0.92) in Pancreatic Acinar cells
  misc_feature 1..378: note = source = chr9:135940264-135940641; Gene: CEL (exon)
  source 1..378: mol_type = genomic DNA
cggggaggggagcgcccactgccgttgcccagcctggggcagggcagcgccttggagcacctccctgtcttggccccaggcacctgctgcacagggacaggggaccggctggagacagggccaggcggggcgtctggggtcaccagccgctcccccatctcagtctcccgggacctgcccgttatgatctggatctatggaggcgccttcctcatggggtccggccatggggccaacttcctcaacaactacctgtatgacggcgaggagatcgccacacgcggaaacgtcatcgtggtcaccttcaactaccgtgtcggcccccttgggttcctcagcactggggacgccaatctgccaggtgcgtgggtgccttcg

SEQ ID NO: 1052 - DNA, 72 bp, Homo sapiens
  misc_feature 1..72: note = U/M: U (0.03:0.91) in Pancreatic Acinar cells
  misc_feature 1..72: note = source = chr19:39692865-39692936; Gene: NCCRP1 (TTS)
  source 1..72: mol_type = genomic DNA
cgcctccaggttcaagccattctcccgcctcagcctcccgagtagctgggactacaggcgcccaccaccacg

SEQ ID NO: 1053 - DNA, 169 bp, Homo sapiens
  misc_feature 1..169: note = U/M: U (0.03:0.91) in Pancreatic Acinar cells
  misc_feature 1..169: note = source = chr12:8370881-8371049; Gene: FAM90A1 (Intergenic)
  source 1..169: mol_type = genomic DNA
cggcctgtgactctagataagttctgagtccccatgggggctcaggaaaggttagtgatgacctggaaagaagggacaggctgaaaccgcccctacgctatctgcaggattccaacttcagcaggaagccaaggaccaactcgtaccacacctgcgccctctgaaaacg

SEQ ID NO: 1054 - DNA, 285 bp, Homo sapiens
  misc_feature 1..285: note = U/M: U (0.05:0.93) in Pancreatic Acinar cells
  misc_feature 1..285: note = source = chr17:76178604-76178888; Gene: TK1 (intron)
  source 1..285: mol_type = genomic DNA
cgagggaaaacgggaggacagagcggaagctggcaggaagagtgatgccaagacaagccaacttacaaactgcccctcgtcgatgcctatgacagccacgcccagggcctcctgggccacgtctcggagcaggcaggcgggcagtgcctccatggtgttcctgggaagagaaagccagagcgtgagcagggccagggaggccagaagccacaatgcaggggccagggaatggcactgtcgtgaccacctgctacctgcaaagcaggctcagtgttcacccagccg

SEQ ID NO: 1055 - DNA, 377 bp, Homo sapiens
  misc_feature 1..377: note = U/M: U (0.03:0.91) in Pancreatic Acinar cells
  misc_feature 1..377: note = source = chr6:170577808-170578184; Gene: LOC154449 (Intergenic)
  source 1..377: mol_type = genomic DNA
cgcacctcacccgttgcctgcagccctcccgggaggaagggtgacatctggggtgccagggccctcggcctgtggggcaaatgctgggcggagtgggctgactgaggcaggaaatgtgagcagctatccagagaagtcggcccccaaagcgtgagtctactagcagcctgagagctggctactggcagtcactggacaattcccactttactttgacctgataaatggcaggaaaagtgcccaccaggaagcctgggaactcagcaggtggttgtgacgacaaggctcagagaccaggtcacactggctggggccactttctacgaaaaaggcaggccacgaaatccctccctaaaacccagtcagtgtggacaacg

SEQ ID NO: 1056 - DNA, 95 bp, Homo sapiens
  misc_feature 1..95: note = U/M: U (0.02:0.89) in Pancreatic Acinar cells
  misc_feature 1..95: note = source = chr18:77448085-77448179; Gene: CTDP1 (intron)
  source 1..95: mol_type = genomic DNA
cgctgccagagccccacctgtgcgtgttctccaggatggctgcgtctgggctctgggcgactgaaccaggtgcagagcgtcagccacagctgacg

SEQ ID NO: 1057 - DNA, 139 bp, Homo sapiens
  misc_feature 1..139: note = U/M: U (0.02:0.89) in Pancreatic Acinar cells
  misc_feature 1..139: note = source = chr12:8371595-8371733; Gene: FAM90A1 (Intergenic)
  source 1..139: mol_type = genomic DNA
cgaagatccaccggaccttctgtggaactcccgtgtcggtgaacttttgtgccacgtcccctaattctgcccatggtcatctgcagctgcacgagttagggtcggtgttccttggacgggaagagacaggcaggagtcg

SEQ ID NO: 1058 - DNA, 210 bp, Homo sapiens
  misc_feature 1..210: note = U/M: U (0.03:0.9) in Pancreatic Acinar cells
  misc_feature 1..210: note = source = chr7:129614765-129614974; Gene: UBE2H (Intergenic)
  source 1..210: mol_type = genomic DNA
cgccttctgggttcatgccattctcctgcctcagcctcctgagtagctgggactacaggcacctgccaccatgcccggctaattttttgtatttttagtagagacagggtttcacaatgttagccaggatagtctcgatctcccgaccttgtgatccacccgcctcagcctcccaaagtgctgggattacaggcatgagccaccacgccg

SEQ ID NO: 1059 - DNA, 243 bp, Homo sapiens
  misc_feature 1..243: note = U/M: U (0.04:0.91) in Pancreatic Acinar cells
  misc_feature 1..243: note = source = chr11:65148746-65148988; Gene: SLC25A45 (intron)
  source 1..243: mol_type = genomic DNA
cgtgcgccaccgcgcctggctaatttttgtatttttagtagagacggggtttcaccatgttggccagcctggtctcgaaatcttgacctcatgatccacctacctcagcctcccaaagtgctgggcttacaggcatgagccaccgcgcccagcctctcatttcttataaagacagggtcttcctatgttgcccaggctggtctcaaactcctggccccaagtgatcctcctacctcagcctcg

SEQ ID NO: 1060 - DNA, 350 bp, Homo sapiens
  misc_feature 1..350: note = U/M: U (0.03:0.9) in Pancreatic Acinar cells
  misc_feature 1..350: note = source = chr1:42505787-42506136; Gene: HIVEP3 (Intergenic)
  source 1..350: mol_type = genomic DNA
cgcttcagttatgtgaaccaatcaattccctttgttgttggaatttagttttctgtctataacataaacagttctaacagtaacaatctctctgggcctccatttttcatagataaaagtaatacggataacatctaaggaggctgctggagtgccaggaggaggccgtgggaacaccgtcacctggtcccagggcctggattcgctgcttccagccaaacacgcgcatatcaggccggggccttcagacctcacggaaggcattcgccccaggccaggtggacttctgatgcaggttgagaacaaaaagaagcacctggacattccccggagccctctgcgtggtcgcg

SEQ ID NO: 1061 - DNA, 148 bp, Homo sapiens
  misc_feature 1..148: note = U/M: U (0.04:0.9) in Pancreatic Acinar cells
  misc_feature 1..148: note = source = chr2:241266440-241266587; Gene: GPC1 (Intergenic)
  source 1..148: mol_type = genomic DNA
cgctgaaatgctgcccagcgctcagccccatttcaggtgctgccagactggcctttggtggagcccccgccgtgggaaccaagcatgtgtagtaatcactccccgcagcactggcaaagttcttcagccaggctgacattaaagtacg

SEQ ID NO: 1062 - DNA, 170 bp, Homo sapiens
  misc_feature 1..170: note = U/M: U (0.03:0.89) in Pancreatic Acinar cells
  misc_feature 1..170: note = source = chr13:113295841-113296010; Gene: C13orf35 (Intergenic)
  source 1..170: mol_type = genomic DNA
cgaccgttgaaatgtggagtttctgaggctacgcagcccaggccctggctggagatttgtgctaataagcctcgtgaccctgggcacagcccagctttatcaccttccctgtgggtcagatgcggaggcagcagccagtctccaagtctgcttccagtgctgagatgccg

SEQ ID NO: 1063 - DNA, 179 bp, Homo sapiens
  misc_feature 1..179: note = U/M: U (0.02:0.88) in Pancreatic Acinar cells
  misc_feature 1..179: note = source = chr9:135948843-135949021; Gene: CELP (Intergenic)
  source 1..179: mol_type = genomic DNA
cgtgcgccactacgttcggctgattttttttgacttttagtagagacagagtttcaccattttggccaggctgatcttgaactcttgacctcaggtgatctgcccgcctcagcctcccaatgtgctgggattacaggcatgagccactgtgctcagcccctacctaggacttttaagcg

SEQ ID NO: 1064 - DNA, 239 bp, Homo sapiens
  misc_feature 1..239: note = U/M: U (0.06:0.92) in Pancreatic Acinar cells
  misc_feature 1..239: note = source = chr10:134224276-134224514; Gene: PWWP2B (intron)
  source 1..239: mol_type = genomic DNA
cggactggaagctgggcacctccctgaagtggggactcaatgctctcctggtgtcccggcctcttgggcaagggggagatttcacagcttccagacagtgcaggctggaggggtccagcctcctgtggccccaggggcccaaccctttcccctcctgccctggcaggggacttttgggggcgtacccagcacagcctccgtcagcagttgggagcacggggtttctgcgccactggacg

SEQ ID NO: 1065 - DNA, 246 bp, Homo sapiens
  misc_feature 1..246: note = U/M: U (0.03:0.89) in Pancreatic Acinar cells
  misc_feature 1..246: note = source = chr10:118309614-118309859; Gene: PNLIP (intron)
  source 1..246: mol_type = genomic DNA
cggctagagtgcagtggcgcgatcttggctcactgcaagctccgcctcccgggttcacgccattctcctgcctcagcctcccgagtagctgggactacaggctcccaccaccaggcccggctaattttttgtacttttagtagagatgaggtttcaccatgttagccaggatggtctcgatctcatgaccttgtgatccacctgcctcggcctcccaaagtgctgggattacaggcgtgaccaccg

SEQ ID NO: 1066 - DNA, 389 bp, Homo sapiens
  misc_feature 1..389: note = U/M: U (0.08:0.94) in Pancreatic Acinar cells
  misc_feature 1..389: note = source = chr2:135198029-135198417; Gene: MGAT5 (intron)
  source 1..389: mol_type = genomic DNA
cgtgtctacatggtcccagcatgagtgagtgggggtgcgcatgaatgcaccccgcgatagaaccatgtcctgtccagggctgcttcccgtctggcaccctgagctgctgggataggctccagccgccctcaacactgagctggaataagagcgttcgaaaacaaatgaatcgatacaaattattgtacaataaaacttcataaagtctacgataatcatacacatgcaagaaatcagaagggaacagaccagctggtggaggcaggcctgattgcggtgccatgttagtgattgattgatagtgaattatgaggtgggaggaggcacttcttacgattttcacttcgcaaatgtgtattcctcgattgaacccaccaccacaactgccg

SEQ ID NO: 1067 - DNA, 415 bp, Homo sapiens
  misc_feature 1..415: note = U/M: U (0.06:0.92) in Pancreatic Acinar cells
  misc_feature 1..415: note = source = chr2:242847380-242847794; Gene: CXXC11 (Intergenic)
  source 1..415: mol_type = genomic DNA
cgggcccgtcactggtgctgggcaccacacttaggcctggccgtcctctgcccaggagaaaagggggagtgggtgctgggagtgtgcacaggtgtgtgtgcagggctgtgggtgtgcgcacacctgcgtgtttaatcataatacaaagtgggccgggaacctcaccctgaagtgtgaagggcagtgcgtcatttagaatccttctctttttctccttcttgagcagctgaacgttgagaggggccccgtctggtgtggccgtgtctggtcccccatgcaggccctgcaccgtggactcccaacctgcggggatccgtccccaaagacgccactagttctgccagcccagggtttcctgagtgtttcccgagaggccctggttgcacggagtaagttctagtttagtcctggttcg

SEQ ID NO: 1068 - DNA, 93 bp, Homo sapiens
  misc_feature 1..93: note = U/M: U (0.03:0.88) in Pancreatic Acinar cells
  misc_feature 1..93: note = source = chr1:22331987-22332079; Gene: CELA3A (exon)
  source 1..93: mol_type = genomic DNA
cggtagcctcatcgcccccgattgggttgtgactgccggccactgcatctcgtgagttctctaccctgtccctgcctgtggccctgggcagcg

SEQ ID NO: 1069 - DNA, 291 bp, Homo sapiens
  misc_feature 1..291: note = U/M: U (0.02:0.87) in Pancreatic Acinar cells
  misc_feature 1..291: note = source = chr5:172408850-172409140; Gene: ATP6V0E1 (Intergenic)
  source 1..291: mol_type = genomic DNA
cgtttaatacaggaatccattctacttgatgaaagaaatcaggagttaatgcaatgtggctactgcaaggaaaccatggtccctggtaaagcacattgcatttaaagacctgctttctatcttgctttcacctgtaagctttatcatcaagctcctcaacctctctgagaactggcttccttgtctattccaagcttggcgcatactataactaacatatgtgaaaattctcagcaagcgttctaagccctgtttatcagctcagcacggtggcttatgccagtaatcccg

SEQ ID NO: 1070 - DNA, 319 bp, Homo sapiens
  misc_feature 1..319: note = U/M: U (0.01:0.86) in Pancreatic Acinar cells
  misc_feature 1..319: note = source = chr6:35766021-35766339; Gene: CLPS (Intergenic)
  source 1..319: mol_type = genomic DNA
cgctgccccctacccaaggccacgtgcgcgcgtgagcagtcgctagtcctggctgagaatgaagaggtctcatgagcctcagatggagcaggggcctcaggaagctgggaagggcacagctgcctgagtttgctcaggcatgggaacagagcagcttttcctgaaggactagtcatggcagccagaggcccctgcccttcccctctccatcccaggaggtagaagacagctccactgagaggcccaggcctcaagcacagcttttaatttaatttaatttaattttttgagacaaggtctcactctgtcacctaggccg

SEQ ID NO: 1071 - DNA, 342 bp, Homo sapiens
  misc_feature 1..342: note = U/M: U (0.02:0.87) in Pancreatic Acinar cells
  misc_feature 1..342: note = source = chr12:120764208-120764549; Gene: PLA2G1B (intron)
  source 1..342: mol_type = genomic DNA
cgatttcagctcactgcaaactctgcttcccgggttcacgccattctcctgcctcagcctccctaggtcagatagttttaaactatctgcactgtttatccagtgaatatttattgagcacttactatgtgccaggctctgtcctaggagctagagatacagcagtgaacagatataataataataataataataataataataataataataataataatctctaacctcatggagcttacaacctagtgggagagaaaaacaataaataataaatgtgataaggccgggcacggtggctcatgcctgtaatcccagcactttgggaggccgaggcaggcg

SEQ ID NO: 1072 - DNA, 375 bp, Homo sapiens
  misc_feature 1..375: note = U/M: U (0.04:0.89) in Pancreatic Acinar cells
  misc_feature 1..375: note = source = chr16:4763799-4764173; Gene: ANKS3 (intron)
  source 1..375: mol_type = genomic DNA
cggtagtcaagcatactacagaaagcctctacattcacaacagcctggttttgtaccactctccatcgtaaccatccttatctcctgttagagcaggggcctcaaccttgacatgtaagcagctgggggaggcagagccaaatctcagagaaggtgggagccggggaagcgggggacatctttctctgccaggtcacctaaagctcaaggcaaccagagaccccagcagggcgcggctggcaggtgtgggtacctgggctccgatagaggctcttgggcagagagggcgagtaagtgtccatcaaggccacgatcttcatgtgtccgtactgcttggccagcatccgggctgtggctccactgtggtctctcgcg

SEQ ID NO: 1073 - DNA, 422 bp, Homo sapiens
  misc_feature 1..422: note = U/M: U (0.08:0.93) in Pancreatic Acinar cells
  misc_feature 1..422: note = source = chr11:76076294-76076715; Gene: PRKRIR (intron)
  source 1..422: mol_type = genomic DNA
cgccactgcactccagcctgggtgacagagcaagactgtctttaaaaaaaaaaaaaaaaaaagtagttaccttgggtgagtagaaatggggcaccaggaaccgaagagttttgttttgttttgttttgttttaatcattttgagttttttttccagacaagcgctcactctgtcgcccagagtggagtgtagtggcatgaacacaactctctgcagccccgacgtcatgggctcaagtatcctcccatctcagcttcccaagtagctgggactacaggcatacgtcaccacacctcgctagtttttttggtattttctgtagcgacggcatctggccatgttgcccaggctggtctcaaactcctgagctcaagtggtcttcctgcctcggcctcccaaagtgctgggattataggcccccg

SEQ ID NO: 1074 - DNA, 148 bp, Homo sapiens
  misc_feature 1..148: note = U/M: U (0.1:0.94) in Pancreatic Acinar cells
  misc_feature 1..148: note = source = chr1:26133259-26133406; Gene: SEPN1 (intron)
  source 1..148: mol_type = genomic DNA
cggaattgccacctggcccagcccagggaagcagtgctggggagcccctttcttttttttttttttttttttgggacggagtctcgctctgtcgcccaggctggagtgcagtggcgcgatctctgctcactgcaagctccgcctcccg

SEQ ID NO: 1075 - DNA, 162 bp, Homo sapiens
  misc_feature 1..162: note = U/M: U (0.09:0.93) in Pancreatic Acinar cells
  misc_feature 1..162: note = source = chr1:42243440-42243601; Gene: HIVEP3 (intron)
  source 1..162: mol_type = genomic DNA
cgctttcctacatcccacgtgtgtcatgcatttaatccgcacagtagtccacccagctccttgccctctgggaagagcgcagatgttgctaatggaatcttggtaaaaggtatcatgtggccccagaatagtggtatgcatcagattaccgcgtgcttcacg

SEQ ID NO: 1076 - DNA, 194 bp, Homo sapiens
  misc_feature 1..194: note = U/M: U (0.04:0.88) in Pancreatic Acinar cells
  misc_feature 1..194: note = source = chr17:3808720-3808913; Gene: P2RX1 (intron)
  source 1..194: mol_type = genomic DNA
cgctttcccacgccctccccagatgtgcctctgagccaccatctgctcctaaagctcctgtcttgggctagaggcaggacagcctcccctgcctcccgctgctggcctgggcctgaagttccacggtgcttttcactatgaaaatgctaattcaggacgggcgtgccatcccagcattttgggaggccgaggcg

SEQ ID NO: 1077 - DNA, 224 bp, Homo sapiens
  misc_feature 1..224: note = U/M: U (0.07:0.91) in Pancreatic Acinar cells
  misc_feature 1..224: note = source = chr2:97267907-97268130; Gene: KANSL3 (exon)
  source 1..224: mol_type = genomic DNA
cgaggcccccattggtcagcagctggtggatggctgtgggcttcccaccaggagtggcacccaaggaggagagagtggtggccacaggaatggtacggacaatggtgctggtgcccgtggtgatggcacccaggctctgcatgggggtgggcaacttcacactggtggcctgtgggacacacaagcccaggtgatcagaagctgtcgcccaacagcaacattcg

SEQ ID NO: 1078 - DNA, 285 bp, Homo sapiens
  misc_feature 1..285: note = U/M: U (0.08:0.92) in Pancreatic Acinar cells
  misc_feature 1..285: note = source = chr17:79814901-79815185; Gene: P4HB (intron)
  source 1..285: mol_type = genomic DNA
cgcccacctcggccttccaaagtgctgggattaccgggatgaaccactgtgcccagccctagctaatttttgtattttttgtagacagggtttcaccatgttgcccaggatggccctctgcattttaaaaattttattttttgaaacgaagtctcactctgtcacccaggctggagtgcggtggcacgatctcagctcactgcaaccttacctcccaggttcaagggattctcctgtgtcagcctcccaagtagctgggattacagacgtgcaccaccacgcccg

SEQ ID NO: 1079 - DNA, 360 bp, Homo sapiens
  misc_feature 1..360: note = U/M: U (0.03:0.87) in Pancreatic Acinar cells
  misc_feature 1..360: note = source = chr12:120761832-120762191; Gene: PLA2G1B (intron)
  source 1..360: mol_type = genomic DNA
cggccaggcacagtgactcacgcctataattccagcactttgggagactgaggcaggcagatcacttgaggtcaggagtttgagaccagcctgggcaacatggtaaaaccccatctctgctaaaaatacaaaaaattagccaagcatggtggtgcacgcttgtaattccagctactcaggaggcttaggcaggagaatcgcttgaacccgggaggcagaggttgcagtgagctgaacggaggttgaggtgatgaagtgagactctgtctcaaaaaagaaaggaagaaaataggcagtaatccctgttctgtggatcttacattctattggaaagatggaatgtaaagaaataagtagccg

SEQ ID NO: 1080 - DNA, 409 bp, Homo sapiens
  misc_feature 1..409: note = U/M: U (0.1:0.94) in Pancreatic Acinar cells
  misc_feature 1..409: note = source = chr2:46144305-46144713; Gene: PRKCE (intron)
  source 1..409: mol_type = genomic DNA
cgtttacaatccctgagctagacacaaaagttttccacgtccccaccagattagctagatacagagtgtccacacaaaggttctccaagtcgccgccagagtagctagatacagagtgtcaattggtgcgttcacaaaccctgagctagacatagggtgctgattggtgtgtttacaaaccttgagctagatacagagtgccaattggtgtatttacaatccctgagctagacattaaggttctgcaaggccccaccagagtagctagatacagagtgtcaattggtgcattcacaaaccctgagctagacacagggtgctgattggtgtgtttacaaaccttgagctagatacagagtgccgattggtgtatttacaattcctgagctagacataaaggttctccacg

SEQ ID NO: 1081 - DNA, 459 bp, Homo sapiens
  misc_feature 1..459: note = U/M: U (0.07:0.91) in Pancreatic Acinar cells
  misc_feature 1..459: note = source = chr1:230290496-230290954; Gene: GALNT2 (intron)
  source 1..459: mol_type = genomic DNA
cggaaggaacaaaccctgtcgccccttgagcgcagacttccagaactgtgagaaagtgtgtttctgttcctgaagcctcccagtttgtagtactttattatggcagccctggcatacttactcaggtagtctctgtcaggttatttataactcaccttatcacattggtaacttgtggttttatcatttggcatgacatccaaggccccttgcagttctaatatttacgtactagcacttaaaaagactttctctgaccacagggtctttgctggatggggtcttggtctggggctggggctttggtttccaaacatcagggtcctcccagatgaggctgccccgcgccgcatgcaccccccaccccgtttccgcgtgcagttttctgcggaagtatttcccaggtcctcggtttcccttctgtgtgagagcgtcactttctctcacatctgtggagcg

SEQ ID NO: 1082 - DNA, 460 bp, Homo sapiens
  misc_feature 1..460: note = U/M: U (0.07:0.91) in Pancreatic Acinar cells
  misc_feature 1..460: note = source = chr10:15273069-15273528; Gene: FAM171A1 (intron)
  source 1..460: mol_type = genomic DNA
cgttctcataacagagaaattacaaatctggagacatgtggtaggatgcttgctaaagagcttgttgacacagagatcttgctaagtgcaggttctgatccagaggtctggaggaaagcctgagaaggcaattcttattttatttttttttttgaggcaggttctctctctatcacccaggctggagtgcagtggtgcaatcacagctcactgcagcttcgacctcctggctcaagtgatcttcccacctcagcctcccgagtagctaggaccacagacacatgccaccatgcctggctaaatttttattttttatagagatggggtcttgctatgttacctgagcaggtctcaaactcttgagttctagtgatcttctccccttgccttctcaaaatgctgggactacaggtgtgagccaccgtgcacagccctgagaacgcggttctaacgagctccg

SEQ ID NO: 1083 - DNA, 113 bp, Homo sapiens
  misc_feature 1..113: note = U/M: U (0.07:0.9) in Pancreatic Acinar cells
  misc_feature 1..113: note = source = chr9:140415142-140415254; Gene: PNPLA7 (intron)
  source 1..113: mol_type = genomic DNA
cgagagctcggctaggtggggaccgtcccacgtcccggccaagtgcctcccagggtcacaccgccaggaggagggagagccggggttgacagccttgtgcccttgacaatgcg

SEQ ID NO: 1084 - DNA, 118 bp, Homo sapiens
  misc_feature 1..118: note = U/M: U (0.06:0.89) in Pancreatic Acinar cells
  misc_feature 1..118: note = source = chr2:241638157-241638274; Gene: AQP12A (TTS)
  source 1..118: mol_type = genomic DNA
cgatgggatgctgaggatagtgctggagcctgaggctgtaggcttgtgaactaggcacagggcacccagtcccacgggccctgagttcgcgaccgtcaggaccatggtccgctcgccg

SEQ ID NO: 1085 - DNA, 330 bp, Homo sapiens
  misc_feature 1..330: note = U/M: U (0.06:0.89) in Pancreatic Acinar cells
  misc_feature 1..330: note = source = chr1:185152942-185153271; Gene: SWT1 (intron)
  source 1..330: mol_type = genomic DNA
cgaagtaaaagcaattttgtttttattgtctaaaggacttctcttaagaatgctctcaaaaacattctccatggctggtttttcacagtcttggccccaggtttcccgtgtatttctgctttgccaacccttaccttctctgcccactttgacttagacgattctccaccccactcccactccaaacaggggttgcaattcctatccagaggaccttaattgattggggagaaatttacttggcaacaaggatacgggccggatagatatcagcttgagagtctagccaactgtgtaaatctctgatacagttaacaagacaaagaggcg

SEQ ID NO: 1086 - DNA, 428 bp, Homo sapiens
  misc_feature 1..428: note = U/M: U (0.04:0.87) in Pancreatic Acinar cells
  misc_feature 1..428: note = source = chr9:134199248-134199675; Gene: PPAPDC3 (Intergenic)
  source 1..428: mol_type = genomic DNA
cgcatgcccagccccacagtccgcccttcctttgtcagggatctgaggtgtgcagagccccacacctgtgccggtcagcagctgccatgtagatagtgggaccctgatgctgcacagaaggtccctggaagcaggtggcccctctcaggatgcgtagaatacagcaaaggctttaattattttttttaaatacagaagctcaggtcccacctgaagaggtttgggtgtaattggtgtggggcgtgggctcctcacggggattgttttccaagcttcccaggtgatttcagtacagccaaagttaagaatcgatcctggagccgggcacggtgcctcatgcctgtaatccccgcactttgggaggctgaggagggtggatcacgaggtcaggagatcgagatcatcctggctaacacggtgaaaccccg

SEQ ID NO: 1087 - DNA, 192 bp, Homo sapiens
  misc_feature 1..192: note = U/M: U (0.04:0.86) in Pancreatic Acinar cells
  misc_feature 1..192: note = source = chr11:62539791-62539982; Gene: TAF6L (intron)
  source 1..192: mol_type = genomic DNA
cgaggccagcctgggcaacacggtgaaacctcgtctctactaaaaatacaaaaaattagctgggcatggcggcgtatgcctgtagtcctagctactcgggaggctgaggcaggagaattgcttgaaccagggaggcagaggttgtagtgagccgagatcacgccactgtactccagcctgggtgacagagcg

SEQ ID NO: 1088 - DNA, 242 bp, Homo sapiens
  misc_feature 1..242: note = U/M: U (0.1:0.92) in Pancreatic Acinar cells
  misc_feature 1..242: note = source = chr4:1094258-1094499; Gene: RNF212 (intron)
  source 1..242: mol_type = genomic DNA
cgatctccgctcaccgcaacctccactccccaggttcaaatgattctctagcctcaggctcccaagtaattgggattacaggcgtgtgctactgagcctggctaatttttgttattttcagtagagatggggtttctccttgttagccaggctggtctcaaacgcctgacctcaggtgatctgcccgcctcggctttgcaaagtgctgggattacaggcgtgagccaccgcacccggccgcg

SEQ ID NO: 1089 - DNA, 317 bp, Homo sapiens
  misc_feature 1..317: note = U/M: U (0.02:0.84) in Pancreatic Acinar cells
  misc_feature 1..317: note = source = chr12:126676605-126676921; Gene: LOC400084 (Intergenic)
  source 1..317: mol_type = genomic DNA
cggagagcctggctttctgagcatcttccctccaaccaaggaggaacccctgctcacaacgcagctaaccgcaaaccccagcttggcagaaatctgcgactcctcctaagtgccagattcagtccggtgtgatttggagttgtcaggtagggactgtggagctcagagacgctggtgtctgggggcgttgggtgtgagtctctggaacctgcctgggcttcccgggagtcctgtcgtctccacatgggagttcatggcctcttggataggagggaatttaatgggcaaggtaggcacctagcatagtttctggagcg

SEQ ID NO: 1090 - DNA, 321 bp, Homo sapiens
  misc_feature 1..321: note = U/M: U (0.1:0.92) in Pancreatic Acinar cells
  misc_feature 1..321: note = source = chr16:19626697-19627017; Gene: C16orf62 (intron)
  source 1..321: mol_type = genomic DNA
cgtggtggctcacacctgtaatcccagcactttggtaggccgaggcaggcagatcatctgaggtcaggagttggagaccagcccggccaacatggtgaaaccccgtctctactaaaaatacaaaaattagccaagtgtcgtgacacatgcctgtaatccctgctacttgggaggctgaggcaggagaattgcttgaacctgagaggtggaggttgcagtgagccaagatcgtgccactgcactccaccctgggcaacagagcgagactctgtctcaaaacaaaacaaaaaacagataaggaaaaaaaaaataggccgggcg

SEQ ID NO: 1091 - DNA, 336 bp, Homo sapiens
  misc_feature 1..336: note = U/M: U (0.06:0.88) in Pancreatic Acinar cells
  misc_feature 1..336: note = source = chr2:241632818-241633153; Gene: AQP12A (intron)
  source 1..336: mol_type = genomic DNA
cgggagctctgcagggacacggctctgtggcagattgcccgggcctctgtcctgggtggcaccggagagctcccgtcaagggtcctgcctccacgaggcacagggcgcctggtctcagggacggagctgcccatcctcagggtcctggtttacacctgggcggccgcagactccatgtccctgtggtccctgccctccgctaggcccactccctgctcttccgtgcccagaggcaggtccccggtattggtggattctgttatttggggtggtcacccaggcctggggctgcaggacagcggcccggctgccgccgccttcccttgtctcacatcg

SEQ ID NO: 1092 - DNA, 381 bp, Homo sapiens
  misc_feature 1..381: note = U/M: U (0.03:0.85) in Pancreatic Acinar cells
  misc_feature 1..381: note = source = chr16:25229769-25230149; Gene: AQP8 (intron)
  source 1..381: mol_type = genomic DNA
cgacgaagatcttgagtggggtgcctggcagggtgatctgggacatggttggtctgtattaaatctcactcaaaaaatagatctgaatgaggaaacagaaatactatttctgagaaaaccagaatggaaaagagctttaacatctctttaggccgggtgcagtggctcacgcctgtaatcccagcactttgggaggctgaggcgggtggatcacctgaggtcaggagttggagagcagcctggccaacagggtgaaaccctgtctctactaaagatacaaaaattagctgggcgtgggggcaggcacctgtggtcccagctacttcggaggctgaggcaggagaattgcttgaactgggagggagaggttgcagtgagccg

SEQ ID NO: 1093 - DNA, 412 bp, Homo sapiens
  misc_feature 1..412: note = U/M: U (0.09:0.91) in Pancreatic Acinar cells
  misc_feature 1..412: note = source = chr3:171789927-171790338; Gene: FNDC3B (intron)
  source 1..412: mol_type = genomic DNA
cgcgttatctagtatgcgtatgcccattagtcacatgtggctgttgattactcaaatgtggctagtgtgactgagaaatagaattcaaggttttatttaattttaagtaatttaaatttaaatagttacatgtagctagtggttctagtactggacagagaggctatagagtttgagagacctgggagaatttgtagtttgcgtttcctggggtaatgacaatatcttggcattttgtggctatcagtatcttgacctcgttagggttgtcagtgaatggttgtgtcatgaaatagtaataatgttaataaaggtgaaatttttacaaagtggataattgaatgtttaaaactgtgatgcctaacaacaaaatcctgtttgatcaccaacctgggaaatccacagtctaccg

SEQ ID NO: 1094 - DNA, 108 bp, Homo sapiens
  misc_feature 1..108: note = U/M: U (0.11:0.92) in Pancreatic Acinar cells
  misc_feature 1..108: note = source = chr12:120892262-120892369; Gene: GATC (intron)
  source 1..108: mol_type = genomic DNA
cgcccaggctggagtgcagtagcatgatatccgctcactgcaagctccacctccagggttcacgccgttcccctcctcagcctctcgctacaggcccccgccaccacg

SEQ ID NO: 1095 - DNA, 500 bp, Homo sapiens
  misc_feature 1..500: note = U/M: U (0.08:0.89) in Pancreatic Acinar cells
  misc_feature 1..500: note = source = chr14:101007293-101007792; Gene: BEGAIN (intron)
  source 1..500: mol_type = genomic DNA
cggcgtccttccaaagatgacggggtgggagtgccaggcaggaatgggaggcaggatgaacccccagcaccttccaccccgcacttcagacttgctgctcacaaccctcttcccagagtgtggtttggaaacagtgtggctgcagggctgggcagggactgggcaggtgtgtgacctcaggcccaggcgggcgctggctcagcctcctgagctgaaaacagatgcaaacagtaggactcaaggggtgtggcttcgccactgaaaatctctgttgcatgtgcctgtgtttggggcttgcattcccgcccctccggggtccccactgcgagggctctgacagctagccctggggtggcccggaggcccagtgacccacctgagctgccccatggctgctcctggcaagggctggccacagtcccaacccagccagcaccaggcatcctgctgtccaggcaaggctgtctctgacacaggcacctttctgtccccccaccacg

SEQ ID NO: 1096 - DNA, 270 bp, Homo sapiens
  misc_feature 1..270: note = U/M: U (0.12:0.92) in Pancreatic Acinar cells
  misc_feature 1..270: note = source = chr9:125705958-125706227; Gene: RABGAP1 (intron)
  source 1..270: mol_type = genomic DNA
cgcggtggctcacgcctgtaatcccagcactttgggaggccaaggcaggcggataacaaggtcaggagatcgagaccatcctggctaacactgtgaaaccccgtctctactaaaaatacaaaaaattagccaggcgtggtggcaggtgcctgtagtcccagctactcgggaggctgaggcaggagaatggcgtgaacccgggaggcggagcttgcagtgagccaagatcgcaccactgcactccagcctgggcgacagagtgagactccg

SEQ ID NO: 1097 - DNA, 369 bp, Homo sapiens
  misc_feature 1..369: note = U/M: U (0.05:0.85) in Pancreatic Acinar cells
  misc_feature 1..369: note = source = chr3:148567923-148568291; Gene: CPB1 (intron)
  source 1..369: mol_type = genomic DNA
cgaggaaaaagataacagtaaccagaagaagaaatatgacagactttctgaaaaattattaaatgtgaacaaaagatagaaagctacttccaaattctaacaccttccagtccagtggcaactcagtcactgcctcttaattgaagttttttttgtttgtttgtttgtttgtctgtttgtttttgagacggagtctcgctctatcacccaggctggagtgcagtggtgcaatctcggctcactgcaagctccacctcccgggttcatgccattctcctgcctcagcctcccgagtagctgggactacaggcacctgccaccacacccggctaatttttttgtatttttagtagagatggggtttcaccg

SEQ ID NO: 1098 - DNA, 223 bp, Homo sapiens
  misc_feature 1..223: note = U/M: U (0.14:0.93) in Pancreatic Acinar cells
  misc_feature 1..223: note = source = chr11:77283866-77284088; Gene: AQP11 (Intergenic)
  source 1..223: mol_type = genomic DNA
cgaatataaaagaaagcgtcctttaagtctaagactgtaaacctagtggcacttgttggaataagtaccattaaagtatatggatttggtgccacgggatggatggtcaccatggcccggtttacggcatgcaaatcttgcaccggtatctactcatcagaccttggtcccagcagcggctttcatactggcaaaagtggagtattccgggggactggcatcg

SEQ ID NO: 1099 - DNA, 358 bp, Homo sapiens
  misc_feature 1..358: note = U/M: U (0.12:0.91) in Pancreatic Acinar cells
  misc_feature 1..358: note = source = chr19:10950193-10950550; Gene: TMED1 (Intergenic)
  source 1..358: mol_type = genomic DNA
cgcctctcaactagctatgtgctttttgcctctagggatttacctactctggatatttcatatgaatagaagcagacaatgtgtcaccatttgtattgaacttcttttacttagcatgtttctagggttagaccatgtatcaatatttaattcctttttatggctgagtagtattctattgtatgtacataccacaatcaatttttcttttgttctttttttttttttttttgagacagtctcgctgtgttactcaagctggagtgcagtggtgtgatcacagctcaccgcaccctccacttcccgaactcatgtgatccacctcagcctcccaagtagctgggactacaggtgcacg

SEQ ID NO: 1100 - DNA, 289 bp, Homo sapiens
  misc_feature 1..289: note = U/M: U (0.11:0.89) in Pancreatic Acinar cells
  misc_feature 1..289: note = source = chr14:101006856-101007144; Gene: BEGAIN (intron)
  source 1..289: mol_type = genomic DNA
cgtaggtctggctgcactgcagcagctgggccgctagattgcagtccttcctatagagctcctaaaagacaagagaaggcgtttggcgccattcaccccagccaaggccccgccgccctgaccagcgccaagtggccagcgggggcagtggtgtgcacagggcctgctgtgcgctcagcaggacaaggacccactgctggctccggccctctctggcctccacactcttgcctgcaaaatgagagcctctttctgacctggggctgccggagcatggagggccctgccg

SEQ ID NO: 1101 - DNA, 303 bp, Homo sapiens
  misc_feature 1..303: note = U/M: U (0.13:0.91) in Pancreatic Acinar cells
  misc_feature 1..303: note = source = chr19:4936033-4936335; Gene: UHRF1 (intron)
  source 1..303: mol_type = genomic DNA
cgaagatacctggccgaccacaccttggggtgtttgggttcttcgattcattcatgcttgtgtcccgagccctctggggatgcaggaggcacagcgggaaagggaacaggtgctcggtccaggcggccttggggcagacactgtcccttgccagccccatgggagcttccagggatgcagtgagagggtcacgctgagccgagttgtgcctcgcaatgagtttgtgatgtgtgcccatcgttagcaccttcgacttctatcatctgctgagtcaggcatcatacaagatgagacagagaaacg

SEQ ID NO: 1102 - DNA, 328 bp, Homo sapiens
  misc_feature 1..328: note = U/M: U (0.13:0.91) in Pancreatic Acinar cells
  misc_feature 1..328: note = source = chr22:43275974-43276301; Gene: PACSIN2 (intron)
  source 1..328: mol_type = genomic DNA
cgaactggcttcaccaaccgcactgaaaatggactagggcaaaaccatgaatggagactgtgtcttgattttctagaagagtctgtgcatgcccgcaggtgtttaatgagctctccttccccccatctccaccagttaccagacaactctgattaaaacttggtgtggctgagtccacggctctgctcacacgtacttacagaacttttgggttggaagccaactcagaagcatcctgtctaacctgtccatttgtcagattaggaaactgaggcccagaaaggcaatgtgatttgcccacgcagtgtgggtggcagacttgggcccg

SEQ ID NO: 1103 - DNA, 384 bp, Homo sapiens
  misc_feature 1..384: note = U/M: U (0.14:0.92) in Pancreatic Acinar cells
  misc_feature 1..384: note = source = chr10:80806029-80806412; Gene: ZMIZ1-AS1 (intron)
  source 1..384: mol_type = genomic DNA
cgcacacacacaaatcagccaggctgtggtgatgcatgcctgtaatcccatataatagggaggctgaggcaggagattgcctgaatctggaaggcagagggtgtggcgagccgagatcatgccactgcactctagactgtacagcagagcaagacttcatctcaaaaaaaaaaaaaaaaaaaagagtaaagctggtgcattctcagggtgtctggctgccagccttgtaggtgacgcaggtcccaatgagagttacaattagatctcactggagacgtatttctattaccagggctgagcacgtgagccatgcagcagcgtcccttctttcgttcgagagactctgccctggctggaagttgagtaaggaagcctgggatctcg

SEQ ID NO: 1104 - DNA, 176 bp, Homo sapiens
  misc_feature 1..176: note = U/M: U (0.15:0.92) in Pancreatic Acinar cells
  misc_feature 1..176: note = source = chr16:87130700-87130875; Gene: C16orf95 (Intergenic)
  source 1..176: mol_type = genomic DNA
cgcataaacatgataaccccggcgtctggggcgtgagacagctgttgtgttttgctcccaagacagtctgaggggaagacctggaaactcccagacactccagggcagggccagggcataggcaggcagtgggtaccagccccacggcataggcaggcggtgggtaccagcccacg

SEQ ID NO: 1105 - DNA, 469 bp, Homo sapiens
  misc_feature 1..469: note = U/M: U (0.1:0.87) in Pancreatic Acinar cells
  misc_feature 1..469: note = source = chr5:177020076-177020544; Gene: TMED9 (intron)
  source 1..469: mol_type = genomic DNA
cgggtggatcacttgaggccgggagttcaggaccggcctgggcaacctccgtctggcaaaccccgtctctagtaaaaatacaaaaaaaaaaaaaaaaaaaaatgagccgggtgtggtggcgcacacctctaataccagatacttgggaggctaaggcacgataattgcttgaacctgggaagctgaggctgcagtgagctgagatagcatcactgcactccagccaggacgacagagtgagactctgtctcaaaaacaaaaacaaaaaagaaccccccaaaaaacaactcacaccaaaaaagttgaaagggcataagctataaaggaaagcccttcccaagagcagtcagtcacttgccaccctaatgtcagactctcagagtctaaacacctgccccagagagttctcacacaagcatatggcaacagctgctgagcagctttgaatctttcagtgttgtgaggtgcg

SEQ ID NO: 1106 - DNA, 261 bp, Homo sapiens
  misc_feature 1..261: note = U/M: U (0.16:0.92) in Pancreatic Acinar cells
  misc_feature 1..261: note = source = chr3:148576081-148576341; Gene: CPB1 (intron)
  source 1..261: mol_type = genomic DNA
cgggtgcagtggctcatgcctataatcccagcactttgggaggccgaggcaggcagatcccgagatcaggagctcgagaccagcctgcccaacatggtgaaaccccacctctactaaaaatacaaaaaattagccaggcgtggtggcgggcacctgtaatcccagctgctcgggaggctgaggcaggagaatcgtttgaacctgggaggcggaggttgcagtgatctgagatcctgccactgcactctagcctgggcgacg

SEQ ID NO: 1107 - DNA, 346 bp, Homo sapiens
  misc_feature 1..346: note = U/M: U (0.18:0.94) in Pancreatic Acinar cells
  misc_feature 1..346: note = source = chr12:120893581-120893926; Gene: GATC (intron)
  source 1..346: mol_type = genomic DNA
cgggttcacgccattctcctgcctcagcctcccaagtagctgggtctacaggcgcccaccaccacgcccggctaatttttttgtatttttagtagagatggggtttcaccgtgttagccaggatggtctcgatctcctgacctcgtgatccgcccacctcggcctcccaaagtgctgggattacaggcgtgagccaccgcgcccggctgacaacttagttcttatgtgcagccttagcccagatgtacctgtcacatctttgtccctctctgacatgactcaaacgccattagggtctgccctcagtctgtgcccactcaaagcaggaggagcgtggctactaccg

SEQ ID NO: 1108 - DNA, 420 bp, Homo sapiens
  misc_feature 1..420: note = U/M: U (0.19:0.94) in Pancreatic Acinar cells
  misc_feature 1..420: note = source = chr1:28846374-28846793; Gene: RCC1 (intron)
  source 1..420: mol_type = genomic DNA
cgcacccggccaattttttttttttttctgatacagaatcttggtctatcgcccaggctgtagtatagtgtcgtgctctcagtcgctgcagcctccacctcccgggttcaagcgattctcctgtctcagcctcccgaatagtaatatcctataattttcataaagcagtgaagttgtgtgtcccttcccccaggaaaaatgaacacataggcccaggcacaggttgtatagaacggggatcccaggtgagaaactcctagtgtgaaatataccacctgtgtgcctggcataacagcagctcaccaaatgtatattgttgacacatgagccctctcctcccttccctcctggggaccttacacacagagatttttcagccttagtctggcaggcaagttcttcctcctggtgtgggggacg

SEQ ID NO: 1109 - DNA, 246 bp, Homo sapiens
  misc_feature 1..246: note = U/M: U (0.2:0.92) in Pancreatic Acinar cells
  misc_feature 1..246: note = source = chr17:71264563-71264808; Gene: CPSF4L (Intergenic)
  source 1..246: mol_type = genomic DNA
cgtgggagacggctccacctcccctgggctgggaagaccacccagacccctgaggcccaagacagctactgagcctttgcttgttcctgagtaggtaggatgcagattctacttttggtccaaatatcaaggaaataggacattttgggcttagggagtcagccctgctcaaaggggtgtgcagatagcattccctgtccactgttgccgcgacgtttcttcacttggtcttcaggtcatcctccg

SEQ ID NO: 1110 - DNA, 313 bp, Homo sapiens
  misc_feature 1..313: note = U/M: U (0.23:0.93) in Pancreatic Acinar cells
  misc_feature 1..313: note = source = chr16:88012199-88012511; Gene: BANP (intron)
  source 1..313: mol_type = genomic DNA
cgctccctgcctgtgaggagtcatgaggccgaaggcatagccgtgtgctgtactcaagggacacccgcacctcagcccctgagtagctgggactatccaggttaatagcttaaagtttttaacagtaataccagtgtgtgaccagtgtgtcacaggtgctgataatcaaaacagtctcagccttaacacgctaagtgatagaaccccaaccctcccaggcacagctgagaccagctgcccccatcacacagcaagcgtcaggtgatcgtcacggcttcccgcaggataagcaactcggccccagctcagggcg

SEQ ID NO: 1111 - DNA, 221 bp, Homo sapiens
  misc_feature 1..221: note = U/M: U (0.23:0.92) in Pancreatic Acinar cells
  misc_feature 1..221: note = source = chr15:90771745-90771965; Gene: SEMA4B (exon)
  source 1..221: mol_type = genomic DNA
cggggtcccgagtcttcactgagtcagagaagaggccactcagcatccaagacagcttcgtggaggtatccccagtgtgcccccggccccgggtccgccttggctcggagatccgtgactctgtggtgtgagagctgacttccagaggacgctgccctggcttcaggggctgtgaatgctcggagagggtcaactggacctcccctccgctctgctcttcg

SEQ ID NO: 1112 - DNA, 162 bp, Homo sapiens
  misc_feature 1..162: note = U/M: U (0.3:0.95) in Pancreatic Acinar cells
  misc_feature 1..162: note = source = chr11:5704702-5704863; Gene: TRIM5 (intron)
  source 1..162: mol_type = genomic DNA
cgacactctatatctagctactctggtggggacttggagaaactttatgtctagcgaagggattgtaaatacaccaatcggcactctgtatctagctcaaggtttgtaaacacaccaatcagcaccctgtgtctagctcggggtttgtgaatgcaccaatcg

SEQ ID NO: 1113 - DNA, 169 bp, Homo sapiens
  misc_feature 1..169: note = U/M: U (0.03:0.94) in Pancreatic Acinar cells
  misc_feature 1..169: note = source = chr7:116225201-116225369; Gene: CAV1 (Intergenic)
  source 1..169: mol_type = genomic DNA
cggccccatgtgcacgtaggacacgacaactggaaaagacgtcaagagataacagacggtccagtggcatttgtcctgaccaggtatatctaaacctgtctgatttacccatggtcagtagccaaaagaaggaagcaacagcatgcagctgtattcacggaaaccaccg

SEQ ID NO: 1114 - DNA, 191 bp, Homo sapiens
  misc_feature 1..191: note = U/M: U (0.02:0.92) in Pancreatic Acinar cells
  misc_feature 1..191: note = source = chr8:49668664-49668854; Gene: EFCAB1 (Intergenic)
  source 1..191: mol_type = genomic DNA
cgggcatctggggagggcctcgggctgctcccattcccggtggtgggaaaggagcaggtgtgtgcggagattgcatgactatggaggattcaggaaagagcgggaggcaccgggctctttttaacatggcgacagaggacgccggagagcgcgggagcgccgggctcaccttgggtctgagccctggcacg

SEQ ID NO: 1115 - DNA, 269 bp, Homo sapiens
  misc_feature 1..269: note = U/M: U (0.03:0.89) in Pancreatic Acinar cells
  misc_feature 1..269: note = source = chr7:100320415-100320683; Gene: EPO (intron)
  source 1..269: mol_type = genomic DNA
cgtcagtggccttcgcagcctcaccactctgcttcgggctctgggagcccaggtgagtaggagcggacacttctgcttgccctttctgtaagaaggggagaagggtcttgctaaggagtacaggaactgtccgtattccttccctttctgtggcactgcagcgacctcctgttttctccttggcagaaggaagccatctcccctccagatgcggcctcagctgctccactccgaacaatcactgctgacactttccgcaaactcttccg

SEQ ID NO: 1116 - DNA, 65 bp, Homo sapiens
  misc_feature 1..65: note = U/M: U (0.06:0.89) in Pancreatic Acinar cells
  misc_feature 1..65: note = source = chr10:120426551-120426615; Gene: PRLHR (Intergenic)
  source 1..65: mol_type = genomic DNA
cgagatgtgacgtccctgtctgagctgcggccggagaagagggtgccctggacaggatccctccg

SEQ ID NO: 1117 - DNA, 167 bp, Homo sapiens
  misc_feature 1..167: note = U/M: U (0.03:0.96) in Pancreatic Acinar cells
  misc_feature 1..167: note = source = chr13:101184824-101184990; Gene: GGACT (exon)
  source 1..167: mol_type = genomic DNA
cgtacacgaagactagggccatccgggcagagctgcagggagaggggaagtcacaggtcagcccgcagtgggagctctgtgtctgcacctgggacgtggctcccggcccacagagcctccactggggccgcaccacctgaatgcgcctggctgtgctcagataaggc

SEQ ID NO: 1118 - DNA, 77 bp, Homo sapiens
  misc_feature 1..77: note = U/M: U (0.02:0.94) in Pancreatic Acinar cells
  misc_feature 1..77: note = source = chr22:26958816-26958892; Gene: TPST2 (intron)
  source 1..77: mol_type = genomic DNA
cgacctcaagtgatctgcccgcctcggcctcccaaagtgctgggaccaggggcgattttgccattcagggaaccatc

SEQ ID NO: 1119 - DNA, 266 bp, Homo sapiens
  misc_feature 1..266: note = U/M: U (0.02:0.93) in Pancreatic Acinar cells
  misc_feature 1..266: note = source = chr17:80395185-80395450; Gene: HEXDC (exon,intron)
  source 1..266: mol_type = genomic DNA
cgggcagcgggcccacggactcactgcagggcatcatcctgaccggctggcagaggtaagtcctggccagtctgtcctcagagggtccagggcagctctggtggccaccacgtcggcctgtgcagcgtccgccaagggccttcccaggttggtcaaaggggaagcagcccgggcctccaagaggagctgcagaaacagccacgtggggttgggccctgcacgccagagcggccgctgagggacgctgctcccgtgttcagggtcac

SEQ ID NO: 1120 - DNA, 431 bp, Homo sapiens
  misc_feature 1..431: note = U/M: U (0.03:0.93) in Pancreatic Acinar cells
  misc_feature 1..431: note = source = chr3:148555831-148556261; Gene: CPB1 (intron)
  source 1..431: mol_type = genomic DNA
cgagaccatcctagctaacacggtcaaaccccgtctctactaaaaatacaaaaaattagccgggcgtggtggcgggcacctatagtcccagctactcgggaggctgaggcaggagaatggagtgaactcaggaggcggagcttgcagtgagccgagatcgcaccactgcactccagcctgggcgacagagcgagactctgtctcaaaaataaacaaattaacaaaaataataatgataatttcaactcaagggttgggtgcaggtaagaggatagcaatatgttctggaagctttgaaatgaaagaggatgtcattttctggtcctcttgggtttttttttttcgttccgagaagctcatccttattaggtaagatttgttctttcacattatgatatcgagacataattgtcctcttagcagtttctgtc

SEQ ID NO: 1121 - DNA, 404 bp, Homo sapiens
  misc_feature 1..404: note = U/M: U (0.06:0.95) in Pancreatic Acinar cells
  misc_feature 1..404: note = source = chr16:75263335-75263738; Gene: BCAR1 (exon)
  source 1..404: mol_type = genomic DNA
cgactcttgacatgggagccagggagctgggaccgccgcacccctcccctgcctccctcctggggtcaccaccctcaggcggctgccagctggcctaggacgcggcggaactgctgggtgctgtggcccagctccttgaccctctccaccatgtcctgggccgcggaaggcgatgggtactgcaaggcagcggccttggtggtggccacgatgccgcgcaggaggtcgcacagcaggttgctgtagtgggtcacctggctgcgcacgtcagcagccttggcctgccgtgacagtgtgtccccgatgaacaccagcttgtgggcgctgaggatgacgaacttgctgtgcgccacaaagatcttgggcggctggttggtggccacggcggtaaagaaggcgtccac

SEQ ID NO: 1122 - DNA, 93 bp, Homo sapiens
  misc_feature 1..93: note = U/M: U (0.02:0.9) in Pancreatic Acinar cells
  misc_feature 1..93: note = source = chr16:25228659-25228751; Gene: AQP8 (exon)
  source 1..93: mol_type = genomic DNA
cgggtgcctgtcggtcattgagaatgggacggacactgggctgctgcagccggccctggcccacgggctggctttggggctcgtgattgccac

SEQ ID NO: 1123 - DNA, 366 bp, Homo sapiens
  misc_feature 1..366: note = U/M: U (0.04:0.91) in Pancreatic Acinar cells
  misc_feature 1..366: note = source = chr9:131857131-131857496; Gene: CRAT (TTS,intron)
  source 1..366: mol_type = genomic DNA
cgggggcaggaaccaagctgagtggaaccagaggcggctcgctagcaatgttatccacaggagcacagccgcaacggaggtgaaacctcacaccctggcccctcggccccagacaatcctgtctccaggtcctgggagtttgggaagcagggtacagatggtggcctggtcatggagttggcagggagtggccggggctgagctggtgagacaaagagctcttgccagtctcctgctctggagggctggttcccttccccagaggaggcaccggtggaggacgtgccaggggcccgggcctaacgtcctgctcagcctctgcactcagccccaggtcgggccctggcaggtgctgggatgacccac

SEQ ID NO: 1124 - DNA, 217 bp, Homo sapiens
  misc_feature 1..217: note = U/M: U (0.04:0.9) in Pancreatic Acinar cells
  misc_feature 1..217: note = source = chr11:868452-868668; Gene: CHID1,TSPAN4 (TTS,exon)
  source 1..217: mol_type = genomic DNA
cgttcctcccgccacggctttccaaagtactgggattacaggcatgaaccgccgcacacaccacttgtatctcctatgcccgtgtcaagcagcagcagggcggtgggaacggctgcacctgcactgtggcagctcgcaggcctccctgacgtccaggcggaggctttctcaagtgtgggtgccttgggtccgacccaggaccccctccccagctccc

SEQ ID NO: 1125 - DNA, 476 bp, Homo sapiens
  misc_feature 1..476: note = U/M: U (0.12:0.95) in Pancreatic Acinar cells
  misc_feature 1..476: note = source = chr22:22041093-22041568; Gene: PPIL2 (exon)
  source 1..476: mol_type = genomic DNA
cgcctgtgtgtctgaggtcggtgctgcctggcatggtggggctgccccagggtgagggcaggggctgagctgggaccttggcttgtagctgccatcgacgaggatgtgctgcgctaccagtttgtgaagaagaagggctacgtgcggctgcacaccaacaagggcgacctcaacctggagctgcactgcgacctggtgggtgtggaggccagccactccccatgccccaaggtcatctctgggtcatctgacagccatgtcttaaatatagggctgccactggtatgtgcttgttgtaggaaattcagcctgtcactaggcgggacccgcagcagtgccctgtgtccttcctagggggccgcgttggcagcatggcctgcgcacaggtgccagtgtctcagagaaggggccaagccgcacctgctgctctgcccacacttctcccatgcgctgtactctgggccgtgcggctgcac

SEQ ID NO: 1126 - DNA, 397 bp, Homo sapiens
  misc_feature 1..397: note = U/M: U (0.13:0.95) in Pancreatic Acinar cells
  misc_feature 1..397: note = source = chr2:86282085-86282481; Gene: POLR1A (intron)
  source 1..397: mol_type = genomic DNA
cgcttagtgtgcctgcagcaggccccacaaagtagtgtctttagatgtgtgcaacgagggcgcggtggctcacgcctgtaatcccatcactttgggaggctgagacgggtggatcatgaggtcaagagatcgagaccatcctggccaacatggtgaaaccccatctctactaaaaatacaaaatttagccgggcatggtggcgtgcacctatacttccagctactcaggaggctgaggcacgataaccgcttgaatccagaaggcagagattgcagttagccaagatcacatcactgcactccagcctgggtgagagagtggaactctgtctcaagaaaaaaaagagagtgggcaatgggacagggcagttataagagcagctgccttttcacccac

SEQ ID NO: 1127 - DNA, 372 bp, Homo sapiens
  misc_feature 1..372: note = U/M: U (0.17:0.95) in Pancreatic Acinar cells
  misc_feature 1..372: note = source = chr20:47601901-47602272; Gene: ARFGEF2 (intron)
  source 1..372: mol_type = genomic DNA
cgtatttgacaatttctggatataagtgagtgtgtatgtttcagacccaagtaggcgattttctgggagatagcgcaaggttcaacaaggaggtgatgtatgcctacgtggaccaacttgacttctgtgaaaaagaatttgtctcagccctgcggacattcctagaaggtttccgcctacctggagaagcccaaaagattgaccgattaatggagaagtttgccgcaagatacatagaatgcaaccaagggtgagcgccgattttgagtcccttccagatcatctgtttgcctgcctcagaacgctaattctaatttggttggggtttaatctttgtatatctgtgccaagcaactgaagcttttgtttacc

SEQ ID NO: 1128 - DNA, 415 bp, Homo sapiens
  misc_feature 1..415: note = U/M: U (0.04:0.94) in Pancreatic Acinar cells
  misc_feature 1..415: note = source = chr20:43938811-43939225; Gene: RBPJL (intron)
  source 1..415: mol_type = genomic DNA
cggaaactgaaggcaggggggacattagctagaaaggtcaaggaggttgagagaccttttgggaggtaacattggaactgaaacttgaatgctgaaatggagccagacaggagaatatctggggaaagcgtgctacaattagaaggaacagaagggccgggcgcgatggctcacacctgtaatcccagcactttgggaggccgaggcgggcggatcacctgaggtcaggagttcgagaccagcctggccaatacagtgaaaccccctctctaccaaaaaatacaaaattagctgggcatggtggcgggcacctgtaatcccagctgctcaggaggctgaggcaggataattggttgaacccgggaggcggaggttgcagtgagccgagatcatgccactgcactccagcctggcg

SEQ ID NO: 1129 - DNA, 46 bp, Homo sapiens
  misc_feature 1..46: note = U/M: U (0.02:0.91) in Pancreatic Acinar cells
  misc_feature 1..46: note = source = chr19:39691013-39691058; Gene: NCCRP1 (exon)
  source 1..46: mol_type = genomic DNA
cgtctatgagctgcatgtctggctgctggcggccgaccgccgcacg

SEQ ID NO: 1130 - DNA, 125 bp, Homo sapiens
  misc_feature 1..125: note = U/M: U (0.03:0.92) in Pancreatic Acinar cells
  misc_feature 1..125: note = source = chr2:241631375-241631499; Gene: AQP12A (exon)
  source 1..125: mol_type = genomic DNA
cgccctctgtgaggcggccaggcgggcctccaaggccctgctcccagtgggcgcctatgaagtcttcgcccgggaggcggtgggtgcgggtgcagctcgggccctgctgcctggagatgaggacg

SEQ ID NO: 1131 - DNA, 296 bp, Homo sapiens
  misc_feature 1..296: note = U/M: U (0.05:0.94) in Pancreatic Acinar cells
  misc_feature 1..296: note = source = chr15:42211291-42211586; Gene: EHD4,EHD4 (exon,intron)
  source 1..296: mol_type = genomic DNA
cgcatgttcattccttaagccttctggaacgaagcctcctcccacccatcttgcctctggagaggagacagcagagtcccagcccctggcctctgtgcaaggcatctcctggcttaccttggccagcctcgctcgcttgatgaggtcgttgagcttgcgcaccgctgccttctgggggaggctctggatgtctctaaagaggtcctgggcctcagcctcgaagagccggcggttgtccgtgttctgcaggggctgcgcccagaaggagccaatgtagacgcgcagtacctcgggcg

SEQ ID NO: 1132 - DNA, 173 bp, Homo sapiens
  misc_feature 1..173: note = U/M: U (0.05:0.93) in Pancreatic Acinar cells
  misc_feature 1..173: note = source = chr9:140351736-140351908; Gene: NSMF (intron)
  source 1..173: mol_type = genomic DNA
cgctggcatgctgtgacctgagcacctgttctctgttccaagcctcacagtggctgctgctgtcagaccctggcagcggcatgcacccccaaacctgtctatgccctgacacaaacccctcaccagacacacggtcaacgctgtacatcctctccagcttcttgcggcgaccg

SEQ ID NO: 1133 - DNA, 236 bp, Homo sapiens
  misc_feature 1..236: note = U/M: U (0.03:0.91) in Pancreatic Acinar cells
  misc_feature 1..236: note = source = chr20:43938184-43938419; Gene: RBPJL (intron)
  source 1..236: mol_type = genomic DNA
cgacctgcctgccctactcccaggtcatccccagagcacaccaccattctgaggggaggcgtgcgcaggtgcctgcagcaacagtgtgaacagactgtgcggatcctgcatgccaaggtggcccagaaatcatacggaaatgagaagcggtaggtgcctccgcagcccctcccaggtctctgcaactgtcagccctatgcacctcctccatccacccattgggcctcttttagacg

SEQ ID NO: 1134 - DNA, 241 bp, Homo sapiens
  misc_feature 1..241: note = U/M: U (0.06:0.92) in Pancreatic Acinar cells
  misc_feature 1..241: note = source = chr12:51749472-51749712; Gene: GALNT6 (exon)
  source 1..241: mol_type = genomic DNA
cgaactcctgacctcgtgatctgccctcctcggcctctcaaagtgctgggattacaggcgtgagccaccacacctggcctcaagttcttgattctgagctttctggacactgactcacctgggccaattcccattcctcgtccttggggacctggctattcttgccagtgaagtgacagctcccaaggcccagagcacccttgctgacatgtagacacagctgctttgcgatgttgtggcg

SEQ ID NO: 1135 - DNA, 299 bp, Homo sapiens
  misc_feature 1..299: note = U/M: U (0.05:0.91) in Pancreatic Acinar cells
  misc_feature 1..299: note = source = chr22:24179883-24180181; Gene: DERL3,DERL3 (exon,intron)
  source 1..299: mol_type = genomic DNA
cgagaagcccatgagcgcccaaggcaggaacggtgcctggaaagtgagcaggccgaagaagttgaccctcacccgagggctgcggcggctccacacgtacaccagcatggccatgagggcctggcccaggaagaacaggctgcccaggagtcccagcagctgggccagagtcaaggtgctccggtgcaggcctcagcccaagcccagggcccctctgacttcccaagaccctggaattcttcccctcatctcccctatgtgctattccctcatcaagatgagccagtccaataaaggcg

SEQ ID NO: 1136 - DNA, 55 bp, Homo sapiens
  misc_feature 1..55: note = U/M: U (0.05:0.9) in Pancreatic Acinar cells
  misc_feature 1..55: note = source = chr11:65147920-65147974; Gene: SLC25A45 (intron)
  source 1..55: mol_type = genomic DNA
cgtacgtgtcctcgctggagcccatacccgggtatcccaccgcctatgagccgcg

SEQ ID NO: 1137 - DNA, 130 bp, Homo sapiens
  misc_feature 1..130: note = U/M: U (0.06:0.91) in Pancreatic Acinar cells
  misc_feature 1..130: note = source = chr22:44671168-44671297; Gene: KIAA1644 (intron)
  source 1..130: mol_type = genomic DNA
cgaaagcaaacaaaaccaaccacgcaccccaaccgagcacacaccaagctggcaccatcacctcaattaaacccctgcctggcagcccgcgaaggggccgacggcggatcagaagcgaggctgagtttcg

SEQ ID NO: 1138 - DNA, 132 bp, Homo sapiens
  misc_feature 1..132: note = U/M: U (0.09:0.94) in Pancreatic Acinar cells
  misc_feature 1..132: note = source = chr7:129501469-129501600; Gene: UBE2H (intron)
  source 1..132: mol_type = genomic DNA
cgcccgtaatcccaacactttgggatgctaagacggacggattacttgatgtcaggagtttgagaccagcctggccaacatggtgaaaccccatctgtaacgaaaatacaaaaattagccgggcatgtggcg

SEQ ID NO: 1139 - DNA, 204 bp, Homo sapiens
  misc_feature 1..204: note = U/M: U (0.07:0.92) in Pancreatic Acinar cells
  misc_feature 1..204: note = source = chr9:35295715-35295918; Gene: UNC13B (intron)
  source 1..204: mol_type = genomic DNA
cgtcgatgaccgagatagtgactatcgcagtgagaccagcaacagcttcccacctccttaccatacagcttcccagcccaacgcttctgtgcaccagttccctgtgccggtgcgatcgccacagcagctgctacttcaaggcagttcccgggactcttgtaatgactctatgcaaagttatgaccttgattatccagagcggcg

SEQ ID NO: 1140 - DNA, 214 bp, Homo sapiens
  misc_feature 1..214: note = U/M: U (0.02:0.87) in Pancreatic Acinar cells
  misc_feature 1..214: note = source = chr16:20335338-20335551; Gene: GP2 (exon)
  source 1..214: mol_type = genomic DNA
cggtgcacctggacacaggtctccgacatccttactcctccttcccctacaaagcggtaccagccgctcatgtttttatcgcacccctgggaccctgctgagttctctgtgcttcggaagggttcatccaggagggtgtaattctgacaggggtcaaaacagacatgagcctctggggtgccaggagctccgcagtccaggtccagcccatacg

SEQ ID NO: 1141 - DNA, 297 bp, Homo sapiens
  misc_feature 1..297: note = U/M: U (0.04:0.89) in Pancreatic Acinar cells
  misc_feature 1..297: note = source = chr20:43948863-43949159; Gene: MATN4 (Intergenic)
  source 1..297: mol_type = genomic DNA
cggtgtggtggtgcacgcctgtagtcccagctatggggtgggggcggggggatgctgaggagggaggatcactggagcacaggtagtggaagctgcagtgagctgtgattgtgccactacactccagcctgggtgacagagggagaccctttgggggtttatgcacagaattctacatacttccagggaatttcctaacactaaaacccatttatggattaatttagtcctctttatattagaatcatttgccacgctataaaaattaatataccgggccgggcgcagtggctcacg

SEQ ID NO: 1142 - DNA, 375 bp, Homo sapiens
  misc_feature 1..375: note = U/M: U (0.03:0.88) in Pancreatic Acinar cells
  misc_feature 1..375: note = source = chr19:50059919-50060293; Gene: NOSIP,NOSIP,NOSIP (intron,exon,intron)
  source 1..375: mol_type = genomic DNA
cggtgtgaagtgcacgggcgtcaggtccgacatgcgcaggggcttccctgacatggggcaggtcaccgtgcgggactgcaaggggcagagagaggcgggctcagtaggcagggctggcgcaggtggagagcgcgtggtccctgtgcgtgaggaggacggtggggaaccctggcgccctggcaccgtgcgtgccggggcgctgtgggggctcaccggcttctccagcttggtggccttggcttcgggcgtcagcgacgggatccagaagctgggcagcactttgtccttgtccttacttggaggacccacactgggcccaggttggacatcatctgtgggggaaggaagggactcagatgccgccccctgggcccg

SEQ ID NO: 1143 - DNA, 463 bp, Homo sapiens
  misc_feature 1..463: note = U/M: U (0.05:0.9) in Pancreatic Acinar cells
  misc_feature 1..463: note = source = chr16:75262836-75263298; Gene: BCAR1,BCAR1 (TTS,exon)
  source 1..463: mol_type = genomic DNA
cgggagatgccacgcatggcccttgcccccgggtgccttccccagaaccgtcacccaccccgggctgctctcatctgccaccctcaggcagctgctcttccttttaaaaactttatttaaatggagactcttagtcaaatgattggaaaaccaataacgaaaaatagttcttcaggttcttctcctggtaaggcggaggacacaccaaactgcactggccctgtcaggggacacggcaccctcgtgggaccaggctcagccctcggggtggcacgaggtcctgcaggctgcaggaccctcacactccagccccgtctggtgacccaacccgggcccgtggtgcatgctggggaaggccactggccggcccctgggcttcggctcctgaggaggcatggccccacaccctgcccggccataaatatatacagattcctgggcatccagggcaccaggaccgacg

SEQ ID NO: 1144 - DNA, 260 bp, Homo sapiens
  misc_feature 1..260: note = U/M: U (0.09:0.93) in Pancreatic Acinar cells
  misc_feature 1..260: note = source = chr16:85351181-85351440; Gene: MIR5093 (Intergenic)
  source 1..260: mol_type = genomic DNA
cgccctgcacagcccccaaggtccctggcaaaattgatccccagtgcccacggtcagcactggtgggcatccatgcgccctgcacagcccccgaggcccctggcaagattgagccccggtgcccacagtgaacgctggtgagcattcatgcaccctgcgctggctcattcgctttcctgccgcgctgcccaccagtgtatccagcactcccctcctaagtgtgggacctgagctctgagctcagctccttgcctcgtccg

SEQ ID NO: 1145 - DNA, 358 bp, Homo sapiens
  misc_feature 1..358: note = U/M: U (0.09:0.93) in Pancreatic Acinar cells
  misc_feature 1..358: note = source = chr19:6026434-6026791; Gene: RFX2 (intron)
  source 1..358: mol_type = genomic DNA
cggtagggagtgttgcttcgcacacgtaggtaagcccgagagcccgtccaacagaagcagcagaaatcatgttgtaaaaacttgctactgaactttaacctggcatatgtgtgtgcacgccgtagcattaatatgcagccactgcatccattccagtgtcagccaagccagcatcatagtcacctgctcctttccccacgccacatcgatggggaaccagaatgaaagcaaggagagatggcagccttgactccccagccaggctgtcctgtcgcaaatcccagggtctccccgctgctggaggctttgggaaaatagcagcgaggccaaagactcagaccctgccaccaggaggccg

SEQ ID NO: 1146 - DNA, 377 bp, Homo sapiens
  misc_feature 1..377: note = U/M: U (0.02:0.86) in Pancreatic Acinar cells
  misc_feature 1..377: note = source = chr19:39691205-39691581; Gene: NCCRP1 (exon)
  source 1..377: mol_type = genomic DNA
cgcgggtcctcaaaaagggctcctccctaaccccaggtgctgtcaccacaggtgtcccacgtattccgccattatggtcccggtgtgcgctttatccacttcctgcacaaggccaagaaccgcatggagcctggtgggctgcggcggacacgggtgaccgactcctccgtgtctgtgcagctccgggagtgactggctggctcctctgtcctgaccccacagcacctccctgacctttaggagccccaactcttagtcacctcctaggcctcttatttctccctggcccttggcttctcacttgatggacagcttcacacacccttaagcggtggactccagcattttcccagcactgtctgagccccatgagggcg

SEQ ID NO: 1147 - DNA, 459 bp, Homo sapiens
  misc_feature 1..459: note = U/M: U (0.11:0.95) in Pancreatic Acinar cells
  misc_feature 1..459: note = source = chr22:22041111-22041569; Gene: PPIL2 (exon)
  source 1..459: mol_type = genomic DNA
cggtgctgcctggcatggtggggctgccccagggtgagggcaggggctgagctgggaccttggcttgtagctgccatcgacgaggatgtgctgcgctaccagtttgtgaagaagaagggctacgtgcggctgcacaccaacaagggcgacctcaacctggagctgcactgcgacctggtgggtgtggaggccagccactccccatgccccaaggtcatctctgggtcatctgacagccatgtcttaaatatagggctgccactggtatgtgcttgttgtaggaaattcagcctgtcactaggcgggacccgcagcagtgccctgtgtccttcctagggggccgcgttggcagcatggcctgcgcacaggtgccagtgtctcagagaaggggccaagccgcacctgctgctctgcccacacttctcccatgcgctgtactctgggccgtgcggctgcacg

SEQ ID NO: 1148 - DNA, 189 bp, Homo sapiens
  misc_feature 1..189: note = U/M: U (0.05:0.88) in Pancreatic Acinar cells
  misc_feature 1..189: note = source = chr7:97602665-97602853; Gene: MGC72080 (Intergenic)
  source 1..189: mol_type = genomic DNA
cgtcaggatttttattaagctggaagaattaggtaacgcccctaggtgcccgttagatgcctccgattggttacaccctctgaaggattggcctgtgaccaatcagaggctgaagtggagacttgcgcaccaccacccaccccccgccgtcaatcagaagctgtcaccctccccccgcccccctctccg

SEQ ID NO: 1149 - DNA, 260 bp, Homo sapiens
  misc_feature 1..260: note = U/M: U (0.1:0.93) in Pancreatic Acinar cells
  misc_feature 1..260: note = source = chr19:7535541-7535800; Gene: ARHGEF18,ARHGEF18 (intron,exon)
  source 1..260: mol_type = genomic DNA
cggtgccggctctgcacggagctgaggacaggacagaccttgctttgagaaggagctgccggccggggccacgctccacagccgccgcgcgacagtggagccaagggttagggcaccaggaggggccaggtggcgtcggcagcatctgtccccagaatcaggcagaatccacttcccaaacagagccccacgcaggttcaccatgaacctcagggtcagggaatgagccaggcacgggggcatgggcagagagggccacg

SEQ ID NO: 1150 - DNA, 355 bp, Homo sapiens
  misc_feature 1..355: note = U/M: U (0.06:0.89) in Pancreatic Acinar cells
  misc_feature 1..355: note = source = chr19:51589287-51589641; Gene: KLK14 (Intergenic)
  source 1..355: mol_type = genomic DNA
cgcttgaacccgggaggcagaggttgcagtgagctgagattgtgccactgcactccagcctgggtgacagagcgagactctgttgcaaaataaataaataaacaaacaaataaataaagagggggttcttgtgtttatgcagagcctgagccagggcacagaatgactggaaggctccccaaggccttcagctcaaaggtagggagacagctggagatgcagctgatgaggcccagttcaccgccggtggctcccaaggacttgccgtccccagcccggacctcagcacctgccgtgccgtggccaggttgctgggccctcttcccaccacatgctaggttcccagggtatctcg

SEQ ID NO: 1151 - DNA, 401 bp, Homo sapiens
  misc_feature 1..401: note = U/M: U (0.16:0.96) in Pancreatic Acinar cells
  misc_feature 1..401: note = source = chr20:30904803-30905203; Gene: KIF3B (intron)
  source 1..401: mol_type = genomic DNA
cggaggcgggcagatcacctgatgtcaggagttcgagaccagcctgaccaacatggtgaaaccccgtctctactaagaaatacaaaaattagctgggcgtggtggtgcatgcctgtagtcctagctacttgggaggctgagataggagaatcgcttgaacccgggaagtggagattgcggtgagttgatatcgtgccactgcactccagcctgggcgacggagtgagaaaaaaacacaaaaaaagaaatagccctgaggacaggtccttctccagctcatctcctgccaccccatgttctgttcattcctgaaaaagtcactttccatctctggatcccatctgttaactgaatgacttcatcaggtgatctccaagttcccttctaaccctaccttctcg

SEQ ID NO: 1152 - DNA, 398 bp, Homo sapiens
  misc_feature 1..398: note = U/M: U (0.13:0.92) in Pancreatic Acinar cells
  misc_feature 1..398: note = source = chr19:19576160-19576557; Gene: GATAD2A (exon)
  source 1..398: mol_type = genomic DNA
cgaagaagcatgccgaacacggagtcagaaacgagcgcttgaacgggacccaacagaggacgatgtggagagcaagaaaataaaaatggagagaggattgttggcttcagatttaaacactgacggagacatgagggtgacacctgagccgggagcaggtccaacccaaggattgctgagggcaacagaggccacggccatggccatgggcagaggcgaagggctggtgggcgatgggcccgtggacatgcgcacctcacacaggtgagtgggaggagccagcgggaggggctggaacctggagacaagcccagtgtgcccaggttggggctggccacactccaggcctgttggtaacagcttggcggggttgtggagagggctgtaggctcagctcg

SEQ ID NO: 1153 - DNA, 274 bp, Homo sapiens
  misc_feature 1..274: note = U/M: U (0.14:0.92) in Pancreatic Acinar cells
  misc_feature 1..274: note = source = chr6:7310866-7311139; Gene: SSR1 (intron)
  source 1..274: mol_type = genomic DNA
cggcgcggtggctcacgcctgtaatcccagcactttagaaggctgaggagggtgaattacttgaggccaggagttcaagaccagcctggccaatacagagaaaccccgcctctactgaaaatgcaaaaattagctgggtgtggtggcacacacctgtggttccagctactccagaggctgaggcaggagaatcgcttgaacccaggaggcagaagttgcagtgagccaagattgtaccactgcactccagcctgggcgacacagcaagacaccg

SEQ ID NO: 1154 - DNA, 452 bp, Homo sapiens
  misc_feature 1..452: note = U/M: U (0.09:0.87) in Pancreatic Acinar cells
  misc_feature 1..452: note = source = chr16:28914746-28915197; Gene: RABEP2 (TTS)
  source 1..452: mol_type = genomic DNA
cggaactacctagagggtaaggagtgccctctctgtcccaagccctggccccaccacagccccttccccatgacgccgcccccgccccgccccgtactttgcaggtggtaagtttctcagccctggcaggacctgtgtccgccccgttccccctgcgcctgcaggggccacatctccggggcagccccactgcctcctcagcccccacagcccctatagcccccatgccacctccctgccttgataacagtgcctcttgtcctctctggccataggataactgttccccctcctccatctctgagcccgtgtcacaggtatcacccccttcttgccctcagcccagctgctgtgcccctgccacccgcgccccctcagccccttgcgcgtcgcatccaaggtcacttgtgctcgcagctccacctggagccgttgccactgctgctgctgcg

SEQ ID NO: 1155 - DNA, 369 bp, Homo sapiens
  misc_feature 1..369: note = U/M: U (0.19:0.91) in Pancreatic Acinar cells
  misc_feature 1..369: note = source = chr3:184015738-184016106; Gene: PSMD2 (Intergenic)
  source 1..369: mol_type = genomic DNA
cgggaggctgaggcaggagaatcacttgcacccgggaggcgaaggttgtggtgagccgagattgcgccattgcactccagcctgggcaacaggagagaaacactatctcaaaacaaataaataaaataaaaaataaatcctcattttactacttgatatgatcttctctgtaaaatggacctaaccctaccaatctcaaaagattgtaagaagtgcatggaatcactcgaaagcagtcctgacataagcgcgtcagtcacacgcctctaaggcttcacagggaaagacgagaagatagaggacgaagaccttgtcttgttctgcttttagctccagaacttggcggggagcacagggctttattgatcg

SEQ ID NO: 1156 - DNA, 151 bp, Homo sapiens
  misc_feature 1..151: note = U/M: M (0.81:0.06) in Pancreatic Acinar cells
  misc_feature 1..151: note = source = chr1:22352744-22352894; Gene: LINC00339 (intron)
  source 1..151: mol_type = genomic DNA
cgcagtgcactggagttattttttcttttttttttttttgagacggagtctcgctctgtcgcccaggccggagttgcagtgccgcgttgtcgcctcactgcaaccttctctgccacatgggttcaagcgattctcctgcctcagccactcg

SEQ ID NO: 1157 - DNA, 300 bp, Homo sapiens
  misc_feature 1..300: note = U/M: M (0.8:0.11) in Pancreatic Acinar cells
  misc_feature 1..300: note = source = chr4:3486324-3486623; Gene: DOK7 (intron)
  source 1..300: mol_type = genomic DNA
cgtgactcgcagctggggcttctccacgggtggcggctgcatcgctctgccagtgacgctgggctggtccctgggggccctcctgctgctgtgggggtgcaggggtggatgctggccccaggatgctgcacacggcctcagggcagcacccacacactggcagctccagcttcccctgaaagatgaccgaggaggtggggaggacgcggtgctggccagcagtgacggctgcagcatgtgtgggcaggtgccgtgccacaccttttacaaacatctgaatgcagccctcccaacagcccg

SEQ ID NO: 1158 - DNA, 121 bp, Homo sapiens
  misc_feature 1..121: note = U/M: M (0.79:0.14) in Pancreatic Acinar cells
  misc_feature 1..121: note = source = chr3:133393045-133393165; Gene: TOPBP1 (Intergenic)
  source 1..121: mol_type = genomic DNA
cgtttaggagctgctgggctagatgagggtccaggggtcagaaacctgcgtatagcaactcacctgggaacccccgcggatctctctctgggttgtaaagcggccagactagtgcgctccg

SEQ ID NO: 1159 - DNA, 149 bp, Homo sapiens
  misc_feature 1..149: note = U/M: M (0.7:0.07) in Pancreatic Acinar cells
  misc_feature 1..149: note = source = chr5:139283262-139283410; Gene: NRG2 (intron)
  source 1..149: mol_type = genomic DNA
cgaagaccagagagagacaactgcccaatgtctagtccagttcccagggaactgtcacagaagcagcggctccccttctctctggggttcgcgagcggggcagggcatcccctccgagtctccggagttggcgggcgctgttgcccacg

SEQ ID NO: 1160 - DNA, 457 bp, Homo sapiens
  misc_feature 1..457: note = U/M: M (0.58:0.05) in Pancreatic Acinar cells
  misc_feature 1..457: note = source = chr7:107786526-107786982; Gene: LAMB4 (Intergenic)
  source 1..457: mol_type = genomic DNA
cgtgcctctcctcatccctaccgacttgcagccgtgatagggatgcttagtaggacccaggaggcacactcctccttcctctcccaataccgaacctcccgggccacaatcattaagaggaagaagcttaacaaggctcacagggacacatgcttcctccctggatgctgtggactcgtcagagaaagctgcaaatcccattttcccctgttgcagcaggcaatcattttttgcatgatcagatcacaagctgattatcaaaactggtttgcactgtgtccagaggccactttttcctgcaagcaggtttctctcacactgcatagagcaggggagccctctggtggtaatctgtaggaaaatttcctgagcgggagggatttgcttaatttgggtaagaattcttcatattcttttcccttgcctccataagccttttccaaaattgcggggcgcg

SEQ ID NO: 1161 - DNA, 183 bp, Homo sapiens
  misc_feature 1..183: note = U/M: M (0.56:0.05) in Pancreatic Acinar cells
  misc_feature 1..183: note = source = chr18:20140157-20140339; Gene: CTAGE1 (Intergenic)
  source 1..183: mol_type = genomic DNA
cgtgacaggccctggtgcaggctccgcagacgccgacgcccggcgctccgctccggggcgcgggccagatcctcttccctgacacccgcggtcttccctgagaagaggtctggccctttttgagtcagatgttggattttctgctttcccctctggcaccacactaatcattctctttaatcg

SEQ ID NO: 1162 - DNA, 331 bp, Homo sapiens
  misc_feature 1..331: note = U/M: M (0.9:0.08) in Pancreatic Acinar cells
  misc_feature 1..331: note = source = chr12:25055441-25055771; Gene: BCAT1 (promoter-TSS)
  source 1..331: mol_type = genomic DNA
cgggggtgggggtggggaaggaagagatccaaggaggcagaaggctgcggtcaaaatattttggggtggcagagtcacgtaggatgtggctgtgggttctggcagcccagagattcagctcccgcctcctccctcagagcgagtccatagctaccctcacgtcccccgtggcggtcctcgccacgctccggagcgggttacccatgagggtgctagacctgggcagcgggaacctcgaagaggtggagattgcaggctgggactccagatttcgggcagggatgcggggaagggaagacgcctcgctggaggcggaatggagggcaaggcg

SEQ ID NO: 1163 - DNA, 398 bp, Homo sapiens
  misc_feature 1..398: note = U/M: M (0.88:0.06) in Pancreatic Acinar cells
  misc_feature 1..398: note = source = chr13:28491265-28491662; Gene: PDX1 (Intergenic)
  source 1..398: mol_type = genomic DNA
cgaggaagacttagccacttaccaagaacaaggtaacctgtgttctcccgggtgtaaaccgcgtctctgtgaagggaaagggggaagagggccggcaaggacctccagtatcagcgaggactatcaggacgtccagctaataaacgactttttcactgtccacactttaattggtttacagccttttttgtttatttatccataagagctgctgttaaatggctcgggaaggtgctcgcctaatggctcggtatcgctgccgggcctgttgtgggcgaggcggcttggagggggcgcaggcgtcagcggggattcagagcggaaacgcatttcgcctgtaatggactcggcgattttacgataccaggagctagatccacggggaagtacaacacacg

SEQ ID NO: 1164 - DNA, 277 bp, Homo sapiens
  misc_feature 1..277: note = U/M: M (0.94:0.13) in Pancreatic Acinar cells
  misc_feature 1..277: note = source = chr7:139168804-139169080; Gene: KLRG2 (promoter-TSS)
  source 1..277: mol_type = genomic DNA
cggggaaggattggccaagcctgtctggatcctgggacctcagagaaatcagaatccaaaggaattggggcgacctgtggaaaagtagcccagttggttgtcctgacaatccagcagggtttcgaaaggactctccatcatacttgggaggactcccccactgagtaacgctaagagaaaagaaacagggcgtggataagcaattcttctttttttttttttttttgagacggagtcttgctctgtcgccaggctggagtgcagtggcccgatctcg

SEQ ID NO: 1165 - DNA, 435 bp, Homo sapiens
  misc_feature 1..435: note = U/M: M (0.84:0.03) in Pancreatic Acinar cells
  misc_feature 1..435: note = source = chr7:157361420-157361854; Gene: PTPRN2 (exon)
  source 1..435: mol_type = genomic DNA
cgaccagcctcagaagcagatgtgcttgctgcaaaccaccttcctacggcccagcagaggcacaacaagcagcgaattttttccagggcctcccgtgaacacggcaccctacgttgccatagcgacgccatcccagctctgagccgcaacaaagcggcagtgtctgtgtctcacctttggccatcttgttgagaaccatgtcgatcaggacgtaggtgccgctccggcctgcaccgtcactgccaacagaaggagagaaatgaaagtgctgccgtccacacggaagcccgacccacaacaaagctagtgacagttcatttccttcctgcttacgggggccggcgagaggaaaggatggcggatgtgagagggggaggaaggacgcgggctgggagaatccaagtgaggggagaagggaggcccctgggggcttcg

SEQ ID NO: 1166 - DNA, 124 bp, Homo sapiens
  misc_feature 1..124: note = U/M: M (0.85:0.05) in Pancreatic Acinar cells
  misc_feature 1..124: note = source = chr10:52178282-52178405; Gene: SGMS1 (intron)
  source 1..124: mol_type = genomic DNA
cggttaaggcggaactttcctttcttgatttataccaagcttagaagcctttcacagccttttctttacgcctttgacaacttcgacacaacttctagaaaagggtaggttgcctttgaaaacg

SEQ ID NO: 1167 - DNA, 120 bp, Homo sapiens
  misc_feature 1..120: note = U/M: M (0.82:0.05) in Pancreatic Acinar cells
  misc_feature 1..120: note = source = chr12:65218052-65218171; Gene: TBC1D30 (promoter-TSS)
  source 1..120: mol_type = genomic DNA
cgcaattcgggctgaagcgtgtgcctcgccgcctgcggttgggtcatggccccttctgagactgctcggaagtgggagaggatgcttgcccttacgggtgttctgcccctgagactggcg

SEQ ID NO: 1168 - DNA, 288 bp, Homo sapiens
  misc_feature 1..288: note = U/M: M (0.85:0.08) in Pancreatic Acinar cells
  misc_feature 1..288: note = source = chr15:53089906-53090193; Gene: ONECUT1 (Intergenic)
  source 1..288: mol_type = genomic DNA
cggttgcagctttaaatatgaattaaaagcaaatccaagctactgtaatgcgaaaattattccgtgtcttgcatggcagagatgaatagctgcgtggatcaataccgtgaaactcggctcccaacgacagggttattgatagcttatattaatgatgttaatgatggaaaaaggaaaacaacggcccacccgacttagaaacttcttagccgctgaaaccccgcaataaaaacgggaagggggcaggaatcgggcttaagtgtaataagaaaattatttatgaaaccg

SEQ ID NO: 1169 - DNA, 379 bp, Homo sapiens
  misc_feature 1..379: note = U/M: M (0.79:0.04) in Pancreatic Acinar cells
  misc_feature 1..379: note = source = chr14:74208161-74208539; Gene: ELMSAN1 (intron)
  source 1..379: mol_type = genomic DNA
cgggcggctctgaagaggaaatctcaggccctagatgctacaggtcattgttagcaaccccagccgctcccaggaaaccagccagcagcagcggagggcagggctgggcgggcacagggtcccgactatacccagtttgcagttcggcccacccccagcaccaggaatgcccctcccaggctatcgctcctctgcaggcttccgcagctccccagcccctgtgctcctggagcctgcctgcctcctgcccgcctgcgtgactcactgagggccccctccctatctttcactttcacccagcacccagaaggggagtaatttcctcctccatttccttcctcagctcctgggccttgaagagagtaagagaccctcctcg

SEQ ID NO: 1170 - DNA, 439 bp, Homo sapiens
  misc_feature 1..439: note = U/M: M (0.78:0.06) in Pancreatic Acinar cells
  misc_feature 1..439: note = source = chr12:117797915-117798353; Gene: NOS1 (intron)
  source 1..439: mol_type = genomic DNA
cgatctaggaccagaacccaggggagtcactggaaaggttcctgccctcctcggctgccttctccgtgagagcctctcctctctagatgtctaccccagacagcctgatgcggagcttggagagccatgagctctctggtcacagtgccctgggggtgggggcgagcgtctggcgtcctctggggcgcagtcccgagagagccccttccgggacctcggacgcaaggcccctgagtggccctggaagttggatcccccggggaccctgctccgaaccctggccacctggaagcaacctcatcgagcgctccttccactgcccagccccgaaccgtggcggaacgcgcccctcggcctccctagagcctcctttgcgggagaagcacaactttcccaggttttggagacggcgctcttacaccccaatctcgcccagacg

SEQ ID NO: 1171 - DNA, 260 bp, Homo sapiens
  misc_feature 1..260: note = U/M: M (0.78:0.07) in Pancreatic Acinar cells
  misc_feature 1..260: note = source = chr4:1165716-1165975; Gene: SPON2 (intron)
  source 1..260: mol_type = genomic DNA
cgtgaaggtgatgctgtatttggccagggctctggcggaacagatggactctcccccaagaggctggccggcggcgccgagagtggccaggaggagagcgcagagggccttgcccagggcggcggccgggctggggttttccatcacctgggagcacagaggggagcagccgcgcgctggcaccgtcgtggcagcctcggggtggaaagccgagagggctgcggcactttgggctctgaggacggccccgagcacccgcg

SEQ ID NO: 1172 - DNA, 396 bp, Homo sapiens
  misc_feature 1..396: note = U/M: M (0.79:0.09) in Pancreatic Acinar cells
  misc_feature 1..396: note = source = chr7:127176750-127177145; Gene: GCC1 (Intergenic)
  source 1..396: mol_type = genomic DNA
cgttaccacaagaaaataaattgctggaaaacaatgatgacaccatttctttcagcaaaacaaaacatgctaggattcaggtcgaattccgcgatgatccgcctgctgcaagcccaggttcttacaggaacgctgaccgggctgtctgctggtcgcgtggtgtgctgtttgttttagtctcacctgggggtctgaaggtgggggagaaggttggggtgagccaagctggagtttggatttcttagggactctccattagtttcctaggcagggtttgcagcgtctgtcaccactgaagatggtgcagcggcgcgctgcagccggcatgctgcaccgaagctgtacccttcaacggctacttttgtgtgctgagaacattttactgaggagggaacg

SEQ ID NO: 1173 - DNA, 370 bp, Homo sapiens
  misc_feature 1..370: note = U/M: M (0.72:0.04) in Pancreatic Acinar cells
  misc_feature 1..370: note = source = chr17:61553811-61554180; Gene: ACE (promoter-TSS)
  source 1..370: mol_type = genomic DNA
cgcagccccaagccccaggtgtgccggccgccctgagcccctccagcacctcccggaggcgcctgcaagacacctaaggtccccgcctccctcctctcccccccgccacacccctacccccggcaggcgacgtccccgcccctcgaccatggcctggtgaagaagccggccaggcccgatcagccccatccccgccgcacgagcggcgcctgcggacagctcctggggccccggccttgtcactccggaggcgggaggctccggggggtcgggctgggaagatcgagccggaggccgctaggctcccaggccccggccgaggctgcgcggccgcacggtgggcaggctcgggtgttccggcaaactgccg

SEQ ID NO: 1174 - DNA, 432 bp, Homo sapiens
  misc_feature 1..432: note = U/M: M (0.7:0.02) in Pancreatic Acinar cells
  misc_feature 1..432: note = source = chr11:123946941-123947372; Gene: OR10G7 (Intergenic)
  source 1..432: mol_type = genomic DNA
cggctccgtggaggatggcactgcctcaggcccagctccacctcctccctgcaccctcccagcagttgctgcagatgagagcggcgatgggaccagggtccagagcaatggaggctccgtgcctgggagcgggttctgccggctgcggaaggataggggtggcacagtcagccgccttggggacacaggacataggggacccaccaccgccactgccgctcccgcagcagctcgtgccgccaccacccacgcctccttgctgcagccagcgtgacgacagcggctgctccggaccacccgcaagcggccatcacggcaagggactaaccgtcgtgtaactactgtctgccacaaaaatctctattattatctttaaagggaaacttcttcttaaactaaaaatgcttttgttcctaatatattgggacatcg

SEQ ID NO: 1175 - DNA, 52 bp, Homo sapiens
  misc_feature 1..52: note = U/M: M (0.86:0.19) in Pancreatic Acinar cells
  misc_feature 1..52: note = source = chr11:1410140-1410191; Gene: BRSK2 (promoter-TSS)
  source 1..52: mol_type = genomic DNA
cgccagggcgctgcggccggatcccaggtgagttccttgactccgcgccgcg

SEQ ID NO: 1176 - DNA, 206 bp, Homo sapiens
  misc_feature 1..206: note = U/M: M (0.77:0.1) in Pancreatic Acinar cells
  misc_feature 1..206: note = source = chr8:11536821-11537026; Gene: GATA4 (Intergenic)
  source 1..206: mol_type = genomic DNA
cggggatgggggaggaaggggacgtttctagaagaaacttaaagggggctcgcgccgcacgactgtaggtggagggcgtgcgccgcgggacgccccagccgggtctgataaagccccgaagccgatctaaggtcaataaaccaggcggcgtcaggcttgggccgagggccgggaggagaggagagtggagccctctcaggctggcg

SEQ ID NO: 1177 - DNA, 59 bp, Homo sapiens
  misc_feature 1..59: note = U/M: M (0.85:0.2) in Pancreatic Acinar cells
  misc_feature 1..59: note = source = chr20:43945377-43945435; Gene: RBPJL (exon)
  source 1..59: mol_type = genomic DNA
cgactggcgctggctgcgcgctcccatcacaatccccatgagcctggtgcgcgccgacg

SEQ ID NO: 1178 - DNA, 151 bp, Homo sapiens
  misc_feature 1..151: note = U/M: M (0.71:0.08) in Pancreatic Acinar cells
  misc_feature 1..151: note = source = chr8:11537046-11537196; Gene: GATA4 (Intergenic)
  source 1..151: mol_type = genomic DNA
cgactgctggggtccgagccctgggccgcttgcggggcgcgcagccggggagaggagctgggcgcgcggcctgggccccccacctgcccgaccccagggcagccaagcacccgcggccttaaaagtatcccggcgagccctgagtgggccg

SEQ ID NO: 1179 - DNA, 311 bp, Homo sapiens
  misc_feature 1..311: note = U/M: M (0.66:0.04) in Pancreatic Acinar cells
  misc_feature 1..311: note = source = chr22:38221073-38221383; Gene: GALR3 (exon)
  source 1..311: mol_type = genomic DNA
cgcgccatgctggcggtggccgcgctctacgcgctctgctggggtccgcaccacgcgctcatcctgtgcttctggtacggccgcttcgccttcagcccggccacctacgcctgccgcctggcctcacactgcctggcctacgccaactcctgcctcaacccgctcgtctacgcgctcgcctcgcgccacttccgcgcgcgcttccgccgcctgtggccgtgcggccgccgacgccgccaccgtgcccgccgcgccttgcgtcgcgtccgccccgcgtcctcgggcccacccggctgccccggagacgcccg

SEQ ID NO: 1180 - DNA, 179 bp, Homo sapiens
  misc_feature 1..179: note = U/M: M (0.61:0.04) in Pancreatic Acinar cells
  misc_feature 1..179: note = source = chr16:67208453-67208631; Gene: NOL3 (exon)
  source 1..179: mol_type = genomic DNA
cgctagaagtaggcgagtgtgaaaccgcacaggggtaaattgagcctcagtcactcccacttccgccccaggctaccgggaccgcagctatgaccctccatgcccaggccactggacgccggaggcacccggctcggggaccacatgccccgggttgcccagagcttcagaccctgacg

SEQ ID NO: 1181 - DNA, 188 bp, Homo sapiens
  misc_feature 1..188: note = U/M: U (0.01:0.93) in Pancreatic Alpha cells
  misc_feature 1..188: note = source = chr9:136894752-136894939; Gene: BRD3 (TTS)
  source 1..188: mol_type = genomic DNA
cggcgagccgcgctgcacgccagcctccagtctggcagttaaacctcactatgaaaatctgcttttgggattttatttgcatttccattagactgagcgcatcacaagccacttcaggatagactgaggtgcagagggaggggacaagcggccaggttgactagaagagcacagaacctggctgtctc

SEQ ID NO: 1182 - DNA, 255 bp, Homo sapiens
  misc_feature 1..255: note = U/M: U (0.03:0.94) in Pancreatic Alpha cells
  misc_feature 1..255: note = source = chr12:123058908-123059162; Gene: KNTC1 (intron)
  source 1..255: mol_type = genomic DNA
cgtgtttatctgacacggacgtaagtaaatagtgaccatttgcgtttcccttttgagcattaaatcttttctgaaagcttttttctgttcataaaagcgacatatatttgtttttgtttgagatgggtctggctgtgtcgcccaggctggaatgcagtgacatgatcatggttcactgcagcctcaatctccctggctcaagcaatccccacctcagcctcctgagtagttaggaccataggcgtgtgccactac

SEQ ID NO: 1183 - DNA, 325 bp, Homo sapiens
  misc_feature 1..325: note = U/M: U (0.02:0.89) in Pancreatic Alpha cells
  misc_feature 1..325: note = source = chr4:3305594-3305918; Gene: RGS12 (Intergenic)
  source 1..325: mol_type = genomic DNA
cgaagcattctgaaagttgccagtctttaatttcttctttacctcttatttctttcccctaatcattcatgtttgccatacttctgaattctaaaagctgcattagtttttgagtgaattctcttgtaagcactgagtcgctgtgctgctgcctagcaatgtgtgggatctttctgagactgacaatggaagaggaagaaagcgcatttgctccatgaggccggaattgaggcatttaatgtgtgtgtccctgatgctcagcctcttggtttctttggatttgaaatgttaaaacctcaagaagtgacatttattaaaaacccac

SEQ ID NO: 1184 - DNA, 241 bp, Homo sapiens
  misc_feature 1..241: note = U/M: U (0.05:0.91) in Pancreatic Alpha cells
  misc_feature 1..241: note = source = chr11:8258933-8259173; Gene: LMO1 (intron)
  source 1..241: mol_type = genomic DNA
cgcacggacacatccagccttgtgagaaggcctccatttcacaccagttttatctccacaatttctcgtctcactgcactcctattccagggccttgccatgcagcaggcgaggcctgaactaatagcatttcctactcatttggaatcaaaagccaacgagaacaactgttgaaacgcgcggctacagccacccagagcacgctcattaccgcccctctgcacaccctcttgcaggcagc

SEQ ID NO: 1185 - DNA, 329 bp, Homo sapiens
  misc_feature 1..329: note = U/M: U (0.02:0.88) in Pancreatic Alpha cells
  misc_feature 1..329: note = source = chr9:122767613-122767941; Gene: MIR147A (Intergenic)
  source 1..329: mol_type = genomic DNA
cgatgtgtgctgtgtcactgatattttcatatggacaagaaaagtccattagtgccatcccctgaaaattaggagttgagctggtaaattgctttctcaccatgctgcactcaccaataccactgtgatggtcagtcatgctcaaactccgttcctggttccccagcacttacggcagacaggacagaaagaacgcagtccaccgccaggcttgatcatcaaggaagaaagcaaaagcgttctttaaagcccaagtgatctgataggagcactgtcctgggagactgggagcccaagctgcagtcccccaacttgctgattgcccttac

SEQ ID NO: 1186 - DNA, 448 bp, Homo sapiens
  misc_feature 1..448: note = U/M: U (0.03:0.88) in Pancreatic Alpha cells
  misc_feature 1..448: note = source = chr18:5399141-5399588; Gene: EPB41L3 (intron)
  source 1..448: mol_type = genomic DNA
cggagacagtgtcataggattttcctagagtgtatattttctgtttgctgtcttctttcagttgcatttctcgagccaattcttcgaagctttgcattttaatagtgccagattttaacatgtcagctgggagatcaccagttttactgctcacggtcaccaccttgtaagtcacaatctttttcaaatcaccatcaactacctcagttggtattctgtctacaataacccaatcctctgtgccctatatttgaaatataaaagctaaattagaaattctgatggtatctcatttctaaaataagaatcctttaagaaaatcagggcaactgctacatgcaggtctgtgatgggaccatacagtgctcatgttattatctaataattatggctgcaatctcttctcctctgaaatgataaactataaacttcagctcagaatacattc

SEQ ID NO: 1187 - DNA, 464 bp, Homo sapiens
  misc_feature 1..464: note = U/M: U (0.06:0.89) in Pancreatic Alpha cells
  misc_feature 1..464: note = source = chr5:57310246-57310709; Gene: PLK2 (Intergenic)
  source 1..464: mol_type = genomic DNA
cgaaaaccctttcacttttcctcatggagggcatttctgacccctgctgacatgtggtcttggagtggtggctccccaccactccaaccaggcagcatcaggtgagagcacccattgtttctgctggttaccctcatgcgagatttttgtttgcttcctttctctccccagatacttctgttactacttcactactgtggggaacttcacaaaaatgcatccctcagcaccctgggctctgtgtctgaaccacttcacatgccttctgtactgcatcccagcactccagtattcctgagctgaaatctcagacctcgtaattaccaatcactgtgcttttgacacccacccctgccactcactaccagcttctcttatttttcaacttattctggttcaccaacgaaaacgattcttcaagcccactggggcctcaatccatgtattcattattggctgctctc

SEQ ID NO: 1188 - DNA, 478 bp, Homo sapiens
  misc_feature 1..478: note = U/M: U (0.04:0.87) in Pancreatic Alpha cells
  misc_feature 1..478: note = source = chr2:163006618-163007095; Gene: GCG (intron)
  source 1..478: mol_type = genomic DNA
cggggactgggaccaacatgaatgtgggacagaatgtccccacagagcaagcgcttctattttctgaatgggaacgtcaagtccgtctttgtcatggatctcggctactttgaaacccaatggtgtttcctttgagaagcgggcatttcaatccaagtttgactatgcttatccacaaataatttgaatgaatatttttagcaaatgacatttggtttggaataaggatttcacaaatattatcatttttaaactatcaatcttttccttaatatattagctgtatttactatctctggcactaaaacatagacactgtaatacctgcagcagtaacttttttctttgaaatattaagttttttgtacattgaatggatgattagacaaaggaacataataggaatgatatattcacctttcttcattcatcaacatcaaattaccaatttgacattttgctatgcttcagtttaacc

SEQ ID NO: 1189 - DNA, 331 bp, Homo sapiens
  misc_feature 1..331: note = U/M: U (0.1:0.92) in Pancreatic Alpha cells
  misc_feature 1..331: note = source = chr19:38695130-38695460; Gene: SIPA1L3 (intron)
  source 1..331: mol_type = genomic DNA
cgcggtggctcatacctgtaatcccagcactttgggaggccaaggtggtgggtcacctgaggtcaggagttcgagaccagcctggtcaacatggtgaaaccccatctctattaaaaagtacaataattagtcgggtgtggtggcgggtgcctgtaatcccaggtactcaggatgctgaggcaagagaatcgcttgaacccaggaaggtggaggttgcagtgagccgagatcatgccactgggctccagcctgggcaacagagcgagactccatctcaaaaaaaaagaaaaaaaaatgttgatccagtaattccacttgtgggaatttatcc

SEQ ID NO: 1190 - DNA, 393 bp, Homo sapiens
  misc_feature 1..393: note = U/M: U (0.1:0.92) in Pancreatic Alpha cells
  misc_feature 1..393: note = source = chr14:93655063-93655455; Gene: TMEM251 (Intergenic)
  source 1..393: mol_type = genomic DNA
cgagtagcagagccagggttataaccaggcattctaacgccatcgttactaaccacagaggcatagcgcttctcacaaatgacaaatgttttagcactgggtactctttgcccagtcatgccaaagaatggaaatggcaatagtattgacaagtttttctctatttgtctactagaaatctgaaagtttcctagcaacctcatctttccactacatctgactgaacccgaaaggaaggctgagtattccatagcaagctgttacttaaaagataaagcaggtacctttgtgatgtaaaagtagcagatcagatccttcagatcaattagtctcatttatctcactgcctccaaaggtctagttactgaaatgatatatcttttgatataacac

SEQ ID NO: 1191 - DNA, 447 bp, Homo sapiens
  misc_feature 1..447: note = U/M: U (0.12:0.94) in Pancreatic Alpha cells
  misc_feature 1..447: note = source = chr4:128912121-128912567; Gene: C4orf29 (intron)
  source 1..447: mol_type = genomic DNA
cgattctcatgtctcagccgcctgagtagctgggattataagcgtgtgccaccatacccggctaatttttgtatttttagtacggatggacttttgccatgtcggccaggctgttctcgacctcctggtctcaagggatccacctgcctcgcctcccaaagtgctgagattacaggcatgagccaccatgctcggccactgttaatgatttgtgttttgttttgtttcgttttgttttgtttttgagatggaatctcactctgtctcccaggctagagacagagtctccagagtcttgctctgttgcctaggctagatggagagcagtggtgctcactgcaccctccgcctcccgggttcaggtgattctcctgctgcagtctccggagtagttgggattataggcacccaccacacctggctaatttttgtatttttagtagagac

SEQ ID NO: 1192 - DNA, 170 bp, Homo sapiens
  misc_feature 1..170: note = U/M: U (0.06:0.86) in Pancreatic Alpha cells
  misc_feature 1..170: note = source = chr6:33672216-33672385; Gene: MNF1 (intron)
  source 1..170: mol_type = genomic DNA
cgagggtggcgctggaaacggaagtgaggaaggatgaaaaactgctgaggcttcactcctgactgaccctggtggctctcagcagtcactgagctctccatggtctgccgagagagcagctgtttgctgtacctggtcttcacctgatggccgcttatctggaccttccc

SEQ ID NO: 1193 - DNA, 364 bp, Homo sapiens
  misc_feature 1..364: note = U/M: U (0.12:0.92) in Pancreatic Alpha cells
  misc_feature 1..364: note = source = chr6:157907038-157907401; Gene: ZDHHC14 (intron)
  source 1..364: mol_type = genomic DNA
cggtgccccctcaaaagaaagaatgtttctaaagctggtatccttgtttttttccattttgcacttaggcaatgaggtgactgtgttagttctattccgtggtgtttatcattccatgctattagttcagtgagttgccctgggcctctgtatgacagtctctaggtgtgttcttggtgactgctaagagaaacaaggctctcccatatgtaagggagtcggcctgctggtatatccaatcgcgtcactacaccggtacctgtgaacttggccgtatggtagacactcagccatggcttcagtatttcaattccgttaaacttgccaagcacagcatctcctacctgtattatcttgggcagtc

SEQ ID NO: 1194 - DNA, 314 bp, Homo sapiens
  misc_feature 1..314: note = U/M: U (0.11:0.9) in Pancreatic Alpha cells
  misc_feature 1..314: note = source = chr11:33666715-33667028; Gene: KIAA1549L (intron)
  source 1..314: mol_type = genomic DNA
cgctttaagagctgtgatctagaagcaggattttgttattctgtctgataagtagcatcaggcaatcagcacttccttaaccaaaggctggacacaggaccatttagggagtgaatctagaatgctacccctccaggtgtagattacaagacattccagggtcttataccctaaggcataggggtggggaatgtctctaaaagattttagaaagtaccgttaatgtcatcggtgaaagccatttctcgagtctgttacactaacaggcagagcctgcagcattggtcaatctatgggcaactgaagtgcacacc

SEQ ID NO: 1195 - DNA, 224 bp, Homo sapiens
  misc_feature 1..224: note = U/M: U (0.15:0.9) in Pancreatic Alpha cells
  misc_feature 1..224: note = source = chr13:24244799-24245022; Gene: TNFRSF19 (intron)
  source 1..224: mol_type = genomic DNA
cgtaggaactgagaggccccagcagccgagagcaggtaacaagtccttcaaagcagagagcgtccactgacggatcagaggatgctagaaacaggcggaacccccctgctcagcaacagagggctcagctgcctcccagcagcactaaatgaggggccctcgccatgtctagtgcatcatccgtgcctctcttgttaggagatcatctgaagaactagggttac

SEQ ID NO: 1196 - DNA, 230 bp, Homo sapiens
  misc_feature 1..230: note = U/M: U (0.13:0.88) in Pancreatic Alpha cells
  misc_feature 1..230: note = source = chr6:159183176-159183405; Gene: SYTL3 (intron)
  source 1..230: mol_type = genomic DNA
cggccagatggcaccttgaactcatttgttaaggggtaggtattcgatgtaatcaaatatttattggtgatctagtatacatcacaacatggcccagaacctgcagcgaacactaaaaaacgtaagccacttaaaacgtcttattttagctttcctatgaaaatctaacaacacatattaaagaccctgatttccaaaaattcacgggatgtgtacatgctggagtactc

SEQ ID NO: 1197 - DNA, 120 bp, Homo sapiens
  misc_feature 1..120: note = U/M: U (0.21:0.94) in Pancreatic Alpha cells
  misc_feature 1..120: note = source = chr7:1152687-1152806; Gene: C7orf50 (intron)
  source 1..120: mol_type = genomic DNA
cgccacagtggtggttacaggaagctatgcacctggaaaaactgcagggcgcacacacacgcacacacccgcacgtacaaccgtggactctggacgagctctgtgcgaggcatccacgtc

SEQ ID NO: 1198 - DNA, 260 bp, Homo sapiens
  misc_feature 1..260: note = U/M: U (0.28:0.95) in Pancreatic Alpha cells
  misc_feature 1..260: note = source = chr8:140863882-140864141; Gene: TRAPPC9 (intron)
  source 1..260: mol_type = genomic DNA
cggaaaaccgaacccaacgttcaaaagggaaatgagtcgggaaggggaaaggtcccgcggactcacggcaaatgtttacatttgatgatctttggaacatatgcatggctgcatacagtacttgctgttaacattatagagaagcctgagctggcaccagcaggagatctccaaagtcattcagtcacgcacagtctccccgaaggatctgggtgggctctgtgaggggcaggtggagaaggacactggatttggtgaac

SEQ ID NO: 1199 - DNA, 355 bp, Homo sapiens
  misc_feature 1..355: note = U/M: U (0.04:0.93) in Pancreatic Alpha cells
  misc_feature 1..355: note = source = chr17:65148228-65148582; Gene: HELZ (intron)
  source 1..355: mol_type = genomic DNA
cggtgtgctggtaaatattttaacacccggctccagggctaggaaggggagaggattccggtttgtagtgtttgctgatttttgtggtgtaaaactgtcatggtaatttcaagctaccagcatttcactgaacatgaacctgagaagtcgtacacgtgattagctctaacaaaccaatacaagttggctccaacacaacactgagcggcacggaggaaggagcagagggtagaagcaaggagaccagttacaaggttactgttaagagtgcagacaagagcagatggtagcttggattaggccaacaatagagatatgaaaatggtcagattcactaggcatttcgagagtaacg

SEQ ID NO: 1200 - DNA, 87 bp, Homo sapiens
  misc_feature 1..87: note = U/M: U (0.03:0.91) in Pancreatic Alpha cells
  misc_feature 1..87: note = source = chr8:19270044-19270130; Gene: CSGALNACT1 (intron)
  source 1..87: mol_type = genomic DNA
cgcctcctttcaatcagagtctctcctcagcactgaggctgcgtctggtctaccttgcattcacagcaacgcccgttagcagggccg

SEQ ID NO: 1201 - DNA, 399 bp, Homo sapiens
  misc_feature 1..399: note = U/M: U (0.02:0.9) in Pancreatic Alpha cells
  misc_feature 1..399: note = source = chr18:5398260-5398658; Gene: EPB41L3 (intron)
  source 1..399: mol_type = genomic DNA
cgaaggaatctcagagtttggaaacgaaaagaatgggaaataaaatagaaaaccaggtgctcttgtttggtaaagcagagacggttattaggatcagggtggcgccgatttaagcagatatatatattttttccccttcattgcaagccacagcagcactatcacatcttgggaacagggagctggaaataaaatggaaagtgttttaatgctgactttgcactgcggtattgatttaaccatgaaaaaaaattaagaagctgggttggctgctctcaacataaagccaagcagcaagagaaacggaaaggtttggggtggaaggggactgcctcaaaaactgtcatgctggaattgcaaactgtggccccaatgagtgacactggttaccactactcg

SEQ ID NO: 1202 - DNA, 141 bp, Homo sapiens
  misc_feature 1..141: note = U/M: U (0.03:0.89) in Pancreatic Alpha cells
  misc_feature 1..141: note = source = chr7:41528144-41528284; Gene: INHBA-AS1 (Intergenic)
  source 1..141: mol_type = genomic DNA
cgacaagcactttatgtatttattcattcactattcaacaagattttattaaggacccattaaaccccagcgaggtaggccctgtgataggtgggaatagcgagatgagctggatgaaaggcctcagcgtgccctgagccg

SEQ ID NO: 1203 - DNA, 359 bp, Homo sapiens
  misc_feature 1..359: note = U/M: U (0.08:0.94) in Pancreatic Alpha cells
  misc_feature 1..359: note = source = chr18:5398664-5399022; Gene: EPB41L3 (intron)
  source 1..359: mol_type = genomic DNA
cggatgactcagtaacgtaatgggcagtagcaacggtaaaggctggttcctgggaatatctccattcggacaggctcttccttcggggaccaaagaggcccacttttaagacctcactctcgggcacttgctctgttttgctgaagcgtctgccttccaggccagggaggacggccacatccttctccagctgtggagccttcttgaggtcatcttcttcaggactctgccggcgagactcggcctccttgatgggggccagggattcggacaatttccgctgtgtcgtctggacctctggtcctctcttggatttctcatcagcgagggtttccaggacctcatattctgccaggccg

SEQ ID NO: 1204 - DNA, 66 bp, Homo sapiens
  misc_feature 1..66: note = U/M: U (0.01:0.86) in Pancreatic Alpha cells
  misc_feature 1..66: note = source = chr2:236588582-236588647; Gene: AGAP1 (intron)
  source 1..66: mol_type = genomic DNA
cgaatggtgttacgtggatctgtgttgtactgacgctgacattttgactgtcgtttctaagtaacg

SEQ ID NO: 1205 - DNA, 82 bp, Homo sapiens
  misc_feature 1..82: note = U/M: U (0.08:0.93) in Pancreatic Alpha cells
  misc_feature 1..82: note = source = chr14:93490477-93490558; Gene: ITPK1 (intron)
  source 1..82: mol_type = genomic DNA
cgccctgtgtgtgttgcggggagagcggagaggatcccacacatgaacctcctgttgccaggcctggaggaaggaactcgcg

SEQ ID NO: 1206 - DNA, 203 bp, Homo sapiens
  misc_feature 1..203: note = U/M: U (0.04:0.89) in Pancreatic Alpha cells
  misc_feature 1..203: note = source = chr21:37580197-37580399; Gene: DOPEY2 (intron)
  source 1..203: mol_type = genomic DNA
cgcagtcagctgcagggacaccaccgaacagacatgggcctggccttggtcagcgtcaggggaaaaacgagccctgatccactggtgacgctgcttctcttaaaaggatgcatgagaaggtgctgactttgtatcacgggagacctagataaagataagaggcgaacaaatgcccggcctcagcacaagagcccctgggagcg

SEQ ID NO: 1207 - DNA, 267 bp, Homo sapiens
  misc_feature 1..267: note = U/M: U (0.02:0.87) in Pancreatic Alpha cells
  misc_feature 1..267: note = source = chr7:3964943-3965209; Gene: SDK1 (intron)
  source 1..267: mol_type = genomic DNA
cgaggaggagaagctgcgtagaagccctgccctctgagtttgcttagaaaaagcacattcaagtttgcatttaggaatcgcagtcagtgacgcatgcttgggttccctgctcaagctgttagggcaaaagcgacggcgtttctaccctcatcaggagagactgcctctatgaatctctcgtcgccaaactaagcagttttaatccagatacagagtggagacagatgaacgcatgcaggatgcttctccagagacggcgtgttctcg

SEQ ID NO: 1208 - DNA, 364 bp, Homo sapiens
  misc_feature 1..364: note = U/M: U (0.03:0.88) in Pancreatic Alpha cells
  misc_feature 1..364: note = source = chr2:191749899-191750262; Gene: GLS (intron)
  source 1..364: mol_type = genomic DNA
cgaggtgtatactctgaaaattgaattttttttttttgagatggagtctcgctctgtcacacaggctggagtgcagtggtgtgatctcggttcactgcaacctctgcctcccgggttcaagccattctcctgcctcagcctcccgagtagctgggattacaggcacccgccaccatgcgtggctaatttttgtttttagtagagatggggtttcaccatgttggctgggctggtcttgaactcctgacctcagatgatctgcccgctgtggccacccaaagtgctgggattacaggcgtgagccaccgcacctggtctgaacattgaatttcaaagtaagatgaaatgcttatgaatttcagcg

SEQ ID NO: 1209 - DNA, 16 bp, Homo sapiens
  misc_feature 1..16: note = U/M: U (0.06:0.9) in Pancreatic Alpha cells
  misc_feature 1..16: note = source = chr10:127219667-127219682; Gene: LOC100169752 (Intergenic)
  source 1..16: mol_type = genomic DNA
cgtgcgcttgcgcgcg

SEQ ID NO: 1210 - DNA, 88 bp, Homo sapiens
  misc_feature 1..88: note = U/M: U (0.05:0.89) in Pancreatic Alpha cells
  misc_feature 1..88: note = source = chr3:32381347-32381434; Gene: CMTM8 (intron)
  source 1..88: mol_type = genomic DNA
cgggaggctgaggcaggagaatggcgtgaacccgggaggcagagcttgcagtcagccaagatcgcaccactgcactccagcctgggcg

SEQ ID NO: 1211 - DNA, 143 bp, Homo sapiens
  misc_feature 1..143: note = U/M: U (0.05:0.88) in Pancreatic Alpha cells
  misc_feature 1..143: note = source = chr10:1021209-1021351; Gene: GTPBP4 (Intergenic)
  source 1..143: mol_type = genomic DNA
cggcatccacccgtggtgtcccgagcacacgtcctgatgcagcaatagtgacatgttgttttatttactaatgtccccacgtgtttagtacagggtctgccgcacagctggagctcagtaagcgtctgttgaattcagttgcg

SEQ ID NO: 1212 - DNA, 181 bp, Homo sapiens
  misc_feature 1..181: note = U/M: U (0.08:0.91) in Pancreatic Alpha cells
  misc_feature 1..181: note = source = chr11:67871149-67871329; Gene: CHKA (intron)
  source 1..181: mol_type = genomic DNA
cgggcagatcacctgaggtcgggaattcgagatcagcctggccaacatggtgaaactctgtctctattaaaaaaacaaaaaaattagccacgcatggtggtgtacatctgtaatcccagctatttgtgaggaggaagcacgagaatcacttgaacccgggaggcagtgttgcagtgagccg

SEQ ID NO: 1213 - DNA, 233 bp, Homo sapiens
  misc_feature 1..233: note = U/M: U (0.11:0.94) in Pancreatic Alpha cells
  misc_feature 1..233: note = source = chr4:141065012-141065244; Gene: MAML3 (intron)
  source 1..233: mol_type = genomic DNA
cgctgccatgcaacacagcagtcctctaacttcttcccaggcatccttcacctcatcgcggcacctctgcctctctctgctcttcaagtaatgatgtttttaaaaagctgagagtaatgccgcatgtgtaaacccatcttctttcatattttcaaaaccctaggagagctccttgtttaaagcagggcccctcaccagcagcaatattttggatcaggtaattctctgttacg

SEQ ID NO: 1214 - DNA, 220 bp, Homo sapiens
  misc_feature 1..220: note = U/M: U (0.09:0.91) in Pancreatic Alpha cells
  misc_feature 1..220: note = source = chr6:170175943-170176162; Gene: C6orf70 (exon)
  source 1..220: mol_type = genomic DNA
cgctgctcagtgaaccattgaacattcttgtgcacaggcactgatgtgagcactttaattgtcacgtatctttaaatattttctgtttttcagattagaagataattctgaaacaaatgcctgccactctttgattacaaaaatgacggatgagctgtatcaccatatgcctgagaatcgttgtgtgttaaaggacttggatcgtcttcctactgagacg

SEQ ID NO: 1215 - DNA, 258 bp, Homo sapiens
  misc_feature 1..258: note = U/M: U (0.04:0.86) in Pancreatic Alpha cells
  misc_feature 1..258: note = source = chr3:170059223-170059480; Gene: SKIL (Intergenic)
  source 1..258: mol_type = genomic DNA
cgccctgggggccaagccgcatcataaagggaaattacattttttttcattttggccagagcaaaatatgtgtgataaaacatagacattagccactctgcttagcaaccaatatcaaactgacaaggcttaaatttgcccccagatgaacctcgtcattttttgtttgttttttgtgttttgtgacagagtctcactctgttgcccaggctgtagtgcagtggcacgttctcggcttactgcaacttctgcctcccg

SEQ ID NO: 1216 - DNA, 258 bp, Homo sapiens
  misc_feature 1..258: note = U/M: U (0.06:0.88) in Pancreatic Alpha cells
  misc_feature 1..258: note = source = chr13:60435635-60435892; Gene: DIAPH3 (intron)
  source 1..258: mol_type = genomic DNA
cgttgttttctgatctgctgattttgtgtcctttagctaaatagaacaggagggagaaaaaacacagagtcataagtatgttgatattctgtctacttaaataatattaatactgtattttgtagataaggactaaaagttgtaaaattagttgatttcgtttttgaaaaacaaatatttaaatactcgaaaaactacttttgacttgctgcttggtgaaaatcattatttgtcgcaaaaaaggaataagtttaatcg

SEQ ID NO: 1217 - DNA, 396 bp, Homo sapiens
  misc_feature 1..396: note = U/M: U (0.07:0.88) in Pancreatic Alpha cells
  misc_feature 1..396: note = source = chr17:79222427-79222822; Gene: SLC38A10 (intron)
  source 1..396: mol_type = genomic DNA
cgagaaggatgttttgtgagtggtgagagcaaatatctcagggacggccctgcatgccaggcatagactgacgtgccggcccagcctccccagtggtgacaccatgaccagccagagaagtgcagggtcagcattctcccaggaacgcagccctgggcctcgcccagacccctggatgtgggggacagggctggctccaaggagatcagggccatggggccggccctcaagcagcagcccctgctccctgctagcaccccgggccagacgcctgcctgcagggaaaggccatgacgggcagagcaggtctcccgcacacctcctttcacaggaggaagtgcaggtggcagaccagccacctcggccgtgggccacgtgctcgccctgggtgctgcg

SEQ ID NO: 1218 - DNA, 225 bp, Homo sapiens
  misc_feature 1..225: note = U/M: U (0.11:0.9) in Pancreatic Alpha cells
  misc_feature 1..225: note = source = chr1:39952315-39952539; Gene: MACF1 (exon)
  source 1..225: mol_type = genomic DNA
cgatcaacttcccacaaactgaggaatgaattccacgagcctgttctgaaaatgtggacgtaagacaaacacgtgctcgtcctttaatggagttcaccagcacacttgttaaccagtcctgtttgctttcgtctttttttgtgcgtaataaagtcaactgaccaagtgaccatgaaaaggggctgtctggggctcctgttttttagctgctgttcttcagctccg

SEQ ID NO: 1219 - DNA, 247 bp, Homo sapiens
  misc_feature 1..247: note = U/M: U (0.13:0.92) in Pancreatic Alpha cells
  misc_feature 1..247: note = source = chr19:53049737-53049983; Gene: ZNF808 (intron)
  source 1..247: mol_type = genomic DNA
cgatcatgatagtttttagatttggacttttctttcaaagccaatggactctgtcctctctgaaacaccgcttgtatcttagttcatctagagactaaatatcgccttgtatgttgaacataatagctgacatgtctgtagagaaaaccctgtgtttgcttttttttttttttttttttgagatggaatcttgctctgttgccaagctaaagtgaagtggtgcgatctcggctcactgcaacctccg

SEQ ID NO: 1220 - DNA, 332 bp, Homo sapiens
  misc_feature 1..332: note = U/M: U (0.07:0.86) in Pancreatic Alpha cells
  misc_feature 1..332: note = source = chr2:49161981-49162312; Gene: LHCGR (Intergenic)
  source 1..332: mol_type = genomic DNA
cgcaagcaaaattattttgaaaatacattttggtttcctaggctgtatctctttaactgtgacttatctctgaggtgtctgctaggttggtcatggttttgtagtttttatgccaacaaacttggtattagccatggtaactcatgtccccagggcacttttgtatgagtaggcatttttaaccaggaaaatgggcctggttcttagttcaaagagttattaaatgtgaagtatcagcaaaatcaagaaaacagaacgctgttatttttccttttagttttctatttttttatttaccattttaatctctcggctgggcacggtggctcacg

SEQ ID NO: 1221 - DNA, 385 bp, Homo sapiens
  misc_feature 1..385: note = U/M: U (0.1:0.89) in Pancreatic Alpha cells
  misc_feature 1..385: note = source = chr12:107866102-107866486; Gene: BTBD11 (intron)
  source 1..385: mol_type = genomic DNA
cggcaaacggaaccggggaagggatagagcaaacacaggaccaaggcactctggcctctccaggagccaggataagacaaagctcaacaagctatagggagagggtcaaaaacatggactctggggccagactcctttggtttgaagcactgctgtgccatttattagctgtgtgaccttaggcaatttggttggcctctctgttcttcagtttacatctgtaaaatggagccaggaaacagaacttctctcacagggatgctctgatgagtaaatgaaatactacctgagaaaggcttagaagagtgccttgtacaaacatagtgagtgatgtacgagcattggctgctgctgttatcagcaccgcgccaagtgggaacatccg

SEQ ID NO: 1222 - DNA, 218 bp, Homo sapiens
  misc_feature 1..218: note = U/M: U (0.14:0.92) in Pancreatic Alpha cells
  misc_feature 1..218: note = source = chr4:3004786-3005003; Gene: GRK4 (intron)
  source 1..218: mol_type = genomic DNA
cgtccattcaacaattcccagttctctccaagcgcctggcaaccaccattctactttatgtctctatgaatttgactactctagggaccatatataagtggaatcatacaggatttgtcactttgtgactggcttctttatttatttttgagatggagtttcgctctgtcgtccaggctggagggcagtggcacaatctcagctcactgcaacctccg

SEQ ID NO: 1223 - DNA, 294 bp, Homo sapiens
  misc_feature 1..294: note = U/M: U (0.11:0.89) in Pancreatic Alpha cells
  misc_feature 1..294: note = source = chr6:153441728-153442021; Gene: RGS17 (intron)
  source 1..294: mol_type = genomic DNA
cgcctgtcccatagcacagctcccgcccggtaatcctccgcttagagagcttcagcagcactctgcctagcaaggaaaattccacctttttactctgatattagcagctgccagtatatgtcttcttttttagccttatcatctagtgatttcctgcgagtactgtatgcttttgaaatattgtgcacaaaatggttttaattttcctgattctgcatctatctttatttacattgtttttgagcctggagacacctttctttgtctgtcaaaattctatctttcaataatccg

SEQ ID NO: 1224 - DNA, 372 bp, Homo sapiens
  misc_feature 1..372: note = U/M: U (0.07:0.85) in Pancreatic Alpha cells
  misc_feature 1..372: note = source = chr8:2803474-2803845; Gene: CSMD1 (intron)
  source 1..372: mol_type = genomic DNA
cgcaacacttcatgttggggatacattctgagaaatgcttcgtgaggcaattttgcggctgtgtgagcatcagagtgcactcacacacctagacggtgttgcctactgcatatctaggctataggtacagccagtggctcctacatgagtaacaccgtgcactatgacattatggcagctgtggtgtcaccaggtgttaggaatttgtcagcttctttataatcttatggggtcactggtgcatatgcgatcttttgttgaccaaaatgtcattatgcgatgcgtgactgtcctatataattcatccacttaagctgaacacacaatccaaggctttctcagtgttttcatagggtggtgcaatcaccaccg

SEQ ID NO: 1225 - DNA, 70 bp, Homo sapiens
  misc_feature 1..70: note = U/M: U (0.13:0.9) in Pancreatic Alpha cells
  misc_feature 1..70: note = source = chr7:79840316-79840385; Gene: GNAI1 (exon)
  source 1..70: mol_type = genomic DNA
cggaagaagtggattcattgcttcgaaggagtgacggcgatcatcttctgtgtagcactgagtgactacg

SEQ ID NO: 1226 - DNA, 267 bp, Homo sapiens
  misc_feature 1..267: note = U/M: U (0.12:0.89) in Pancreatic Alpha cells
  misc_feature 1..267: note = source = chr3:177085908-177086174; Gene: LINC00578 (Intergenic)
  source 1..267: mol_type = genomic DNA
cgaatatgtctccatcatcgcactcacagggtggttttctgtttaatttgctcactagttttcgagctattgcaggggcacttcacatatttagctctgtatttccactttttttttttttttttagatggagtctcactctgttgcccaggctggagtgaagtggcatgatctctgctcactgcagcctccgccttccgggtttatgtgattctgccttctcagcctcctgagtagctaggctataggcatgcaccaccacacccg

SEQ ID NO: 1227 - DNA, 402 bp, Homo sapiens
  misc_feature 1..402: note = U/M: U (0.07:0.84) in Pancreatic Alpha cells
  misc_feature 1..402: note = source = chr15:57665395-57665796; Gene: CGNL1 (Intergenic)
  source 1..402: mol_type = genomic DNA
cgttctactggctcaaaaaccataattaagggagccagacttacattaaataaaaaaaaagacaaaaatgtttttcagaagcattccctggaaatgtttgctttaagttgaggttggtggggcttgagcattcatcttgacaataagagcaacgaaagcagtatctctggtagctgatctctctcacctctgtctttacctccaatgactcctcttatttttgtcatcagcaaaatatctgtatgggaggggaaattgctgatgaaatgcttttttgacagttaacaaatatttcctgagtgcacactctctacagatccttggaagggcccatgtgagaagtggattcgtgacattcggcactgccctctccttcaggagtccctcacccttgggcttccg

SEQ ID NO: 1228 - DNA, 435 bp, Homo sapiens
  misc_feature 1..435: note = U/M: U (0.14:0.91) in Pancreatic Alpha cells
  misc_feature 1..435: note = source = chr2:163062923-163063357; Gene: FAP (intron)
  source 1..435: mol_type = genomic DNA
cgccatgtaatatcttgccatagctgttaaatgacctaaagcggatgccctaaactgagtgcacattcggtcaaaagcacaagctttcaagcatcaagaagaaaattcatttttttttgaaccaagggattttgccagccgcctaaagacggtgtagtgtgttgcttaaattattttaaaataattgatgtgactttgcagtctaagcatgatgccttcagtgcttgttctccaaatttaaggaatgaagcactagtttcctttgattaactcttcacttttctgtcctctacagagcaaaacaaaacaaacatgttttaaaagcaattttgttattttttctgattaataccaaaaaagaagttaggttattaatcctaacttaaaggactggatgtgtcagtgctggaggaaaaaagtggtaagtaaagttcg

SEQ ID NO: 1229 - DNA, 87 bp, Homo sapiens
  misc_feature 1..87: note = U/M: U (0.12:0.88) in Pancreatic Alpha cells
  misc_feature 1..87: note = source = chr10:75601807-75601893; Gene: CAMK2G (intron)
  source 1..87: mol_type = genomic DNA
cgccctggtcaaggtgtggcccaggacgccgaggaaacccagcggtgcccgggatggcaacagcccattcctgatccactcacctcg

SEQ ID NO: 1230 - DNA, 178 bp, Homo sapiens
  misc_feature 1..178: note = U/M: U (0.14:0.9) in Pancreatic Alpha cells
  misc_feature 1..178: note = source = chr18:53212032-53212209; Gene: TCF4 (intron)
  source 1..178: mol_type = genomic DNA
cgagttaactcaaaagactggcgtcatcaagcagaaaatgaccagatcagcactcggagagcggatacaggagtttctttgataacatgtgaacttaccagtgtttctagagtactaccacagcaagtacatgaagtgtctacctgtagatgtacatcatgcacagccaggtgttacg

SEQ ID NO: 1231 - DNA, 226 bp, Homo sapiens
  misc_feature 1..226: note = U/M: U (0.12:0.88) in Pancreatic Alpha cells
  misc_feature 1..226: note = source = chr13:114111683-114111908; Gene: DCUN1D2 (exon)
  source 1..226: mol_type = genomic DNA
cgtgccacgtgtgccgttgctatgcaaagctacatggggattgagaaccataaaatgattttcagatgaatgtctagagaaaatgaaaacaaaaatagagctggtaaatctagatatttggtaattcaaaaaatataaatcgtgaattgctggcaccaattttaaaaaacattagactctacgacaagatcctctcccttagggcacattcttaacagctttgacg

SEQ ID NO: 1232 - DNA, 348 bp, Homo sapiens
  misc_feature 1..348: note = U/M: U (0.14:0.9) in Pancreatic Alpha cells
  misc_feature 1..348: note = source = chr21:17026618-17026965; Gene: USP25 (Intergenic)
  source 1..348: mol_type = genomic DNA
cgggctcatgtgcgacaaatgttttcagcagggcagaggatctactgatagttgttaagtgcttcctctgtgctggcactgcgctaaatactgcacatgtttaacgcacactgcactcacttaaccctcacaaaaatccaatgaagtaggtactaatactatcccattttgcagatgcacaaatggaagcaacgaggctaactagaacccactttgcaataagcggaggaagcagggtgagaacccaatcagtgcagcaacagagacttcactcttaactagtgcccaactgcttctcataataaaacatgtgctgctaaccacttcttagcctacatcatgttgacg

SEQ ID NO: 1233 - DNA, 215 bp, Homo sapiens
  misc_feature 1..215: note = U/M: U (0.14:0.89) in Pancreatic Alpha cells
  misc_feature 1..215: note = source = chr6:141398623-141398837; Gene: MIR4465 (Intergenic)
  source 1..215: mol_type = genomic DNA
cgggggtgaatccagagtgcagacacagcacaaaagctgcagcaggtggggaggcacgaaacctgaaagcccggcttgcttttacaatcaggagtctggtagcttgtggcaggttctcagccctggtcacctgctgcctggaaacaaacttggtgctgttgggcggcaggcatggtgggaatgagactggccttctgggctgtgtgtatgagccg

SEQ ID NO: 1234 - DNA, 294 bp, Homo sapiens
  misc_feature 1..294: note = U/M: U (0.07:0.82) in Pancreatic Alpha cells
  misc_feature 1..294: note = source = chr11:15662272-15662565; Gene: INSC (Intergenic)
  source 1..294: mol_type = genomic DNA
cggcaatgagcacagtgcatttgactttttgccttgtctctcacgcttctcaacatggacggttcgtaatggatgtcagactttgaatttcttatcatgttgtttatatctaataagtgaattgccctgtttttttaaaagtcagcttttaaaaatactgtgtttgaacatctgtcaagggctggggattagctgaataggcactggatgccaggatattatattctctcttatcctttatactgtaattatcttgatcctcaaacaactcagcaccagttacaaccactttcg

SEQ ID NO: 1235 - DNA, 82 bp, Homo sapiens
  misc_feature 1..82: note = U/M: U (0.18:0.92) in Pancreatic Alpha cells
  misc_feature 1..82: note = source = chr7:50666848-50666929; Gene: GRB10 (intron)
  source 1..82: mol_type = genomic DNA
cgcgcacacgctcagctgcatgggtggggacggggatgggaggggagctgcctggatcctgggatttcaggaatacttgacg

SEQ ID NO: 1236 - DNA, 219 bp, Homo sapiens
  misc_feature 1..219: note = U/M: U (0.1:0.84) in Pancreatic Alpha cells
  misc_feature 1..219: note = source = chr12:107859460-107859678; Gene: BTBD11 (intron)
  source 1..219: mol_type = genomic DNA
cgctgggttgtctcaagcctcaggcctccagccttgcccacctgacctcaggggcctggctcatcttgtctctttctccctttacacatttccaggcctaacatccctgacttccctcccagaaaacacacatccacacacacagtcgcgtgctctctctcctgttacgtctttcatgctcttgcagaaaataaatctctgcgttcgtactgcctctcg

SEQ ID NO: 1237 - DNA, 362 bp, Homo sapiens
  misc_feature 1..362: note = U/M: U (0.13:0.87) in Pancreatic Alpha cells
  misc_feature 1..362: note = source = chr6:136920291-136920652; Gene: MAP3K5 (intron)
  source 1..362: mol_type = genomic DNA
cgtctcaaaaaaaaaagggggggggggcgtggattttagctcctaatttggttagcacatctgtcctgctctcctaggaaggagagggaggaggcacatcatccatgtaatgatattgttttagctgagagtctgaacagtttaatcatgcagggaattggggactgcccctttttctaggcccaagtccatatgtaagcaagaacggcgaaagggcagtgggaacctgactgactagagttcagcaggtttacaccgtccatctcacgctcaccccaaggtacatagtcactgagaagacatagaactgtccacttaaaggatctctctctctctctctctctctctctcatatatgcacg

SEQ ID NO: 1238 - DNA, 221 bp, Homo sapiens
  misc_feature 1..221: note = U/M: U (0.22:0.95) in Pancreatic Alpha cells
  misc_feature 1..221: note = source = chr17:3745633-3745853; Gene: C17orf85 (intron)
  source 1..221: mol_type = genomic DNA
cgctggaacccaggaggtggaggctgcagtgagccgagatcgcaccactgcactccagcctgggcaacggagcgagactccacctaaatatggggggcctaccatctgccaggcacttttcatgttttgtttcatttcaagtggaaacagtacacatttttttagaaatggacataccatttaaaaaagcatcccccgtcttggacattttcttggaaacg

SEQ ID NO: 1239 - DNA, 222 bp, Homo sapiens
  misc_feature 1..222: note = U/M: U (0.22:0.95) in Pancreatic Alpha cells
  misc_feature 1..222: note = source = chr2:101892145-101892366; Gene: RNF149 (exon)
  source 1..222: mol_type = genomic DNA
cgcccgcctcggcctcccaaagtgctgggattacaggcgtgagccaccgcgcccggccctcctagtatttcttaaagacaaagagcaaacaatctacttgctacagaatcaggatgtattttcctatttataataaactacagaaggtagatttcaaaggtaatggctgttatggaaacctacttgaggttgtctgctaaaaccaactcagtgtgcaaagcg

SEQ ID NO: 1240 - DNA, 389 bp, Homo sapiens
  misc_feature 1..389: note = U/M: U (0.18:0.91) in Pancreatic Alpha cells
  misc_feature 1..389: note = source = chr1:246828709-246829097; Gene: CNST (intron)
  source 1..389: mol_type = genomic DNA
cgtgctatgagcacgtgagctgtttttcttcttctcatggagtgattctgtccattgtataaatgagctagttttaattttagcttgtacaagctccacaagtctgaatcttcttggtatttaataggtaggtctttgtagagtcattagcagcatgagttttctgtcaatacttcctatccgtagaggaccaacagtagaaatgtgtagttatcttaattagtgaaaagacagcagatgctaagatttccatttcggtgacaatgtaacctcactctttctcatgtttgcagatgaagttggaggtggctcctgtattttgctggtcttgctgtgcatagcaacggttttcctcagtgttggaggaactgcattatactgcactttcg

SEQ ID NO: 1241 - DNA, 64 bp, Homo sapiens
  misc_feature 1..64: note = U/M: U (0.18:0.9) in Pancreatic Alpha cells
  misc_feature 1..64: note = source = chr8:93584046-93584109; Gene: FLJ46284 (Intergenic)
  source 1..64: mol_type = genomic DNA
cgtgagtgggtttggtacgtgtgcaaagacgacggccaggtttcagtcatctgtgcagagttcg

SEQ ID NO: 1242 - DNA, 226 bp, Homo sapiens
  misc_feature 1..226: note = U/M: U (0.19:0.91) in Pancreatic Alpha cells
  misc_feature 1..226: note = source = chr13:96827497-96827722; Gene: HS6ST3 (intron)
  source 1..226: mol_type = genomic DNA
cgggtgagtggaaatgcagaggcttgaactgattttcccgggagcgtgtgcactttcccatcgtctgatgttgttcgtgagcagtctgatacctagctcctttccttttgtaacagttttttttttcttttgaagattttaaaatattctctttatctttgatatgtgaagtttcacaaggctgggtcaggttggatttctgtttgacacttgctggttcctttcg

SEQ ID NO: 1243 - DNA, 282 bp, Homo sapiens
  misc_feature 1..282: note = U/M: U (0.12:0.84) in Pancreatic Alpha cells
  misc_feature 1..282: note = source = chr2:36985565-36985846; Gene: VIT (intron)
  source 1..282: mol_type = genomic DNA
cgttaccattcctcttccttgcctgctagctaccgtgtctccccctgggtgagcaacacatggttattttcaaggttgacctatatttacctacttttaggttttactactgctatgaaattcaaatgaatcccacacggtctgtgaaagtgagcctatgaccggagcactccatcatctcaaaggagagcatgtggagggctttcccgttcacctactgatacaattaaacattcgaagccacacagataaaaaccttcacttccatgtcacatcttcacg

SEQ ID NO: 1244 - DNA, 310 bp, Homo sapiens
  misc_feature 1..310: note = U/M: U (0.21:0.93) in Pancreatic Alpha cells
  misc_feature 1..310: note = source = chr8:96051029-96051338; Gene: NDUFAF6 (intron)
  source 1..310: mol_type = genomic DNA
cggagtagctgggactacaggtgtgtgccacaatgcccaactaatttttgtatttttagtagagacggggttgttggccaggatggtctccatctcttgacctcgtgatctgcctgcctcggcctcccaaagtgctgggattacaggtgtcagctaccgcacctggcctattttttgtgtttgtttttttttttgagacagggtgttgctctgttgctcagactggagtggagtgtcattatctcagctcactgcaactttcacctgctgggctcaagccattctcctacctcagcctcccaagtagccg

SEQ ID NO: 1245 - DNA, 372 bp, Homo sapiens
  misc_feature 1..372: note = U/M: U (0.15:0.87) in Pancreatic Alpha cells
  misc_feature 1..372: note = source = chr5:164754286-164754657; Gene: MAT2B (Intergenic)
  source 1..372: mol_type = genomic DNA
cgctatggtttacagactgaaaagctgctgacatttgtatttttactaattatgttttttaatggtacttgaatttagtttagggtaactaaatattaatacatagaattacaggcaactgtgttatagacaatgcatgttcttaagtctttctcttgctcttataccaagtgaacaaaatgatactttacatttatatgctgaactgaattacagaatctctctgtttttttctctcactattttctgtacatccttcaggatttaccgcatcatttcctcccttacctccaaagtttttggttcacctctgtgcttccactacaatccacgctatcactctgtcatttctgaattttgatgaatgacgcg

SEQ ID NO: 1246 - DNA, 170 bp, Homo sapiens
  misc_feature 1..170: note = U/M: U (0.16:0.87) in Pancreatic Alpha cells
  misc_feature 1..170: note = source = chrX:56820581-56820750; Gene: LOC550643 (intron)
  source 1..170: mol_type = genomic DNA
cggcaggtacgctttgttctagggctctaaaccctggtcggggaaaccctggctcaggcagagtccacccagccccgcatatttttgctgacctcggtgcctagcagaaggcaagtgtttccgcagcctgttgtcatgttcagaaacaccttctgctggatggcactgcg

SEQ ID NO: 1247 - DNA, 234 bp, Homo sapiens
  misc_feature 1..234: note = U/M: U (0.12:0.83) in Pancreatic Alpha cells
  misc_feature 1..234: note = source = chr3:79999196-79999429; Gene: ROBO1 (Intergenic)
  source 1..234: mol_type = genomic DNA
cggggggaacattgatgtgttttagaacagtagcatacacttgagctaaagaacaaggacaaagagcacattagatgtgccacgcaggaggtcagcatagcaacgaaaaagagctagggttccagttctggcactgttaacagcaggcatatcttcctgcttaatttgatcatcccagtcagcgtatgcattggatacccactacaatacttaccaatctatggagggtaatcg

SEQ ID NO: 1248 - DNA, 250 bp, Homo sapiens
  misc_feature 1..250: note = U/M: U (0.15:0.86) in Pancreatic Alpha cells
  misc_feature 1..250: note = source = chr15:36621859-36622108; Gene: C15orf41 (Intergenic)
  source 1..250: mol_type = genomic DNA
cgtgtttaacatcattatattgattttcaccaaggccactgagtcatctgacacagctttccagggtgctctctccattcgcatctgcctgagttctttgagatactgccctatgtcaacccacatataatgctgacacttgctattttatctcaagcaccgattcacacaacgttaaagctgataatttttttttatgtagttgtatactcttgattcttgatttctacaactgaagtgctgtgctacg

SEQ ID NO: 1249 - DNA, 379 bp, Homo sapiens
  misc_feature 1..379: note = U/M: U (0.2:0.91) in Pancreatic Alpha cells
  misc_feature 1..379: note = source = chr15:91509125-91509503; Gene: PRC1,LOC100507118 (TTS,promoter-TSS)
  source 1..379: mol_type = genomic DNA
cgacagagtgagactcaaaaaaaaaaatcacactcctgactaaaaatttccaggaggtccttttagttttttgtgtttgtttttcacacacagaccaaccaactaaaaagtgactggggaaaaaaaggaaacaccacactatatctttttgaaatgtaagtatacagattttaatttatttttaagaataattgtatattttaaaaacaggacacgtactgtatgagtaaacagcgtggctaacaccaagtccacactggtaagcttttgagaaccatttacactatgttgacagtagtactgctgcaggcagacagcggaagaataaataatagtgcttcaagaagagtagtgattgagaggataggtaaagagggcg

SEQ ID NO: 1250 - DNA, 470 bp, Homo sapiens
  misc_feature 1..470: note = U/M: U (0.17:0.88) in Pancreatic Alpha cells
  misc_feature 1..470: note = source = chr1:61411507-61411976; Gene: NFIA (Intergenic)
  source 1..470: mol_type = genomic DNA
cgttaccatgaaaaggcttttattgggaagcatgttgggaatctctggtgcataaatctctcagaatgcaagcaaagactagcttattgcctactttttgatgacttttctttcacgaacaaaccgaaagggccacaagttgatcacaatagtttcctcactcaacagaaagaaatgaatacttaatgttaaaatccaattcagttactgttggttgggcatctgctagcaaaaggaccgggatagatggagcagtgaagtgcaaagatatccacaagttgtcaatctaggtagagttgcaggcatttcattctttgcttatttacttaactagtatttatttaacatatgctatgagccaggcacttttgctaagccctggtgatagacatatacatacaggcacggtccattcctaaagtgagtttgtagtgctataggtaaggcaaatattaaataatgggtatacg

SEQ ID NO: 1251 - DNA, 162 bp, Homo sapiens
  misc_feature 1..162: note = U/M: U (0.15:0.85) in Pancreatic Alpha cells
  misc_feature 1..162: note = source = chr11:61368781-61368942; Gene: RPLP0P2 (Intergenic)
  source 1..162: mol_type = genomic DNA
cgtctctactaaaaatacaaaaattagccgggagtggtggcacatgcccctgtaatcccagttactcgggaggctgaggcagcagaatcgcttgaacccaggaggtggaggttgcagtgagtcaagatcactccactggactctaacctgggcaacagagcg

SEQ ID NO: 1252 - DNA, 338 bp, Homo sapiens
  misc_feature 1..338: note = U/M: U (0.17:0.87) in Pancreatic Alpha cells
  misc_feature 1..338: note = source = chr3:31857960-31858297; Gene: OSBPL10 (intron)
  source 1..338: mol_type = genomic DNA
cgtgcattaaaattacacaggggaacaagacagtccaggatgcttgtgatgggtaatttcatgtgtcaacttagctgggcacagtgtccagatatttggtcaaacattaatctgggccaggcacagtagctcatgctgttagtggctccctaaggtgtcccttttcttcctggaaacatctgtggctgcagcaccttggcctgagttctcacctgcatccaggaagaatgaggtacgcagacaagtgaagggtgaacaagacgaagatgagctttattgagtgttacaacagctcagaggagacccgtagcgggtgactcctttctgtaggcaggccg

SEQ ID NO: 1253 - DNA, 354 bp, Homo sapiens
  misc_feature 1..354: note = U/M: U (0.15:0.84) in Pancreatic Alpha cells
  misc_feature 1..354: note = source = chr7:153394633-153394986; Gene: DPP6 (Intergenic)
  source 1..354: mol_type = genomic DNA
cgtagctgcgtgtcagctttattccaggcactagggatacagagatgtcaaggacaagacaaatacgtcattggctttatgggacttacatttcagtgtgttgtggggtagggctatgtgggtgtgggtgtgtgatttgcactctcagctatgccctagttattcttactgcttcaggaaaaggaccgcacattttatggaataaataacaataaaatatgtcaattatggagtgtatatcaagtgcaatgatctatgctagttgctttcaatctgttattttattaattattgtaacaattcaaatctttggcataaattttgtatcattaacacattagacaacagtcgccg

SEQ ID NO: 1254 - DNA, 106 bp, Homo sapiens
  misc_feature 1..106: note = U/M: U (0.25:0.93) in Pancreatic Alpha cells
  misc_feature 1..106: note = source = chr21:45380092-45380197; Gene: AGPAT3 (intron)
  source 1..106: mol_type = genomic DNA
cgccaacaccagagcatgctgacgcgtatttcagcatgcatccctgaaagaaaaggtgtcctgcctccctgcgtatcaaacacatgtgtagctgtgtgtctgtccg

SEQ ID NO: 1255 - DNA, 108 bp, Homo sapiens
  misc_feature 1..108: note = U/M: U (0.23:0.91) in Pancreatic Alpha cells
  misc_feature 1..108: note = source = chr11:33576001-33576108; Gene: KIAA1549L (intron)
  source 1..108: mol_type = genomic DNA
cgacacagttgtatccaggtgattatttgatttcatcaagctctctcttcctgtcttcgttggctttgctctgcacgggcattgtccgtggctcccatggggtggccg

SEQ ID NO: 1256 - DNA, 115 bp, Homo sapiens
  misc_feature 1..115: note = U/M: U (0.23:0.91) in Pancreatic Alpha cells
  misc_feature 1..115: note = source = chr18:45667935-45668049; Gene: ZBTB7C (Intergenic)
  source 1..115: mol_type = genomic DNA
cgggggggaaagtaacccataatctcatcacactaggtaggctaatatttatggtgtcacggtggcgtgggcagcgggtcagtctttctctcgctggagtgaacatttcacaccg

SEQ ID NO: 1257 - DNA, 336 bp, Homo sapiens
  misc_feature 1..336: note = U/M: U (0.14:0.82) in Pancreatic Alpha cells
  misc_feature 1..336: note = source = chr10:100086848-100087183; Gene: LOXL4 (Intergenic)
  source 1..336: mol_type = genomic DNA
cgctgtggagagatggatgtcagggaaggggggaaggtatggatggagggcctctcttccttgcttccagggaactggtaaaagacagatgaaatgttcttgaccagaaatgaagcccacctttggtttccattccaaggagtaaatctcccgggaagtgaacaccgtttctcacatgaggcaccccgatgggaggtgggaagagtctggtgaggatgtggaaaacaagcaaaggagtgagcagcaccttctcctccgggtgacagtggcacatgtctgtgcagaagcacactcccatcctgggagagctttgggagggacagattcagctgtccg

SEQ ID NO: 1258 - DNA, 341 bp, Homo sapiens
  misc_feature 1..341: note = U/M: U (0.2:0.88) in Pancreatic Alpha cells
  misc_feature 1..341: note = source = chr1:201671557-201671897; Gene: NAV1 (intron)
  source 1..341: mol_type = genomic DNA
cgatctcagctcactgcaacccctgcctcccaggttcaagcgattttcctgcctcagcctcccaagtaggtagctggggttacaggagtgcaccaccatgccaagctcattttgtatttttagtagagatggggtttcatcatgttggtcaggctggtcttgaattcctgacctcaagtgatccaccagcgtcggctcccaaatgaactgtacattttaaaagggtgaattttggtatgtgaattctctctctctctctctctctctctctctctctctctctctctctctctctctctctctccccattctgactagtggcgacaatattggactatgcg

SEQ ID NO: 1259 - DNA, 399 bp, Homo sapiens
  misc_feature 1..399: note = U/M: U (0.2:0.88) in Pancreatic Alpha cells
  misc_feature 1..399: note = source = chr10:75598299-75598697; Gene: CAMK2G (intron)
  source 1..399: mol_type = genomic DNA
cgttgtcactattgctgccaccctcctgccctttgggtagccattcctccccaagctgtgttccatctctctccagtgagaacaggggtccttccattacgagaattctgactccagaaaaagacctttgatcttatcttgtcgtgctgggtttgaatgttgttttttaaatgtgctgactcctgtgcctgaccgcctactgtctaagtgctttccattcaccagccagctctcaacgctggttgcccactaggatcacctgggagcttaaaaaaagcgtactacctatcttatccctaagggtctgattttattgtctggggtggggtcctggcattaggacttcttacgagctcccaggtaacagctgtactgcacaggcagggctgagagccttcg

SEQ ID NO: 1260 - DNA, 149 bp, Homo sapiens
  misc_feature 1..149: note = U/M: U (0.25:0.92) in Pancreatic Alpha cells
  misc_feature 1..149: note = source = chr10:99427111-99427259; Gene: PI4K2A (intron)
  source 1..149: mol_type = genomic DNA
cgcatgtcacaacgcccggctaatttttgcatttttagtagagacagggttttaccatgttgaccaggctggtctcgaactcctgacctcaagtgatgcacctgcctctgcctcccagagtgctgggattacaggcgtgaggccctgcg

SEQ ID NO: 1261 - DNA, 278 bp, Homo sapiens
  misc_feature 1..278: note = U/M: U (0.23:0.9) in Pancreatic Alpha cells
  misc_feature 1..278: note = source = chr7:55250136-55250413; Gene: EGFR-AS1 (intron)
  source 1..278: mol_type = genomic DNA
cgctcacccaactccaggcagatgtaaaaggtgacctacaagaagacaaacaaaaacatctggagcgctcttatgccagcatctgcccttgacaccaccaggcaggctgttgctgggagccgtggtgcttgggtaagctccttcccatggcagagctcctgggacgcattgtagaagcagggaccacctcccaggataaccagatagcagcacaccctgcacagccccttttactccagcatcatcgggcattgatatctcagctgcagccacaggcg

SEQ ID NO: 1262 - DNA, 190 bp, Homo sapiens
  misc_feature 1..190: note = U/M: U (0.23:0.89) in Pancreatic Alpha cells
  misc_feature 1..190: note = source = chr10:421964-422153; Gene: DIP2C (intron)
  source 1..190: mol_type = genomic DNA
cgcctgcagtcatgtaacggcggtaacatttgttgaattcttactatgtaccaggcgtgctttcaagctctgtgtgtgtatgaacccactcaatgctcacacgggcctctgacgtagctaactgctgtgattctcatctacagacgaggaatcctcaaggtgaagccctgcccacatgacaaagcaggcg

SEQ ID NO: 1263 - DNA, 216 bp, Homo sapiens
  misc_feature 1..216: note = U/M: U (0.22:0.88) in Pancreatic Alpha cells
  misc_feature 1..216: note = source = chr6:148307348-148307563; Gene: SASH1 (Intergenic)
  source 1..216: mol_type = genomic DNA
cgattgttcctcttcctgcactaaaatgtaacgtccataaggtcagaagctcacggttgctgtgatgagtttctgccatctctcagtctcatacagctagtatggacccaagctaggcaactccaaggctcacataccccccaaggtggaggacagagatggagcacagtcctttcatttcactttcccgctggcagagcagatggaatcattacg

SEQ ID NO: 1264 - DNA, 332 bp, Homo sapiens
  misc_feature 1..332: note = U/M: U (0.23:0.89) in Pancreatic Alpha cells
  misc_feature 1..332: note = source = chr11:68358417-68358748; Gene: PPP6R3 (intron)
  source 1..332: mol_type = genomic DNA
cgtagacacttgacttcaaagagaaggctgcagtttgacaccaacccactgcctttgactcctttgtattgccaggagagaaatgtggactgggtcagggcaagcccctcgttactaggcatttctgtggaaacaccgagacagtcgtgtcacctgaatggagacagtttattgattttatgttgactagcatgagagaccactggcttatttgctgatggagtaaggtaggaactgctgatttgagccattgaaggttatcactgctcagctggactagtaaaagcaaataagtacggttgcttttccttgctaggacagacctgggaccg

SEQ ID NO: 1265 - DNA, 404 bp, Homo sapiens
  misc_feature 1..404: note = U/M: U (0.26:0.92) in Pancreatic Alpha cells
  misc_feature 1..404: note = source = chr17:945834-946237; Gene: ABR (intron)
  source 1..404: mol_type = genomic DNA
cggatggatggacgaagagacgtggcacctacatccacggacagacagaaggacaaacagacgtggcacctacatccacagatggatggataaatagacgtggcacctacatccacggatggatggatggataaacagacatggcacctacattcacggacggatggatggataaacagatgtggcacctatatccacagacggataaacagacgtggcacctacatccacggacggacgggcagataaagagacgtggcatctacatccagggaaattgtatccagcctcagaaagggaggaaattcagacacacaacggcatatgggtgaagctcaaggacatgaggaggacaaatgctgtctgattccacctacgtaaggttcccagactggacaaattcg

SEQ ID NO: 1266 - DNA, 236 bp, Homo sapiens
  misc_feature 1..236: note = U/M: U (0.24:0.89) in Pancreatic Alpha cells
  misc_feature 1..236: note = source = chr3:100536916-100537151; Gene: ABI3BP (intron)
  source 1..236: mol_type = genomic DNA
cgtacattttacaatttgacaatttactaaaaacatcattccttgaaacaaaaaaatcaatgttacacagatcctaataaaatgaaaaataatatgagcaaagaaacactgtgcttccctacaattgatgaggaataagcagcataaataagggatagagattcgtgcttgaaatgcagcttaaaatggtcaatgctctttaaacgaatgcacatgatcgcatgacacattgaacg

SEQ ID NO: 1267 - DNA, 255 bp, Homo sapiens
  misc_feature 1..255: note = U/M: U (0.23:0.88) in Pancreatic Alpha cells
  misc_feature 1..255: note = source = chr9:140718792-140719046; Gene: EHMT1 (intron)
  source 1..255: mol_type = genomic DNA
cgtctggaccatgttttgttcctttgatctatttgctgatcctcaaacaatgacacattctcttgactgatagtaaagcttggagccaggtagtgttaggtcctcatactcctcatactcggtttttttttcaaaactgttttgctcctccatgtcctttgcatttccatagacaattgagagcccgggcgtcagtacaggccaaggctgctggaatttttgctgagactgcactaaatctgctggccattatcg

SEQ ID NO: 1268 - DNA, 333 bp, Homo sapiens
  misc_feature 1..333: note = U/M: U (0.2:0.85) in Pancreatic Alpha cells
  misc_feature 1..333: note = source = chr16:66577370-66577702; Gene: TK2 (intron)
  source 1..333: mol_type = genomic DNA
cgggcagctccaatacataagacaaactgtcccctgagaacacattagacatcctccaggggcacacacagagaggggcccgacctgctgcacagaggcctgttcctttgcactcaggctggaagcacccagagaaacctgggcaacacaggtaacttacccaagtgccagacttggctagggaagaatcagaattagaattcacatccaggccccttctcacgactcctgatggagcctcagtcacacctcacataaacaccaggtcacagtgggccgtctcacccgaccccactaaagtctccccagcaactagaactctgtcagctggcg

SEQ ID NO: 1269 - DNA, 66 bp, Homo sapiens
  misc_feature 1..66: note = U/M: U (0.22:0.86) in Pancreatic Alpha cells
  misc_feature 1..66: note = source = chr4:40176314-40176379; Gene: RHOH (Intergenic)
  source 1..66: mol_type = genomic DNA
cgggaggctggggcaagagaatcgcttgagcctgggaggcaggggttgcagtgagccgagatcgcg

SEQ ID NO: 1270 - DNA, 152 bp, Homo sapiens
  misc_feature 1..152: note = U/M: U (0.27:0.9) in Pancreatic Alpha cells
  misc_feature 1..152: note = source = chr10:27024210-27024361; Gene: PDSS1,PDSS1 (exon,intron)
  source 1..152: mol_type = genomic DNA
cgcctatcagtacggaaaaaatgtaggaatagcttttcaggttagtatgctttttatttgtaagaatggtggcgtagtgatacagtcagcattctcccctagtgtgtaatcgtcaaaatagtaagaacgatggcagcagtgttggcatggcg

SEQ ID NO: 1271 - DNA, 386 bp, Homo sapiens
  misc_feature 1..386: note = U/M: U (0.28:0.9) in Pancreatic Alpha cells
  misc_feature 1..386: note = source = chr3:8687845-8688230; Gene: SSUH2 (intron)
  source 1..386: mol_type = genomic DNA
cgtgtatattttaccctaaacatctgtgtgagcatccattgctgtatctgtttaggtgtgtgtttgcatgtgtgtatatatttgagccaaaacatgataaatgatagattaatgacaaaatgcttgcaacttaactaaaacaatataccactattacatcttgagtactttttaagcgcaatatatgcttacctaaaaccctcctcagcatttaaaaggaacaaccacagaaaattctttaaatgtcaaattgaacaaaatgttgaagagaattaagcattacaaggacccgaaatcttgaggccgcaaaaatgcagacaacgctgagctgtattttcgtaaccaggaagtgctgatcagcagaaatgacagtccttttctgcacg

SEQ ID NO: 1272 - DNA, 434 bp, Homo sapiens
  misc_feature 1..434: note = U/M: U (0.19:0.81) in Pancreatic Alpha cells
  misc_feature 1..434: note = source = chr5:76171518-76171951; Gene: S100Z (intron)
  source 1..434: mol_type = genomic DNA
cgtgttacctggggttagggtttctaagtggtaaaaattgtatttttgactttcaccaattaacattctggtgcggcaaagatgtagctaattatagccagagttatagttataactagttacagctagttatacctggagcttggtccagctgtctgtaaattatgtattgggccagaggtgaaggggtactttaccttcagaggtggggtacttcatgctatggtggcaaattttctagtgaatggcaaatacttagagagctttgtcagccgagcacagactgattgggattgatagaaggatgtgtttggccagtgaccagtggggtagcaaacagattcatttctcaaaatagccaggagtttgagagattaatatatgaagccgtacattgtagcgtttggggcctcctccaaggaaaacacttcacg

SEQ ID NO: 1273 - DNA, 152 bp, Homo sapiens
  misc_feature 1..152: note = U/M: U (0.22:0.83) in Pancreatic Alpha cells
  misc_feature 1..152: note = source = chr6:159100930-159101081; Gene: SYTL3 (intron)
  source 1..152: mol_type = genomic DNA
cgatgttgtccccctgtctgattagctcagtcgactgtagcgtctcagatatggatattttgggcccagtggtaacgggctggagcatgtgagagaggagatgagctgaaatgggtcactcaccagaaaggcaattctgcaagtaaggtgcg

SEQ ID NO: 1274 - DNA, 335 bp, Homo sapiens
  misc_feature 1..335: note = U/M: U (0.27:0.88) in Pancreatic Alpha cells
  misc_feature 1..335: note = source = chr6:168668214-168668548; Gene: DACT2 (Intergenic)
  source 1..335: mol_type = genomic DNA
cgaaagttgatttcatgtagattgaaggtgtaaatgtggagggtaaaacactaaagaatcaggaagaaaacacaggcctgtcttcaagaagatgggcagacaaagatttttaaacattattttttattttaagttctgggtacaagtgctgaatgtgcacgtttgttacataggtaaacatgtgccatggtggtttcacgcacctctcagcccatcacctagatattaagcccagcatccattatctatttttcctgatactctccctccctctgtcccctctgacaggcctcagtgtgtgttgttccccttcctgtgtccacatgttctcgtcg

SEQ ID NO: 1275 - DNA, 249 bp, Homo sapiens
  misc_feature 1..249: note = U/M: U (0.31:0.91) in Pancreatic Alpha cells
  misc_feature 1..249: note = source = chr12:109959317-109959565; Gene: UBE3B,UBE3B (exon,intron)
  source 1..249: mol_type = genomic DNA
cgagtttgtggggaagatgctggggaaggctgtgtatgaggtaggaacgttaagaaacagagaaatgtaaaataaaatgttaacggtaccatgggcttcttcacatacacatatgtgatcaggcttggccatgtaaactgtcactaggatacaagcgaggacaggggcaggaaccaaggtttgttgtacaccagtgctaggtactttgcctgtggcatctcatctcatcccatcgacagccctgtgacg

SEQ ID NO: 1276 - DNA, 160 bp, Homo sapiens
  misc_feature 1..160: note = U/M: U (0.3:0.89) in Pancreatic Alpha cells
  misc_feature 1..160: note = source = chr17:28538035-28538194; Gene: SLC6A4 (intron)
  source 1..160: mol_type = genomic DNA
cgccccggcctgtaggcgccataattgggccaagggacagtgcttaataacagttcacatatgtgagccttgggcctcataagcgcctggcgcttgacccactttatcccattaatgactcgaatgtaccagagggtggtaaatgccgaggagtcagccg

SEQ ID NO: 1277 - DNA, 188 bp, Homo sapiens
  misc_feature 1..188: note = U/M: U (0.25:0.83) in Pancreatic Alpha cells
  misc_feature 1..188: note = source = chr17:5756865-5757052; Gene: LOC339166 (intron)
  source 1..188: mol_type = genomic DNA
cgttggttttctgtaagtgcttgatgggtttttatgtgtcctcacttccaggacacctgagcactgtgtttcctgtggcccatctgtggctattatgaaggaggggtggggcacactcaggagtgacggcttgatcgggagctcgttttcctgagcgtgccatccttcctcgtggtcagtgtggtccg

SEQ ID NO: 1278 - DNA, 448 bp, Homo sapiens
  misc_feature 1..448: note = U/M: U (0.3:0.88) in Pancreatic Alpha cells
  misc_feature 1..448: note = source = chr1:94595612-94596059; Gene: ABCA4 (Intergenic)
  source 1..448: mol_type = genomic DNA
cggagcttgcagtgagctgagattgagccactgcactccagcctggatgtcagagcgagactgtctcaaaaaaaaaaaaaaaaaaaaaaagctaaatcaagttgttatcaaaaatgagaggcaggttgttattccaaacacatttaatacactcacttccaaagctgtttagagttttgccgatttgacacccagaaaacccacgggagtccagagattttacattttctgggcattaagtgcaaagtacttgccagataacagagttttagggggttgccaaggagtgttgcatagcagaccgtgagactgggctgttatcacatgagccgcagtgaagtgccggctgagtacagagtagggtaacacctgagaagcttcattatcagggccagatctgtcactctgagtctcagggcatcctgagctcagctgtggttgtgtatcg

SEQ ID NO: 1279 - DNA, 42 bp, Homo sapiens
  misc_feature 1..42: note = U/M: U (0.29:0.86) in Pancreatic Alpha cells
  misc_feature 1..42: note = source = chr2:195176961-195177002; Gene: SLC39A10 (Intergenic)
  source 1..42: mol_type = genomic DNA
cgcgtggtctccgtgttgtatgaaataggtaaatacgcctcg

SEQ ID NO: 1280 - DNA, 280 bp, Homo sapiens
  misc_feature 1..280: note = U/M: U (0.36:0.92) in Pancreatic Alpha cells
  misc_feature 1..280: note = source = chr1:22439457-22439736; Gene: WNT4 (Intergenic)
  source 1..280: mol_type = genomic DNA
cgccagtagtggagtgagggaagtggagggtctgtgggactgaggaggggctctgataacatattccatcctgaccagcaggctgaagccttaggttccggccttgggcaagtctcttcccttctgtaggtctcagtctcacccgtaaaatagcgatgaagcctacacctgcctcttggttggtttatctgacaggaaatgtttgtgttcacttgcttgcctatgaacgtgacatgggataatgctagtaaatggtgctttagtgcaggcctgacccacg

SEQ ID NO: 1281 - DNA, 331 bp, Homo sapiens
  misc_feature 1..331: note = U/M: U (0.36:0.9) in Pancreatic Alpha cells
  misc_feature 1..331: note = source = chr11:33534024-33534354; Gene: KIAA1549L (Intergenic)
  source 1..331: mol_type = genomic DNA
cgtggtgcaatctcggctcacaggaaccttgatctcccaggctcaaatgatcctccgacttcagcctctggagtagctgggactacaggtacctgctaccacccccagataacttttatattttttgtagagatggggttttccatgttgccaggctggtctccaactcctgggctcaagtgatccaacctcctcggcttcctgaagtgctgagattacaggcgtgagccattgcgcccggcccctgctctaggtaatattcgaaatccttttagtgcattatctccttcagttctcacatcagttacatgaacaaggtagttcctaggcg

SEQ ID NO: 1282 - DNA, 403 bp, Homo sapiens
  misc_feature 1..403: note = U/M: U (0.31:0.85) in Pancreatic Alpha cells
  misc_feature 1..403: note = source = chr8:9448608-9449010; Gene: TNKS (intron)
  source 1..403: mol_type = genomic DNA
cgtcatgcctttgcatgtggctatccagttttctcatttagttgttcataatattcctttataatcttttatttctgtaagcttagtaataatttactccctttcgtgtatgattctagttaatagagttgtcttttattttttccctaggtccatttggctaaatgtttgtgagtttatattgtgtgtgcatatcgttagtttttttgttgttgtatggtgtttcattgtatggatgtagcacagttggtggttgtttagcttgtttgcagtttgtagctgttataacgctggatgtatgtctcagcgtggacatgttttttcacttctcttggatggatccctgagagtgggattgctgggtggaatgctaagtgcacattggactgtaaaagaagctgcg

SEQ ID NO: 1283 - DNA, 425 bp, Homo sapiens
  misc_feature 1..425: note = U/M: U (0.17:0.94) in Pancreatic Alpha cells
  misc_feature 1..425: note = source = chr18:74659093-74659517; Gene: ZNF236 (intron)
  source 1..425: mol_type = genomic DNA
cgtgtggtcttttgtgactggcttttttcattccttagagtatttccaaggctcctccatgctgtagcatgtaccagaactttgtaccttcttattactgaacaatattcccttataccacattttcatttgtgcatttatcggttgatgggcatttgggctgtttccattttttggctatgggtaattctcctgtggacatttctgtacaaggcttctgttttcacttctcttgggttgctgggttacatggtgactccacggttcactttttgaggagctaccagcttgttttccaaggtagctgcaccataaaagatcttttaaattattgcttgttttgctaaagttacaacttctgaaatagtactaatcttttgccagggtcagcagttcccagcgctcctcacggatccctctctctc

SEQ ID NO: 1284 - DNA, 491 bp, Homo sapiens
  misc_feature 1..491: note = U/M: U (0.32:0.93) in Pancreatic Alpha cells
  misc_feature 1..491: note = source = chr16:3795172-3795662; Gene: CREBBP (exon,intron)
  source 1..491: mol_type = genomic DNA
cgctgaattcttgctgacaacaatgaatgagatgcagtagccactgcaactgccccgccactggctctgtgcagaactgccctccaggccaggggaaacaactcaccctgaaggccaaatgatgtcatagtgcagaacgcaaatctgatgcatcttccggccacactccttgcaatcaacgaaactaggaggcaaagaaggcgcactgttaaagcacacggaaccacaagaccagagtcacttgtagaagtctgtgtgtgcgtccacaccttgttctctgggttactttgagtagtgctgacattaatgcgtgtgttggctgattcagctatattttacaatgcatccgtatgatatcttctacaggaaaaagctttcttcttttgtttgtacaagcgcttcattcctcttttctcccaatctccctttgcaaccagaaaggaaactttactttttaaaaattgctgcgacaaatacatatttcacaggcc

SEQ ID NO: 1285 - DNA, 164 bp, Homo sapiens
  misc_feature 1..164: note = U/M: U (0.09:0.86) in Pancreatic Alpha cells
  misc_feature 1..164: note = source = chr10:128092762-128092925; Gene: ADAM12 (Intergenic)
  source 1..164: mol_type = genomic DNA
cggttgacatttgtgtaatggtggattgagaattcaccggtaggttaaaataacctgagtgcctgtggagataattgtaaccaccagcaattaaactgaaaagcccgtctttcagacaaatatttggctttcattgaacttccgcaaaatgatttcaaccagcg

SEQ ID NO: 1286 - DNA, 112 bp, Homo sapiens
  misc_feature 1..112: note = U/M: U (0.25:0.94) in Pancreatic Alpha cells
  misc_feature 1..112: note = source = chr3:59793504-59793615; Gene: FHIT (intron)
  source 1..112: mol_type = genomic DNA
cgtgatggtttccgcaaacacaggagaaagaaacattaacaacgtgggccgtggaaaaggaattaaacttgtttggtttcatggagcaggtagataactagtgggtggatcg

SEQ ID NO: 1287 - DNA, 233 bp, Homo sapiens
  misc_feature 1..233: note = U/M: U (0.32:0.95) in Pancreatic Alpha cells
  misc_feature 1..233: note = source = chr18:74541752-74541984; Gene: ZNF236 (intron)
  source 1..233: mol_type = genomic DNA
cgtgcccctcgcagtcacaggccttccccgcactgtcctggcttctgatacgacatgttagctttacctgtttttgttttgctttttcttttttgagacggagtctcgccctgttgccaggctggagttcagtggtgcgatctccactcactgcaacctccgtctcccgggttcaagtgattatcctgcctcagccacctgagtagctgggattacaggcacgcgccaccacg

SEQ ID NO: 1288 - DNA, 72 bp, Homo sapiens
  misc_feature 1..72: note = U/M: U (0.01:0.94) in Pancreatic Alpha cells
  misc_feature 1..72: note = source = chr22:41269489-41269560; Gene: XPNPEP3 (intron)
  source 1..72: mol_type = genomic DNA
cgatgctttcaccatttaccgtttcatctctatcgtcaactataatggcagaagccaggtgcggtggctcac

SEQ ID NO: 1289 - DNA, 235 bp, Homo sapiens
  misc_feature 1..235: note = U/M: U (0.15:0.93) in Pancreatic Alpha cells
  misc_feature 1..235: note = source = chr14:34144321-34144555; Gene: NPAS3 (intron)
  source 1..235: mol_type = genomic DNA
cgtcatagctggcctgaaaccattgcactccggaggaccgggaaacccattagtgacctgggaaagagcttttgcttgtcctattgctgacatatctctccctgttgtatgtgcatgtaatgtagagcattaccactattcttaggagataaaatttagagcattagaggagtacagaggtaaggccagtccttaccagcaacttctgccccttcagacggcgcacaactcagac

SEQ ID NO: 1290 - DNA, 212 bp, Homo sapiens
  misc_feature 1..212: note = U/M: U (0.1:0.86) in Pancreatic Alpha cells
  misc_feature 1..212: note = source = chr20:31950133-31950344; Gene: CDK5RAP1 (intron)
  source 1..212: mol_type = genomic DNA
cgtatgtcagaagtcaacagaatgatatctccaaaatgtcaacctaaaagtcaacactcggtgaaaatatatttttaaaaggaaggtgaaataaagatcttttcagacaaacagaagctgagcagcatcactgccaaaagacctgcattacaagcaatgttaaaggaagcctttcaagcacaaacaaaacgatgcccagtggaaacgtgaac

SEQ ID NO: 1291 - DNA, 352 bp, Homo sapiens
  misc_feature 1..352: note = U/M: U (0.28:0.95) in Pancreatic Alpha cells
  misc_feature 1..352: note = source = chr13:113173833-113174184; Gene: TUBGCP3 (intron)
  source 1..352: mol_type = genomic DNA
cgtacaccatgtcttgtgctcctgttggatttactatgagaagaaagcaccattttctaagcatctgtgatatgctgcccagcacagggcaagggtgtcatgcgttttctccagcttaagcctagcagccctgcaaggctccccgctgcaagatgggcaaacggaaacccagatggtggagagggagcagatgtgctgaccaggcagtaacaagccacagagtggagttcctactcaggctgcccagtttccagaaagataacggctagctgtgcctgaaacaacatggaaaacactcgctagaacaccccggcccagtgggtcctcggtgccggggcggcgttcccaacac

SEQ ID NO: 1292 - DNA, 305 bp, Homo sapiens
  misc_feature 1..305: note = U/M: U (0.35:0.93) in Pancreatic Alpha cells
  misc_feature 1..305: note = source = chr3:12940907-12941211; Gene: IQSEC1 (exon)
  source 1..305: mol_type = genomic DNA
cggctgcagtggctcgaaaggctgaaactacaaagtatggcccgtgggtgactcgggcacagacctgccgcgtgcaggtctggccctggggagcgcatggtgtcaccacaacacagaagcgacaagagcacagctgagagtcatgtgatgccctggcagctcactggaccatgggaaggcagcgggggctccgccgggcactcgtcggctggggtcacacgggccacggtgaggacacaggggttctgctagcacatggctacatggaattacggtgatcactgctaccactcagaaaacaaaac

SEQ ID NO: 1293 - DNA, 62 bp, Homo sapiens
  misc_feature 1..62: note = U/M: U (0.06:0.91) in Pancreatic Alpha cells
  misc_feature 1..62: note = source = chr16:84553123-84553184; Gene: KIAA1609 (Intergenic)
  source 1..62: mol_type = genomic DNA
cgtggctctcctgtgcagcccgctctcccctgtccgtacgccgcagtaaaacctgtgtctcg

SEQ ID NO: 1294 - DNA, 110 bp, Homo sapiens
  misc_feature 1..110: note = U/M: U (0.01:0.84) in Pancreatic Alpha cells
  misc_feature 1..110: note = source = chr20:24570628-24570737; Gene: SYNDIG1 (intron)
  source 1..110: mol_type = genomic DNA
cgcttgtcagagctaacgtgctcgtcgcctgcctctcttccttgcaatgtcagctttacttttctccgttttactcactggctattagctgcggatggacatggggagcg

SEQ ID NO: 1295 - DNA, 237 bp, Homo sapiens
  misc_feature 1..237: note = U/M: U (0.16:0.93) in Pancreatic Alpha cells
  misc_feature 1..237: note = source = chr16:714186-714422; Gene: WDR90 (intron)
  source 1..237: mol_type = genomic DNA
cgtgcctagaggaaaccccgtgcgtgcctgttcctcggtcgctccctgcttcccgcctccccagcccctggcgaccgttgagtggctttctgtgtctgggtcttcccattcaggatattctgtaggaactggctcacctggcttctcaccctgagcatggtttccagggtcatcccagccgctgtgtgtgccaagccagtcatccctcttgatggccaaatactgttccattgtacg

SEQ ID NO: 1296 - DNA, 167 bp, Homo sapiens
  misc_feature 1..167: note = U/M: U (0.13:0.88) in Pancreatic Alpha cells
  misc_feature 1..167: note = source = chr5:35231999-35232165; Gene: PRLR (Intergenic)
  source 1..167: mol_type = genomic DNA
cgtccttattaaaacatagactccacctggttctgttagctgatgggagatgcatctttcacgtgcagaccgcacatgcttcctgtgatgattagggtatatttactttcattcatgggtgtccatgaaggtacgcaacttctatttattttcagaaccactgggcg

SEQ ID NO: 1297 - DNA, 168 bp, Homo sapiens
  misc_feature 1..168: note = U/M: U (0.15:0.87) in Pancreatic Alpha cells
  misc_feature 1..168: note = source = chr20:23637374-23637541; Gene: CST3 (Intergenic)
  source 1..168: mol_type = genomic DNA
cgaaatgtccagttacatgttagctgcaacccttaacaagcagaagtgaataatctattcggctactccacaacacagaatgtgtgcctatgtttcgtatgatagcacgaaagtaatgccttagaattactaatgactctgaagcctccagttattttaaaggtgccg

SEQ ID NO: 1298 - DNA, 239 bp, Homo sapiens
  misc_feature 1..239: note = U/M: U (0.08:0.79) in Pancreatic Alpha cells
  misc_feature 1..239: note = source = chr16:713945-714183; Gene: WDR90 (intron)
  source 1..239: mol_type = genomic DNA
cgggattgatttttccttgatgctgagtcccatcatccagttgcccctgggttgtttctttagaaacctgtctttagtatttggagatgacgatagccagcaaagaaagttgagtttgagacaggtgagggttgtttacttttctggaagcaggtttgctgaggtgtagtcgtcacagcacaagctccgtgtgtttcagggggtggcttttggcatattcagcagctttggaaaccccg

SEQ ID NO: 1299 - DNA, 266 bp, Homo sapiens
  misc_feature 1..266: note = U/M: U (0.17:0.88) in Pancreatic Alpha cells
  misc_feature 1..266: note = source = chr22:36375406-36375671; Gene: RBFOX2 (intron)
  source 1..266: mol_type = genomic DNA
cgaagtctgtggatggatggtcgcgttgtactaatattgatttcctgatttggagatctctgccagttatataggaaagtcctatttcggggaatacacattgaagtgtttgggagtgaaggaatatcacatctgcagcttgctctcaaaaaaagctcagaaaaggcacaatgaaaaagggtatgtatgtacacaaaccccacacacaaacacacagagtgagcaatgaagcagatgcagtgaaatattaacaactggggaatccg

SEQ ID NO: 1300 - DNA, 162 bp, Homo sapiens
  misc_feature 1..162: note = U/M: U (0.22:0.9) in Pancreatic Alpha cells
  misc_feature 1..162: note = source = chr17:2539854-2540015; Gene: PAFAH1B1 (intron)
  source 1..162: mol_type = genomic DNA
cgcaaatttttgtatttttagtagagacgagatttcaccgtgttggccaggctggtcgcaaactcctcacctcaagtggtctgcccacctcagcctcccaaagtgctaggtttgcagacataagccaccacgcctggcctcagggctcatatttgaaacccg

SEQ ID NO: 1301 - DNA, 411 bp, Homo sapiens
  misc_feature 1..411: note = U/M: U (0.23:0.89) in Pancreatic Alpha cells
  misc_feature 1..411: note = source = chr22:29678381-29678791; Gene: EWSR1 (intron)
  source 1..411: mol_type = genomic DNA
cgcaggatggaaacaagcccactgagactagtcaacctcaatctagcacagggggttacaaccagcccagcctaggatatggacagagtaactacagttatccccaggtacctgggagctaccccatgcagccagtcactgcacctccatcctaccctcctaccaggtcagtctactttttgtggcaaaacaaaaacagtgacaaaacagtttttttcaggttgttgaccagcttgctttgacttcttcagctaaggtatgttatctgactgtcgcagtgataagtcatctgaccatacttggttacattaaagcctgagatctagggtcccatagtgttgcctggcagctaataactattcttttttctttttttttttttttcccccgagacggagtctctctctgtcg

SEQ ID NO: 1302 - DNA, 348 bp, Homo sapiens
  misc_feature 1..348: note = U/M: U (0.25:0.9) in Pancreatic Alpha cells
  misc_feature 1..348: note = source = chr22:38489645-38489992; Gene: BAIAP2L2 (intron)
  source 1..348: mol_type = genomic DNA
cggaaatcaatattgcaatcagatatcgcttcacacctgctaggatggctattatcaaaaagacagtaacaaatagtagcgaggacgtgaaacaactggaaccctcataaactgctgatggacacggaaacactccggaaaacggtctggaagttccacaaacagttaaacatagagttaccatatggccccacaattctactcttatatacccaagagagatgaaaacatatgtccacatgaagactcgtacatggatgctcagcgcagcagtggtcatgacagccaaagagtggaaacaaccaggcgtccatcagctaacatctgagtaaatacatcgagtaaacg

SEQ ID NO: 1303 - DNA, 98 bp, Homo sapiens
  misc_feature 1..98: note = U/M: U (0.29:0.93) in Pancreatic Alpha cells
  misc_feature 1..98: note = source = chr22:30369649-30369746; Gene: MTMR3 (intron)
  source 1..98: mol_type = genomic DNA
cgtgatcttggctcactgcaacctccgcctcctgggtacaagcgattctcctgcctcagcctcctgagtagctgagattacaggcgcttgccaccacg

SEQ ID NO: 1304 - DNA, 237 bp, Homo sapiens
  misc_feature 1..237: note = U/M: U (0.29:0.92) in Pancreatic Alpha cells
  misc_feature 1..237: note = source = chr6:168709994-168710230; Gene: DACT2 (intron)
  source 1..237: mol_type = genomic DNA
cggggcagacgggaatgcgtttagacacagggtgcagggcctcatttgcatttagacacaggcgtggggcccgtctgcatctagacaccgcacagggccgtttgcgtgtagacacagggtgcggggccgtttgcgtgtagacacagggtgcggggccctatttgcgcctgcagcgcggccccctcagcctgttctgatcctgcccgttgcgggagagtgcatgggcagggagaatcg

SEQ ID NO: 1305 - DNA, 461 bp, Homo sapiens
  misc_feature 1..461: note = U/M: U (0.3:0.93) in Pancreatic Alpha cells
  misc_feature 1..461: note = source = chr4:40161659-40162119; Gene: RHOH (Intergenic)
  source 1..461: mol_type = genomic DNA
cgaattcctgatcttaggtgatccatccgcctcagcctcccaaagtgctgggattacaggtgtgaacaatcacacccggccagggaattttattcggggaggattgctgtatatgatcctgttctagcctcaagtaggaaaaaactaaatgacacggactagcttaataagtgctaatggcaggaagtacattagtcaaaacatgtttttggcattgctacattagcccgccctatttaatataggatatatgtacagatggtctcccacttaggatggtttgacgtatttttcgattttgtgatggtgtgaatgccgtatgcgtttagtagaaaccatccttcaaagcatgaatgttgatttttcttgtgctggtgatgggctagtgatatgtggtgcaatactcgcctgtgatgttgggcagtggagcgagctgcagctcctagtcagccacgctaacg

SEQ ID NO: 1306 - DNA, 427 bp, Homo sapiens
  misc_feature 1..427: note = U/M: U (0.26:0.88) in Pancreatic Alpha cells
  misc_feature 1..427: note = source = chr9:91940837-91941263; Gene: SECISBP2 (intron)
  source 1..427: mol_type = genomic DNA
cgtatgatcagcaaaagtttgacagtgaaagggctgatggaactatatcatctgagataaaatcagctagaggttcacatcatttgtccatttacgctgagaatagtttgaaatcaggtaaaaataaccaacaatgtagtataatgcgagcctactccttgtgccccagaaacattcctgctatgtatacagctgtttctatgggcttgttcattgtgactactccaagaaatgagacctgggtctgacacagcttagggcgtcagacttcctgagcaattctagaggtatttcttcccagggatgggattattatttggtacctgttgcattgtgggatcttaagtgcctataatttgtattatttggtatatacatttttctcttttcattgacttcactcataaaccatctggtacaagggacg

SEQ ID NO: 1307 - DNA, 220 bp, Homo sapiens
  misc_feature 1..220: note = U/M: M (0.93:0.17) in Pancreatic Alpha cells
  misc_feature 1..220: note = source = chr2:240362418-240362637; Gene: HDAC4 (Intergenic)
  source 1..220: mol_type = genomic DNA
cgcccatcgtgctgcagggagggagggcgagacacatgtggatcaacaatgagatgggtcttggcctcgggacgggatgcccgggtcggggagtgcagctttgatctggcaggccggcctgaagaacaaagccggtctcctggtccctcctcggctgtgcccagctgcactcactctgaagctgaatcttggcagttgtgattcttctgctggcaaaacg

SEQ ID NO: 1308 - DNA, 67 bp, Homo sapiens
  misc_feature 1..67: note = U/M: M (0.88:0.13) in Pancreatic Alpha cells
  misc_feature 1..67: note = source = chr13:28492917-28492983; Gene: PDX1 (Intergenic)
  source 1..67: mol_type = genomic DNA
cgtttctgcaaagctgtctagtttttctaaaacccacggtggcgtttcgagaaacgtcctcatttcg

SEQ ID NO: 1309 - DNA, 128 bp, Homo sapiens
  misc_feature 1..128: note = U/M: M (0.92:0.19) in Pancreatic Alpha cells
  misc_feature 1..128: note = source = chr13:28492638-28492765; Gene: PDX1 (Intergenic)
  source 1..128: mol_type = genomic DNA
cgaagcaaatgctgagactataccggcctcccgcaagagaaggaatctgcagagaagtccacattcccgactggcttttttgtcttttaataaaaataaagagtcctcagaatagagcactcaatccg

SEQ ID NO: 1310 - DNA, 161 bp, Homo sapiens
  misc_feature 1..161: note = U/M: M (0.86:0.16) in Pancreatic Alpha cells
  misc_feature 1..161: note = source = chr16:77823862-77824022; Gene: VAT1L (intron)
  source 1..161: mol_type = genomic DNA
cggtgagacgagcctattccttcccatctgttttctagagccccccagtacatactgctctccaaagcagcagccagctcacgagcttctaggttagatcagaaacccaatatctggacctctctagaggcacgagaaatacaaacgagggtcccctcccg

SEQ ID NO: 1311 - DNA, 483 bp, Homo sapiens
  misc_feature 1..483: note = U/M: M (0.75:0.07) in Pancreatic Alpha cells
  misc_feature 1..483: note = source = chr12:52346100-52346582; Gene: ACVR1B (promoter-TSS)
  source 1..483: mol_type = genomic DNA
cgcgcacctcagactgtaggggaaggggtctctaacctttccttcaggtcctgcacttggcgtgtttcttcccctccctccactgcctccctaatgttctgggaaagggagtcacatttccccttcactcaatcccttgagttcagtggggcaatcccccctccgccctccggcactcatgccccgtggaggctatttggaggaagtgggacgaacaggcccctaaacctttttggagcctggctttggaatccctaaccctatggaaccgagttccccaagggttgatgtgaatctaggtgtatttgctttcctcctcgcctcccccaccctaccccggggggcccattcagttaatcactttgtggatgcctttcaggtgaaatcctggaacctgtctccaaacccccaagattatttaaagatcccaccactggactgtattcccggcccttggtcagtacttatttaccttcctacacg

SEQ ID NO: 1312 - DNA, 117 bp, Homo sapiens
  misc_feature 1..117: note = U/M: M (0.78:0.11) in Pancreatic Alpha cells
  misc_feature 1..117: note = source = chr17:72348064-72348180; Gene: KIF19,KIF19 (intron,exon)
  source 1..117: mol_type = genomic DNA
cgctgccgcggcgcatcggctccgaggagcagcgcgaggtgctcagcctgctgtgccgcgtgcacgagctcgaggtggagaacaccgagatgcagtcgcacgcgctgctccgcgacg

SEQ ID NO: 1313 - DNA, 265 bp, Homo sapiens
  misc_feature 1..265: note = U/M: M (0.76:0.1) in Pancreatic Alpha cells
  misc_feature 1..265: note = source = chr2:219910701-219910965; Gene: CCDC108 (Intergenic)
  source 1..265: mol_type = genomic DNA
cggttatttcaactggaagtccttccccttcttgatcctcctccctgggggaggaactgtgagcacagctaactgcttgttttcttctagtctaagcattgctccttttctgtggtagctctctctgctgccttcacctacgcagtctccagctggctctatgaccagcaccacggacagctcccgctggccaggccatcccccttcctccttcctccaaccttctatcgcctctttctccacttaccctaatgcagaaatcccg

SEQ ID NO: 1314 - DNA, 253 bp, Homo sapiens
  misc_feature 1..253: note = U/M: M (0.77:0.17) in Pancreatic Alpha cells
  misc_feature 1..253: note = source = chr5:3278065-3278317; Gene: LOC285577 (Intergenic)
  source 1..253: mol_type = genomic DNA
cgaagccttttggttgttctttttttttctaattaaggagggtatgcaaagtgattccacaacagtgatcccacaacaaagagacgtgtgctcccggggagaggaagtgcctctcagagccagcagaggtggggacagcccctgcatgcagtctgagtcctcttgcagggagcaggccaggccatccttccagctgcgagattatcccccctgggaggataaaatgggacaaattttcccttcagctttgccg

SEQ ID NO: 1315 - DNA, 171 bp, Homo sapiens
  misc_feature 1..171: note = U/M: M (0.6:0.12) in Pancreatic Alpha cells
  misc_feature 1..171: note = source = chr17:43044150-43044320; Gene: C1QL1 (intron)
  source 1..171: mol_type = genomic DNA
cgcctcaggaggaaaaactcccccgccccccagactgccttctttttggggaagctctgctacagtgggaaacagctccccaactcccggattttgcaaagggtgtcagattcgcccaatggtcccttctccagggcaggggaggcactgcagccagggctgtaagcaccg

SEQ ID NO: 1316 - DNA, 420 bp, Homo sapiens
  misc_feature 1..420: note = U/M: M (0.93:0.14) in Pancreatic Alpha cells
  misc_feature 1..420: note = source = chr10:26502618-26503037; Gene: GAD2 (Intergenic)
  source 1..420: mol_type = genomic DNA
cgtccttcttgggtggcccctgaagacaagagccctggcactcagccccttctgttatttctgttggtgtagggagaatttatggagggaggcaacagactccctccctaaatttttcctgcaccaatgttttaagtgagaatagaaaagagaatggcaaaggcttggtgaatgcttggttgcaatatttttgtgttcttccgtggttgtttcctctttttctttccatcttcccttctttctctgtcctttgacatttaagcacgggaaggacacaggaaaatgtgtgccagacactcttctttgggtcagcctgagacccatatgttggtaaaccagacacctaaggaaactgtccctacaagtcggaggattgggtctctcgcccctcatctgaggaagggccttccaaagcggccg

SEQ ID NO: 1317 - DNA, 61 bp, Homo sapiens
  misc_feature 1..61: note = U/M: M (0.96:0.14) in Pancreatic Alpha cells
  misc_feature 1..61: note = source = chr10:26501089-26501149; Gene: MYO3A (exon)
  source 1..61: mol_type = genomic DNA
cgggaaacctcccccgacgctctctctcggaactcccgcaccctcctttctcaccagcccg

SEQ ID NO: 1318 - DNA, 228 bp, Homo sapiens
  misc_feature 1..228: note = U/M: M (0.94:0.15) in Pancreatic Alpha cells
  misc_feature 1..228: note = source = chr10:26500832-26501059; Gene: MYO3A (exon)
  source 1..228: mol_type = genomic DNA
cgacttcaggaggctcctgcgcaaaacctcccagcgccggcgcctcgtccagcagtcctaaccgttcaacgaggcagtcaccgccgtcggaaggcgctggagcctgcggggcagcaggggccaagcaggcactctggggctggcaccagcaggcactgaagctgcggccctgatctccgcagaggctgcctgctgcgctcggccctcaagtgcccgggccggccttcg

SEQ ID NO: 1319 - DNA, 160 bp, Homo sapiens
  misc_feature 1..160: note = U/M: M (0.9:0.13) in Pancreatic Alpha cells
  misc_feature 1..160: note = source = chr10:26500635-26500794; Gene: MYO3A (intron)
  source 1..160: mol_type = genomic DNA
cgtttcgattgtgcctttcctaaatgtccgcggttggcagaacgtgggaggaagaggacccgcctaactcggggtaggtggggacgcgctgctcactgtggtgaggttgacacttgggccctgggtttcacttgcaggtgctgggcggcggagagccccg

SEQ ID NO: 1320 - DNA, 39 bp, Homo sapiens
  misc_feature 1..39: note = U/M: M (0.9:0.19) in Pancreatic Alpha cells
  misc_feature 1..39: note = source = chr11:31846812-31846850; Gene: DKFZp686K1684 (intron)
  source 1..39: mol_type = genomic DNA
cggaggccgattgccgaccagcgtagccggcccgcagcg

SEQ ID NO: 1321 - DNA, 226 bp, Homo sapiens
  misc_feature 1..226: note = U/M: M (0.76:0.06) in Pancreatic Alpha cells
  misc_feature 1..226: note = source = chr8:134585146-134585371; Gene: ST3GAL1 (Intergenic)
  source 1..226: mol_type = genomic DNA
cgcaacttttcggaggaatgttagaggaaagaggcacagtttgcctttggggtcattgcatccttccagcgccccttgctccagctggagagagatcaaccttttgcagtggaaggggagagtcccccagcctttgtttcatcagacggctgctgtagtacagggattcaggccagggcccgcatggccggacttcttggttcaaatcctgcactgccactcaacg

SEQ ID NO: 1322 - DNA, 301 bp, Homo sapiens
  misc_feature 1..301: note = U/M: M (0.79:0.09) in Pancreatic Alpha cells
  misc_feature 1..301: note = source = chr19:41025447-41025747; Gene: SPTBN4 (exon)
  source 1..301: mol_type = genomic DNA
cgggccggcggcgccctgcagtggcgtcttagcggcctagaggccgctctgcaggcgctggagccgcgccaggcggcccttctggaggaggcagccctgctggctgagcgcttcccggcgcaggcggcgcggctgcaccagggcgcggaggagctgggcgccgagtggggcgcgctagctagcgcggctcaggcctgcggcgaggcggtggcggcagcagggcgcctgcagcgcttcctacatgacctcgacgctttcctggactggctcgtgcgcgcccaggaggcggcgggcggcagcg

SEQ ID NO: 1323 - DNA, 278 bp, Homo sapiens
  misc_feature 1..278: note = U/M: M (0.81:0.12) in Pancreatic Alpha cells
  misc_feature 1..278: note = source = chr7:157482024-157482301; Gene: PTPRN2 (intron)
  source 1..278: mol_type = genomic DNA
cggtgccggccgggacgcgcagctcggggggcgggaccacgtccgggaccccggggccgctgtccgaggacggaggtcggtgacttgaaccgcgtcgtcctcagggctgtggcggggcccctctcccagccgtccagcccgcagcgcccagctcagcgcactgaggaccaaaaagggcgggagactctctccggccctaaaaggcaattgtgctgagattttaactctaacttgggggttcgcccgattccctggagcaacgcttctctaaaaccacg

SEQ ID NO: 1324 - DNA, 480 bp, Homo sapiens
  misc_feature 1..480: note = U/M: M (0.7:0.06) in Pancreatic Alpha cells
  misc_feature 1..480: note = source = chr7:157482641-157483120; Gene: PTPRN2 (intron)
  source 1..480: mol_type = genomic DNA
cgcccacactggcgcctctccatcctggctgctcgccccttccctcctcctttcccacacgcctcccatctccgtgcctgcacccccccacccccagcaccctgcaatggtcggaactgcagggagtggggagcaacgcgaaaggccgagagaagagcgctggggagaagtcccggaggtcctagactccttggggcggtctctgcggggcgctgggccaggacagctgccaaccctccaaatctgtgcgctcagaaggagctgccctttgcccgctcctcctcacaggcccaccctagacccacttggggatgatcccaggcgcagctctcccctgccggcccaagcctttgacaggagtcctgcggcgaggcagagaccccctgaactgagctctccgacgccctagttgcccgttagagcccccatgcgcgccctccagccttcgaaagctctcttcctcgccccaccacctacgcg

SEQ ID NO: 1325 - DNA, 289 bp, Homo sapiens
  misc_feature 1..289: note = U/M: M (0.74:0.12) in Pancreatic Alpha cells
  misc_feature 1..289: note = source = chr16:77823437-77823725; Gene: VAT1L (intron)
  source 1..289: mol_type = genomic DNA
cgcctcctgcccacttccttccccgtagcctgacggggaaaggaactaggaaggaagagggtcggtaccttgcacccaggcttggtgagggtggagaccagggctgcagcgcaaccccctccatgcccctctccatcctctgtttctccgagaggggaaaaaaccctgatcagtctccccggaattcctggtcccatctcagaaggagctcagctctctaagctgccctctattccccattccccctgggggaacttctccaggccctcacgctcagctgaaattcccg

SEQ ID NO: 1326 - DNA, 114 bp, Homo sapiens
  misc_feature 1..114: note = U/M: M (0.69:0.11) in Pancreatic Alpha cells
  misc_feature 1..114: note = source = chr19:6022436-6022549; Gene: RFX2 (intron)
  source 1..114: mol_type = genomic DNA
cgcagggtgtgcaagtgatgtgtttactttagcagacagcgccacctcatggtgacagagactcggtgaacctgctacggggtcccggtcggctggtagcctgagggcagcccg

SEQ ID NO: 1327 - DNA, 320 bp, Homo sapiens
  misc_feature 1..320: note = U/M: M (0.68:0.1) in Pancreatic Alpha cells
  misc_feature 1..320: note = source = chr19:38877908-38878227; Gene: GGN (intron)
  source 1..320: mol_type = genomic DNA
cggagctcggagactagtcagaaaaatttactccagtcagcctgccagggccgtggggaccctacgaggctggctgtacttgatctaatgcgtccgcaccggccccgcccctgttctccaagatccgatcaggcccaagtccttaggtcgcactcctgttccccgaccttcgacactcacgccttcttgcccatgtccccaacacagctgctgttaagatacttcactaccagccccattatgtactaaggttccatgcctgtccccttggctggtcatgctgatccctcagtcctctcctctaactctccgactccccg

SEQ ID NO: 1328 - DNA, 93 bp, Homo sapiens
  misc_feature 1..93: note = U/M: M (0.66:0.09) in Pancreatic Alpha cells
  misc_feature 1..93: note = source = chr3:126854676-126854768; Gene: PLXNA1 (Intergenic)
  source 1..93: mol_type = genomic DNA
cgtctccatttcctgggctctccaggccatcgcagcccccggccctgccacgcaccggcgcagcccctgcactcgggcggccctgcctcggcg

SEQ ID NO: 1329 - DNA, 265 bp, Homo sapiens
  misc_feature 1..265: note = U/M: M (0.59:0.07) in Pancreatic Alpha cells
  misc_feature 1..265: note = source = chr10:99080071-99080335; Gene: FRAT1 (exon)
  source 1..265: mol_type = genomic DNA
cgccagcctcagactggagggcaaggggttcccttgagggctgcagttctactcaggctggtggagaactctggcttttggaagcgagagtaaaaagctaatgacgaggaaccgaaaaatcgcgagtgtttcgcgggtaactggggttgagggccaaaatatttggaatgaaggactttggccctatttaaggcagattttacagagcgcacctcaaacgtacaagtcagtaggactccttatttggcgtgacccgacctggccg

SEQ ID NO: 1330 - DNA, 178 bp, Homo sapiens
  misc_feature 1..178: note = U/M: M (0.63:0.13) in Pancreatic Alpha cells
  misc_feature 1..178: note = source = chr19:38718807-38718984; Gene: DPF1 (intron)
  source 1..178: mol_type = genomic DNA
cggacccgagccccacacacccgctcccggcaccctgctcacggcgaagccacacgtgtaggcgcttgcctctaagtccctgccccccttcctctcccaactcccaccctccacctcccacccccattcccgccagaaaccagaagcaactggcggcctctggtccagccagcaggcg

SEQ ID NO: 1331 - DNA, 90 bp, Homo sapiens
  misc_feature 1..90: note = U/M: M (0.61:0.17) in Pancreatic Alpha cells
  misc_feature 1..90: note = source = chr19:38877540-38877629; Gene: GGN (exon)
  source 1..90: mol_type = genomic DNA
cggggaactggagtgcccgcgggcttttgccatttagacgggccgggcagcagagtccccgcgggggccgggggtggtgcagagaccgcg

SEQ ID NO: 1332 - DNA, 63 bp, Homo sapiens
  misc_feature 1..63: note = U/M: U (0.02:0.94) in Pancreatic Beta cells
  misc_feature 1..63: note = source = chr1:11017503-11017565; Gene: C1orf127 (intron)
  source 1..63: mol_type = genomic DNA
cggagcgctttacgctaatggggcccaattttcgaaggcgcctgcctaaatctgtccagtctc

SEQ ID NO: 1333 - DNA, 41 bp, Homo sapiens
  misc_feature 1..41: note = U/M: U (0.01:0.92) in Pancreatic Beta cells
  misc_feature 1..41: note = source = chr19:33035544-33035584; Gene: PDCD5 (Intergenic)
  source 1..41: mol_type = genomic DNA
cgtgaaccaccgcgcccggccaatgtgacttataagtaatc

SEQ ID NO: 1334 - DNA, 380 bp, Homo sapiens
  misc_feature 1..380: note = U/M: U (0.02:0.93) in Pancreatic Beta cells
  misc_feature 1..380: note = source = chr17:45757584-45757963; Gene: KPNB1 (exon,intron)
  source 1..380: mol_type = genomic DNA
cgcggatggcaacagttcacttttttggcacagagatttctttgcagaacgcttcatgtcctgttttgagtgttcacatgatagtttattccagaccctcaaggtgtctgtattacaccccattaaactctgatgttggtcaacaattgcctctgtctagtgacctctactgagggttttatttatctttgaaatttgctaagaaacccatagcactggtttggaaggctcaaaacattatactggtatggggctaggagctcattctcagctgtgtttgttttgcacagggacttatgtacagcatttgggaaggatgtactgaaattagtagaagctaggccaatgatccatgaattgttaactgaagggcggagatc

SEQ ID NO: 1335 - DNA, 76 bp, Homo sapiens
  misc_feature 1..76: note = U/M: U (0:0.89) in Pancreatic Beta cells
  misc_feature 1..76: note = source = chr16:71049526-71049601; Gene: HYDIN (intron)
  source 1..76: mol_type = genomic DNA
cggctgccggcttcagtgcttcgctaggtcatcgttagatgtctacggaaaacattcagagcgagccatcgttacc

SEQ ID NO: 1336 - DNA, 241 bp, Homo sapiens
  misc_feature 1..241: note = U/M: U (0.04:0.92) in Pancreatic Beta cells
  misc_feature 1..241: note = source = chr5:45128099-45128339; Gene: MRPS30 (Intergenic)
  source 1..241: mol_type = genomic DNA
cggctactggcatagttatgaaaatcctatttgttatacttttactttcttgtaggggacagattggtgaagtaaatgatgtggaagactacaatccctgcatattttacgcctttaaaattggtatgaatcggccaggtgcggtggctcacgcctataatcccagcactttgggaggccgaggcgggcggatcacgaggtcagcagatcaagaccatcctggctaacacagtaaaacccc

SEQ ID NO: 1337 - DNA, 47 bp, Homo sapiens
  misc_feature 1..47: note = U/M: U (0.08:0.94) in Pancreatic Beta cells
  misc_feature 1..47: note = source = chr7:157822975-157823021; Gene: PTPRN2 (intron)
  source 1..47: mol_type = genomic DNA
cggatccttcaccgcacccgagaacccgcaggatgaggcagctctgc

SEQ ID NO: 1338 - DNA, 354 bp, Homo sapiens
  misc_feature 1..354: note = U/M: U (0.02:0.88) in Pancreatic Beta cells
  misc_feature 1..354: note = source = chr12:21533849-21534202; Gene: SLCO1A2 (intron)
  source 1..354: mol_type = genomic DNA
cgactatcagctgatggtcaggtgattgttaaattgtctctctaaaataataactggtcgtagccagcaccagagaaaggtagactcccaataggtagaaaacacctaaaactgatgatcggcagcttccagataagatctcagaagttgggtgagtgggcttaagtatgtacactatgagaaaaaatgacagagtttaactggtatatgatcccaaaaataaatgcaacaaaaacaaaaataaataaatgggatgtaattaaactaaaaagcttctgcacagcaggagaaataataaacagagtaaacagacaacccacagaatcggagaaaatatttgcaaactacccatcc

SEQ ID NO: 1339 - DNA, 367 bp, Homo sapiens
  misc_feature 1..367: note = U/M: U (0.06:0.91) in Pancreatic Beta cells
  misc_feature 1..367: note = source = chr7:111371216-111371582; Gene: DOCK4 (intron)
  source 1..367: mol_type = genomic DNA
cgagcaaatcacttgcacttacccgcgaatttctacgtcagaaattctggcaatgcaagggaatcacacttctttcaattttctccattttgcggggggaggcgggttgttttcccgtttctcaatttctatcagcaactatcgttagcaccacagatgcactggatcgcaacctgcccctatgtgtttgtagaggctaatttgtcttttgcacattagctagaactagctcatcacacaaaggacatggagcgtgtaaatcctaagtcactcaggtacaaaatcattctttcgacacacttcatatttgcctctggtgcagcagttctgaacaccaatctctcacgtactgacaatccttgaagcc

SEQ ID NO: 1340 - DNA, 184 bp, Homo sapiens
  misc_feature 1..184: note = U/M: U (0.07:0.91) in Pancreatic Beta cells
  misc_feature 1..184: note = source = chr19:4614761-4614944; Gene: TNFAIP8L1 (Intergenic)
  source 1..184: mol_type = genomic DNA
cgcgacagctaatgtcattatttacttcactgagctaaataatctagggaattgctcatcaggacctgataatttgattggatttcatgcacaattaggtcttcagagctgaggcattagtcggcgagttcaggaaagacaccaacctccctgctggagaggctcaaggtaaggggacaacgac

SEQ ID NO: 1341 - DNA, 381 bp, Homo sapiens
  misc_feature 1..381: note = U/M: U (0.06:0.9) in Pancreatic Beta cells
  misc_feature 1..381: note = source = chr5:43316070-43316450; Gene: HMGCS1 (Intergenic)
  source 1..381: mol_type = genomic DNA
cgaaccacttttctagccatcctgtaaagggatcatttacccgtgagttgctggctaactcattggatagagcagtcagacctcacaatgcctttgttatacttccattaggggtggcgttgtttgggatgaaggtgcaacattgagttttaatcataacgcaaactcatcttctttctgctaatatcatgtctaaggctatcctattttcccaagccatctggctaatagcccctaattgctcagctattcctttaacagcatctctagtgtagttaatacatcactgttggttgtaatagatgtcgtttaaccaatctgcatttttattaattgtcacccaccaaaatattgactcaaatcctgcagctatttgatttc

SEQ ID NO: 1342 - DNA, 175 bp, Homo sapiens
  misc_feature 1..175: note = U/M: U (0.03:0.87) in Pancreatic Beta cells
  misc_feature 1..175: note = source = chr22:44551259-44551433; Gene: PARVB (intron)
  source 1..175: mol_type = genomic DNA
cgctgggtgcttgtgaaagtggagggtcacccgctcgcagctgggccccccagccctgccctctccttgtggccgtccctccctccttcctgtgagcccgtgtgctgggacagtgaggagacaccacggaaggaagaaaagactcagcaggctcagggcctgcgggagcagcggc

SEQ ID NO: 1343 - DNA, 323 bp, Homo sapiens
  misc_feature 1..323: note = U/M: U (0.02:0.86) in Pancreatic Beta cells
  misc_feature 1..323: note = source = chr12:105694549-105694871; Gene: C12orf75 (Intergenic)
  source 1..323: mol_type = genomic DNA
cgacagagaattatgttcccatcactgtttggggtgattaggccttggtgtgtgctgtcctaatacctcctcaaccttcctctcccacacggccttcattatctgatcagcccctcgcttcagctactcctcccccacttaatgatgctgaaaattcaatgtctaactccggtgactttggcttaatgttaccccctgctgaccttattccttttcacgaacagctggtacttgtagctcctgtggccccaactcacacagcctgggaccatatatatgctaattcttccctcttcaaacctttgcagtatttgcttctgggc

SEQ ID NO: 1344 - DNA, 216 bp, Homo sapiens
  misc_feature 1..216: note = U/M: U (0.1:0.92) in Pancreatic Beta cells
  misc_feature 1..216: note = source = chr10:94293775-94293990; Gene: IDE (intron)
  source 1..216: mol_type = genomic DNA
cgtctgaaaaaaaaaaaaaaattgaccaagaaattaaatcatcctaatggagcttgctccagaaaacattcaaaatatccccacggttgaccaagaaattaaatcggcctaatggagcttgctccagaaaacactttcaaaatatccccacggttgaaacagcaggtcaaaacgttctgtatctactaagcatccttgagaagcaaggaaatgaac

SEQ ID NO: 1345 - DNA, 142 bp, Homo sapiens
  misc_feature 1..142: note = U/M: U (0.13:0.93) in Pancreatic Beta cells
  misc_feature 1..142: note = source = chr2:225897978-225898119; Gene: DOCK10 (intron)
  source 1..142: mol_type = genomic DNA
cgacctccgcctcccaggttcaagcaattctcctgcctcagcctcccgagcagctgggactacaggtgcatgccaccacgcccggctaatttttgtaattttagtagagatggggtttcgccatattggtcaggctggtctc

SEQ ID NO: 1346 - DNA, 322 bp, Homo sapiens
  misc_feature 1..322: note = U/M: U (0.19:0.97) in Pancreatic Beta cells
  misc_feature 1..322: note = source = chr15:28473191-28473512; Gene: HERC2 (exon,intron)
  source 1..322: mol_type = genomic DNA
cgtaaatgtatttgataccgctgaattgtgacgttaaaatggtacacttcctatttgtgtcttaccataatttacaaaaagctttaaaaaaaaaaaaaaagaaaagaaaagaaaagaaatcaaagcaaaatcttgacattttcccaaaggcgctcaagcgggtgcagacctaccaatcaggcgcagtgccgtctgcgtgagggccagcatgccggaattgagcagaaggtcgaggttgtttgcgccgtgctgcagggtgagcatgctgagcatcaccaggaggaagcgggcttgcgggatggtccccaggctcggtcctgac

SEQ ID NO: 1347 - DNA, 277 bp, Homo sapiens
  misc_feature 1..277: note = U/M: U (0.16:0.94) in Pancreatic Beta cells
  misc_feature 1..277: note = source = chr16:84091831-84092107; Gene: MBTPS1 (intron)
  source 1..277: mol_type = genomic DNA
cgtggtgtgttcagcactttcggtttatgatgaggagtaaaggcggaaggcagcctcgccaccttcacacgggcactctcctcttcgccttacaggacggaaggtggcctccgtccctggccccataccatcactggaggaaaagaaggcaggcagggggcctgtcaagagggtagcctcctgcctgaggggctggggagaggggccgggtaccaggcggccagggggcctcggagggcaagactcctgcttgatggggtgggaggtgtgcctgccc

SEQ ID NO: 1348 - DNA, 355 bp, Homo sapiens
  misc_feature 1..355: note = U/M: U (0.22:0.94) in Pancreatic Beta cells
  misc_feature 1..355: note = source = chr11:46711310-46711664; Gene: ARHGAP1 (intron)
  source 1..355: mol_type = genomic DNA
cgaactcctgacgtcacgatccacctgccttggcctcccaaagcgctgggattacaggcatgagccaccacgcccggctcttacctcaatttttaaaaaatgctcactaaagcatttgtgatcttgccaaatagtcatcttataagtctacacttttccaaaagcacccccgctgagcagtgtgtatttggaaagcctcttgaagttaccttctcagcatgtttcagccactgaggaaatcagtctgattacttaacagtcatgtctcatttctgaccactgacaatcgctttctgattttattactagaattttttttaagagatgggggtctcggccaggcacagtggctcac

SEQ ID NO: 1349 - DNA, 371 bp, Homo sapiens
  misc_feature 1..371: note = U/M: U (0.22:0.93) in Pancreatic Beta cells
  misc_feature 1..371: note = source = chr22:47460066-47460436; Gene: TBC1D22A (intron)
  source 1..371: mol_type = genomic DNA
cgttgccgttgccggggagccgctgccggcacccgtgctctctctgtggtgaactggccctcctctcccgctcagcagtttaacaggccagtgcaagctgctcagttcccgggcagcggtgccgggcggtcatgccgctctaagccaggcaggtttgtccacaggaggccacttgtggttcagcaaacacagaattagaaaaccagaatccctgttgcacgtctctgcagatggagctgttcagctcagtatggttaatgtcagggaggattaactggttcagtctgatccatttacctgatggtattttattttaagtacagaggtggtagtacattttcagaaaacattattccttttcttactgctgc

SEQ ID NO: 1350 - DNA, 312 bp, Homo sapiens
  misc_feature 1..312: note = U/M: U (0.24:0.95) in Pancreatic Beta cells
  misc_feature 1..312: note = source = chr17:33443734-33444045; Gene: RAD51D (exon,intron)
  source 1..312: mol_type = genomic DNA
cgatttcctgacctcatgatccgcccacctcagcctcccaaagtgctgtgatcacaggcgtgagccactgcgcccggcctagaatgatgatttaaacagtaacatgctcattggtggttgtgacgaataaatgaaataatgtaccgtgaagtgctgaccgcagtgcctcgttcatcgaaagcattcagcgaaagtccatctgttcctccatgcccaagtcctgccttcttcagagcattcctgaccccactccacgatctccctgcggggacctgaggcagctgcagtcctcccaggttcccacttgagtgc

SEQ ID NO: 1351 - DNA, 79 bp, Homo sapiens
  misc_feature 1..79: note = U/M: U (0.28:0.95) in Pancreatic Beta cells
  misc_feature 1..79: note = source = chr3:115762709-115762787; Gene: LSAMP (intron)
  source 1..79: mol_type = genomic DNA
cgtgaaccggtcaggcggagcttgcactgagccaagatcgcgccgctgcactcccgcctgggcgaaagagcgagactcc

SEQ ID NO: 1352 - DNA, 109 bp, Homo sapiens
  misc_feature 1..109: note = U/M: U (0.03:0.95) in Pancreatic Beta cells
  misc_feature 1..109: note = source = chr2:239293858-239293966; Gene: TRAF3IP1 (intron)
  source 1..109: mol_type = genomic DNA
cgtgttagccaggatggtctcgatctcctgacctcgtgatccgcccgcctcggcctcccaaagtgctgggattacaggcgtgaaccgctgcgcctggcctgtagcatcg

SEQ ID NO: 1353 - DNA, 328 bp, Homo sapiens
  misc_feature 1..328: note = U/M: U (0.02:0.94) in Pancreatic Beta cells
  misc_feature 1..328: note = source = chr8:131216273-131216600; Gene: ASAP1 (intron)
  source 1..328: mol_type = genomic DNA
cgggtccccagtccccaggccacgaaccggtacaggtctgtggcttgttaggaaccaggccacacagcaggagtgagttgcgggctattgagcgaagctgagttccgcctcctgttagatcaagggcagcatcagactctcataggagacggaaccctactgtgaactgcatatgcaagggatctaggttgcacgctacttatgagaatctaatgataaatgtaatgtgctcaaatcatcccgaaaccatcctcccggctaccctcttgtatgtggaaaaactgtcatccacaaaaccggtccctggtgccaaaaaggttggggaccg

SEQ ID NO: 1354 - DNA, 187 bp, Homo sapiens
  misc_feature 1..187: note = U/M: U (0.01:0.91) in Pancreatic Beta cells
  misc_feature 1..187: note = source = chr1:10573884-10574070; Gene: PEX14 (intron)
  source 1..187: mol_type = genomic DNA
cgtattgccgggagctgtcatattgactgttacagaaaagatctgtatttaagcagtaccagtgcactgggatctcccaggcaggatattaatgctaattcatccgctcaccccctgctgtgagtgttatttgtttaaatctgtagattcccacagcgcgtttatatcctcactagagtgagctccg

SEQ ID NO: 1355 - DNA, 200 bp, Homo sapiens
  misc_feature 1..200: note = U/M: U (0.02:0.92) in Pancreatic Beta cells
  misc_feature 1..200: note = source = chr5:6639629-6639828; Gene: SRD5A1 (intron)
  source 1..200: mol_type = genomic DNA
cgcggacagtaagaatggacatggaggcagccccgatgattttgttcttttcaataatccatttttcttcctgggtgcttatagggcactttctttttccttagatggataatctgtgtttgcttgtttattaatttcgcctgattttctccaagcctttttaggaaattgaatttagcccaggaaattgaatttctccg

SEQ ID NO: 1356 - DNA, 436 bp, Homo sapiens
  misc_feature 1..436: note = U/M: U (0.03:0.93) in Pancreatic Beta cells
  misc_feature 1..436: note = source = chr4:152619353-152619788; Gene: PET112 (intron)
  source 1..436: mol_type = genomic DNA
cgtctgtccacccagtcatggagtacctaccgtgtcaggtattgtgtgtggtagacgctaaagcataacattagagttctgtaaatattaagaataatttggtgctcactgcacgataaaatgacaagataaattaaagactagagttaaattctgaagtttttcgtcatttgtgggtgaggtgtgcatgggggtgggcatgtgcataatgcttaatttaataagcaatccaaagacagagagcacagagttgcagctctgcaaagcacacctccaccactgctatttatttaatgaatactcctgggcgctctttaaattgaaagatggttcattagatttgtgcatctgcccttctcagcaatctgttgtgtttctgatgaaggcaggaaaaaacacgaacatatcattttcgggtatgttatgagtaacgccg

SEQ ID NO: 1357 - DNA, 103 bp, Homo sapiens
  misc_feature 1..103: note = U/M: U (0.02:0.91) in Pancreatic Beta cells
  misc_feature 1..103: note = source = chr7:152472533-152472635; Gene: ACTR3B (intron)
  source 1..103: mol_type = genomic DNA
cgtgcaaggactgtttaaaatgtttggggcaggctgggcgtgatagctcagcctgtaatcccagcactttgggaggccgaggcgggcagatcacctaaggtcg

SEQ ID NO: 1358 - DNA, 166 bp, Homo sapiens
  misc_feature 1..166: note = U/M: U (0.02:0.91) in Pancreatic Beta cells
  misc_feature 1..166: note = source = chr5:137712761-137712926; Gene: KDM3B (intron)
  source 1..166: mol_type = genomic DNA
cgctcgttaggttaatgatgatttctttgttgatatgtcttcctcgctcgttaggcctcattccctctcagcaaccttgctttattcatatttataatcctagtgctttatgagatagcacttagtaaatgttggataaatactgaaataagcaaaaagatttgcg

SEQ ID NO: 1359 - DNA, 169 bp, Homo sapiens
  misc_feature 1..169: note = U/M: U (0.03:0.92) in Pancreatic Beta cells
  misc_feature 1..169: note = source = chr10:30742439-30742607; Gene: MAP3K8 (intron)
  source 1..169: mol_type = genomic DNA
cgttcgcgggcttccaagtaatgtatttaacattcacatcattaggctgactgggtgattcaattagccagtgtccactgggcatctgctatgtggcaggttcttgtgagcaccaacgaggaagcatgacacaaggcagtgaggagcaagccttagtggtactccagcg

SEQ ID NO: 1360 - DNA, 224 bp, Homo sapiens
  misc_feature 1..224: note = U/M: U (0.05:0.93) in Pancreatic Beta cells
  misc_feature 1..224: note = source = chr8:123843945-123844168; Gene: ZHX2 (intron)
  source 1..224: mol_type = genomic DNA
cgggagcctggcagctttaaggagcttgttgatgagagagccatttatggcaggagtgttttttgcagttaggataccccgttctttccagatggatgagtgtgagtgcactatgtggaacacataatgagaatttgaatatatgttgatctgttgtcctgctgctagagtgagagctcgagtgagggcgatgagttcagcttcttgggaggtggtgcctagcg

SEQ ID NO: 1361 - DNA, 381 bp, Homo sapiens
  misc_feature 1..381: note = U/M: U (0.02:0.9) in Pancreatic Beta cells
  misc_feature 1..381: note = source = chr2:144715110-144715490; Gene: GTDC1 (intron)
  source 1..381: mol_type = genomic DNA
cgcctcgccaccctccccctaaatgaaaagccaactgtctgcttcataaaactcgcttagcagacactgaaacaaaatggactgtaaagttcgttagatgaaaatattaaaaaagaattaagctaatggagataaaattaaaagaaatgaggcaacaaacacatcacaccaaaaatggcattgcagtgacagctaagattcctaatgacggactgcattcggaaaaattaaatggcattccgtgcttaaatttctttggaaagtaatgatccatgaatgatgctcactccaggcacttagaaggagtgaaaaaagcaaagtgttctgaaataacaaagaaatatgtgtcgctgagtgaagggaggtttagacaatgccacg

SEQ ID NO: 1362 - DNA, 111 bp, Homo sapiens
  misc_feature 1..111: note = U/M: U (0.02:0.89) in Pancreatic Beta cells
  misc_feature 1..111: note = source = chr4:188074215-188074325; Gene: LOC339975 (Intergenic)
  source 1..111: mol_type = genomic DNA
cgacaccagagaggcccactacttagcataatttgtctcagaaatgtgtgtttggccgggtgcggtggttcatgcctgtaatcccagcaccttgggaggctgaggcgggcg

SEQ ID NO: 1363 - DNA, 137 bp, Homo sapiens
  misc_feature 1..137: note = U/M: U (0.04:0.91) in Pancreatic Beta cells
  misc_feature 1..137: note = source = chr1:11303087-11303223; Gene: MTOR (intron)
  source 1..137: mol_type = genomic DNA
cgtaagctccgtggatctgaaatagagcgtccttcctctccaaccaaatggagtggaaggtgaaatcataacagaggtgcttacttatgggcgaagtcctttgggggcagggccgctcggatgatgtccagcacgcg

SEQ ID NO: 1364 - DNA, 110 bp, Homo sapiens
  misc_feature 1..110: note = U/M: U (0.03:0.89) in Pancreatic Beta cells
  misc_feature 1..110: note = source = chr13:52405059-52405168; Gene: LINC00282 (intron)
  source 1..110: mol_type = genomic DNA
cgaggtctaatgaggctcactcttgctcgaggtcgaatgaggctcactcttgcttaaagtctaatgaggctcactcttgctcgaagtctaatgaggctcactcttgctcg

SEQ ID NO: 1365 - DNA, 183 bp, Homo sapiens
  misc_feature 1..183: note = U/M: U (0.03:0.89) in Pancreatic Beta cells
  misc_feature 1..183: note = source = chr2:3424402-3424584; Gene: TRAPPC12 (intron)
  source 1..183: mol_type = genomic DNA
cgccgctgtggctggaattggagcaggtcgttagctcctgcctgaggaagcccaaataaaggactgcagaacaactgtagtgcaaagctgagactcattgccctcctaggcgtttcatgagcaggtcctgagttctctgtgtcccggcgtggagtgcaggaggcgtggaaagggagtagtgcg

SEQ ID NO: 1366 - DNA, 306 bp, Homo sapiens
  misc_feature 1..306: note = U/M: U (0.03:0.89) in Pancreatic Beta cells
  misc_feature 1..306: note = source = chr3:172640814-172641119; Gene: SPATA16 (intron)
  source 1..306: mol_type = genomic DNA
cgatacactggctctgctaggctagccatgcacggatgagatgaaataatgctacacggtgatggttctggttagcaaagctttccctgcttgcatgggcctgatgatgagggtaatgatgtgtgtgggtctttaggttggtgttttgttatggcagcctgagctgactaaggtagagatggatttcttattaatagaaatatagaggagataattgaaacatggttgtggggaaggggtagctttgtggtaggaacatcagtgaaaatgtgtttttgtatttgtaatacatggaatcgcaaatcg

SEQ ID NO: 1367 - DNA, 108 bp, Homo sapiens
  misc_feature 1..108: note = U/M: U (0.06:0.91) in Pancreatic Beta cells
  misc_feature 1..108: note = source = chr6:81314161-81314268; Gene: BCKDHB (Intergenic)
  source 1..108: mol_type = genomic DNA
cgtgtttctcgcaatcaacagatcactaagtctttgttaaaaaatcaatttagccacttgatctctttactggataatttagtcgatttacgttcaatgttattatcg

SEQ ID NO: 1368 - DNA, 149 bp, Homo sapiens
  misc_feature 1..149: note = U/M: U (0.03:0.88) in Pancreatic Beta cells
  misc_feature 1..149: note = source = chr13:56573620-56573768; Gene: MIR5007 (Intergenic)
  source 1..149: mol_type = genomic DNA
cgcaaaagttttttaaacaaactatatttgctcaatcatttgccaaatgatgcgcagcagtgtgggcagcagcagaagcaactctccaaacctcccccagggagccatactgcgtgcggatcattgacggagttctccaaacccatccg

SEQ ID NO: 1369 - DNA, 195 bp, Homo sapiens
  misc_feature 1..195: note = U/M: U (0.05:0.9) in Pancreatic Beta cells
  misc_feature 1..195: note = source = chr2:233422665-233422859; Gene: EIF4E2 (intron)
  source 1..195: mol_type = genomic DNA
cggccgtcccacgagctcacagagctatgaacagaatatcaaacagattggcacctttgcctctgtgagttcttggtgaattaatggagtgtgccttgatagttcgttcatgcctgtattgatatgatgtttatttactttcctagtaacctatttaagattctggttttcttaattgactgacctgagtctccg

SEQ ID NO: 1370 - DNA, 227 bp, Homo sapiens
  misc_feature 1..227: note = U/M: U (0.05:0.9) in Pancreatic Beta cells
  misc_feature 1..227: note = source = chr15:59577839-59578065; Gene: MYO1E (intron)
  source 1..227: mol_type = genomic DNA
cgcccgactagacactgtctttaaaaaaaataataaaatcaattaattaattagctgaaatgaattttaaaaataaaagtgaaaaaaatttttaagaaaaagaaaagaaaaaattaagtcagcctattaaatgcataccaaattagtgtgtgcatgtccattaagatttttattaatcatacaggtcggcacaaaagtaattgcggtttttgccattaatggcaccg

SEQ ID NO: 1371 - DNA, 447 bp, Homo sapiens
  misc_feature 1..447: note = U/M: U (0.03:0.88) in Pancreatic Beta cells
  misc_feature 1..447: note = source = chr1:238543890-238544336; Gene: LOC339535 (Intergenic)
  source 1..447: mol_type = genomic DNA
cggagaatgaactgaaagtacagtgggcgttccacaacagggaacactcattgagctgcatagaatttctcggtgttgggtgttctgatttgaagcctcattacttcctctgtatcattaggtagcaaatttacttcacccaaattaaattaatcagttatctaattaatacttatacaatatttttaacagttgagggaaattgagggaggggagaggatgacagatgtcgctatgccgtaattggtaatgcaccaattaaggcaatcagatacaacaaattggattaaaacctaacagatccagtgatgtgttttgccttttttctcccctgcagctgtaatgcaaagtgaaaaaaaaaaaattcagtgtgtacaaacaaaccttcggattagtcatgaccgtttcacgctgtactgtacagttgagccacatctttaggatgcg

SEQ ID NO: 1372 - DNA, 282 bp, Homo sapiens
  misc_feature 1..282: note = U/M: U (0.03:0.87) in Pancreatic Beta cells
  misc_feature 1..282: note = source = chr2:221134662-221134943; Gene: MIR4268 (Intergenic)
  source 1..282: mol_type = genomic DNA
cggactgtgaattttagcatgactaaatagatctgcattggcaagacaagctttccaatatttgagaaaaatatcggagtacacgctctgatatgagctgatacattatttgggaagtgggacttactctgtgaaaccaggaaggctccatataatatgaaatgcatattcttcccacttttacaagcttatttcctcttgaatattatttctatacttttggtaactttcaaatggtaaatggtagtccccgtgatccatgcatagacaattgagagatcg

SEQ ID NO: 1373 - DNA, 362 bp, Homo sapiens
  misc_feature 1..362: note = U/M: U (0.05:0.89) in Pancreatic Beta cells
  misc_feature 1..362: note = source = chr4:184808460-184808821; Gene: STOX2 (Intergenic)
  source 1..362: mol_type = genomic DNA
cgtcatagctaagaggacaaccatttgtcagagacaccatcaatttaggccgttataaatttagtgatttagtatttggagagattatagtatttggagagatggattaatgtttccttagaaaggaaactctttattccctctaactgtccaaaaggtactgtgtgagctactggaggcctttcccctttaggatcagacatatccctactaatgaaggacacttacacatcattagcagactccctgctgagcgccctgcatgcacgctcttatttactcttcacacaacattaggagagagctctgtttcccattttgccttggagggaataaagccttagcagagattttggacttcg

SEQ ID NO: 1374 - DNA, 83 bp, Homo sapiens
  misc_feature 1..83: note = U/M: U (0.06:0.89) in Pancreatic Beta cells
  misc_feature 1..83: note = source = chr11:2174558-2174640; Gene: INS-IGF2 (intron)
  source 1..83: mol_type = genomic DNA
cggagtttcgctctcgttgcccaggctggagtgcaatggtgccatctcggctcagcgcaacctctgcttcccaggttcaagcg

SEQ ID NO: 1375 - DNA, 125 bp, Homo sapiens
  misc_feature 1..125: note = U/M: U (0.05:0.88) in Pancreatic Beta cells
  misc_feature 1..125: note = source = chr5:176260994-176261118; Gene: UNC5A (intron)
  source 1..125: mol_type = genomic DNA
cgcacccggcccagtcacacagcctcttattctctcattcatcaacttaggtcttcagtaaatgtttgtggagtgccgcatctgtgctgggctctaagctggcactggggaggtggagcaccgcg

SEQ ID NO: 1376 - DNA, 257 bp, Homo sapiens
  misc_feature 1..257: note = U/M: U (0.06:0.89) in Pancreatic Beta cells
  misc_feature 1..257: note = source = chr8:99353984-99354240; Gene: NIPAL2 (Intergenic)
  source 1..257: mol_type = genomic DNA
cgtggtcaggcaggataaagtcagctccactaatctaagcccgaaaatgaagcggcaattctgctgttatgccctaattcacaggctcatcattaaattgttatcatagcctcagacgagacttttaattctcttacaacagctggcaaatggcaggaacagatgctctcacccactgaagcagcttctgcaggagcagtggagaagagagagaataatggataccagcaaggaaggttcagacactcccttatccg

SEQ ID NO: 1377 - DNA, 290 bp, Homo sapiens
  misc_feature 1..290: note = U/M: U (0.06:0.89) in Pancreatic Beta cells
  misc_feature 1..290: note = source = chr1:11007326-11007615; Gene: C1orf127 (intron)
  source 1..290: mol_type = genomic DNA
cgacagcagaccaagcccagaaacacagctggcagggccagggagagaccaggagacactgccctgcactcagcgcctcttccctcggggaggtccatgcaggcagacggcctgccgcttcacccctccctctgggttccatggcagcagctggtaccctgctggcttggatggccccagtgactctcagtgacccagtgcccctggactccctggcctagatgcctagctgtggctgagcacagtgatcatctgggccagaagagcaccggggcttccctggaaagacg

SEQ ID NO: 1378 - DNA, 297 bp, Homo sapiens
  misc_feature 1..297: note = U/M: U (0.1:0.93) in Pancreatic Beta cells
  misc_feature 1..297: note = source = chr15:33203375-33203671; Gene: FMN1 (intron)
  source 1..297: mol_type = genomic DNA
cgttaactaatatgcttatgatttcatctagagaggtaccttcccatagatactgggatgcaaaaattgagacttaaaatccttaatggatttggctatcgaagtgtttgaaataagcaggtccacatctttaaataattattcaaaactaataaggtttgttccctcaaccctacctcccttccctgactttacattgtgaaattaaccagcacgctagtaaattttctccgtggcaggctaattaattttattaaaccaaccagtgatacttagaatgccttaaaattttgctcg

SEQ ID NO: 1379 - DNA, 59 bp, Homo sapiens
  misc_feature 1..59: note = U/M: U (0.14:0.96) in Pancreatic Beta cells
  misc_feature 1..59: note = source = chr5:39002706-39002764; Gene: RICTOR (exon)
  source 1..59: mol_type = genomic DNA
cgaagcgctcgtagccctgctgctcgcacttcttttgcttcatttaataaagctaaccg

SEQ ID NO: 1380 - DNA, 131 bp, Homo sapiens
  misc_feature 1..131: note = U/M: U (0.12:0.94) in Pancreatic Beta cells
  misc_feature 1..131: note = source = chr16:71798505-71798635; Gene: AP1G1 (intron)
  source 1..131: mol_type = genomic DNA
cgaaactaaaataaatatatatttaatatgtttggtctactcacctgtgctaatatatcattcatagcttcacttgaatcatcatcatttcgtcctaaaattcttaataaccgcaaaattcgtacctaacg

SEQ ID NO: 1381 - DNA, 165 bp, Homo sapiens
  misc_feature 1..165: note = U/M: U (0.04:0.86) in Pancreatic Beta cells
  misc_feature 1..165: note = source = chr3:72775909-72776073; Gene: SHQ1 (Intergenic)
  source 1..165: mol_type = genomic DNA
cgggatgattgagggctttctctaatcacaccaattgatatcaattactgcgtcggccccctgagagcatccctgggatttccacctcattagatcattggtgccaaatgaagcaacagggttctgcgcctccttcggagctatttgtgttataggcaaaaatcg

SEQ ID NO: 1382 - DNA, 235 bp, Homo sapiens
  misc_feature 1..235: note = U/M: U (0.08:0.9) in Pancreatic Beta cells
  misc_feature 1..235: note = source = chr9:116745198-116745432; Gene: ZNF618 (intron)
  source 1..235: mol_type = genomic DNA
cggtgaccacggatagcaggtacttactgaaaaatatccttttaatgtttgactttggattttatgttgaagtgtgactcgggttaaatataaaattcatagcatatcttgagcaactattttgtagttatctatatataaatctattttacagcgacacaaatagaatagattatggagtgtcagcatgtagatagattccgagtgctttttcactaatatacctaatgattcg

SEQ ID NO: 1383 - DNA, 95 bp, Homo sapiens
  misc_feature 1..95: note = U/M: U (0.13:0.94) in Pancreatic Beta cells
  misc_feature 1..95: note = source = chr5:118554340-118554434; Gene: DMXL1 (intron)
  source 1..95: mol_type = genomic DNA
cggcgtttcaccatgttggttggccaggatggtctcgatctctttacctcgtgatccgcctgcctcggcctcccaaagtgctgggattacaggcg

SEQ ID NO: 1384 - DNA, 99 bp, Homo sapiens
  misc_feature 1..99: note = U/M: U (0.03:0.84) in Pancreatic Beta cells
  misc_feature 1..99: note = source = chr9:135887415-135887513; Gene: GTF3C5 (Intergenic)
  source 1..99: mol_type = genomic DNA
cggtgaaaccccgtctctactaaaaatacaaaaattagccaggcgtggtggcacgtgcctgtaatcccagctactcaggaggctgaggcaggagaatcg

SEQ ID NO: 1385 - DNA, 296 bp, Homo sapiens
  misc_feature 1..296: note = U/M: U (0.11:0.92) in Pancreatic Beta cells
  misc_feature 1..296: note = source = chr8:48809687-48809982; Gene: PRKDC (exon)
  source 1..296: mol_type = genomic DNA
cgtggtgaaattaaagatatacagattaccatacctggcaataaaggaacgaatttataaaagagttcaatggatttgtgtcgacattctgtctggggcctcccacaatgagctaaaagccacttgaccagatccaataaacacaatgatgcggaaggtggaaatcctctgcacagagacagcatactgtcattagtccctctccaacatgcaacattcagctaccaaggctctagaaatcataaactcatctttatcacacagatatatgtagaaatctcactaaaaggcattcg

SEQ ID NO: 1386 - DNA, 352 bp, Homo sapiens
  misc_feature 1..352: note = U/M: U (0.07:0.88) in Pancreatic Beta cells
  misc_feature 1..352: note = source = chr2:99487624-99487975; Gene: KIAA1211L (intron)
  source 1..352: mol_type = genomic DNA
cgttccctgagacatcagagaaccaaacgaaaaggtcagtgacacccatgtgcatctattagaatagaatttataaactgcaacagaaaatatcttatgcaaggacatctaaggactttgtgataggacctccttaggccctgggctcattttcattcagagggaaggaaatgaacatttattaagcacatctcaggcctcatttaaggctcacaaccagctatgagttaaatggtccattgctttttttgcaggtgaggaaatagagggcctgagcagctaagcaaccagtccgagatgactgaggcagtcagtggaatgtccgaccctgaaatcaaggcctgtgcctccg

SEQ ID NO: 1387 - DNA, 142 bp, Homo sapiens
  misc_feature 1..142: note = U/M: U (0.09:0.89) in Pancreatic Beta cells
  misc_feature 1..142: note = source = chr1:201674580-201674721; Gene: NAV1 (intron)
  source 1..142: mol_type = genomic DNA
cgctgggctccagttcagcccactcgctgattgagatggttccggattctctggggtaaggatgaaaaccctgggagctcccctggggagcaggagcactcaactacgagaagcatgagatttgccatgctgcgggggttcg

SEQ ID NO: 1388 - DNA, 195 bp, Homo sapiens
  misc_feature 1..195: note = U/M: U (0.09:0.89) in Pancreatic Beta cells
  misc_feature 1..195: note = source = chr11:83406390-83406584; Gene: DLG2 (intron)
  source 1..195: mol_type = genomic DNA
cgctattaagatagaagaaaatatatgaggtgcttagcgatcacctctaatgagggagaaattatgtgtggggaggggaagaggatagagtttgtgattcagtaaaagagtcctagctgggtgcagtggctcacgcctctaatcccagcactttgggaggccgaggtgggtggatcacctgacgtcaggagctcg

SEQ ID NO: 1389 - DNA, 309 bp, Homo sapiens
  misc_feature 1..309: note = U/M: U (0.11:0.91) in Pancreatic Beta cells
  misc_feature 1..309: note = source = chr2:236757594-236757902; Gene: AGAP1 (intron)
  source 1..309: mol_type = genomic DNA
cgtccgtgtgctttggaggtatcctggccatgttgttccttaaagctctaagtagaaatgactttgttccttggcactatgttaaattggctggttaattctggtgttatttaccctgtaattcattagtttcaccccaccattggcagctgacaggctgtaatttcacgccttgcaataaaagatgtctcataatctgcttcatttagcagcaagagaatttaatgaaattaactgcagtcctaattatgccagtgaatactaaagaccgccatcaagttttctcagaaaaggacgaggtccaactcg

SEQ ID NO: 1390 - DNA, 356 bp, Homo sapiens
  misc_feature 1..356: note = U/M: U (0.12:0.92) in Pancreatic Beta cells
  misc_feature 1..356: note = source = chr3:122144391-122144746; Gene: KPNA1 (exon)
  source 1..356: mol_type = genomic DNA
cgagaagtcgtattgaactcatttgcagttgtcttggcaattaagcgtattttttcattccagtccaagcacaaatgtggatcactgaacacagtactggaagcgccatttgcaggtacagattgcagtcatcattaaatgagccagaaggcagatactgtttttattttgtgtggggggagggggaagcggcacagtactagcaggagatgaaataaaatgattaggaaacaatgaggttataagatcactgttcttatttgggttaagcaggtcatgttgagaagatggttatttctttcagataaggatgctacattaaaggaatcgtgtgcagcatgaaaagattagaatcg

SEQ ID NO: 1391 - DNA, 358 bp, Homo sapiens
  misc_feature 1..358: note = U/M: U (0.07:0.87) in Pancreatic Beta cells
  misc_feature 1..358: note = source = chr1:16030996-16031353; Gene: PLEKHM2 (intron)
  source 1..358: mol_type = genomic DNA
cgtattgttaaaaaatgaggattcttttctcacatgacccaatattacaaaaaattcacaataacttttcctcaatatcatcaaatatttgctgtttcaagttccagctgcctcatcactgtcatgtttaaatgcctcatttgctgatgcgggatccacacaagctcctgccctccgtgatgagtgcccatcaggctgctgcccccgcccctgcgcccatgtgctttcctcatggtcccagcacctcccttttaggcccctgctgccatgaccctggcgactgaccacacctgcccttgggaaactttcctcactgggcttctggagcacatactgcccacgttttctgcccacctcg

SEQ ID NO: 1392 - DNA, 371 bp, Homo sapiens
  misc_feature 1..371: note = U/M: U (0.06:0.86) in Pancreatic Beta cells
  misc_feature 1..371: note = source = chr6:154919079-154919449; Gene: CNKSR3 (Intergenic)
  source 1..371: mol_type = genomic DNA
cgatacaaaactggaaatcatttggctgctaaattgtagagaatcaaaaccctctgagtcacagctgtacagaacacatttcacaccaaacttaaaaatcccatcagacacacagtttataaaattcaccttttaaatacaagctgtcacaatggagttcacagaagcaacaagtcagggaaaatgtcattatcttcagtttaagtcttaatctgactaggcggtgagtgaaattatccacaaagtaattctccagagaaggcctctctctaatgacctgagtaaggcgaccaaagagatttttttttcttggtagagaagctaaacataaaaagtccaatccctaacgatggccatacctctccttcacg

SEQ ID NO: 1393 - DNA, 190 bp, Homo sapiens
  misc_feature 1..190: note = U/M: U (0.11:0.9) in Pancreatic Beta cells
  misc_feature 1..190: note = source = chr8:142158421-142158610; Gene: DENND3 (intron)
  source 1..190: mol_type = genomic DNA
cgttcagcccccttcctctgatggtgcatggaccaacagccggagcagggcaaagactagaaacagccccactctgcgctcacctgccttttcttgccctccagcgggactgattttacttgctttgcaaatctttggcttaattgggtgtgcaaaatctcacacacacacacattcttctcttgtaccg

SEQ ID NO: 1394 - DNA, 324 bp, Homo sapiens
  misc_feature 1..324: note = U/M: U (0.05:0.84) in Pancreatic Beta cells
  misc_feature 1..324: note = source = chr10:70010968-70011291; Gene: ATOH7 (Intergenic)
  source 1..324: mol_type = genomic DNA
cgccgcctgcccttggctttgcggggtgtgttcccagcagggaaggcctctccactaatgcttgctactggaacttgggctgaaaatgtggtgggttccccatatgttgcaggggagaggccagccacacctggcgttggattcaacctcttatccaaccctggggctgaagccacccccaggagattacagacgctcccacccccaactaattaaataggtggcctcctgctgttaaaagggaatgagggcggaaaaacagaggatgcctgatttaactaggacctgggtaagtagcttaccagccagacccagaaatcaccg

SEQ ID NO: 1395 - DNA, 393 bp, Homo sapiens
  misc_feature 1..393: note = U/M: U (0.06:0.85) in Pancreatic Beta cells
  misc_feature 1..393: note = source = chr16:5153423-5153815; Gene: FAM86A (Intergenic)
  source 1..393: mol_type = genomic DNA
cgcaagagctcctgtgacaatgctgagcccgatcactgcgccttgcagagcagatgccgtctgtacctccctcctgttaagaaaccagagggtttttaattgcctgattattaagaggctcttctggctgctcctggtttcctgggaagtttcccatctagccgctagtgagtattcattatggaaatgaaatgtacatttaacccaagaaaatgctcactctagagaaatctcatagggcaagtcgttgaaagccgatttactaaatgacctcttcaccaaatgacccatttgcctaatgaccactttgccaaatgatcaatttgctgaaagccaattcgctgaaaatctgtttgtgggatatcctgcttattagtaactgacagtcagacg

SEQ ID NO: 1396 - DNA, 396 bp, Homo sapiens
  misc_feature 1..396: note = U/M: U (0.12:0.91) in Pancreatic Beta cells
  misc_feature 1..396: note = source = chr19:43995336-43995731; Gene: PHLDB3 (intron)
  source 1..396: mol_type = genomic DNA
cgttgcctggcaacacagctgacacctaccttcatcaggtttccaggggaagcagccagaaagttaatttcccatacagaagaacatctgctaacccttcacccaaataataacggaacctgcttgtgagggttcttcccaagaaaaaatgaaattttatatattaggttgagccaggggaattgccagtatacgactgtttcttgcctccaaatattagcaattccataagattcaaagtgataaaatggtttagaacagaccctgacctatattaagtgctttaaaattagtgttattaatattgattaataaataacaagattttttttttttaagatggagtctcgctctgttgcccaggctgtcatgcagtggtgcgaccttagctcaccg

SEQ ID NO: 1397 - DNA, 429 bp, Homo sapiens
  misc_feature 1..429: note = U/M: U (0.11:0.9) in Pancreatic Beta cells
  misc_feature 1..429: note = source = chr3:197212554-197212982; Gene: BDH1 (Intergenic)
  source 1..429: mol_type = genomic DNA
cgaacctgtaactatagtattttccccccgccaaaccccagttttctcaattcaagtgttactctgtgatactgtcagcacattagagcacctgttcccaccagttctgctgaagtggcaggccacagtcagcaggtgacccgcaaagaagagttagtgataaatgatgacttgaatggcattgagagcggtccacagtgtggcttgctatggccaacagactgctgtggtttggttcttgctctccaaatttccattccctcagctactgccaccagcaaagcactcgaaagctgtaaagattattttcagcatgtccaggggctctaagagagaccaggtgaaagacagattatactgttggtactagagccagcacgaaactcaagctcctctgattgttggtccaggctctctacagccccaccg

SEQ ID NO: 1398 - DNA, 88 bp, Homo sapiens
  misc_feature 1..88: note = U/M: U (0.12:0.9) in Pancreatic Beta cells
  misc_feature 1..88: note = source = chr10:133058775-133058862; Gene: TCERG1L (intron)
  source 1..88: mol_type = genomic DNA
cgctaccgcaagatatcagcccccagaaaacaggtgaggggggcgctacccctctttaatggaggcccacagtatgtgccaccgtccg

SEQ ID NO: 1399 - DNA, 257 bp, Homo sapiens
  misc_feature 1..257: note = U/M: U (0.12:0.9) in Pancreatic Beta cells
  misc_feature 1..257: note = source = chr13:94650116-94650372; Gene: GPC6 (intron)
  source 1..257: mol_type = genomic DNA
cgtaagggaaaatcaagagaatcagcgttgagacatggttacaatgatgagtccttcccttccttatctcccaaatttccatctcaagttctgtgttagactttaacatacttcctagccatgttgatttcaggtgtgaccacatgacttgctctagtcaatgactgtgagtaatgtggccacaaatgttgaagagaaatcgaaagcacttatttatagagttttccgatttctgtagtgcaaatcatcttgaaacg

SEQ ID NO: 1400 - DNA, 292 bp, Homo sapiens
  misc_feature 1..292: note = U/M: U (0.11:0.89) in Pancreatic Beta cells
  misc_feature 1..292: note = source = chr7:70038370-70038661; Gene: AUTS2 (intron)
  source 1..292: mol_type = genomic DNA
cgctgttttctccctttcaactccaaagaaggggataatgcactttttgtgccatgcatccagaggaattatgtgtgctaatttgattaggggagatttgattaactggaaaatgagggctttgctaagactttcacacgcttaatttatcccttgcaaagcagacgcaacattgtgtcatgaaactcagaaggcatatgggaacagtattcagtggttagacggcctttcagacccaacaatatcaaggattgccacggttcatattgggataatcattttagagcattcg

SEQ ID NO: 1401 - DNA, 323 bp, Homo sapiens
  misc_feature 1..323: note = U/M: U (0.04:0.82) in Pancreatic Beta cells
  misc_feature 1..323: note = source = chr14:101186014-101186336; Gene: DLK1 (Intergenic)
  source 1..323: mol_type = genomic DNA
cgctccgtccctagctggatcctggctgcagacagccagcttgggcctctggaggtgcagtgttgccataggaacaggctcatggagagcgtctcagaggaaccaggtgcttgcgggtggtgggcaggggcaggtggcagcagggggtgctggagatggtcccgacacagctactccccacattcctagtgaaggaactgagggctctggtggggaaagaaccaggtggaggcatcgctgcaaccctgagggctctcctgtttgcaagtccaagggggtcagtaaccccctggaacccagagatcagaggtggcaagaggacg

SEQ ID NO: 1402 - DNA, 188 bp, Homo sapiens
  misc_feature 1..188: note = U/M: U (0.13:0.9) in Pancreatic Beta cells
  misc_feature 1..188: note = source = chr10:35593985-35594172; Gene: CCNY (intron)
  source 1..188: mol_type = genomic DNA
cgtttgtttcttttggaaaaatataaaatctgacattgcttggagaaaaccggagacagacttgtcaggaaaaggttatggccacgtgtccttttgcccgaagacatttatcctttacgtaactggcaataccaaaagtaagcgtgctttttaatgaaaattgtcattttatggttacaaagctttcg

SEQ ID NO: 1403 - DNA, 225 bp, Homo sapiens
  misc_feature 1..225: note = U/M: U (0.15:0.92) in Pancreatic Beta cells
  misc_feature 1..225: note = source = chr10:94293767-94293991; Gene: IDE (intron)
  source 1..225: mol_type = genomic DNA
cgaaactccgtctgaaaaaaaaaaaaaaattgaccaagaaattaaatcatcctaatggagcttgctccagaaaacattcaaaatatccccacggttgaccaagaaattaaatcggcctaatggagcttgctccagaaaacactttcaaaatatccccacggttgaaacagcaggtcaaaacgttctgtatctactaagcatccttgagaagcaaggaaatgaacg

SEQ ID NO: 1404 - DNA, 417 bp, Homo sapiens
  misc_feature 1..417: note = U/M: U (0.09:0.86) in Pancreatic Beta cells
  misc_feature 1..417: note = source = chr11:17482160-17482576; Gene: ABCC8,ABCC8 (exon,intron)
  source 1..417: mol_type = genomic DNA
cgaaggcatggctgagtgcctgccagatggcccgggcaccttgagtgccctgaatgtccttccgctgcccagagagaccatggccaggtcagagtgcctgagggctaattcacggctgggcctagcctcccaggatgcccctagctcctgttgtctggggaaacccagtggtcacatcctctgcaaataggtgaactccaggaagagatcatggaatcagcaagtgcacagttgggagggccctatcaacaccaacatggtctagatggggaaactaaggccagatgattgctcaaggtcacacagctggtcagggactatgtgatgagcacagcactggaatgaggaggtggccatgtgccacactcactcattaccacctgccaccgtgtctgcctcagcaactgccctggtgcg

SEQ ID NO: 1405 - DNA, 105 bp, Homo sapiens
  misc_feature 1..105: note = U/M: U (0.14:0.9) in Pancreatic Beta cells
  misc_feature 1..105: note = source = chr18:54518561-54518665; Gene: WDR7 (intron)
  source 1..105: mol_type = genomic DNA
cgctgttcccaccctatatcacccaactatctcctactcatctcacgacactcagctcttacatcttttctgaaacgattttcctgtccctagagcacgctctcg

SEQ ID NO: 1406 - DNA, 121 bp, Homo sapiens
  misc_feature 1..121: note = U/M: U (0.19:0.95) in Pancreatic Beta cells
  misc_feature 1..121: note = source = chr1:23619838-23619958; Gene: HNRNPR (Intergenic)
  source 1..121: mol_type = genomic DNA
cggatcacttgaagtcagcagttctgagacccgcctggtcaacatggtgaaactccatctctattaaaaacgcaaaaattagccgtgtgtggtggtgcacacctatagtcccagcttctcg

SEQ ID NO: 1407 - DNA, 124 bp, Homo sapiens
  misc_feature 1..124: note = U/M: U (0.13:0.89) in Pancreatic Beta cells
  misc_feature 1..124: note = source = chr1:236432042-236432165; Gene: ERO1LB (intron)
  source 1..124: mol_type = genomic DNA
cgtgcgtggtggcaggtgcctgtagtcccagctactcgggagcctgaggcaggagaatggtgtgaacctgggaagtagagcttgcagtgagccgagatcgcgccactgcactccagcctgggcg

SEQ ID NO: 1408 - DNA, 174 bp, Homo sapiens
  misc_feature 1..174: note = U/M: U (0.12:0.88) in Pancreatic Beta cells
  misc_feature 1..174: note = source = chr2:66554646-66554819; Gene: MIR4778 (Intergenic)
  source 1..174: mol_type = genomic DNA
cggtggtttggagttggggattaaatatgaatctcatttacctttattatccgtacatttctcgctaatcatcataactcagactatttaaactttattgaaaatgtagccagagtaatggagtgttattaatatttgtttgtaatagttccagcctggactgagcgagtctcg

SEQ ID NO: 1409 - DNA, 179 bp, Homo sapiens
  misc_feature 1..179: note = U/M: U (0.16:0.91) in Pancreatic Beta cells
  misc_feature 1..179: note = source = chr21:47735995-47736173; Gene: C21orf58 (intron)
  source 1..179: mol_type = genomic DNA
cgggggtgcagtgaattgtgatcaggccactgcactccatcctgggcaacagagcgagaccaaccctgtctcaggaataaaaaaaaaaaatctggccaggtgcagtgagtcacacctataatctcagcactttaggaggccgaggtgggtggattacttcaggccgggagtttgagacg

SEQ ID NO: 1410 - DNA, 238 bp, Homo sapiens
  misc_feature 1..238: note = U/M: U (0.07:0.82) in Pancreatic Beta cells
  misc_feature 1..238: note = source = chr9:134650003-134650240; Gene: RAPGEF1 (Intergenic)
  source 1..238: mol_type = genomic DNA
cggcaccccagggccccactccctcccctgcggcttcatgaaagccctcattttacagatggcttgagacacagacaggttaagctgcctcccccagggtttgggggccccagggcagctggggtggcagttgtggaaggggcactggaaaaggagtcgggctgtggctgggagctggcagctgcaccctgtccaacagctcagggctcaccagccttgctgagccagcacaccggcg

SEQ ID NO: 1411 - DNA, 260 bp, Homo sapiens
  misc_feature 1..260: note = U/M: U (0.16:0.91) in Pancreatic Beta cells
  misc_feature 1..260: note = source = chr4:16584680-16584939; Gene: LDB2 (intron)
  source 1..260: mol_type = genomic DNA
cggccatcctcagggtctcgcctgctcctccctccaacggtgagagctgccttcggtcagctctgtgtatttcctgactgcaggtctccgtgagaatgattagaatttcattggaataaatgaacttgttttgacgaagctagatggctgtaattgcctactttctgctctgcttaattttgttacgttagacactgcatattgaaatttcaatggctggagcctttaaaatctctatccatcctttccaaaacaggacg

SEQ ID NO: 1412 - DNA, 290 bp, Homo sapiens
  misc_feature 1..290: note = U/M: U (0.15:0.9) in Pancreatic Beta cells
  misc_feature 1..290: note = source = chr17:67530192-67530481; Gene: MAP2K6 (intron)
  source 1..290: mol_type = genomic DNA
cgggattgcccagtgcattacaggatgcttagcaacatccctggcctctacctattagatgccagtaacaccctgccaccagatgtaacaaccaaaaatgcctcctgacattttccatatatcccctggggagcaaaatgacctccagctgagaaccacccacgtagactctcagcatctaggtacctacaaaaccatcggtgggagttacacggactcattcatttcactcagcacacattcccatatcaatcagactttgccgcctgttaattcctctttctaatgcg

SEQ ID NO: 1413 - DNA, 333 bp, Homo sapiens
  misc_feature 1..333: note = U/M: U (0.19:0.94) in Pancreatic Beta cells
  misc_feature 1..333: note = source = chr21:48078860-48079192; Gene: PRMT2 (exon)
  source 1..333: mol_type = genomic DNA
cgtcttgtggggcctcctggtccacagtctgcaggtgggccaaggccctgggagatcccatacgacggttggataaatgagggtacctgtgcacccagataggacaatctgttgtagcattggagtaattaaagcagtatggtgctataacaagacagatgggcagagcagggtagaatgcaaggaacaaaaattttcgtatgtgaaaaaggtggcattacgattaggagggagtgagggccaagtcagcaaattattctggagcagttgattagcccttgttctctcacgccatacgtgaaaacttaattctgcatggaatcagcgtcagcg

SEQ ID NO: 1414 - DNA, 154 bp, Homo sapiens
  misc_feature 1..154: note = U/M: U (0.11:0.85) in Pancreatic Beta cells
  misc_feature 1..154: note = source = chr8:144555154-144555307; Gene: ZC3H3 (intron)
  source 1..154: mol_type = genomic DNA
cgcagagcagggcagggcctgcagactgactgccaggagcagcctctgctgcctatcctggccgcctggggctctcgcgtacgtcaggacatcatggtctccatggctgctgtcttggccacttaattatcaacctcagtcagtactactatcg

SEQ ID NO: 1415 - DNA, 198 bp, Homo sapiens
  misc_feature 1..198: note = U/M: U (0.09:0.83) in Pancreatic Beta cells
  misc_feature 1..198: note = source = chr3:14511595-14511792; Gene: SLC6A6 (intron)
  source 1..198: mol_type = genomic DNA
cgcaattgagtgggaatctccaggagtatggagtgaatttggcaatgggagatacagatagatacatacaatgtatcttcctccatggacaacgaagtattttcgtagacacatatattgtcaatctcagttgttttttcctcccgtccacttcaaacaccttgtcatttattccccacggtgatgtctgaacagccg

SEQ ID NO: 1416 - DNA, 228 bp, Homo sapiens
  misc_feature 1..228: note = U/M: U (0.15:0.89) in Pancreatic Beta cells
  misc_feature 1..228: note = source = chr17:43091359-43091586; Gene: C1QL1 (Intergenic)
  source 1..228: mol_type = genomic DNA
cgggcgcagtggctcacacctgtaatctcagcattttgggaggccgaggtgggcagatcacctgaggtcaggagtttgagaccagcctgaccaacatgaagaaaccccatctctactaaaaatagaaaattagccaggcgtggtggtgcatgcctgtaatcccagctactcgggaagctgaggaaggagaatcacttgaacctgggaggtggaggttccagtgagccg

SEQ ID NO: 1417 - DNA, 251 bp, Homo sapiens
  misc_feature 1..251: note = U/M: U (0.11:0.85) in Pancreatic Beta cells
  misc_feature 1..251: note = source = chr20:57398590-57398840; Gene: GNAS-AS1 (intron)
  source 1..251: mol_type = genomic DNA
cgtctcccgaccccagtgggccccatggccttgctattaatacagtgcaaagaggcccagcagctggccggggccaggtctttccacatggatggtgacaactgccatcaccctggatgtgggctctgcacgttcccaatgtgccttctgtcagaaggggcagagctgcagtccgctggggtactgtctgctgaaaatgtccactctgacttggcaatgggggaaatcaccaatgatcaacttgggagtcg

SEQ ID NO: 1418 - DNA, 175 bp, Homo sapiens
  misc_feature 1..175: note = U/M: U (0.2:0.93) in Pancreatic Beta cells
  misc_feature 1..175: note = source = chr3:197431446-197431620; Gene: KIAA0226 (exon)
  source 1..175: mol_type = genomic DNA
cgagcaggggccggagctgggctgagaggcagtggtactgcaggctgtgctgcagccacagctcggcaacagcacgttcactggcaccatcagcactgctctggtcgttctcgtgcacgctgatgaactgggaagcaaaggggcatgagtcaaaacacacatcctggtagatacg

SEQ ID NO: 1419 - DNA, 220 bp, Homo sapiens
  misc_feature 1..220: note = U/M: U (0.17:0.9) in Pancreatic Beta cells
  misc_feature 1..220: note = source = chr8:74351022-74351241; Gene: STAU2-AS1 (exon)
  source 1..220: mol_type = genomic DNA
cgctaacggggacaaggccacataggtaaacagcaccagcaaatttgcaacgtgagaagggctatcagagaggtggcgttcagaactacctaatgtgtggggagcttgatttgctggtaaaagctgtcttccttcccgctgttaggaggacacatttggacctgaccttcaccactggtcatgtgagaaagcctctatacctggttcctcaacgtctccg

SEQ ID NO: 1420 - DNA, 248 bp, Homo sapiens
  misc_feature 1..248: note = U/M: U (0.19:0.92) in Pancreatic Beta cells
  misc_feature 1..248: note = source = chr12:80402312-80402559; Gene: PPP1R12A (Intergenic)
  source 1..248: mol_type = genomic DNA
cgatattccatgtgctcttgaaaagatcgtgttttctgctctttctgggtgtagcgttctataaatatcttcacgtcatgtaggttgatactgtttttcaattctacatttttgctgagttcatgtaattgttatagcaattgctgagagaggattgttaaaatctccaattatggtttgtttacatttccactcaattttgtcaatttttgtatcatgaattttgaaactctgttattaggtccacg

SEQ ID NO: 1421 - DNA, 379 bp, Homo sapiens
  misc_feature 1..379: note = U/M: U (0.18:0.9) in Pancreatic Beta cells
  misc_feature 1..379: note = source = chr17:3737463-3737841; Gene: C17orf85 (intron)
  source 1..379: mol_type = genomic DNA
cggattacaatgagaatggcacaaatctgaacgactaatgccagtctacacagtaacatggaaatgctgaccatagactgtccagggaatggaaaaaagcagtgtgactgcaaaggagaaaaacaaaagttcactgccataagagattagaaggaaacacacagactgttgacaatgacggggtttggatggtagaccgtgggcaacttttcttcctgttctatgttacaaattttctttggtgagcatgaactgtttgtaaaagagctaatgaagaaaagattagagtccagagtgaacaggctcatcaaaaatgctgacagcaggctaggcgcggtggctcacgcctgtaatcccaacactttggaaggccgaggcg

SEQ ID NO: 1422 - DNA, 406 bp, Homo sapiens
  misc_feature 1..406: note = U/M: U (0.13:0.85) in Pancreatic Beta cells
  misc_feature 1..406: note = source = chr8:140900839-140901244; Gene: TRAPPC9 (intron)
  source 1..406: mol_type = genomic DNA
cgaactcccttgggggtcttactctcgcgcaagcaatttatcaaagtgtttcctgcaaagataattccctcccttagaagaattctccaaacgaaattttctccatctcattacacacacagcctatgtttgctgaactgatattgttactgacaaatactctgcaatgaacttttaattatctcattttgccctgtgacaatcctggaagttcggattctagcattcacctcattcattcaatagttaacaggcagctatctgagctagggtttagggttatggagctgactgtgacccaacagacagtcttttcagaacatgctgacctccagcaatcatacttccaggtttatacccaaaagaactgaaagcagggactcagacagatatttgcaaacccacg

SEQ ID NO: 1423 - DNA, 407 bp, Homo sapiens
  misc_feature 1..407: note = U/M: U (0.18:0.9) in Pancreatic Beta cells
  misc_feature 1..407: note = source = chr2:3431774-3432180; Gene: TRAPPC12 (intron)
  source 1..407: mol_type = genomic DNA
cgtggcactgtttacccatctctaaggagaggattttgatggaaatgacactgagtgccctttaagatagcgaatgaaaatctgtgggtttaggtggaaactgcctgtcatctttcctcactttgaggacattttttcctaaggacgttcagtcaagcctagaaaacatgctttgattcttcctgaaattaaattgcattggtaaatggataaagagaagacagcagctacgcatcattgagaagctaatttaaattatgaaatagacataaatcatacatacattttagcaaaagcgtattaacattcatcctcaataatatgctggatgtttactaatttttcttcccattttgtggtgtaacaaagcataaatgtaagattttgattcattcacttcattttcg

SEQ ID NO: 1424 - DNA, 150 bp, Homo sapiens
  misc_feature 1..150: note = U/M: U (0.23:0.93) in Pancreatic Beta cells
  misc_feature 1..150: note = source = chr16:70619229-70619378; Gene: IL34 (intron)
  source 1..150: mol_type = genomic DNA
cgatcctcccgcctcagcctctcaggttgctgagaccacaggcaagtgctaccatacctggccaattaaaaaataatttttttgaggctgggcgcggtggctcacgcctgtaatcccagcactttgggaggccgaggcagatggattacg

SEQ ID NO: 1425 - DNA, 211 bp, Homo sapiens
  misc_feature 1..211: note = U/M: U (0.21:0.91) in Pancreatic Beta cells
  misc_feature 1..211: note = source = chr1:38058749-38058959; Gene: GNL2 (intron)
  source 1..211: mol_type = genomic DNA
cgtagagggtgatttacgccggaattccaaattctaaaacaaactgcaaagtagatgactacacatattaagttctttgacatttgtattttagtcacatcttttaggacagacggagatggagaatctaattaccaaacaaattaagaccagttagcggaatgccacactcagcaaatccctgtggtagaggctacctcagcagaactcg

SEQ ID NO: 1426 - DNA, 214 bp, Homo sapiens
  misc_feature 1..214: note = U/M: U (0.19:0.89) in Pancreatic Beta cells
  misc_feature 1..214: note = source = chr8:144545917-144546130; Gene: ZC3H3 (intron)
  source 1..214: mol_type = genomic DNA
cgggtctgggcaggacgtggcagaccccgcaggtgtgtacaaacaggcagtctgaagtcatccccgtcctgatatctaggagggcaggcggcatctggcagaggttgacccctgagccacagccgtggccccccaaaaggggaaggagcggagatttactcccagcctaaattattcacaaggaaagggaatgtggctctttaacaagccatcg

SEQ ID NO: 1427 - DNA, 325 bp, Homo sapiens
  misc_feature 1..325: note = U/M: U (0.24:0.94) in Pancreatic Beta cells
  misc_feature 1..325: note = source = chr7:129333023-129333347; Gene: NRF1 (intron)
  source 1..325: mol_type = genomic DNA
cgcagtggtggggaacaggatcgcaagtcccctgggcagttgtttactcagtgtggacgctgacgctgctgctcaggggtggcacttttattttttattccatctgaaccagcaacttggtctgaagtaatactatattttataaatataaacctaaatagtgatcttttgattgttggattcatagccctttctgtggacactggaaggatctctaaatagtggttcagaaaggaaagcatatctaaaccaagcttgtccaacccacgtcccgcaagacgcatgtgacccagaatggctttgaatgtggcccaacacaaattcg

SEQ ID NO: 1428 - DNA, 344 bp, Homo sapiens
  misc_feature 1..344: note = U/M: U (0.21:0.91) in Pancreatic Beta cells
  misc_feature 1..344: note = source = chr18:29493069-29493412; Gene: TRAPPC8,TRAPPC8 (exon,intron)
  source 1..344: mol_type = genomic DNA
cgacagagcaagactctgtctcaaaaaaaaaaaagaaaatgattaattcacactgatagtacacacctgaaaagagtgcacataagggattactgcagttagttaaaaacagcttttaaaccactgacctaagagctcacctctgacagatcaaaactgaccagattccacacaattaatatgaataattatactagttaaaccaaaacgtaaaaactgaagtatcgtttttgtggtttgcttcatttattttttacatatacctggttttgaatactatttttctggagatactgactccaaggatctggtatctgttcatctgatgctcgattagatgttcg

SEQ ID NO: 1429 - DNA, 435 bp, Homo sapiens
  misc_feature 1..435: note = U/M: U (0.13:0.83) in Pancreatic Beta cells
  misc_feature 1..435: note = source = chr1:111011211-111011645; Gene: CYMP (Intergenic)
  source 1..435: mol_type = genomic DNA
cgattttttttttttttttacatcagctaacatattcttctccattacctgcctggcccctgtggtcatctgggctttcacccttgccaatgtcactgagcctcatgtttcttatctgttaaatgaggcctgagaggctggggtagaaagatcatggattctggagttgaactggtcctggattgaaatcctggcaacactgtcttctcatcttggagctgagtaacgacttaagttctttaagcttcatttttctcatttgtaaaatatagataatagcaaccaccctgcatgctcttggtgatgactagatgagaggagaataataagagcttgcattcatcgagtgcctgctgttgccaggcaccttgcatggcctcactgatcatcacaaaaaacctacaaggtagaagatgtttccagatgaggacgccg

SEQ ID NO: 1430 - DNA, 257 bp, Homo sapiens
  misc_feature 1..257: note = U/M: U (0.25:0.94) in Pancreatic Beta cells
  misc_feature 1..257: note = source = chr15:52008281-52008537; Gene: SCG3 (intron)
  source 1..257: mol_type = genomic DNA
cgtgacctcctgatccgcctgcctcggcctcccaaagtgttgggattacaggtgtgagccaccgcgcccagcaaggcagtggttttcaaactttgatgcacattaaaatcacttagcgggagtctgccttttattccattaaagatgttgacactgcagcctattctgcagaggcagtattaatgaaccaggaataaacaagaagtgccctttgtgccttaggggtcaggaataaaggaatcatcgccttaggtgcg

SEQ ID NO: 1431 - DNA, 258 bp, Homo sapiens
  misc_feature 1..258: note = U/M: U (0.23:0.92) in Pancreatic Beta cells
  misc_feature 1..258: note = source = chr10:121146663-121146920; Gene: GRK5 (intron)
  source 1..258: mol_type = genomic DNA
cgcaccaccacacccagctaattttgtatttttaatagagatggggtttcgccatgttggctggtctggtcctgaattcctgacctcaagtgatccgcctgcctcagcctctcaaagtgctgggattacagacgtgagccaccgtgcccggccttctgtgcagtcttaatgtccacatttctcaagtcaagtggaaggctgcagctgttttttaatgacggcccaggtgattttctgggcagcagaactgtttgcgcg

SEQ ID NO: 1432 - DNA, 303 bp, Homo sapiens
  misc_feature 1..303: note = U/M: U (0.11:0.8) in Pancreatic Beta cells
  misc_feature 1..303: note = source = chr14:93400750-93401052; Gene: CHGA (intron)
  source 1..303: mol_type = genomic DNA
cggaagtcccaggctggcctcaccctgggtcctggcaaccatgggctaggccgagggaagggggctcttcagggcactgtaagctttgttttccatgtgccctaaaagaacagactcccacctgtgcggaaccatttgagaggaagtggggcctggataagaggccaccaagagcagtgtggggacagggcccccggcatcagccaccttcttgtgcataatgatcccgagagcagtacagtaagctcattatcactgtctccatgatggatgagggtacagagagacaaagccacctgtccg

SEQ ID NO: 1433 - DNA, 95 bp, Homo sapiens
  misc_feature 1..95: note = U/M: U (0.17:0.85) in Pancreatic Beta cells
  misc_feature 1..95: note = source = chr8:144578492-144578586; Gene: ZC3H3 (intron)
  source 1..95: mol_type = genomic DNA
cgagagccactgccccccaaggagccggggttctgcagagaaacagctgactccacggtgagcctggagcacctgccgtgcagaacgtgatgacg

SEQ ID NO: 1434 - DNA, 180 bp, Homo sapiens
  misc_feature 1..180: note = U/M: U (0.23:0.91) in Pancreatic Beta cells
  misc_feature 1..180: note = source = chr18:72341539-72341718; Gene: ZNF407 (Intergenic)
  source 1..180: mol_type = genomic DNA
cgtattgttcgcgcttccagtgtcctgcattataagcatatttttgttgcctgattttagctgagtcaaagcaataggctccatttgatttgtcaacgttatggaaaaaatagctaaaatagtttaaaatagttgtcattagccttgagactataatacgttgatgcctttttattaacg

SEQ ID NO: 1435 - DNA, 388 bp, Homo sapiens
  misc_feature 1..388: note = U/M: U (0.2:0.88) in Pancreatic Beta cells
  misc_feature 1..388: note = source = chr1:20826430-20826817; Gene: MUL1 (exon)
  source 1..388: mol_type = genomic DNA
cgagctctcccaagtggcaggagttcaaatcagggccagtggcgaaaccaggaggcctgcctgaccaactgcccttcacatgatctctcttcaatctgttgcccggggccccgaccatctgggcagaagcggatgtgctgacttcactttcttttgtcctctacacacacgtgcaggcgttaaggaggcaagcaggtgaggggaaaggaacacaagttgacctgcccagcctgacaattctgaagaaagactgtttcccggggcatgaggaaaaagaagaaaagctgcggcagagtctcttcggaggcagcacccaaggcatccgttgtactcggggcccagcctttcctcccctctgagtcctccaccaagtccacagcaagcaacg

SEQ ID NO: 1436 - DNA, 300 bp, Homo sapiens
  misc_feature 1..300: note = U/M: U (0.25:0.92) in Pancreatic Beta cells
  misc_feature 1..300: note = source = chr1:110154279-110154578; Gene: GNAT2 (intron)
  source 1..300: mol_type = genomic DNA
cgaactcctcctatttcgcttgtgcttgttccctctaagcagcttatcctgaatgtagaagaaatctgcttaggcttaaaagatctctcagtggccccaccatctctgtttccccctgcgtaacctcctgggctccttagagtctggtccagcttacaaagatatgctcctttagtgtgtccttacgactgtgccacagatcagctgggggaaaagaaggtgccttagcctagtgcgtcagctcccagatcccttatgggggcttggaaacccagctcaggcatctaatcttctgctacg

SEQ ID NO: 1437 - DNA, 198 bp, Homo sapiens
  misc_feature 1..198: note = U/M: U (0.3:0.94) in Pancreatic Beta cells
  misc_feature 1..198: note = source = chr14:103120423-103120620; Gene: RCOR1 (intron)
  source 1..198: mol_type = genomic DNA
cgccattctcctgcctcagcctcccgagtagctgggactacaggtgcctgccaccacgcctggctaattttttgtatttttagtagagacagggtttcaccgtgttagccaggatggtttcgaactcctgacctcaggtgatctgcccgcctcagcctcccaaagtgtcgggattacaggtctgagccattgcgcccg

SEQ ID NO: 1438 - DNA, 160 bp, Homo sapiens
  misc_feature 1..160: note = U/M: U (0.33:0.94) in Pancreatic Beta cells
  misc_feature 1..160: note = source = chr3:118945649-118945808; Gene: B4GALT4 (exon)
  source 1..160: mol_type = genomic DNA
cgctcacctggtggatgacgtagatgccataatccagctgctgcctctgcaggaagggatgcagatgttccagcaggtacatcaggtgtttctctctgttccggtggggaacgaggatggcgaccctctgtaaagctttacattcctgagggcgataccg

SEQ ID NO: 1439 - DNA, 387 bp, Homo sapiens
  misc_feature 1..387: note = U/M: U (0.34:0.95) in Pancreatic Beta cells
  misc_feature 1..387: note = source = chr11:68181416-68181802; Gene: LRP5 (intron)
  source 1..387: mol_type = genomic DNA
cggcggccaccgctgcggctgcgcctcacactacaccctggaccccagcagccgcaactgcagccgtaagtgcctcatggtcccccgcacctcactccctcgttagatcaggctggttctgggagctgacgctgaaaggagcttctcatctggggttcctgggtgtacatagatggttgggtaggttgtgcactgcacaagctgcatgatgctacctgggggtccaggtccaggctggatggacttgttgcttcatcaggacatagataaatggccaaaactcctcagctggaaggtcctgggcaggatctttgggtgtgaaaaccagtcacaggggaagggtgcttgctcatactgccagcacagtgctgagtgctttccatagcg

SEQ ID NO: 1440 - DNA, 398 bp, Homo sapiens
  misc_feature 1..398: note = U/M: U (0.32:0.93) in Pancreatic Beta cells
  misc_feature 1..398: note = source = chr7:156933820-156934217; Gene: UBE3C (intron)
  source 1..398: mol_type = genomic DNA
cgagggccattcttctgggagagagtggcagtaaagagcccttagtaggaactggcagcagctggggcatgggtgccctggcctggttaaggaatctgggtggggagccagctgtatgtacagcttgaaggatttttgcatatggacactctcctgtagatggaacaccactcacatcaaaggaagaccatccccagcattccagaggctcccctgcactctcacccattcattacagtcatatgtgacttaaagagggggacgctgtcactagtccagttggttgttgtgggaccgtcctagagtgcacttaacagaaacctatagccagtgttgcccactgcacacctagctgcttggtacagcccgttgcccctatgctacacacctggacagcg

SEQ ID NO: 1441 - DNA, 260 bp, Homo sapiens
  misc_feature 1..260: note = U/M: U (0.03:0.95) in Pancreatic Beta cells
  misc_feature 1..260: note = source = chr8:144546287-144546546; Gene: ZC3H3 (intron)
  source 1..260: mol_type = genomic DNA
cgcctgtccccgctggatctggccggctcagcgctttcccatatataattacaagctgctatccatcatgcgggcgccgcggcgcggacacacggaaaggcagcagtaagcacttccactaatagaagcaggacctaaatatcactttgatattttcatttaaatcgaaacattttacaataatcagccatggcctccatggggatcctgccactgcccccacagggtctggggctgccccagccaggccctacctcccc

SEQ ID NO: 1442 - DNA, 157 bp, Homo sapiens
  misc_feature 1..157: note = U/M: U (0.02:0.9) in Pancreatic Beta cells
  misc_feature 1..157: note = source = chr22:32628870-32629026; Gene: SLC5A4 (intron)
  source 1..157: mol_type = genomic DNA
cggattcagggcttacctgtgtacaggatgcggctgatcatccccggcatcaccatgaggaacatgggcagcagcttcaggtaagcacacataatgcaagcggccttcacgtgagacatgtccttgccacacaggcagcgctgcacaatgacctgcc

SEQ ID NO: 1443 - DNA, 260 bp, Homo sapiens
  misc_feature 1..260: note = U/M: U (0.01:0.89) in Pancreatic Beta cells
  misc_feature 1..260: note = source = chr11:2176043-2176302; Gene: INS-IGF2 (intron)
  source 1..260: mol_type = genomic DNA
cgctctagagaggatcaggggatgcccaaggtccctccgaaactgggcagcagcgggcctggatgtgggcaggtggtggccctgtggaggccgggctggggtgggaccgagctttgaagtgaaggtggactttgaagacagaagggtgcgatttgagtcccagcgtgagcagccgcaagctggcagggccgcggggggctctggctctgttttccaaaaacacagatgggctgggaagggggtcagagagaggcctgggc

SEQ ID NO: 1444 - DNA, 391 bp, Homo sapiens
  misc_feature 1..391: note = U/M: U (0.04:0.92) in Pancreatic Beta cells
  misc_feature 1..391: note = source = chr10:121550377-121550767; Gene: INPP5F (intron)
  source 1..391: mol_type = genomic DNA
cgtattcacgctcccacgcccttccttacccttgtcagctgtgcggcacttctcctgcagcccctaattactgcttcttcaagtttaactaatctccggacccaaagtgtatgttattaagctgatttcattagtgcatgtgagcgtaggaggagagggagtggttgaaatgtccagcttttagggctcccactagagcaggctcttaagccatcttctcaaccaaaacactcaattagcatcagtatttagcacggatacctgtaaagtcataaccctgaagcatagcaaatgtgcattttgcaatttttaaattcttagatactaatttccaaagcattaataacctcagccggaacatttcactcttcagttatgttagaagagaacc

SEQ ID NO: 1445 - DNA, 288 bp, Homo sapiens
  misc_feature 1..288: note = U/M: U (0.1:0.9) in Pancreatic Beta cells
  misc_feature 1..288: note = source = chr18:56002609-56002896; Gene: NEDD4L (intron)
  source 1..288: mol_type = genomic DNA
cgtcacctgccttacagcgctgccacagcagtgggccctgattcagacagcagggggtcatcccctaagtgcatttcactgatgtaaattatcattcacagcccagtgccccagctgggagagcgcgttcatcaactgtcacgggtggtgaggaaccaacggtaatgatccactttatcagacatcaatagcaagaggccgtgaggcagttttaatatttcgtgtagtggtgaatatacgctgtttttaaaaataagattagctcctttgtgctacagagctgcacac

SEQ ID NO: 1446 - DNA, 305 bp, Homo sapiens
  misc_feature 1..305: note = U/M: U (0.02:0.94) in Pancreatic Beta cells
  misc_feature 1..305: note = source = chr10:135206703-135207007; Gene: MTG1 (promoter-TSS)
  source 1..305: mol_type = genomic DNA
cgccactgcactccagcctggcgacagagcgagactccgtctcaaaaataaaaattccggtagagtaatactcttgtaacgcagtgtgcaattgagcagttgctgactgctgatttagagttgaaatccgactatatttatgtctagtcttggacagtggagaatatttcagcctcattaattaatcggtttaatttagcagaactgcagtcagtatttggaaacagtttgttatattaaaccctgaagtacttgaggctgcgcgcggtggctcatgcctgtaatcccagcattttgggaggccg

SEQ ID NO: 1447 - DNA, 121 bp, Homo sapiens
  misc_feature 1..121: note = U/M: U (0.05:0.93) in Pancreatic Beta cells
  misc_feature 1..121: note = source = chr6:11769090-11769210; Gene: ADTRP (intron)
  source 1..121: mol_type = genomic DNA
cgaatctctgtgctctcccaagaaaggcacacaaaagggtgccttgctcagccgaagaagagccggtgcactttcttccttaaatagggcacctgcaggcctcaccgagacaatctggccg

SEQ ID NO: 1448 - DNA, 160 bp, Homo sapiens
  misc_feature 1..160: note = U/M: U (0.02:0.9) in Pancreatic Beta cells
  misc_feature 1..160: note = source = chr19:33953366-33953525; Gene: PEPD (intron)
  source 1..160: mol_type = genomic DNA
cggggctgagctggccaggccacacccgccacggctgggcagccgccggaagctccccgggtgccactggctcgctgcagccctaataggagcagaaggccaatggagctctccagagctctttatgggccatttaaccatccctcaacccagtcgcccg

SEQ ID NO: 1449 - DNA, 169 bp, Homo sapiens
  misc_feature 1..169: note = U/M: U (0.07:0.94) in Pancreatic Beta cells
  misc_feature 1..169: note = source = chr3:196100180-196100348; Gene: UBXN7 (intron)
  source 1..169: mol_type = genomic DNA
cgattcgtacaacagatatcgatacatcaatcgttagtgcgtactttttgcctgtcagtcccttgtcagcataaagacccatgaaatgctgctgagtggaaaacaatggcagaaaagcaaataagcaaatgctgcctcaaatctttgcctaggaaagaacagtgacacg

SEQ ID NO: 1450 - DNA, 172 bp, Homo sapiens
  misc_feature 1..172: note = U/M: U (0.04:0.89) in Pancreatic Beta cells
  misc_feature 1..172: note = source = chr6:735859-736030; Gene: EXOC2 (Intergenic)
  source 1..172: mol_type = genomic DNA
cgtgacactggagctttagttaatcgaacgagccatggctcagcattttctctgatttttttcaagtaatgatgaggcacaggaggaggatgattatgaaactgacattaaagcatgtcccctgcaatgaaataagatgtacagatattttaacgtattagctggccgggcg

SEQ ID NO: 1451 - DNA, 309 bp, Homo sapiens
  misc_feature 1..309: note = U/M: U (0.05:0.9) in Pancreatic Beta cells
  misc_feature 1..309: note = source = chr22:30719173-30719481; Gene: TBC1D10A (intron)
  source 1..309: mol_type = genomic DNA
cgtgagccaccatgccctgccactttcagcttcctgacttgaaatgtctccccgcaaataagtattaattactccaccgcaggcctgaggagaaaaaggtgaatgagcctcttcccagtcctgaagctaatcagtctaatgaactggtaatgacaacatattcttatccttctgggccacttctattagcctcatatactgctgagagagtcgaaagtgctgagctaagtcagggaaggtaagagcaggcaggtgactgctaagacacttctgttctacctgtctgacacctgatatcctgcagggacg

SEQ ID NO: 1452 - DNA, 428 bp, Homo sapiens
  misc_feature 1..428: note = U/M: U (0.05:0.9) in Pancreatic Beta cells
  misc_feature 1..428: note = source = chr16:30958131-30958558; Gene: FBXL19 (exon)
  source 1..428: mol_type = genomic DNA
cgtctcctgctgcgtcacgcaccccagctgagcgccctggacctgagccactgcgcccacgtcggggaccccagtgttcacctcctcacggcccccacgtccccactccgcgagaccctggtgcacctcaatcttgctggtaagcacggtcccccatccgtcctgccagcctgtggatccccacggccagtgccaaccccttgctcacctgcctggtctcagctccactgccccatccccaggttgccaccgcctaacggaccactgcctcccgctgttccgccgctgccctcgtctacgccgcctagacctgcgctcctgccgccagctctcacccgaagcttgtgcccggctggcagctgccgggccccctggccccttccgctgccctgaggagaagctgcttctcaaggacagctagttgggcg

SEQ ID NO: 1453 - DNA, 207 bp, Homo sapiens
  misc_feature 1..207: note = U/M: U (0.11:0.93) in Pancreatic Beta cells
  misc_feature 1..207: note = source = chr9:88873435-88873641; Gene: C9orf153 (intron)
  source 1..207: mol_type = genomic DNA
cgtctggaaggacgcatgtggacggatgagggaggaaggagacatccacctagccagccagatcagacaaattaaccctggccatcagtggggtgacagatgttgcagccagatcaccctcacatccggaaataattgcttttaaaacgcaatatttgaaaacctgaattttcttgggtaagcaactattatattgctaatttaacg

SEQ ID NO: 1454 - DNA, 225 bp, Homo sapiens
  misc_feature 1..225: note = U/M: U (0.1:0.91) in Pancreatic Beta cells
  misc_feature 1..225: note = source = chr20:47604576-47604800; Gene: ARFGEF2 (intron)
  source 1..225: mol_type = genomic DNA
cggcctcccaaagtgctgggattacaggcctgagccaccacgccctgccaaagaagctaaaatttgatacagattgttaatgagctttttctacactctgggttgctaagtcttgttcagtgatgatgaaagcgtaaaaactcttgcctcatttggaatcaaggggagtagtcggctgcttttctcgtgaagtgtgtctctgttagcattgtaccttccaaaccg

SEQ ID NO: 1455 - DNA, 184 bp, Homo sapiens
  misc_feature 1..184: note = U/M: U (0.02:0.81) in Pancreatic Beta cells
  misc_feature 1..184: note = source = chr11:2176386-2176569; Gene: INS-IGF2 (intron)
  source 1..184: mol_type = genomic DNA
cgaagcccacaggcctgtggacccccagggcttggcctcctcgaggccggtctccatccctggcaagggctgggctggctctgcctaggggtcacagccacccgggtttagacattctcagcccccctgggcgaggagagcctggcaggcaccacctacgttaccctcggcctgagggaccccg

SEQ ID NO: 1456 - DNA, 231 bp, Homo sapiens
  misc_feature 1..231: note = U/M: U (0.13:0.91) in Pancreatic Beta cells
  misc_feature 1..231: note = source = chr16:89202972-89203202; Gene: ACSF3,ACSF3,ACSF3 (promoter-TSS,exon,intron)
  source 1..231: mol_type = genomic DNA
cggattctggcataagccggcgggcacaggggacagccagggatggctggacacagctgaggatggccgaggccggcctgcagctccccaacggcctcctccgggtcaggatgagaggagaggttgccagctttgatgccagccgctcctgcctcccccacctgcctctgtgcctacagcccgcttctgcctcaagatcacacagcgggcttgtgaggccaggggtctccg

SEQ ID NO: 1457 - DNA, 423 bp, Homo sapiens
  misc_feature 1..423: note = U/M: U (0.16:0.92) in Pancreatic Beta cells
  misc_feature 1..423: note = source = chr9:101531696-101532118; Gene: ANKS6 (intron)
  source 1..423: mol_type = genomic DNA
cgtagggaggtattacctataaaaagcaaaaatctaggaacagcctcagtgttcaacacagggaattggttaaatgaactgtgatgcctcatacaaatggaatactgtttgattattaaacaaggtgctgtagatatatatgtatcaacataaaaaggtgctcacaatctagcaatgtgaggaaaaagaaaaaagcaagttacagagcagtttatagtttagaaaggcacgtggttccaagaacaggctctgaagtgagactgcctgggtttggatcctggctctgccaactaatagctatttgaccccggacgagttatctaactgtccttagccccaatccctcatctgtaaaacagaggtggtaacttcactgcctgctggggcactgaaggagataattcattcgaagggcttggcacg

SEQ ID NO: 1458 - DNA, 104 bp, Homo sapiens
  misc_feature 1..104: note = U/M: U (0.21:0.94) in Pancreatic Beta cells
  misc_feature 1..104: note = source = chr15:99431340-99431443; Gene: IGF1R (intron)
  source 1..104: mol_type = genomic DNA
cgtcctcggcacccagaagcccaggaaacaccaggcagctccactcactcccgtacttgctgtgtcgtccgttccctggggacaggattgtcgctgatcctgcg

SEQ ID NO: 1459 - DNA, 435 bp, Homo sapiens
  misc_feature 1..435: note = U/M: U (0.25:0.94) in Pancreatic Beta cells
  misc_feature 1..435: note = source = chr16:24794958-24795392; Gene: TNRC6A (intron)
  source 1..435: mol_type = genomic DNA
cgcaaccttccaaatcttaagtttgcctacagcattgcagcgtataaacattttgcattacactcagtaaaactcagccgctccctttcttcctactagcacagagattaactatttctcattatttcctggaaagctgagtgataatactctacttaatgatgttcctctatgtttatcttccagatcatttacaacactgggtcttgtgtgtctttaagtgaaataaattatttgacttcttccaaatctgaaataatctctgactctgaaacatattagttatacctgaggagtcctgttcttttcatcctttcagttttaatagcgtcttttcccatcccctgcaacacattttgtttttgttgttgttgttttgagatggagtttcgctcttacataatgcccaggctggagtgcagtggtgcgatctcg

SEQ ID NO: 1460 - DNA, 393 bp, Homo sapiens
  misc_feature 1..393: note = U/M: U (0.35:0.94) in Pancreatic Beta cells
  misc_feature 1..393: note = source = chr12:123826263-123826655; Gene: SBNO1 (intron)
  source 1..393: mol_type = genomic DNA
cggagtttctccatgttggtcaggctggtcttgaactcccaacctcaggtgatctgcccactttggcatcccaaagtgctgggattacaggcgtgagccaccgcacctggcctctattactaatttaaattaagcacaggcatgaaaacatgtaaacccatgtgtctttatggaagtaaagaattaactttagaaaacaactcaaaaggaacgtgtgcaagggaagcttgaaaattatttatcagaaagatacccaaaagccagcattactttgagacacttcatttgactcattaaaaataaacaaggccggcgcagtggctcacgcctgtaatcccagcactttgggaggccgaggaggcccagtctctactaaaaatacaaaattagccg

SEQ ID NO: 1461 - DNA, 155 bp, Homo sapiens
  misc_feature 1..155: note = U/M: M (0.91:0.15) in Pancreatic Beta cells
  misc_feature 1..155: note = source = chr12:133196447-133196601; Gene: P2RX2 (intron)
  source 1..155: mol_type = genomic DNA
cgccacctgcctctccgacgccgactgcgtggctggggagctggacatgctgggaaacggtcggtgtgcgccagctggggctgggcgggtggggcagggctgcgtccccgctaatgcctcagtgacctctgcctcccaggcctgaggactgggcg

SEQ ID NO: 1462 - DNA, 159 bp, Homo sapiens
  misc_feature 1..159: note = U/M: M (0.81:0.13) in Pancreatic Beta cells
  misc_feature 1..159: note = source = chr20:62105601-62105759; Gene: KCNQ2 (Intergenic)
  source 1..159: mol_type = genomic DNA
cgcattggctgtgattaccagcatgaagtgggcttgccccaagcggctgcggtttctctcgattgttaagggaggaggcaccagcctggtgctttcaggggagggagaggacttcagtatgcagaaggaagagagcaccgtggcatctccctgcacacg

SEQ ID NO: 1463 - DNA, 321 bp, Homo sapiens
  misc_feature 1..321: note = U/M: M (0.85:0.2) in Pancreatic Beta cells
  misc_feature 1..321: note = source = chr8:144502355-144502675; Gene: MAFA (Intergenic)
  source 1..321: mol_type = genomic DNA
cgccctcccctcggaacagagccccctcttccaagaagccttctcagattgacgaagggcttgctgaacgggtccctctctttactgctcatgaggcccctgtgtggatggccgatgggaggagcgtcttcttacagatgaggtgattgagccctgagagacggcccccgctctacctccagctggggaagggcagaggtcaggccgactccagtccagcccctctgccaccatggcgggggtggcctggtgactgggccggggggctggggaggtgcccacctgacctaaccaaggccagtgacgaggtccaaggccccg

SEQ ID NO: 1464 - DNA, 303 bp, Homo sapiens
  misc_feature 1..303: note = U/M: M (0.86:0.22) in Pancreatic Beta cells
  misc_feature 1..303: note = source = chr8:136225451-136225753; Gene: LOC286094 (Intergenic)
  source 1..303: mol_type = genomic DNA
cggcagaggagctgattggatgcccagttgcaattcctcacttctcctgctgttttgaaaggttccgataagagggaaaatatcctctctggggagcccttgccctttcatgatttgccaaacacctcttcagcaaggtagccaagagcctgctgcagccaactgagattcaaagagaaagcagatctaaatgaagggttggagtgaaaagactgtgtttattgttgctccctggcatcctaggcgatcttcaccagaggaatttcagcaacgggctcactgcctgcaggcagtcagggaacg

SEQ ID NO: 1465 - DNA, 203 bp, Homo sapiens
  misc_feature 1..203: note = U/M: M (0.7:0.07) in Pancreatic Beta cells
  misc_feature 1..203: note = source = chr2:67877948-67878150; Gene: ETAA1 (Intergenic)
  source 1..203: mol_type = genomic DNA
cggacagaccaatccccacccctcaggccctcgcttctaagagaagcagacctttgctgggagccagctcattcctccacgaaacatttgtaatgattacttgacaaggagtgcagatacaaaattgcgcaacagagagccatcactcaccacagcccgctggaattctcatgctggagcaacagtgccccccaaagcaagcg

SEQ ID NO: 1466 - DNA, 182 bp, Homo sapiens
  misc_feature 1..182: note = U/M: M (0.78:0.18) in Pancreatic Beta cells
  misc_feature 1..182: note = source = chr11:33398566-33398747; Gene: HIPK3 (Intergenic)
  source 1..182: mol_type = genomic DNA
cgaactgtcagaaatctgtctttcgggaaggcactttgggcggggaagaaaaaaaaaggagcaatcgcctcttctttttggacaagttgtagaaccttcctagtggtcccgcaggcacgctttatttagagaaagatgtgtgtttaggacaccttaaacgggaaatgtatcattagaacacg

SEQ ID NO: 1467 - DNA, 106 bp, Homo sapiens
  misc_feature 1..106: note = U/M: M (0.81:0.23) in Pancreatic Beta cells
  misc_feature 1..106: note = source = chr9:137981018-137981123; Gene: OLFM1 (intron)
  source 1..106: mol_type = genomic DNA
cggagggcgattcctccatgatgactttgttccggcctgccggtcccgatcttctggggttgggaatgaatgagattaaagatatgactactatagattctacccg

SEQ ID NO: 1468 - DNA, 166 bp, Homo sapiens
  misc_feature 1..166: note = U/M: M (0.92:0.34) in Pancreatic Beta cells
  misc_feature 1..166: note = source = chr12:133196638-133196803; Gene: P2RX2 (intron)
  source 1..166: mol_type = genomic DNA
cgaggtgttcggctggtgcccggtggaagatggggcctctgtcaggtgcacctgcgccccggcctggggcccagcctcccctctgatccttttcccctgaccagaggccaaacgggcggggcaggagtgacaagatctggggaggggtgggggccaatgccaggcg

SEQ ID NO: 1469 - DNA, 80 bp, Homo sapiens
  misc_feature 1..80: note = U/M: M (0.66:0.09) in Pancreatic Beta cells
  misc_feature 1..80: note = source = chr14:105266518-105266597; Gene: ZBTB42 (promoter-TSS)
  source 1..80: mol_type = genomic DNA
cgggtttaccctcgggtgactgcccaacgcgggctgggatacaagcggaccctcggaagggttccttttgcagactggcg

SEQ ID NO: 1470 - DNA, 110 bp, Homo sapiens
  misc_feature 1..110: note = U/M: M (0.75:0.2) in Pancreatic Beta cells
  misc_feature 1..110: note = source = chr20:62105422-62105531; Gene: KCNQ2 (Intergenic)
  source 1..110: mol_type = genomic DNA
cggggcctgtttttgttgttgttgttttgtttttaactaggctgaatacagaagggtcggtgcaggcagaatgctaacctgtacgttatccaggacgttggggatagacg

SEQ ID NO: 1471 - DNA, 187 bp, Homo sapiens
  misc_feature 1..187: note = U/M: M (0.7:0.16) in Pancreatic Beta cells
  misc_feature 1..187: note = source = chr5:158476829-158477015; Gene: EBF1 (intron)
  source 1..187: mol_type = genomic DNA
cgtgttcttgggaggggtgcttatctggtgataatctccagaatgattttacatcccggttgtcctacaaaactaactctctccgacacagcacagcaaattcattcaatttggtgggtcctaacgctttctctttctctccctctagaggcagaaaatgaagcactaaataaggtttaatttcacg

SEQ ID NO: 1472 - DNA, 359 bp, Homo sapiens
  misc_feature 1..359: note = U/M: M (0.9:0.11) in Pancreatic Beta cells
  misc_feature 1..359: note = source = chr2:219847327-219847685; Gene: FEV (intron)
  source 1..359: mol_type = genomic DNA
cgagcaaggacagatatccgccgccactctccatctcagccgggcgcccttatttagggaaaagacgcacaaccgtacagggcggccttgggcagaatgatcggactgccccatcccagctggaccacatccagaggtgggaagggacaggcgtgcagcaggacgaccccaaccactgctggacaaggcccagctagtcccgagtccccaaagacgtagttggacaggctactcctgaggtggagtggtggctggctcccttgggacaccacatccgacaggagtaggaacgaacagtggccccctatacgtgacaggaggggcaagctctcatgggctcactatcctagccaccttcg

SEQ ID NO: 1473 - DNA, 339 bp, Homo sapiens
  misc_feature 1..339: note = U/M: M (0.94:0.17) in Pancreatic Beta cells
  misc_feature 1..339: note = source = chr2:219847690-219848028; Gene: FEV (intron)
  source 1..339: mol_type = genomic DNA
cgcaggcctctgcgctggccctgagaatttggcctcttattttcggaacaggcgggattccctgcctacgaaggtgccatagttctcggggcctgatgaacaactctgaggaggggaacggaccgagcagctgttgtgcttggctaccaacctcctcctgtctttgtgtgatctccctccgaattcggttgctggaggcagcaaggaggtttttccaggatatgcgagtggttagagagtggggtcccagaattcctgctcccctgtcttggagcctcaagcagacaggcagagaaaaatcccgatacaattacccccactcccttttagaataaaacg

SEQ ID NO: 1474 - DNA, 313 bp, Homo sapiens
  misc_feature 1..313: note = U/M: M (0.84:0.1) in Pancreatic Beta cells
  misc_feature 1..313: note = source = chr2:1858523-1858835; Gene: MYT1L (intron)
  source 1..313: mol_type = genomic DNA
cgtgaatgaatgtggggaagctgtttggcccgagaaggctcacagtcctcctgggcctgacgtcgtctccttctcttgagacgcctctccacccgcctgcataggttcctgtgaacgccacagttcaggctgccctcaacgtcctcactagcgcccagagcagagacatgctggaaacactggctgtgtctccctgagataaccagcccccggttttcgggggtggtaattcagcttttccgtctttaggtggtgcttctagaccacataaggcagcccagaatggcttttcaagggttcctccttccaaccg

SEQ ID NO: 1475 - DNA, 170 bp, Homo sapiens
  misc_feature 1..170: note = U/M: M (0.78:0.08) in Pancreatic Beta cells
  misc_feature 1..170: note = source = chr22:31480533-31480702; Gene: SMTN (promoter-TSS)
  source 1..170: mol_type = genomic DNA
cgaccttccctcaggaagtccaagtcccagtgggggtcgtagaggcagcacagtccaaaaagagggaatgccaggcctggttcccgcacatcctcatctcaaggtatccacaggcaggctcagggttcttcagccgccacctccctctcttaagcgaggctcgggcggcg

SEQ ID NO: 1476 - DNA, 334 bp, Homo sapiens
  misc_feature 1..334: note = U/M: M (0.88:0.21) in Pancreatic Beta cells
  misc_feature 1..334: note = source = chr1:2780356-2780689; Gene: TTC34 (Intergenic)
  source 1..334: mol_type = genomic DNA
cggcccctcgacagcttagttgggctctactcaggtgggcgaagcccctggggtctcttcctgaccccccacccccaactccctccgggcagggccggctctgggggcggctgactccagcctctgcttctccgaattaagacggatggcggcttctctaagaaaggaaatgtatatcaacaaacttccatcccggagatcaaaccgcttcctcccgccctccccaagcacctcccgtgctgccccccctcgccaccccaccccccagtcctgctggccttccctggccccatgtgccggctcaggggacctcaggaggggtggtgggggtgcg

SEQ ID NO: 1477 - DNA, 500 bp, Homo sapiens
  misc_feature 1..500: note = U/M: M (0.77:0.13) in Pancreatic Beta cells
  misc_feature 1..500: note = source = chr15:53078206-53078705; Gene: ONECUT1 (intron)
  source 1..500: mol_type = genomic DNA
cgcaaggtggttggaacgagactggggagggtctctgagcgcaacagcaaggaaagctgccaggggcacctccccatatgggagctggtagtggggggcaggcactaatgtcccgtaggaacggccaaggcgctctgcaatccattttaaggctcatgcacttggcccgttagagatcatttggaaagttcagaaaataaccccactctttttaaaatatgaaaatgttaatgagatggctccttcttcagtaacttaaaaataggttgtgaagagactgttcctggttccttgcaggagaccctcctggaccaacacagaatcctcagtcctagccctttccaccatcccttttaagttaaggaaacaaaaatgtaatagacatgcttcctcagggtctcaggacacagagtcggcttggtgtttggtgccaaatgcctgccctgctggactctccagtgtttcactttttcgaggaaaaggccatgggcctagggccg

SEQ ID NO: 1478 - DNA, 274 bp, Homo sapiens
  misc_feature 1..274: note = U/M: M (0.74:0.11) in Pancreatic Beta cells
  misc_feature 1..274: note = source = chr20:17183457-17183730; Gene: PCSK2 (Intergenic)
  source 1..274: mol_type = genomic DNA
cgcttacggtgactgctccaacggtatgagagctgctttgcttatacagggaacctggggtttgtactcccatgatttggtccttagccaatggcagctccctcagaacaaaattctaggatgtaattggacactctagagccgccctacaggaccaggctgaagtgaggatttttcctgaaatcacaacaattgctttacttctttcctttccttgtcctgctttctccactcccttatcagagtttgtgggagcactcattcataaatcacg

SEQ ID NO: 1479 - DNA, 225 bp, Homo sapiens
  misc_feature 1..225: note = U/M: M (0.66:0.08) in Pancreatic Beta cells
  misc_feature 1..225: note = source = chr12:71834853-71835077; Gene: LGR5 (intron)
  source 1..225: mol_type = genomic DNA
cggcaccgacacccaaagggagacctgaagctctctatcatccctgggggattctcccaccccttctctccccactgcaacttccaaagccctgaggcggcggctcattgcgtaattttttctgtggaaaacccaggcccgaaggtaacaggtagttgggtgaacgcggtgacccaggaggaaccctattctcggagaccaaggcgactactctctccacccccg

SEQ ID NO: 1480 - DNA, 311 bp, Homo sapiens
  misc_feature 1..311: note = U/M: M (0.65:0.07) in Pancreatic Beta cells
  misc_feature 1..311: note = source = chr9:133320781-133321091; Gene: ASS1 (intron)
  source 1..311: mol_type = genomic DNA
cgattctctctccctctctcggactcgccgtctgtctccacctctatttctctgcgtaaaaccaggagtccagcccctctggggcttggacgtatcgctttccccgcagcctcagtttaccctggacagatgggcatggtggccctggctcccttccctgcagggggcggcagccacctggccctccccggtggggctggcggcctcgcggcggggtttcctgctggcctgggctgggctctgtgggaggggcagtgccaggaatattttctattcgggctgctgttgcctttggcccctgggcggctgcg

SEQ ID NO: 1481 - DNA, 349 bp, Homo sapiens
  misc_feature 1..349: note = U/M: M (0.69:0.11) in Pancreatic Beta cells
  misc_feature 1..349: note = source = chr20:61638977-61639325; Gene: BHLHE23 (promoter-TSS)
  source 1..349: mol_type = genomic DNA
cgcctcttccctgccagccgcttcctgggcatctatcagcgaaacgcgtgaggcttggtgggctttcccggagcctccgaacccctggggtccagccacactggatgggaatgtggccagcctcggactcgccttttcagtcctcttccaaccccgcatgaaggccagaaccccagcccttctcccaggtgggaacctgcctggaggcccggccgagtgctgaggctagagtgtgctgagggatagtggcttctccggtcctggcttgggtgggagactgggccaccctggcctatggcacgaggtggagcggcccgtcgggcccttctgtgtgacctgggaagggccg

SEQ ID NO: 1482 - DNA, 67 bp, Homo sapiens
  misc_feature 1..67: note = U/M: M (0.66:0.13) in Pancreatic Beta cells
  misc_feature 1..67: note = source = chr20:56803322-56803388; Gene: C20orf85 (Intergenic)
  source 1..67: mol_type = genomic DNA
cgaccatcaggtccagctcctctttgagctcccgcacggtcatgtcgccgcggcagtttgccactcg

SEQ ID NO: 1483 - DNA, 277 bp, Homo sapiens
  misc_feature 1..277: note = U/M: M (0.61:0.08) in Pancreatic Beta cells
  misc_feature 1..277: note = source = chr18:24130764-24131040; Gene: KCTD1,KCTD1 (promoter-TSS,intron)
  source 1..277: mol_type = genomic DNA
cgagctggcacacactagtcacacacggctaattccagagggctggccctttgtcctgggacgctcccaggttttcgggccgcggtgcggagaactcaggtgggtgcccggcaagttacctaccaggggctgttcccccgcgaccctcgccataagcgcagggacccgggggccgcgctggctccgggctgcgctcctggcttggcaggggaccaggcccacgctgcagcctgggagcggagccgccccccaggtctccccacctctgcgggcggcg

SEQ ID NO: 1484 - DNA, 356 bp, Homo sapiens
  misc_feature 1..356: note = U/M: M (0.55:0.03) in Pancreatic Beta cells
  misc_feature 1..356: note = source = chr1:226069476-226069831; Gene: TMEM63A (intron)
  source 1..356: mol_type = genomic DNA
cgcctcaccctttccgcccccgcccttccccccagtccccgagtccccagcctccctcctcaggactccgccaaggctgcaggaagtggtcacccaggaacagcccgaggggtggcctctgccttcctggcgtcaggagagtcggacgcttggccctttcccagcccggcctcgtatagggtccgaggagcccatagctgcactcctagttaggtgggaggtcggactccgccgacaaatcccaaagagaggggtggggaagaaggagataccagccctgaaagcgaaaagccggagaggaaagtcctgaaaagccgccaggaattcccaaggagcgcagggctggaatggaggcg

SEQ ID NO: 1485 - DNA, 219 bp, Homo sapiens
  misc_feature 1..219: note = U/M: M (0.57:0.07) in Pancreatic Beta cells
  misc_feature 1..219: note = source = chr19:17717375-17717593; Gene: UNC13A (intron)
  source 1..219: mol_type = genomic DNA
cgcccacgcctgttcttcccatttttccacccaccgaaaaatgaccgcatagttttacatccagctcccgcccctcagacaccgccctgcaaggccatgctcccaccctgagatacccgcgcctgtgccctctgccggctgaactgctgcccgcacggccctgcccctaatgtcccacccagaagctctttaaccaggctctcctctagacccacgacg

SEQ ID NO: 1486 - DNA, 212 bp, Homo sapiens
  misc_feature 1..212: note = U/M: U (0:0.92) in Pancreatic Delta cells
  misc_feature 1..212: note = source = chr7:101575497-101575708; Gene: CUX1 (intron)
  source 1..212: mol_type = genomic DNA
cggcttcatttttggcccgggccatcagtagcttaaagccattactgtctattggctgtttggtttgtctgaaatatggggccggcgtcagcctatttccctggggtcaggtgtgttcacataatcaaagtgccaggaacccatatcgcatgcaagcgtgtgtgttcaaattagccttctccagggaggaattcacagcaccaggaatacgc

SEQ ID NO: 1487 - DNA, 330 bp, Homo sapiens
  misc_feature 1..330: note = U/M: U (0.05:0.94) in Pancreatic Delta cells
  misc_feature 1..330: note = source = chr17:55693892-55694221; Gene: MSI2 (intron)
  source 1..330: mol_type = genomic DNA
cgataatcctgtctatttaaatgattaacatttttctcttgggatatcaaaatttgcatttaaatggatgttttaaatagcctgttttactctttatttgccaaaaaaaaaaaaaagatgaaagacaaagtgtgtttgttctgactaaaaatgatttctcctggcttttagagaaattgagttgcatattatgtccctttccttaaaagtatctctgtccgtcctgcgtagataattgaaaatcttaccgcttaaatggcatgaaagatggagaaagcagtggagatgcgtaatggtgtaggtcgcaacaataattagaaatttaaaggc

SEQ ID NO: 1488 - DNA, 274 bp, Homo sapiens
  misc_feature 1..274: note = U/M: U (0.02:0.9) in Pancreatic Delta cells
  misc_feature 1..274: note = source = chr16:85546140-85546413; Gene: GSE1 (Intergenic)
  source 1..274: mol_type = genomic DNA
cggggactgcttttgatatgtgtggtgttttcttccctctcttctgaggcaaatggctgattgattgcttttcatctcctactttgagtagctgtaagagctactttatataaacatcaattacaggcacgtaataaattaagggtccctcacaccacacgcattagagtccactccgatatcaaagcgctcccatcacccagggaacgggagcggtgggggctgattagccagtgatgttggtggagacagaagctaatttaatcgcaggtcc

SEQ ID NO: 1489 - DNA, 197 bp, Homo sapiens
  misc_feature 1..197: note = U/M: U (0.06:0.94) in Pancreatic Delta cells
  misc_feature 1..197: note = source = chr9:130226701-130226897; Gene: LRSAM1 (intron)
  source 1..197: mol_type = genomic DNA
cgtgctgtccagagcggcagccgctggccatatgtatctatggagcacctggaatgtggcttgtgtgtacagccaggaactaaaagtttgatttcattgaattttaattaatttatatttaaatagccgtgggtccttagtggctaccattttagacaatacagctcagagcacgttcccaatcctgaagccatctc

SEQ ID NO: 1490 - DNA, 396 bp, Homo sapiens
  misc_feature 1..396: note = U/M: U (0.06:0.91) in Pancreatic Delta cells
  misc_feature 1..396: note = source = chr13:49762704-49763099; Gene: FNDC3A (exon,intron)
  source 1..396: mol_type = genomic DNA
cgactgaatccaggctgtttctatcgtttacgagtttactgcatcagtgatggaggacagagtgcggtaatacttatatgtagattcttttgtgttgttattaagtttggccaaatggggtaggatcaccaggtgccacttcaaatattgaaacatatccacaaatggagaaaagtaacttctgtaacctgttgggttaatttgatagtgaccaaaatattctaatgtggtacttagctcacagtaagtattcagtgtgtgtctgttgtctggttggtattcagctttggaaaaacaaatacatgaaaacattggagaaaattttataaagataaatttgagaatgatgctcaataaccatactaagcagagatagaaataaaataattatagacc

SEQ ID NO: 1491 - DNA, 87 bp, Homo sapiens
  misc_feature 1..87: note = U/M: U (0.09:0.92) in Pancreatic Delta cells
  misc_feature 1..87: note = source = chr3:39497339-39497425; Gene: MOBP (Intergenic)
  source 1..87: mol_type = genomic DNA
cggtgtttaaagggagcagtcactgctgggtgagatggtcgcagatcggatcctggacacggggttatgtgtttgctttccgaagac

SEQ ID NO: 1492 - DNA, 128 bp, Homo sapiens
  misc_feature 1..128: note = U/M: U (0.07:0.9) in Pancreatic Delta cells
  misc_feature 1..128: note = source = chr6:37693027-37693154; Gene: MDGA1 (Intergenic)
  source 1..128: mol_type = genomic DNA
cggctgcggataattgatgagcagctctggtgcaatgtttaaatatgcattaggctaattgcgtggtaattaaatagacaagaccattacggctgctcaggggcccatctgtgttctggtgtctcccc

SEQ ID NO: 1493 - DNA, 77 bp, Homo sapiens
  misc_feature 1..77: note = U/M: U (0.12:0.93) in Pancreatic Delta cells
  misc_feature 1..77: note = source = chr1:6019318-6019394; Gene: NPHP4 (intron)
  source 1..77: mol_type = genomic DNA
cgtttggcaccttggtgacgggccggctgctccacacctggaaggccgacttgaggccaacgggccagacctcttcc

SEQ ID NO: 1494 - DNA, 223 bp, Homo sapiens
  misc_feature 1..223: note = U/M: U (0.02:0.83) in Pancreatic Delta cells
  misc_feature 1..223: note = source = chr7:129945291-129945513; Gene: CPA4 (intron)
  source 1..223: mol_type = genomic DNA
cgaaacagcctggtttgtgtacccttatgtctctcgctgttgggataccatttgaggtctttcaagagacataacattatctctaatggcaccggcatcataaaacacagtaacggttgtttcccctcccatttgctcctaatgctggagaggttcaggctgcctggagctgcagcttggccccgcagccaaccaattaagcttccaagtcacggataagctc

SEQ ID NO: 1495 - DNA, 234 bp, Homo sapiens
  misc_feature 1..234: note = U/M: U (0.04:0.85) in Pancreatic Delta cells
  misc_feature 1..234: note = source = chr17:33217450-33217683; Gene: CCT6B (Intergenic)
  source 1..234: mol_type = genomic DNA
cgcacgggtcctcagagcatgccacaatcggagatgatgagtaaagccaacatttaactggcacttacaagggtgctgggtgctgtgctaattgtgtgtactcttcataataagtgtctcgtggatactattagcccccttttcagatggagaaatggaaggtcagagggattaattaagctgaccatggtgacacaggtattaagtgatgtggctggaactcagatccgctcc

SEQ ID NO: 1496 - DNA, 257 bp, Homo sapiens
  misc_feature 1..257: note = U/M: U (0.08:0.88) in Pancreatic Delta cells
  misc_feature 1..257: note = source = chr5:170039130-170039386; Gene: KCNIP1 (intron)
  source 1..257: mol_type = genomic DNA
cgagctcatggcccacggggaaaccagacagacagacacccaatgacaacattgaaggcttgcacgcacgaggggccagaaaacaccccacatggagtgggtcccactctaggccactctcccatcccttcccttttccaaatttcctccctagccacatgccttggtttccagggccagccagctgtgcaaaatgcctagcaagctctcagcaggcccctgctgggcacagcacagagaaattaagtgcaattagc

SEQ ID NO: 1497 - DNA, 330 bp, Homo sapiens
  misc_feature 1..330: note = U/M: U (0.13:0.91) in Pancreatic Delta cells
  misc_feature 1..330: note = source = chr3:172058903-172059232; Gene: FNDC3B (intron)
  source 1..330: mol_type = genomic DNA
cgaatcagtgggaagtggcctacagtgggtcggctaccgaatacaccttcacccacttgaaaccaggcactttgtacaaactccgagcatgctgcatcagtaccggcggacacagccaggttggttttgtttccatatgaaagtaaacctcattgatcaaattcggacaaactgtctataacatcagaagcaaattgcagtttaaacaatgtatcttggtaatgcaacctaatagtatcatgtcaggaaatgaaaaatagagctttctgaattgctgtttagaggtataagataggcctaaatgattccctactgaattgtggtattttc

SEQ ID NO: 1498 - DNA, 426 bp, Homo sapiens
  misc_feature 1..426: note = U/M: U (0.13:0.91) in Pancreatic Delta cells
  misc_feature 1..426: note = source = chr1:184078999-184079424; Gene: TSEN15 (Intergenic)
  source 1..426: mol_type = genomic DNA
cgtgccattgcactccagcctgggcaacaaaagcaaaactccgtctcaaaaaaaaaaaaaaaggtaagaagaaaaataacattttatctttgataagagcaagtagagcgttatggtgtttttattctattttgaagttctagaaccaatgcagcctcccgagggaactgcaaatgggccaggcactttcataatatttacactcatttgttcatccatttgctgtccatttatcattcatccaaaatcatttattagggacctcttctatttcatgcactggggctatgatgataaatgaattcttcacttggaggaactacactctactggagggaggcctacataaatggggtttagggtaaacctgacaggtgttctactagatctaataacagatttctgtggacatacagagaaaaggtc

SEQ ID NO: 1499 - DNA, 446 bp, Homo sapiens
  misc_feature 1..446: note = U/M: U (0.11:0.89) in Pancreatic Delta cells
  misc_feature 1..446: note = source = chr9:129143335-129143780; Gene: MVB12B (intron)
  source 1..446: mol_type = genomic DNA
cggtgtaggttgcacagacagcagatggtgtggatgctgacctctggaaagacggcttatttaaatccaaggttaccagatacctgtgtttcacaagatcattttccaaagaaaatgtaagtctagtcgtagtttccatttgctgagtgagcacaagtaatttacattcctgtttggaatttcctcattttgttgttgttgtggtttattttcattgccatattaatttatctgtggttttagtgaactgggtagaatcagcagccagcactgtgtttcatttattaacagtgttattaaccacgtacccaagtgtaccgtgaattccattaaattgtgttctcaaaaggaaaccaggaaatttctctcccagctctcatttgcctacctttcctccaagcaacagatcacagggtagtgcggcagtgagagttctccagtggagc

SEQ ID NO: 1500 - DNA, 51 bp, Homo sapiens
  misc_feature 1..51: note = U/M: U (0.14:0.91) in Pancreatic Delta cells
  misc_feature 1..51: note = source = chr16:9663477-9663527; Gene: MIR548X (Intergenic)
  source 1..51: mol_type = genomic DNA
cggtgcaaataacgcccaggtctccgctctgagtgggacacgtgaaactcc

SEQ ID NO: 1501 - DNA, 392 bp, Homo sapiens
  misc_feature 1..392: note = U/M: U (0.16:0.92) in Pancreatic Delta cells
  misc_feature 1..392: note = source = chr11:78039188-78039579; Gene: GAB2 (intron)
  source 1..392: mol_type = genomic DNA
cgagaaacggatatacacaccaaacactaggcactctcgggtccacattgtttgataaaataaatcctgggtcaataatctcaatgggatgacaaaaacaatttcctgttgcagggcatttactggtagcattgcatttgcagtcttcccaatcagcagtccattaagcagccatcaaaaacactaagccgcggaaggctttttaaaaaagacattatgtgtaagacattaataataaggaaagctgggtgtggggtatatgggaactctgtaccatcttctcagttcttctgtaataaaactgacaaaaagtctattaaaaatgacattacagacttatagtagatttactcataatagccaaaagctggaaacggcacaggcatccatcc

SEQ ID NO: 1502 - DNA, 202 bp, Homo sapiens
  misc_feature 1..202: note = U/M: U (0.18:0.91) in Pancreatic Delta cells
  misc_feature 1..202: note = source = chr13:43316442-43316643; Gene: FAM216B (Intergenic)
  source 1..202: mol_type = genomic DNA
cgtctctaaacagtagagatgtgggcaaaaggcttagcgtggacggcaattctggagaggcaacagagaacagttaggttaggggttggggtcaggcagaagtgcagtagggtggagtgggagagctgaggtgtagctctagttcttcaataacctgccacgtggctggcaaaccacgctgcttctgtggacttctcttctc

SEQ ID NO: 1503 - DNA, 421 bp, Homo sapiens
  misc_feature 1..421: note = U/M: U (0.13:0.86) in Pancreatic Delta cells
  misc_feature 1..421: note = source = chr4:152903957-152904377; Gene: PET112 (Intergenic)
  source 1..421: mol_type = genomic DNA
cgatgacagatcaaattttctggggcacatctaatgttgtcctagttctggatttcctagggtcaagccaggagcagctgtcagaaatgcctaatatcaggacttgtgtattgcatgttaagcctataaaaacacgtattcatataaatttctagcagttgccaaatggaccctaaaggacttttgctttcagtgtcgcctataatggtatcttgggaaaatgaacgaaactcaaatcatcggcaacagttggagtaggagcaaggctgtttgctcttacagccatcacaacagagaggcataacttgtataagatgatgaatattctttggttaaccagctaatgttttaaagtaataggaaagaggggtgggcgggtaggtggacttcctataaaattaacaaccagcctgaattctgc

SEQ ID NO: 1504 - DNA, 486 bp, Homo sapiens
  misc_feature 1..486: note = U/M: U (0.26:0.94) in Pancreatic Delta cells
  misc_feature 1..486: note = source = chr7:101575751-101576236; Gene: CUX1 (intron)
  source 1..486: mol_type = genomic DNA
cgcttacgagcgcagcattttcaagccttttcttgagatcagctcgttcagttacatgtgcttttgaagatgaccatttgtgaaaccatcagccactggcaaagtgaagaaaaatgaagatttcggcctggttgatgtgtgctcggggaaaggtgatagcttctgtttccttgaattaaaagctgcagacaagtatattttcatttattttgtttataaatcaacaacccacgaaaggtatttcatacgtatttaaatgattgctttgccgccatcaagaaaaaatactgtttcacttaacagtgaattgagacaaggaaaagtgatgtgtgaatagaaataaagaaattaaagtaaaaaacaggatcagggtaggttctagggctaataatttaagaacagaacatgtggtttaactctttttgccactctaaggagaggtgatatttgtatttttctttttactgaaaccagatcgtgagacac

SEQ ID NO: 1505 - DNA, 446 bp, Homo sapiens
  misc_feature 1..446: note = U/M: U (0.24:0.91) in Pancreatic Delta cells
  misc_feature 1..446: note = source = chr2:39474855-39475300; Gene: CDKL4 (Intergenic)
  source 1..446: mol_type = genomic DNA
cgtgaactgggaatgtattatatgctctcttagtgtttacccattattttgtatagcacacactttcacctctccgccagtaatggtgaaaactaatagcatctgtccttttgtttcctggtctctactgaaatcagagtcacatgtgcaagctgaatgatgccattaggcccataaccggttgatctcattctcctcaaaaccagtgtctatgcaattagctaataagatcgctttaacttcaataaagatgaaatagattgtttccaacatttaagtgagtggctgtcttccttttgtgtatgtaaagatccataatcaaaaattcctgggtggaatctagaaatttgcacttttaagtattaccaaagatgattctgaggcacacttggacacactcagaagcactgatttaaatttagtgcccaccagtggtttcatgttgc

SEQ ID NO: 1506 - DNA, 499 bp, Homo sapiens
  misc_feature 1..499: note = U/M: U (0.25:0.92) in Pancreatic Delta cells
  misc_feature 1..499: note = source = chr7:151850900-151851398; Gene: MLL3 (exon)
  source 1..499: mol_type = genomic DNA
cgtaggctgagaccaattcaatgacaaacgatggcactcaaaggcagctgagaggtctgcagtgagcatcagctctgctctctgaccctttatcctcagtgatcctgtttgtgtgtgttttatggtagacacctgacccatctttgaaaattggggacatactgtttaacattaagaagtcatttaatcttttacctcagcagctgtaggatgcagagtaattgctacagatataagacctgatctgggaccatttggggaaggaccaaaaggtgacgcaaaatataaagtgcctggctcagttttgatgtcattccttcttgattctgaacctttaaaaagagagaaaaaaaagaggaaaatagtgttaatggattttcaaaatcaaaatatttacattagtaaattggcgtagtgtaaagggaaataataaggttaagtgttgttcttacttttcccagcagtgctaggaagaattggaatgatgggggacggcacc

SEQ ID NO: 1507 - DNA, 277 bp, Homo sapiens
  misc_feature 1..277: note = U/M: U (0.28:0.94) in Pancreatic Delta cells
  misc_feature 1..277: note = source = chr7:69911307-69911583; Gene: AUTS2 (intron)
  source 1..277: mol_type = genomic DNA
cggagtgcgtgccggctgagctgattacggcacaacactctgtcagccaatgatttgtcctgtcctttatcatctgtgtcactcagcagtgtgctggcgaagggaacggatcacccccttccctttttttgtacccattttgtgtagaaaatttgtatttactttgggagtgtaatttgttcctcatggataatgtgaccctgagcggagctggatcatgggttagttgaagtgatattttccgctaatggtagtcgtacatcattgctgtcagctc

SEQ ID NO: 1508 - DNA, 366 bp, Homo sapiens
  misc_feature 1..366: note = U/M: U (0.25:0.9) in Pancreatic Delta cells
  misc_feature 1..366: note = source = chr5:54045100-54045465; Gene: SNX18 (Intergenic)
  source 1..366: mol_type = genomic DNA
cggcttgggaaacatggcaaaaccccatctctactaaaaatataaaaattagcagggcacgatggcacacacctgtaattccagctacttggaaggctgaggcatgagaagctcttgaacccaggaggcggtggttgcagtgagccgagatcatgccactgcactccagcctaggtgacagaggcagacgctgtctcaaaaaaaaaaaaaaaaaaaaaagagtcaattagctacctcaatgaatgttttaaacccatagcaaacacgtgttaaaaggatgcttgagaaaacaaacattttttaaatctcagctttgaattagcgaagtctatgttctggttattgtagccatgtgataaatcatcc

SEQ ID NO: 1509 - DNA, 271 bp, Homo sapiens
  misc_feature 1..271: note = U/M: U (0.05:0.91) in Pancreatic Delta cells
  misc_feature 1..271: note = source = chr3:187592073-187592343; Gene: BCL6 (Intergenic)
  source 1..271: mol_type = genomic DNA
cgcgaaatggatgtaatcctagtagggcggaggctttctgcaggagtgtgtttcaggagctgcttaaaaggagaaagggaggagaaagataactaatgtggtttgaaaaacttcagtgtgccaagcaccatgccaaactctttacatataattgtctccttcagtcctcacaatgacattgtgagatggcttatgtgttaactgcctttgcaaatgataaaacagatggttggaaaaattgtattacggcagcgttagcactgaaatcccg

SEQ ID NO: 1510 - DNA, 280 bp, Homo sapiens
  misc_feature 1..280: note = U/M: U (0.05:0.89) in Pancreatic Delta cells
  misc_feature 1..280: note = source = chr1:107951331-107951610; Gene: NTNG1 (intron)
  source 1..280: mol_type = genomic DNA
cgagaaagcaagattacgcatggtaagcggagagaattttcactgtagtgtcatcccctcacaggcttgtgtcataggtgctgtgccaggcagggtgatcgcagtgtaaatagccattgaatgattgcgattcccagcatccatctaaaaagcaatactctgataatttggataaagcaacttcctgcttcttataaatgcacagtcaggtgtcccaatttataaatcaacccagtttacttgagcttgtgaataggcctggacactgatttgttaagcg

SEQ ID NO: 1511 - DNA, 464 bp, Homo sapiens
  misc_feature 1..464: note = U/M: U (0.06:0.89) in Pancreatic Delta cells
  misc_feature 1..464: note = source = chr1:29379317-29379780; Gene: EPB41 (intron)
  source 1..464: mol_type = genomic DNA
cgagataaatggattttctatttcttttctttgatcttgtctcccctgaattcagcattcatggaacatgatcattaacacattttagcctttctactgagggtacatttaacttccttgttgctatcagttccctggcagagcactaatgatttattttttaccctctgtgtgatagcccactacacactctaacattcgtgtgtatcctggattcacaattattttgcctggtgactttgaaataatacagtagctctggcctttacttatgcttcccttttccctttctcacatagcagcagctgtcgattcggcagaccgaagtcctcggcccacttctgcacctgccattactcagggtcaggttgcagaaggtggcgtcctagatgcctctgctaaaaaaacagtggtccctaaagcacagaaggaaacagtgaaggctgaagtgaaaaaggaagacg

SEQ ID NO: 1512 - DNA, 138 bp, Homo sapiens
  misc_feature 1..138: note = U/M: U (0.04:0.86) in Pancreatic Delta cells
  misc_feature 1..138: note = source = chr16:966029-966166; Gene: LMF1 (intron)
  source 1..138: mol_type = genomic DNA
cggggtagcctccggcaaagggagggatgaggggccagtgggttgtgggctgagccgcctctgaccaaggaagaaacgtgatttaacacaacgctttggaggtgcaagtcattgcaatggccactgtaggagagaacg

SEQ ID NO: 1513 - DNA, 254 bp, Homo sapiens
  misc_feature 1..254: note = U/M: U (0.1:0.92) in Pancreatic Delta cells
  misc_feature 1..254: note = source = chr18:2950356-2950609; Gene: LPIN2 (intron)
  source 1..254: mol_type = genomic DNA
cgccacaaataaagagtctggaaatgcagggccactcatgggcagcagcttcttgtccagtcgtcaccaataaagagaatccccaccacggtcctagtgccaaggtggccactgagtgcaacaggtggaagaaaacggaatcttgaataagaaaacgtgttctactcccaactgctacctttcaaccccaagcggtgctgacatgaaaaatggcatataatgagctcttctacagagcaggtaaataagcagcg

SEQ ID NO: 1514 - DNA, 101 bp, Homo sapiens
  misc_feature 1..101: note = U/M: U (0.02:0.83) in Pancreatic Delta cells
  misc_feature 1..101: note = source = chr16:17551988-17552088; Gene: XYLT1 (intron)
  source 1..101: mol_type = genomic DNA
cgtccttgggctcccggcttttattgcttctcccctcgctcattatgaaatgattagttgtctccgatgcccttttgaattgctgctaacgttgtactgcg

SEQ ID NO: 1515 - DNA, 166 bp, Homo sapiens
  misc_feature 1..166: note = U/M: U (0.09:0.89) in Pancreatic Delta cells
  misc_feature 1..166: note = source = chr11:63912203-63912368; Gene: MACROD1 (intron)
  source 1..166: mol_type = genomic DNA
cgtcgctggcccggccatctcccctgcccactgcggagaggtttctgctgtcgtggtggccggcaagcctcagcaaacacattaaaatctgaagtgacagataaagcgatttacggcgacagttcagcgtcagatcacttcccacaaggcagtccgcatccctgcg

SEQ ID NO: 1516 - DNA, 284 bp, Homo sapiens
  misc_feature 1..284: note = U/M: U (0.07:0.87) in Pancreatic Delta cells
  misc_feature 1..284: note = source = chr10:33401284-33401567; Gene: ITGB1 (Intergenic)
  source 1..284: mol_type = genomic DNA
cgttagtttgctgaggataattcgccattacttttaaatggcaaacactgcatttacttttgcaccaacctaatagttacatttttagaacatttacttccatggactaggaaacctaagatgttatctaattaatttttataaatgaggtctggttgggctgcgggttggttggacgggttattgccacttacaaatggataaaagtgaaaggaatttaatagtcttttctaaggtcacaaatggctcagtggtgggatgattaattcacacccatgtgggcg

SEQ ID NO: 1517 - DNA, 71 bp, Homo sapiens
  misc_feature 1..71: note = U/M: U (0.13:0.91) in Pancreatic Delta cells
  misc_feature 1..71: note = source = chr7:129945615-129945685; Gene: CPA4 (intron)
  source 1..71: mol_type = genomic DNA
cgggcaggcggtcattttcgagccttttctcccttctgcagttcagcactgggaaaggcgtgaggcggccg

SEQ ID NO: 1518 - DNA, 79 bp, Homo sapiens
  misc_feature 1..79: note = U/M: U (0.08:0.86) in Pancreatic Delta cells
  misc_feature 1..79: note = source = chr4:187535391-187535469; Gene: FAT1 (exon)
  source 1..79: mol_type = genomic DNA
cgtgtaagtaatttcagcgttagagcggatgtctgcgtctgtagcagagatctgcatgatcaattttccaggaaggacg

SEQ ID NO: 1519 - DNA, 188 bp, Homo sapiens
  misc_feature 1..188: note = U/M: U (0.07:0.85) in Pancreatic Delta cells
  misc_feature 1..188: note = source = chr10:21239090-21239277; Gene: NEBL (intron)
  source 1..188: mol_type = genomic DNA
cgcagggcatcgggggtcatctgtgctttattcctcattaatcccacctcctagcaatgtgcgcggcacatagtaaacactttaaaacatgtttgttaagtcaataattaagatctcaaaagtggtatcatctagaaatgtttgttttggatttatagatgcccaaattatgcacatttgaaactacg

SEQ ID NO: 1520 - DNA, 341 bp, Homo sapiens
  misc_feature 1..341: note = U/M: U (0.09:0.87) in Pancreatic Delta cells
  misc_feature 1..341: note = source = chr1:41841569-41841909; Gene: EDN2 (Intergenic)
  source 1..341: mol_type = genomic DNA
cgaggttgtgctgtcagggaatgaggtggtacttgggggcaaggtgaggctgcattattagataaatgaggttgtactgtcaggggatgaagtgtacttgtagtagagatgacgtcctgctggatcagtcggcttttgctccatcagagaacacagccacaccacaggaggaaggagagtgtccgactcagaggataaatgagggtgtcctgctggataaatgagggggcccgtcaggtgaatggagtgctgttagcaaatgaggttgtacttgctggataaatgggactggtgtgctggataaatggggttgtgctgtcaggtgaatgcattactgctcg

SEQ ID NO: 1521 - DNA, 160 bp, Homo sapiens
  misc_feature 1..160: note = U/M: U (0.04:0.81) in Pancreatic Delta cells
  misc_feature 1..160: note = source = chr11:63835331-63835490; Gene: MACROD1 (intron)
  source 1..160: mol_type = genomic DNA
cggcccacttcctgctgctgtccatttagccagcggttcgctcggcttttaggagggggctggcggtgaacccatccccgttacaatgcactcagggaccctgacaactaatttaatttaaaacagccttgcaataaaagctcagaacggaaaaccgccg

SEQ ID NO: 1522 - DNA, 163 bp, Homo sapiens
  misc_feature 1..163: note = U/M: U (0.13:0.89) in Pancreatic Delta cells
  misc_feature 1..163: note = source = chr16:17493407-17493569; Gene: XYLT1 (intron)
  source 1..163: mol_type = genomic DNA
cgcagctgccagcatcatgccccggttgcacagtccgaaggacctatattggaaaaataatggcattttctcaacaaattatctcacagctgaagtaataacttgtttaaagatacgccaattcagattttcatccccttaacctgccactaaaagaaaagcg

SEQ ID NO: 1523 - DNA, 180 bp, Homo sapiens
  misc_feature 1..180: note = U/M: U (0.09:0.85) in Pancreatic Delta cells
  misc_feature 1..180: note = source = chr7:12645693-12645872; Gene: SCIN (intron)
  source 1..180: mol_type = genomic DNA
cgtattcacaaattaatttccatttgttcatacaacaaatatttattgtactcctgcgatgcgccaggcactaaatgtttgcaccagttgctacttccttgtacgagcactgtgttccatcgtgactttacagagccctgtcaaaatctgttgatataatacctttttgaaacttctgcg

SEQ ID NO: 1524 - DNA, 202 bp, Homo sapiens
  misc_feature 1..202: note = U/M: U (0.12:0.88) in Pancreatic Delta cells
  misc_feature 1..202: note = source = chr22:48478698-48478899; Gene: MIR3201 (Intergenic)
  source 1..202: mol_type = genomic DNA
cgaacgccatgcatccgctattgcacagctttaattagcacccaattcaagtccgcaccgcccagcagagcattgcaggggaaccatgggcctgcgcgtttgctttttaatttccagcaatgatctggtgattatgagagtgtccactttccatatttatactgattgctttttcatttactctgctttccattatgaaacg

SEQ ID NO: 1525 - DNA, 228 bp, Homo sapiens
  misc_feature 1..228: note = U/M: U (0.11:0.87) in Pancreatic Delta cells
  misc_feature 1..228: note = source = chr16:69941097-69941324; Gene: WWP2 (intron)
  source 1..228: mol_type = genomic DNA
cggtgtagcctattaatacattgtaaactgaggaggttgctagatgcctgtgggttttgtgcattcttgtgtaactaggtttagctgggggaagtcttctgtgttcatctagtgtttctcacagacaaaatcacgcataagcaaatagaattcccattatgctcacatcgtccgcttctatatcaatagcattggaacaaatttgcattttcaaagcaagcattaccg

SEQ ID NO: 1526 - DNA, 234 bp, Homo sapiens
  misc_feature 1..234: note = U/M: U (0.15:0.91) in Pancreatic Delta cells
  misc_feature 1..234: note = source = chr6:168560246-168560479; Gene: FRMD1 (Intergenic)
  source 1..234: mol_type = genomic DNA
cggctgaagaccactgatgtgatgtaaagatctgggctttgccaagatggatttaagtttaaattccagctccgccactcagtgcctctgtaaatttgggccatttaaactctccagtctgtttatacacaaagagagcaaacagcatctgctccacagtggctgtgaggcctgcacggagtgtcaggagagcatctggtacacaacagagagacaattgcaagcttcgctccg

SEQ ID NO: 1527 - DNA, 380 bp, Homo sapiens
  misc_feature 1..380: note = U/M: U (0.1:0.86) in Pancreatic Delta cells
  misc_feature 1..380: note = source = chr1:38707894-38708273; Gene: LOC339442 (Intergenic)
  source 1..380: mol_type = genomic DNA
cgcctggcacagaaaatgaaagctttatcttcccagtccatcctgaagtgtgttaagatgatggatgagtttccagacctgaatgctcctcccagtagcattaacaaaattgcctttcaggatcccaacttccacgtcaagatgggctgcggtggagatgggagccccaagctttggcacttgacggtgaacattaaaatcattttaatgctgcatttaggatttgtgttccctgtgtatgagccagtcccattgctggcaccggaataagatgaatgatgtttattaaaaagctctttggtacagcctgattgaccattaggaacactcagctcggagcagggtgcgtgggcccagcttctgggcctggatgggacccg

SEQ ID NO: 1528 - DNA, 230 bp, Homo sapiens
  misc_feature 1..230: note = U/M: U (0.15:0.9) in Pancreatic Delta cells
  misc_feature 1..230: note = source = chr2:42565737-42565966; Gene: COX7A2L (Intergenic)
  source 1..230: mol_type = genomic DNA
cgataggactcagcccccaccaagaccgtagagccttagtgtgattcaactccatccccacctggcggtcagcctgtcgaggggccagtgaggaatctgacagcaggactctaaccactggctacggtggaaaaggcctcaggaaacagttttcactcacagggagaattactgcttcccatgaaagcattttccagtgagtggaggtgggtttaggtgttatctgtgcg

SEQ ID NO: 1529 - DNA, 118 bp, Homo sapiens
  misc_feature 1..118: note = U/M: U (0.11:0.85) in Pancreatic Delta cells
  misc_feature 1..118: note = source = chr16:87967699-87967816; Gene: CA5A (intron)
  source 1..118: mol_type = genomic DNA
cgctgcctgtgttagcaacagcagcagctggcgtctagcaagggcttcctggagccatgtgctgtccccagcctttgcaggccccacctcggacccttctcccaacgacactgtgccg

SEQ ID NO: 1530 - DNA, 187 bp, Homo sapiens
  misc_feature 1..187: note = U/M: U (0.13:0.87) in Pancreatic Delta cells
  misc_feature 1..187: note = source = chr2:9419562-9419748; Gene: ASAP2 (intron)
  source 1..187: mol_type = genomic DNA
cgcatttgaagtcctggtaccgtaatattgatgaccattaacaaatgagccagctagactcctttatcggggcatgcagatcacagaggtgagctgggatgtttctttttcagaagtatgttttgttttgccagtcgtctgattcaggtgtgggatttcgtcccctgtcatcccctgtcatcctccg

SEQ ID NO: 1531 - DNA, 336 bp, Homo sapiens
  misc_feature 1..336: note = U/M: U (0.16:0.9) in Pancreatic Delta cells
  misc_feature 1..336: note = source = chr15:86556120-86556455; Gene: AGBL1 (Intergenic)
  source 1..336: mol_type = genomic DNA
cggcagctcctgccgatggagtgaatgcgtgttcggtcagacagatgtgagtgtctgggccacatgacagtgcatttatttccagcttaaattaataaataggagtcctggtttacatacaatttgttgaataaatggcttgcctatggtcatagctcaattatccaaatacagatgatcctcccagcctattatttgcagactgatttttatttattatcttgaatttgttctctctctctctctttcttttttttgagctctgctcagtccctctttcctccctgtgtggataattgaaagctggcaccacatgtgaccccatcagaaaggccg

SEQ ID NO: 1532 - DNA, 351 bp, Homo sapiens
  misc_feature 1..351: note = U/M: U (0.13:0.86) in Pancreatic Delta cells
  misc_feature 1..351: note = source = chr10:77717495-77717845; Gene: C10orf11 (intron)
  source 1..351: mol_type = genomic DNA
cgggagagagtgagaggaggagagaagcaggagagctggactgtgaggggaaagagcaggaggcttttataagaagctaatgtgatgaggatgacgagggctttgatggatgagttagctccatctggtcgcagtatatgtaataaatagctgtgctcgggtttgacctctcccttaccagacacatctttctctttggggatatccaggagggagcttccattagagtaaagaacccgtcatgagccagagctgaggatgtttatgggcttgtgcagagggcaaaaaggagatggtatccaagttacaggtttataaactgaaaactgtagcctgtgcgccttgctgacg

SEQ ID NO: 1533 - DNA, 362 bp, Homo sapiens
  misc_feature 1..362: note = U/M: U (0.1:0.83) in Pancreatic Delta cells
  misc_feature 1..362: note = source = chr6:148789420-148789781; Gene: SASH1 (intron)
  source 1..362: mol_type = genomic DNA
cgtctagtgaagtctgtcttcttcatttaatattacaggtctcaccttcgagtgagtctttaataaatgtcgacaaatggcacacgagtctatttctaggaagtcagcagatgggtagaaaaagccagtggtaaatagcctataacaatttccctggctgtattaagtagtattgatgctgggtcaaactagttaggaggattttcagttctcccatgaaagcaaggctctctggtaatctgatttgtttttcttttctaggaaccctcttcataaatcaaactcagaagacagctctgtaggtcagtaccacttttcttggtttacctatttaattatttcaatactttatagaaaacacg

SEQ ID NO: 1534 - DNA, 477 bp, Homo sapiens
  misc_feature 1..477: note = U/M: U (0.14:0.87) in Pancreatic Delta cells
  misc_feature 1..477: note = source = chr18:34140963-34141439; Gene: FHOD3 (intron)
  source 1..477: mol_type = genomic DNA
cgcagacattctgtttatgtattcttcccctgtggagggctgtacacatttgtgatatctaagatgtttttgttcccaagaatcaaatttcatgtttctagctcctattaagaatttatggtctgaagtatttattccatttcagtagctgataacatgagaaatgcttatataattacagaaatgaaagcaaaatactagtcattgattgacagccagtaattactataaggatggcaaaacaattctgttctaatgaacacgtaattacagctgctggggaatagctattaaataaatggaatctaatgtgttggcccaggagacaggatgggtggcggtgaggtctggggacactcagccttgtcacatgggtcagctccatagggctgggctagtctcatacctgtttgtgcacaaggaaccacctcccaggactgttagagcacacgtccaagtcaggaggccttagttgcg

SEQ ID NO: 1535 - DNA, 141 bp, Homo sapiens
  misc_feature 1..141: note = U/M: U (0.12:0.83) in Pancreatic Delta cells
  misc_feature 1..141: note = source = chr3:187385076-187385216; Gene: SST (Intergenic)
  source 1..141: mol_type = genomic DNA
cgcctcccgggttcataccattctcctgcctcagcctccccagtagctgggactacaggcacccgccaccacgccaggctaatttttttgtattttttttagtagagacggggtttcaccctgttagccaggatggtctcg

SEQ ID NO: 1536 - DNA, 360 bp, Homo sapiens
  misc_feature 1..360: note = U/M: U (0.13:0.83) in Pancreatic Delta cells
  misc_feature 1..360: note = source = chr7:31869005-31869364; Gene: PDE1C (intron)
  source 1..360: mol_type = genomic DNA
cgagaaacctttagtgaatttgttcacctaatacactccgattgtaataagtactgtcaataaattaatgtaatagcaaataaagggtagtaacaacctgcaaccaggcctggttcaaaactggatgattcttccttctaaggcatgctaccaaagagaatggatattggctcacatgtagcattaactgaaaggacggaaaaggggtgtgtgtctgaggcagctcaacagtggggtcacaatgggagctggggacatccaagggtctcaggaatagtccctaagtggctcagttccttctgcaccctcttcctatatagacaccccagcggacacaatggcttctttatttcaagtacg

SEQ ID NO: 1537 - DNA, 79 bp, Homo sapiens
  misc_feature 1..79: note = U/M: U (0.17:0.86) in Pancreatic Delta cells
  misc_feature 1..79: note = source = chr10:131667822-131667900; Gene: EBF3 (intron)
  source 1..79: mol_type = genomic DNA
cggttgcacatcttcataagcgggagttttccggaagcccgcgtgccgtggtttccctgacaggtcagaggcagcgccg

SEQ ID NO: 1538 - DNA, 199 bp, Homo sapiens
  misc_feature 1..199: note = U/M: U (0.15:0.84) in Pancreatic Delta cells
  misc_feature 1..199: note = source = chr4:8034277-8034475; Gene: ABLIM2 (exon)
  source 1..199: mol_type = genomic DNA
cgaggaggcccttcccgggagtgcggctgggtggttatgtttataacccaggcagcagcgccacggcaagcggggacaggcgagagggtggtggttacctcggtcggcgttggcgagagcaactgaggggactgtggacacaacacacaaagtggccattagtgctggcgccaggcagagagggaggagggcagttccg

SEQ ID NO: 1539 - DNA, 415 bp, Homo sapiens
  misc_feature 1..415: note = U/M: U (0.21:0.9) in Pancreatic Delta cells
  misc_feature 1..415: note = source = chr4:169589443-169589857; Gene: PALLD (intron)
  source 1..415: mol_type = genomic DNA
cgacacaggtcgctacacctgtttggctacgaatcccagcggctcagacacaacatctgctgaggtgttcattgaaggtaaggaggggtgcctggtaatgggggataaaggggtgtcaatggtctaatgactccagtatcttgggcatgcaaatgtgcctttccaatgcaaatggcacaatggtgttctaattcaaacttcatttccctgaaaacctttataaattgaactgttccgacatttaggcacccatcaactatctctgatgtcaacatttgttccttttaatgtagaatgtttccactccattaacttgaattatttaaaatgtaaggtatccaaattatttttgtctttctctagtaaatgaagcatagaaacacaattgaaataccatatcaagcaaagttaaacg

SEQ ID NO: 1540 - DNA, 85 bp, Homo sapiens
  misc_feature 1..85: note = U/M: U (0.2:0.88) in Pancreatic Delta cells
  misc_feature 1..85: note = source = chr16:75368216-75368300; Gene: CFDP1 (intron)
  source 1..85: mol_type = genomic DNA
cgggtaaaaaggaccgggaaagacgatggtaatgaggataaaactgtacggcagtcccacctgtcgagacaatccggccagcccg

SEQ ID NO: 1541 - DNA, 163 bp, Homo sapiens
  misc_feature 1..163: note = U/M: U (0.2:0.88) in Pancreatic Delta cells
  misc_feature 1..163: note = source = chr4:102230945-102231107; Gene: PPP3CA (intron)
  source 1..163: mol_type = genomic DNA
cgtgtgatacaatggaatgtttctataggatattcttatacaacttaataacaaaaaatattgtagaaaaatagtgtgctacacattcccctattttaaaaagaaagtacgtatttatcaacgacacgttatgattgattcaacattttaattctgtattccg

SEQ ID NO: 1542 - DNA, 449 bp, Homo sapiens
  misc_feature 1..449: note = U/M: U (0.23:0.91) in Pancreatic Delta cells
  misc_feature 1..449: note = source = chr7:155475836-155476284; Gene: RBM33 (intron)
  source 1..449: mol_type = genomic DNA
cgtggtcattcttttcttgctttatgatgatcacaatggtaacatctgaatgatctgaaatggccgcttccttggacaggaggagatacgcagagaattaaattgtgaggtactcttatcttgctcggcaatgggagcctctctctgtcttcggaggctgtcactgaagcccagatgatttattcaccattagactaatgaacacatgagcagattgtgtctctgtgtaccccaatggcattttagtttattaaatgacttgtataactgtgatttttgttctcccttgggttgttaacccccactctaagacttgaactctgaaatgtggatctgttggaacctacctgtaaagccacatggaggggctttggtgcataacagggagtagaatcatgaaaccccagaatgtacagtgggagggtttgctgttccctatgaagaaagcg

SEQ ID NO: 1543 - DNA, 175 bp, Homo sapiens
  misc_feature 1..175: note = U/M: U (0.21:0.88) in Pancreatic Delta cells
  misc_feature 1..175: note = source = chr8:10149407-10149581; Gene: MSRA (intron)
  source 1..175: mol_type = genomic DNA
cggactctaggcagttcccgtggcacaagggttgtttgttgtcaccatcgttacattagtcaccgtggaatcctcagtgctcagcaccgtgcatggagcttagcaggcatttgatcagtatttattaatgaataaataaaatggtgctggcccatacagtaaagtattctagtcg

SEQ ID NO: 1544 - DNA, 82 bp, Homo sapiens
  misc_feature 1..82: note = U/M: U (0.23:0.89) in Pancreatic Delta cells
  misc_feature 1..82: note = source = chr3:151142539-151142620; Gene: MED12L (intron)
  source 1..82: mol_type = genomic DNA
cgccctgtgagagtggagatgtggctgagtgcatgcacaaccctatacgttgttgttccttccgctgccgcttgtagggacg

SEQ ID NO: 1545 - DNA, 160 bp, Homo sapiens
  misc_feature 1..160: note = U/M: U (0.25:0.91) in Pancreatic Delta cells
  misc_feature 1..160: note = source = chr12:118852674-118852833; Gene: SUDS3 (exon)
  source 1..160: mol_type = genomic DNA
cgtagctactttccctgtcgcgtccaattcactatttgcccagaagcttggggcagaggtcctagcaggagatgatgaattctcgtggctctcggccttctcagagaaataaatgctttgtgtaacatctgtgcacaccatccattccgctcgctgagcg

SEQ ID NO: 1546 - DNA, 210 bp, Homo sapiens
  misc_feature 1..210: note = U/M: U (0.22:0.87) in Pancreatic Delta cells
  misc_feature 1..210: note = source = chr15:61383738-61383947; Gene: RORA (intron)
  source 1..210: mol_type = genomic DNA
cggcagaagatgccatgaaacctctgggatgaaggtcctgggactagataaattattccacccgacttcctcagtcagccagccttaatagattgactacaggaagcattcgcatgatgctctttatttatccacaagcaacttcacataacaagaattaattcaggaaaggtagactcgacatacctttgctgagtgcctagtagtgcg

SEQ ID NO: 1547 - DNA, 250 bp, Homo sapiens
  misc_feature 1..250: note = U/M: U (0.26:0.91) in Pancreatic Delta cells
  misc_feature 1..250: note = source = chr17:71315786-71316035; Gene: CDC42EP4 (Intergenic)
  source 1..250: mol_type = genomic DNA
cgttgatggtgagagtccagccacagaaccatgagaaggtaggaaaggaagtttccagctgaaacagaaatgatcccgttactatactgagccgcagtgggcaagaggaggttgctaggggagactggcatgatcttcaccaagcagacaggcttctgtgtgcccaggaggagtctacattgtttcaaagagaacggactcaccctgcctgaaggcacctcttagcaagctatagtagtatctcaaatcg

SEQ ID NO: 1548 - DNA, 361 bp, Homo sapiens
  misc_feature 1..361: note = U/M: U (0.2:0.85) in Pancreatic Delta cells
  misc_feature 1..361: note = source = chr6:158137642-158138002; Gene: SNX9 (Intergenic)
  source 1..361: mol_type = genomic DNA
cgattttactttgaaaatgttcaagcttatatggttttctagggaggtgttttgttttgtttttttcttagtgcattacattctaaattcaatgccctggaagatactgaatagatgggacaaaatccattaggctggatgatttatggcttttcagcatttagcaggagtggctttcaatgtgaaattggttgcgtgcagcaaaccattttagaaatttgtctcacgttgcccataagtgattcatgccatgcttcccatgcctctttttgggaaaaggggaaacaatatcaacacaaagcaaattcagtgtccagtacctctgtcctttgcgaacccctgctcagcaatcccatgcccg

SEQ ID NO: 1549 - DNA, 170 bp, Homo sapiens
  misc_feature 1..170: note = U/M: U (0.18:0.82) in Pancreatic Delta cells
  misc_feature 1..170: note = source = chr6:41643405-41643574; Gene: MDFI (Intergenic)
  source 1..170: mol_type = genomic DNA
cgcctggaattcctgtgcctcttctccttctcttatctaggcccttgttgtccttggacgagttaccgagtctctctgcaccttttcctcctcatctctaacatggacataaccatggtcacctcccagggttcgcagaaggctcactgggataattcatataaagcacg

SEQ ID NO: 1550 - DNA, 313 bp, Homo sapiens
  misc_feature 1..313: note = U/M: U (0.28:0.91) in Pancreatic Delta cells
  misc_feature 1..313: note = source = chr2:129168742-129169054; Gene: HS6ST1 (Intergenic)
  source 1..313: mol_type = genomic DNA
cgcgtccaggagaaaacctacctggagtagttttgcttcctaattgagtgcatcagtgatttttctccttaggtttctgtgttttgacatttgattacatccagcttcacactcggagctctctgtgtactaagcactaattatttgatgtatcctgaaatagagaaaacaacatgccacttattgtgttaattgggatttgttttacccgcagcaaacttgtgcacgtaggttttattccatatttgctcattaatgcagccagccgctcatcagacatttatcaagggctcactgtgagccaggcgcagcg

SEQ ID NO: 1551 - DNA, 328 bp, Homo sapiens
  misc_feature 1..328: note = U/M: U (0.17:0.8) in Pancreatic Delta cells
  misc_feature 1..328: note = source = chr12:127371160-127371487; Gene: LOC440117 (Intergenic)
  source 1..328: mol_type = genomic DNA
cgagagctgtggtccacaggtagaatttcttcttctccgggaaacctctttctagtgtggcagcaaataatgactaaatggattttgtggctaaggcagcacagagatatagaaaaagttcaacaggtattattaaaaggcatttaatctctaggcaactcagctagatgaaatgcaatgaaagagtcgctgcttttttcaggagagatacatgaggcatctttacctaataaacaccatttgttatattgaagctttagggccgaagccaatgagttgaaactcttaaaaacaaaatcttttgaaaataattctgcacatttaggcg

SEQ ID NO: 1552 - DNA, 445 bp, Homo sapiens
  misc_feature 1..445: note = U/M: U (0.21:0.83) in Pancreatic Delta cells
  misc_feature 1..445: note = source = chr3:54250346-54250790; Gene: CACNA2D3 (intron)
  source 1..445: mol_type = genomic DNA
cgtttcagtgatgtttaaaagtgcgtgttttgattatctttaagtattccaggtatatgtgtgctttctataataataaacagaagccaatacttgcatactggttgaaatctggtgctttttaaagtttgcatggacaggttgttatccagttgccatccagcttgtccaccaggtgtgttagggatgggctgtgagcaccaaagtgcgaggcctatagtggaactgatagagtaatatcaacattttaaactaattagatgaggaaaaagcatttcacagaaggcgtgatggcttcttgccctccagctggaaggtggcagagcataattggagttagaaagctttttaccatcagtgatttaactgagcacacttgaaggacacccaggagtaatgcattaactgttttgtttttgtcaaaaataagcccaggtgtaagacg

SEQ ID NO: 1553 - DNA, 192 bp, Homo sapiens
  misc_feature 1..192: note = U/M: U (0.29:0.9) in Pancreatic Delta cells
  misc_feature 1..192: note = source = chr15:70636344-70636535; Gene: TLE3 (Intergenic)
  source 1..192: mol_type = genomic DNA
cgcaaattagatccacccattgcgtttcgttgctctgacactcaggtctctctgattctcaagtttcctctccccactttcccatgccaaccagttgaacctccttttatagatgggaaatgaggcagtgttcgcggtctcttccaggactaggccccagccagctctagttcatttctgctgccgccgtcg

SEQ ID NO: 1554 - DNA, 259 bp, Homo sapiens
  misc_feature 1..259: note = U/M: U (0.27:0.88) in Pancreatic Delta cells
  misc_feature 1..259: note = source = chr11:117572066-117572324; Gene: DSCAML1 (intron)
  source 1..259: mol_type = genomic DNA
cgatgataccaccctgggcaggatcgtcccccagagaataaacaaccgccagagaaaaacagcctttgagaacccgcttatggtcaattaaaaatcccaattaacacttctgaaaaatagttcaatatttgccactgagctcaggatgagatgcatctggaggtacacaggcaggcctctttggaggaggaagagctggctgccggctggggaagagccacgagggctgtgcaaagatccccttcagaaagccagcgcg

SEQ ID NO: 1555 - DNA, 327 bp, Homo sapiens
  misc_feature 1..327: note = U/M: U (0.26:0.87) in Pancreatic Delta cells
  misc_feature 1..327: note = source = chr4:41786674-41787000; Gene: PHOX2B (Intergenic)
  source 1..327: mol_type = genomic DNA
cgggcattgaaatatccttatcttggcttcctttcatctttctctgatactggggatggacgaaggccttgtgtctaataagtcatttgcatcagcatgtcccaaatgaccaagagatgaggatgggagagattagcatggtaatctcattctgatggataaaattagcagagatattccccacaaatggagagctgccgttggcgaactgctgtgcttagaatcaattactaaattactttgagctctaagttgacattaacagaaaaaaattgccatcgactgaagggaaataagataaaaaatatgcgatcattaaatctctcg

SEQ ID NO: 1556 - DNA, 334 bp, Homo sapiens
  misc_feature 1..334: note = U/M: U (0.3:0.9) in Pancreatic Delta cells
  misc_feature 1..334: note = source = chr16:2527294-2527627; Gene: TBC1D24 (intron)
  source 1..334: mol_type = genomic DNA
cgaggtgcggtggctcacgcctgcaatcccaacactttgggaggctgaggtggaaggatcgcatgagcccaggagttcaagaccaccttgggcaacatagggaggtctcgtctctataaaaaattagccaagtatggtggcatgtgcctgtggtcccagctacttgggaagctgaggcagaaggatcacttgagcctgggagctcaagactgcagtgagctgtgattgtgccactgcactcaagccagggcaacagagtgagaccctgtctctgaaaaacaaaacaataaaaatgcatttattgaattcacacttcataggaggcaccatgccg

SEQ ID NO: 1557 - DNA, 423 bp, Homo sapiens
  misc_feature 1..423: note = U/M: U (0.31:0.91) in Pancreatic Delta cells
  misc_feature 1..423: note = source = chr12:3048985-3049407; Gene: TULP3 (exon)
  source 1..423: mol_type = genomic DNA
cgcgcactctcactccttttccaggtttcatagacttggtgagggatcacagcttagcatgggtgagagatgatttaaagcacagggagattcttgtcacattggggtctccaaagctagaatgggatttcatgtgcttggaaacttgcagtagaatcagggactgacatcgcagttcctctcctctcttcattccctcacagcagattggccggcaccaatcttagtcaagagtggctgtgatcacatttgtgatcaattatgtgagaattttatataattgtcttcatttcaattaaggctgaaagcataaactctagaggtgactcagtcaggactgacagtaatgtgataattgccttcattttcaacccaggagtgcctctcacagctatatgactacggatccattagtgaggagcg

SEQ ID NO: 1558 - DNA, 115 bp, Homo sapiens
  misc_feature 1..115: note = U/M: U (0.21:0.8) in Pancreatic Delta cells
  misc_feature 1..115: note = source = chr1:203980720-203980834; Gene: LINC00303 (Intergenic)
  source 1..115: mol_type = genomic DNA
cgaaacatcatgagcaaacatatatgtctggcgtatttgatggatggccggcgacaatgtggctgaggcagggggagcaggagggaaaggaagacaggatgccaaagaggtgacg

SEQ ID NO: 1559 - DNA, 133 bp, Homo sapiens
  misc_feature 1..133: note = U/M: U (0.25:0.84) in Pancreatic Delta cells
  misc_feature 1..133: note = source = chr11:117421347-117421479; Gene: DSCAML1 (intron)
  source 1..133: mol_type = genomic DNA
cgggccccgccagctccctggacacgcactgcctccccaccttggcattggccagcgtggcaccagcctccccagcacacttggaattctgagctcattcaccagacaggtgcaatttcccacctctcactcg

SEQ ID NO: 1560 - DNA, 419 bp, Homo sapiens
  misc_feature 1..419: note = U/M: U (0.23:0.82) in Pancreatic Delta cells
  misc_feature 1..419: note = source = chr6:127246456-127246874; Gene: RSPO3 (Intergenic)
  source 1..419: mol_type = genomic DNA
cgttcttgcattgccaagagtgataacagaggcaggagagaagtgcatcagtgaaagtcagagaatacaaagccccattgcaagaggcttaatttcattacatacgttgctttgcagaattgcagggaaggaaaaaaaaaatatgtgtgtatgtgtgtgtacatatttttaaaataatgctttatatacaaatatcttccttaatttgccaggacttctattacttttatttaccttcccaataaatactcaagatagaattattaatacctccattttacaaaagactgggacacggaaagattaatttatttacttatcgtcaaggtaatgccagccttggtattagaagctattatcacctgattcacatagtctttgaatctttctactattctattttgacataagagaaaacg

SEQ ID NO: 1561 - DNA, 485 bp, Homo sapiens
  misc_feature 1..485: note = U/M: U (0.3:0.89) in Pancreatic Delta cells
  misc_feature 1..485: note = source = chr7:6156468-6156952; Gene: USP42 (intron)
  source 1..485: mol_type = genomic DNA
cgcttaatgaaagtagggtgtggatgaaaacccagcactagcacctggacagcaagagagaggaccaagacaaaattcagaagctcccgatgtccagaattaggtgcctatcttttatgctactggtagtttttgtgcttgcttcctccctccctcccttcctccctctctttctctctctcttttcccagctttactgaagtataattgatatataccaaattacacatatttaaaatacataatttgatgcattttgacatttgtatacacccgtggaactagcatcaagattaagataatgaacatgttcatcaccctcaaaagttccccgatgcccctttgaaatcaccctttccatcctttccccaccctcctgcccggcaaccactgatctgctttccgtcactatagatgaattagtttagattttctagagtgttgcttatgtggaattgtacagtatatattctcatattatctcg

SEQ ID NO: 1562 - DNA, 497 bp, Homo sapiens
  misc_feature 1..497: note = U/M: U (0.24:0.83) in Pancreatic Delta cells
  misc_feature 1..497: note = source = chr3:13018910-13019406; Gene: IQSEC1 (intron)
  source 1..497: mol_type = genomic DNA
cggtttctttcctggtagctttaccaaaactggggcttatctgcatatgaaaatgggtggagaaactgagggaatctagaaaaaatacagagagaaagctgcaagggcttgccctccttcagaacatctcacctggatgtcactggcttagacaccgtggcagggccggggctgcattcctggtagctgttggggagacagcctgctgccttttatgtagtgagttcacaccaaagaacagctaccaagggaatgcagggcctctgctgtaatgaatagatacgttcatttataataagtgctgggttcacctgttttgtaaatggatgccattaagtgctcctaaatcaacagcgtctcctaagtgagttaaacatccctttttgcagtcatctttatgttactgatttaaacaacaccttcttttgtcccagtggaaggaagacctgacccaactccactgattgagaattaatggaggcaggacatgtgtgacg

SEQ ID NO: 1563 - DNA, 111 bp, Homo sapiens
  misc_feature 1..111: note = U/M: U (0.25:0.83) in Pancreatic Delta cells
  misc_feature 1..111: note = source = chr19:4729206-4729316; Gene: DPP9 (Intergenic)
  source 1..111: mol_type = genomic DNA
cgcctcctgtgtttaatcaattctggtgcctcagcttcccgagtagctgggattccaggcgtgccaccatgcccggctaatttttgtatttttagtagagatgggttttcg

SEQ ID NO: 1564 - DNA, 170 bp, Homo sapiens
  misc_feature 1..170: note = U/M: U (0.24:0.82) in Pancreatic Delta cells
  misc_feature 1..170: note = source = chr8:53214548-53214717; Gene: ST18 (intron)
  source 1..170: mol_type = genomic DNA
cgatgtcagagccagagcagagtgaagatggcttccctcagaggggctgcgggactccgagcctgcagagggcatctatgcagggtgagagtggcagcctgtctgttttggaggaaggcatccacatgggtgcaggagaggtttgggagcgatggggtggagagtggacg

SEQ ID NO: 1565 - DNA, 319 bp, Homo sapiens
  misc_feature 1..319: note = U/M: U (0.31:0.89) in Pancreatic Delta cells
  misc_feature 1..319: note = source = chr2:242231211-242231529; Gene: HDLBP (intron)
  source 1..319: mol_type = genomic DNA
cgtaaccacaatcacaagtgtcctttagatcatgtgctctaatgatggaggaaggggccatagccaaaaaatggctgccacgagctggaaaaggccaggaagcagatactctccagagctgcctgatggcacccagatacccagactctagaccagtgagactgatttcagccacagtgttgtaatttggtacagcagcaataggaaagtaatacaccaactaaataacgggtacaagcaacaagcaaatggccgttaaacccagtagagaactggttgataaagaactctataattcaacctactgacaccgcacccg

SEQ ID NO: 1566 - DNA, 374 bp, Homo sapiens
  misc_feature 1..374: note = U/M: U (0.31:0.89) in Pancreatic Delta cells
  misc_feature 1..374: note = source = chr5:16844110-16844483; Gene: MYO10 (intron)
  source 1..374: mol_type = genomic DNA
cgctgcaagtgggggaaaacagacagcagataagtgggttgtcccgtcactcatgaatcagctgctgactagcaacaaatcacaatccatttgctttttctccttcaccccaataaaattgggagactctgtttcatttttccattcattgttccccaagtatccttaaactgattctctcaaatcatattactagataataattttcttccaaactatttttatccactccttttttttctttgaataattatttatcgaattcaggatcggactctgaggattttgcataaatcacaggagaaacaaatatttcactatcaggtccacatcacgcattaacacagatctttaatgatgtcaatatttatccg

SEQ ID NO: 1567 - DNA, 378 bp, Homo sapiens
  misc_feature 1..378: note = U/M: U (0.22:0.8) in Pancreatic Delta cells
  misc_feature 1..378: note = source = chr15:61912008-61912385; Gene: VPS13C (Intergenic)
  source 1..378: mol_type = genomic DNA
cgcaaacaccatgccattcagaatgaaacaaggaagcctgcgtgcagacagccagaatacattaccaattgcatatttagctccagaatttgtgaatctttgcaaagaaatttaggggcttctcacttgattaaatagcctgtgatggaggattcggttgttccccacaatagttgcatgcaaatgatagattcacatggactacagcatacagagcccttagggggctgtacatttttaagtaattctgccattgtttttgcatagtaattggaaacgtacattctgttggaatgtgattcttattagaagagaaggtcgctgctgtctgctacaggattctattcatttagggtcagcgggacttaaaaacagacg

SEQ ID NO: 1568 - DNA, 494 bp, Homo sapiens
  misc_feature 1..494: note = U/M: U (0.35:0.93) in Pancreatic Delta cells
  misc_feature 1..494: note = source = chr17:8470034-8470527; Gene: MYH10 (intron)
  source 1..494: mol_type = genomic DNA
cgatgcctgaagccaccaggttttaggatcatttgttacgtagcaactgataactaatatagaattatatctgtccaaacactaaaataatgagttgaaacacaccctggcagggggataaatccttacacttcgtaacagaaccactacattctttacccaaggacacaaatgacggcttagtagcaatttatcttttccaggaaaaagcggggccactgagcaccaaaactgtctctcttgaatttagggtatggtttgagggctgggggtgggggaaacagaatagattagtaacttgatttctgtggtaagataaacaattttccacaaagaagtccttgaagatcttgatggagattcacataccaaagctggcagctcactgttccttctttcctgtgatatagccactaaacacagggcatttcagtaggaaaatttcagatttagttgtggctcaggctcaatggggatgatccaggagagtgacg

SEQ ID NO: 1569 - DNA, 156 bp, Homo sapiens
  misc_feature 1..156: note = U/M: U (0.31:0.88) in Pancreatic Delta cells
  misc_feature 1..156: note = source = chr7:104887719-104887874; Gene: SRPK2 (intron)
  source 1..156: mol_type = genomic DNA
cggttctgtggcttgggtaagttatctcacagcctcactttttcgtctgtaaaatacagatgattaataatattgttatgaggactaactgaaagcgtgcttgaagtgaggtcgttaatggtgaggaagaggggaagagaaggtgagtaaatgacg

SEQ ID NO: 1570 - DNA, 215 bp, Homo sapiens
  misc_feature 1..215: note = U/M: U (0.24:0.81) in Pancreatic Delta cells
  misc_feature 1..215: note = source = chr8:3556138-3556352; Gene: CSMD1 (intron)
  source 1..215: mol_type = genomic DNA
cgcgtccctaaaagcaagacctgatgatgagaggcatttctggcaatctagtaacacgcctggtattccttaataatattattgtgaagcaaaatgtgtttctcacagatgagtaaagaggatcatgttcattactgaagattatccatatgcggactaatagagtgaaaatgtatctggttatctggaaaattatggcctgatgaaaatgtccg

SEQ ID NO: 1571 - DNA, 308 bp, Homo sapiens
  misc_feature 1..308: note = U/M: U (0.29:0.86) in Pancreatic Delta cells
  misc_feature 1..308: note = source = chr7:33827647-33827954; Gene: BMPER (Intergenic)
  source 1..308: mol_type = genomic DNA
cgggttaattgatatccctttccaagtgtgtgttgctggtgaaacagaataatcagtggctctccaccccaactctgacagtctcactccccagagcccccacaaccgccaaaagggagttctgtgcctcttttctcactgacctgcggcctgcctacatctgcccaattagagccatgaaggctgtgacccacccaccactttcctggttccattcagcagacccaccctctttgccttcggaaggcatgatggattggtttgaaacaaaaccatctcgttcccaaactgaaaggttcctttttacg

SEQ ID NO: 1572 - DNA, 314 bp, Homo sapiens
  misc_feature 1..314: note = U/M: U (0.25:0.82) in Pancreatic Delta cells
  misc_feature 1..314: note = source = chr10:72975603-72975916; Gene: UNC5B (intron)
  source 1..314: mol_type = genomic DNA
cgcgtgcatgcgcctgtgcacacacaatgatagcctgtccttgtctccctctgcactcactgtagcaaacacccatctcacttaaacaaatggaaaatcaagtgtcttaatgggttttctcattaaagtgaaagtaccactgcaggggaggaatttctcctgtaatctctctcctccacctctctcccctcccccacaaacagggaattctgtaggataaaacagttcccctcttttccaatccatttatttaactgttgacactttgggacaggccaacttgcccaaggtcacactgggactcaccggtagcg

SEQ ID NO: 1573 - DNA, 367 bp, Homo sapiens
  misc_feature 1..367: note = U/M: U (0.24:0.81) in Pancreatic Delta cells
  misc_feature 1..367: note = source = chr2:129592222-129592588; Gene: HS6ST1 (Intergenic)
  source 1..367: mol_type = genomic DNA
cgtgtgtgtgccctcagtgtggaccactctgcctgagccaccattgcttgtgagttccttaatgcagcctggtgttccctgcctctcagggcaggcaggctgctccctgtctcagatacattttcccatgagatactgtttataaaatacatcttatttctccttcaaaacacagctcacaggtggtgcctcctcccagctcaggtgccctttgcgtctgctcctacaggccccttgatgtctattttaatcactgttcattgtctatctgctcccctctgggtccctcacctggctgccctgtgagtgtctggtgcatctggatggaacgtgcagtatcccatccccaggtccctggccatcggcg

SEQ ID NO: 1574 - DNA, 118 bp, Homo sapiens
  misc_feature 1..118: note = U/M: U (0.31:0.87) in Pancreatic Delta cells
  misc_feature 1..118: note = source = chr1:33887399-33887516; Gene: PHC2 (Intergenic)
  source 1..118: mol_type = genomic DNA
cgagaaggctcattaaaggttcttcgctaactgcatgattccgtctctggtctcactcctgcccaaaccacccttcacattgctgatgtgttctttctaaaaggcggatctgatctcg

SEQ ID NO: 1575 - DNA, 393 bp, Homo sapiens
  misc_feature 1..393: note = U/M: U (0.29:0.85) in Pancreatic Delta cells
  misc_feature 1..393: note = source = chr2:108362136-108362528; Gene: LOC729121 (Intergenic)
  source 1..393: mol_type = genomic DNA
cgctgtaggtactcactctgctaattctagatatatctattatgcagagaaaccaatgactgcatgtgtttctgaggccatttcatttctgttatgtttttctttcacaaggccaaatattcatttattttaaaaaagaaaaagctgttcatatgttaaagaggtcaaaatgcaatttaagagcataattctccccaaagagaagggatactaataaatgctaggacattttctactgctaagtaccttgttgcttttggttaagtaaacacaacaaatggagaagagcttggagcctcatgggtgatcagggagggaatgtgaaaggaagatcaacagatcagcgtctacctgaaccacggctattgagaaggagcgatacaagagagcacg

SEQ ID NO: 1576 - DNA, 467 bp, Homo sapiens
  misc_feature 1..467: note = U/M: U (0.37:0.93) in Pancreatic Delta cells
  misc_feature 1..467: note = source = chr5:158696274-158696740; Gene: UBLCP1 (intron)
  source 1..467: mol_type = genomic DNA
cgaaaataccatgattattaagattacttttgatgttttagacagtcagtatttgcttgttaaacctttggcacagaagtcccggatgaaactcatttattttctgacatctaccttttagcacagtgtttcgttgtaacgagggcctcgtactcttcccaaattatcttttctgtttcaaaagtaaagacaacatttaaaaattacaggcagcattcatatccagtttaaaagggattttttttatggtgttttgtgattatcatattgaagagtgagttttgagtaacagtaaatctgcagttttcttaggcactcaatttttaaggcttcctggaaaacagtaatattcatcttgaacaacagaataaaacatgaattaattttgtttaggtagttgaataaaggtgttcatctaacatagaattggggagaaaataacccttgtattaattttgacttcttcg

SEQ ID NO: 1577 - DNA, 500 bp, Homo sapiens
  misc_feature 1..500: note = U/M: U (0.31:0.87) in Pancreatic Delta cells
  misc_feature 1..500: note = source = chr1:224810551-224811050; Gene: CNIH3 (intron)
  source 1..500: mol_type = genomic DNA
cgctttgccctctggacttgttttctgctgtggacctctctcccagtaagtctgcaaacaggttcctctggggccttattcttcagtagctgtgctatctggatggtgcctttgccaccatcatctgactcactcctatgggcccctccactgggcaccactgaggacttggctcctggtcactgtcctgtccttgctgtcctgcaaggtgctgggtgctgttggttatctgacctcccctctagtgaccacttccatctttgtggtccctgagccccctgacctgccctggacctgcctctgcagtgagctccctgttctctactcccgcactctgctgccccaggggctcttggccctcctttgactgtggcttttccttcttctctcaatgcatcgctcctctaggatttacttcctcctctgtgtcattacccctcatcatccaccacttagctcctgctgctgctctccactgctgcgtcctctgtttcctgtcg

SEQ ID NO: 1578 - DNA, 204 bp, Homo sapiens
  misc_feature 1..204: note = U/M: U (0.34:0.89) in Pancreatic Delta cells
  misc_feature 1..204: note = source = chr10:13553787-13553990; Gene: BEND7 (Intergenic)
  source 1..204: mol_type = genomic DNA
cgagcactggcgtatacattttacccaggagatgcagagactgtgaggtgagagatctgcattggatgcatcaggcttctgggtccctgtgctacactcctctactaagctgctcaaggaactagctgaatggcaggaaggactccattcatgagactatcaagccggtgtccagggagctgtcacaacaagacgtgggtgccg

SEQ ID NO: 1579 - DNA, 344 bp, Homo sapiens
  misc_feature 1..344: note = U/M: U (0.35:0.9) in Pancreatic Delta cells
  misc_feature 1..344: note = source = chr1:208144549-208144892; Gene: CD34 (Intergenic)
  source 1..344: mol_type = genomic DNA
cgtcaaagagtttaaagcagagtttaagtaacttactcaagttcatatgctagtaaggagagaagcaggatttagacccagggacaggagaaataatatgatatgcatatttaagtataaaaatatgataacacaatccctgctcacttgaattcaccatcttgtggggagcaaggtgtctgaaggtttgaaaacaaagggacatgatatgagacccagagtggaagggctgtcagggccctttttgtcaatcccctgcctctaaggcccagcctttcttagccacccttggtaatagctgaggacggatgttgcccttggaaccattactcacgaacgtgccg

SEQ ID NO: 1580 - DNA, 339 bp, Homo sapiens
  misc_feature 1..339: note = U/M: U (0.35:0.89) in Pancreatic Delta cells
  misc_feature 1..339: note = source = chr9:15453796-15454134; Gene: SNAPC3 (intron)
  source 1..339: mol_type = genomic DNA
cgaataaaccctgctccattgctggtttgattccttatgagagaccatttaaaagttttttgtggaacaataatgtacctgtgtttgaccagtaattagaaaccagtaattactggtattaattagtaatttattataccactaatagaaactgatgcctgccgggtgcagtggctcacgcctataatcccaacactttgggagactgaagtgggcaaattgagcccaggagttcgagaccagcctgaacaatatggtgaaaccctctctacaaagaatacaaaaattagctgagcatagtggtgtgtgcctgtaatcccagctactcaggttaaaacg

SEQ ID NO: 1581 - DNA, 254 bp, Homo sapiens
  misc_feature 1..254: note = U/M: U (0.33:0.86) in Pancreatic Delta cells
  misc_feature 1..254: note = source = chr16:27258007-27258260; Gene: NSMCE1 (intron)
  source 1..254: mol_type = genomic DNA
cgccatgttgcccaggtttgtctcaaactcctgagcttgagtgatccacctgctgcagcctcccaaactgctgggattacaggcatcagctactgcaccgggccaagaatgagatatttaccttgtctctaagtacctccctgcaatatacttattaatcacatagaaaaagagtaattgtacactggagaaacctggctgaccccatcaacaccgtagccgacctggtaggatgcagagagaacacaacaccg

SEQ ID NO: 1582 - DNA, 338 bp, Homo sapiens
  misc_feature 1..338: note = U/M: U (0.35:0.88) in Pancreatic Delta cells
  misc_feature 1..338: note = source = chr12:46352966-46353303; Gene: SCAF11 (intron)
  source 1..338: mol_type = genomic DNA
cgcttggcctgggaggcagaagttgcagtgagccgagatggttccactgcactagagcctgggtgacagactgagactctgtctcaaataaaaaaaaaaaaagaagtgaacatgcataaaattgtacaccacaaaccaattttttaaaaagattttaacgtcaggctatcccttgacgtacttaaaaatcgtaagtttagaatccttgtcttgtatagcaaataaatattaacatagtgaattaaatgaaattaaatgttagaatgtgtatgacagcctaggcataaggcatggcctgttagaaggctgaagacacttattcctgatcctgaaatccg

SEQ ID NO: 1583 - DNA, 408 bp, Homo sapiens
  misc_feature 1..408: note = U/M: U (0.35:0.88) in Pancreatic Delta cells
  misc_feature 1..408: note = source = chr7:99616252-99616659; Gene: ZKSCAN1 (intron)
  source 1..408: mol_type = genomic DNA
cgcccacctcagcctcccaaagtgctaggattacaggcatgagccactgcgcccggcgcatcatgagaaattacctagcaaatgtttggtgaagagtattagggcctttagagacagaagagtatgtgctcagatcatctgggaaacctcaaataaaacccagcctttccactgctgtgatggcttttccctgcaccccagagtaggagcagagagatactgaaggtgaggaggaggatctgtcccagttgtgggcagagggaatgtgcccatgtctgtgtctatttccccctggactcatttcctccttagagtcgcatcttcgcactgacccaagaagtgtcctgctcaatagctaaggcaggataaaactttcacaaaagtagggatttctggtggctgggctcg

SEQ ID NO: 1584 - DNA, 499 bp, Homo sapiens
  misc_feature 1..499: note = U/M: U (0.31:0.84) in Pancreatic Delta cells
  misc_feature 1..499: note = source = chr15:94958699-94959197; Gene: MCTP2 (intron)
  source 1..499: mol_type = genomic DNA
cggggcttaaaagggtccaaggcttcactttgacttttgatcaaatttgttttcataatcctttcgcagtgccataacaccccgtgcagcattctccttttaggttattatttcagctaaatatgtagaaaataggtgaactttaggattccctcggtgcgtccccccaacctcacccctcccaacacacccccattctgagatgtttcccctgaattaggcatatgcaagaccaacccacatttaggacgtgataactttgtccagaccatcattgtaaacttcaaatgatacacagacacatttgaaaaaagatctcctctctgcattggagaatcctaactcaatcttgtgtgtctggagagctgatatagcaattttatcagactctgtatctcttatattgctttgattataactcagtgtttcctaaatgacactgaaaagcttaaagaaaggttttactagttctttcccaatggcagtttaggaaatatcg

SEQ ID NO: 1585 - DNA, 104 bp, Homo sapiens
  misc_feature 1..104: note = U/M: U (0.3:0.82) in Pancreatic Delta cells
  misc_feature 1..104: note = source = chr16:88895451-88895554; Gene: GALNS (intron)
  source 1..104: mol_type = genomic DNA
cgtctcccagagctacacgggtcccgagtctcatgccaacgtctcccagagctacacagttcctgagtctcatgccaacgtctcccagagctacgcgggtcccg

SEQ ID NO: 1586 - DNA, 290 bp, Homo sapiens
  misc_feature 1..290: note = U/M: U (0.34:0.86) in Pancreatic Delta cells
  misc_feature 1..290: note = source = chr2:219687559-219687848; Gene: PRKAG3 (exon)
  source 1..290: mol_type = genomic DNA
cgaggaatccagaagccctgactaaacccactggggccatccgacccagtcaggcggcaaggggatgggcgggcatggagcacagatggccctggggtaatcctagtgcctctggttcagggacctccaagcttgactcagctgttctccttaatttcatcatcccatggtgcactgggcatgcccgagggcttctgggagcacaggtagggcaagggcaatttgggagggctgaagaagcctgtggggaaaagaaaagggaagatggtgaccacataggagggacagcg

SEQ ID NO: 1587 - DNA, 309 bp, Homo sapiens
  misc_feature 1..309: note = U/M: U (0.35:0.87) in Pancreatic Delta cells
  misc_feature 1..309: note = source = chr10:16566692-16567000; Gene: C1QL3 (Intergenic)
  source 1..309: mol_type = genomic DNA
cgataagaatcttggaagtgggccctggactctcatttctgcagcatctcccaaccatctctcaagaaaacaccaggctccctactcccattgcacctgtacctggaccttgtggaccctccagaagatgaagtccaatccagaaagccgtgatcatggttggatcacaatcctgtgattttcttcttccccacaccatttctgttgctttcagagagctgagcagatcctaagcacacgactcccacacagacatgcacggccatccattaatcagtattgagtatctacggacagcacagccctacg

SEQ ID NO: 1588 - DNA, 450 bp, Homo sapiens
  misc_feature 1..450: note = U/M: U (0.37:0.89) in Pancreatic Delta cells
  misc_feature 1..450: note = source = chr10:21246174-21246623; Gene: NEBL (intron)
  source 1..450: mol_type = genomic DNA
cgtgtgagcttattaatgggcatataatttattttacattctaagaagtcagtgaaaaattatgtagtgtagcaaaagagctaaaaataattatattacaagatcaaattatagagagattactttttggtatacttttttaaaagtgtcactcttagcttttcttgtaaagtaggcaagcaattcttataaatgggtatgcgaaattgaaagtggtagcaaaaaaggatatttgggaaagcggacagataattaaaattgtgaacattgacaaggtaagggaaataatatagggcaggtgaaacactaatgtctatagacattagtctatactgatctaggaaaatggggttttagacactctcattgaagtcaacacacagaggtacatacacagatatacgcacacacagacaagcaaaactattttctccatttgtcaagaacacg

SEQ ID NO: 1589 - DNA, 93 bp, Homo sapiens
  misc_feature 1..93: note = U/M: U (0.32:0.83) in Pancreatic Delta cells
  misc_feature 1..93: note = source = chr11:72374120-72374212; Gene: PDE2A (intron)
  source 1..93: mol_type = genomic DNA
cgcctcctcaggaagggtcctcatcagcggtcccagcactcacccgacaaaattgattgcctgcgtctgggtgtgcctgtctctaatgaagcg

SEQ ID NO: 1590 - DNA, 191 bp, Homo sapiens
  misc_feature 1..191: note = U/M: U (0.28:0.79) in Pancreatic Delta cells
  misc_feature 1..191: note = source = chr2:89339816-89340006; Gene: MIR4436A (Intergenic)
  source 1..191: mol_type = genomic DNA
cgctgaaccttgatgggaccccactttgcaaactggatgcagcatagatcaggagcttaggggctttccctggtttctgctgataccaggctaaccagctgctaataccctgactcgcccgacaagtgatggtgactctgtctcctacagatgcagacacggaagatggagactgggtcatctggatgtcg

SEQ ID NO: 1591 - DNA, 292 bp, Homo sapiens
  misc_feature 1..292: note = U/M: U (0.35:0.86) in Pancreatic Delta cells
  misc_feature 1..292: note = source = chr3:72949112-72949403; Gene: GXYLT2 (intron)
  source 1..292: mol_type = genomic DNA
cgattttccatccaacttaccctgctagtctgtatggcagcctcaggttcacctgagttaatttagcttgacagttcaggagaagcgctgataagagaagtagcaggagatggcagaaaagagggtctgagtagaaccaattactcactttaataattcagtgtgttttgcagtaataggctacaaagtaaatagcactacacataaatgccgtatttcattatttatacactccagaaattgaagtttaattaagtcgcacgtttgagacttttaagcgattaaggagacg

SEQ ID NO: 1592 - DNA, 343 bp, Homo sapiens
  misc_feature 1..343: note = U/M: U (0.33:0.84) in Pancreatic Delta cells
  misc_feature 1..343: note = source = chr8:88901809-88902151; Gene: DCAF4L2 (Intergenic)
  source 1..343: mol_type = genomic DNA
cgaaaggtgtattcctttaccgatggaaatttcttctttgataattaaaatgtgcacaccttaagtgtactttttattgtgattatatgtttgctttttacttttcggttcataatggctatcaccaattaagcaacagtggaaatcaacaccaaggaaacagacaaatgcacattagaacagaagatattttttagtaaaagaatataattttgcaatcttagaagaggggataattcattccacctgaaggaattgagggacacatatggaaagctggcagttgatctgcgtcatgaagaaagactaggatattcattggcagagattatgaaaaggagcg

SEQ ID NO: 1593 - DNA, 80 bp, Homo sapiens
  misc_feature 1..80: note = U/M: U (0.37:0.86) in Pancreatic Delta cells
  misc_feature 1..80: note = source = chr13:113584348-113584427; Gene: MCF2L-AS1 (Intergenic)
  source 1..80: mol_type = genomic DNA
cggcttccacaaaacctcacaacgcctggtactggcgaggacacagggcatggggagctctcgttcactgggatggagcg

SEQ ID NO: 1594 - DNA, 219 bp, Homo sapiens
  misc_feature 1..219: note = U/M: U (0.35:0.84) in Pancreatic Delta cells
  misc_feature 1..219: note = source = chr11:13197303-13197521; Gene: ARNTL (Intergenic)
  source 1..219: mol_type = genomic DNA
cgtccaacaatcatggattaattatgagcctcgtctccccaacaggtggtgcctgtgatcccatgaccatatcagatccatcttcgaaatcaagcaggtaaatggtctatccagaatttctagtataagtgttcatcagctgtatatgcaagcaggtagggcaggtgcggtcattaatttaccagactgttctttgacttggtatttcagtgtctggcg

SEQ ID NO: 1595 - DNA, 399 bp, Homo sapiens
  misc_feature 1..399: note = U/M: U (0.19:0.88) in Pancreatic Delta cells
  misc_feature 1..399: note = source = chr9:133740366-133740764; Gene: ABL1 (intron)
  source 1..399: mol_type = genomic DNA
cgctacttcagtagatggtgctgtggcattgttttctgaacaactgaaggaggagactccagagaagggtacctgctggagacctgtgtggtttgtggggtgggtttcttatatcactgaatctaaagtgggtgcctttcagaatgtgctttactaataatgtgttactctgcttttaattatacttctaataatttttcccaagagcctaattaacttacgatctcacagttggtaaagaattacaggatgtcattgcgtggatttctgtgggcagtcacccggagtggtatctaattagggaaaaggcagtatgtccctttctggaagtgtgttaactgaaaatacggtactaagcaactgctaaataaattagccctccttcctcctggccgtgcg

SEQ ID NO: 1596 - DNA, 142 bp, Homo sapiens
  misc_feature 1..142: note = U/M: U (0.29:0.85) in Pancreatic Delta cells
  misc_feature 1..142: note = source = chr12:121439119-121439260; Gene: HNF1A (exon)
  source 1..142: mol_type = genomic DNA
cgctccccactctgctctgatgcatcagaaagggagggctctgaggcgccccaacccgtggaggctgctcggggtgcacaggagggggtcgtggagagctaggagcaaagcctgttcatggcagatgtaggagggactgtcg

SEQ ID NO: 1597 - DNA, 218 bp, Homo sapiens
  misc_feature 1..218: note = U/M: U (0.07:0.95) in Pancreatic Delta cells
  misc_feature 1..218: note = source = chr1:168260481-168260698; Gene: TBX19 (exon)
  source 1..218: mol_type = genomic DNA
cggacagtcaccgctggaagtacgtcaacggggaatgggtgcccgctggcaagccagaggtctccagccacagctgcgtctacattcacccggactcccccaactttggggcccactggatgaaagctcccatctccttcagcaaagtgaagctgaccaacaagctcaatggaggcgggcaggtacgaatgaggcgggcaggcctggccacccgctcc

SEQ ID NO: 1598 - DNA, 314 bp, Homo sapiens
  misc_feature 1..314: note = U/M: U (0.16:0.9) in Pancreatic Delta cells
  misc_feature 1..314: note = source = chr20:20412544-20412857; Gene: RALGAPA2 (intron)
  source 1..314: mol_type = genomic DNA
cgggtttttcctctatgcaaagttgaagtaggggctatcttcaatgagaaacatccactaatattacttgcacagacttaatgggagagataaatgggttatacatcagttaacttgtaactaataataaattatattttggtcattaaagtcatgtaattttttaaagaagcagttggtgcgagaaacagtaaggactgtgaaataggaaccaccgttgttccaaggctggtgatcgtcttcactgtcagaattcatgagaggaagctatgtttattttcccttgatgacccgaccactatggaataaaacac

SEQ ID NO: 1599 - DNA, 222 bp, Homo sapiens
  misc_feature 1..222: note = U/M: U (0.07:0.93) in Pancreatic Delta cells
  misc_feature 1..222: note = source = chr1:230393372-230393593; Gene: GALNT2 (intron)
  source 1..222: mol_type = genomic DNA
cgacaacatcgcctaaggatgcatttttcaggttgtatccctctcattaagcagcacctggctgtacctggagcaggtgtgtagcagtggagatggggtgagatccagctccatggtgaagcaggcagctgtttgctaatagggcggcagagagaagggaggtagagcgggaaattaatttagggtgatgcccaggagctttgttacacaactgcgctggcg

SEQ ID NO: 1600 - DNA, 263 bp, Homo sapiens
  misc_feature 1..263: note = U/M: U (0.04:0.85) in Pancreatic Delta cells
  misc_feature 1..263: note = source = chr9:83639823-83640085; Gene: TLE1 (Intergenic)
  source 1..263: mol_type = genomic DNA
cgagctaccatccattcgttactgccagtatcaccgtgaccgtcatttaatctttattcatccttaaatttcagtaaaagtaaaatactttttactttctctggaaagctgtccctggcctcactgataaaataagattactcacctcatgcctatttccttccccttccattgcacacatcccaaatataatttatcttttaatatttgcttttgtcagctagactttcaactctacaaggcaagggctgtatctgtcatcg

SEQ ID NO: 1601 - DNA, 194 bp, Homo sapiens
  misc_feature 1..194: note = U/M: U (0.08:0.88) in Pancreatic Delta cells
  misc_feature 1..194: note = source = chr20:20417198-20417391; Gene: RALGAPA2 (intron)
  source 1..194: mol_type = genomic DNA
cggtcctgggccctggccaggacacaaaggcatagaacaccagcccagggaagccatctcacttcccctggggagacaaacactggatggctcacgaaggcttcaatgtgttgacactgtcgtctctgctgccataaggttggaggccgaagagtaatctaaatagaaaaaagaataaaaccctggcctagtcg

SEQ ID NO: 1602 - DNA, 157 bp, Homo sapiens
  misc_feature 1..157: note = U/M: U (0.1:0.84) in Pancreatic Delta cells
  misc_feature 1..157: note = source = chr1:6329539-6329695; Gene: ACOT7 (intron)
  source 1..157: mol_type = genomic DNA
cgagcattcccaatgccacaggccgagggctgtgactgcttctctcgaggtcagttaatacacagcctgaggcgggcacgagcccaggtgcaggtcattctcagggtcggctccaggctgagggagaatctggtgcccagcaacgggccccaaggcg

SEQ ID NO: 1603 - DNA, 374 bp, Homo sapiens
  misc_feature 1..374: note = U/M: U (0.1:0.84) in Pancreatic Delta cells
  misc_feature 1..374: note = source = chr12:130953864-130954237; Gene: RIMBP2 (intron)
  source 1..374: mol_type = genomic DNA
cggggtgacaggtgacagcgggatcatggtggagcagtccctcagaggcggattgaagccacacagggtcatgtcaatgggctccggggcaactggggagaggcaactaccttttctgccaggagacgatgcaaattaaagtgcggtggataactcaggccagggaaagtgaattattttccagggagataaatggccatttggaggtctgtttctattctcccaggttatatattttcctatttgctattcatcacactcctccctccagatagtcattaactaatggaggctttcagaaaatccattttaatatataggatgataatgatgaaaccttttcctgtgggaggaatagactttaaaaggcaacg

SEQ ID NO: 1604 - DNA, 218 bp, Homo sapiens
  misc_feature 1..218: note = U/M: U (0.13:0.86) in Pancreatic Delta cells
  misc_feature 1..218: note = source = chr4:6974639-6974856; Gene: TBC1D14 (intron)
  source 1..218: mol_type = genomic DNA
cgtggggatgctttacaacagactcggtaactctttccgacataacactgtgtacataggctgtagggattgacgtcgttgttggaaatgaggttgagcggaaagttaatgtcctggttggactctgagggtgctgctgattgttggaaagatagccgcagggaggataggcttgtaggtttcagtgtcctggatgaaaccctgtcatgtgagcaccg

SEQ ID NO: 1605 - DNA, 103 bp, Homo sapiens
  misc_feature 1..103: note = U/M: U (0.17:0.89) in Pancreatic Delta cells
  misc_feature 1..103: note = source = chr6:3143797-3143899; Gene: BPHL (intron)
  source 1..103: mol_type = genomic DNA
cgaaacacactatgagagctgctcagacgacagcagtgatggggagcaggctttgcctttctgcctcccgtgtccacatttcctcctataagtacagcggtcg

SEQ ID NO: 1606 - DNA, 195 bp, Homo sapiens
  misc_feature 1..195: note = U/M: U (0.09:0.79) in Pancreatic Delta cells
  misc_feature 1..195: note = source = chr5:10986780-10986974; Gene: CTNND2 (intron)
  source 1..195: mol_type = genomic DNA
cgttcaggaaacgtctcaggagcagcgctgaggtgttcccttgtagggtctgcacatggaggcagaatgtgctcctgggggcagggataagaaacatccgtttattatagttttctttacgcagctgagcagagttaacacggaaaacactgccgctggggtaaatgcatttgctattagaaaaatttatcttcg

SEQ ID NO: 1607 - DNA, 290 bp, Homo sapiens
  misc_feature 1..290: note = U/M: U (0.2:0.89) in Pancreatic Delta cells
  misc_feature 1..290: note = source = chr11:72022054-72022343; Gene: CLPB (intron)
  source 1..290: mol_type = genomic DNA
cgacctagggcatgagtccggggtgggcttgatgtgggtcccctgtgaaacaggtgaaatgccaaccattaagcaattccaactctggatatttctaataatatctgaagagaaaaacagccaagcagatggagtctgacagaatgaaaaatggtggcagctaggaaggactggagaaggcgggccctagtgtttgtggttggcagggtggccgaggaccaaggctatgggccttgaggatcccgtcaggccagagtagaggctgggacagagacctgcatgggcccacg

SEQ ID NO: 1608 - DNA, 431 bp, Homo sapiens
  misc_feature 1..431: note = U/M: U (0.24:0.92) in Pancreatic Delta cells
  misc_feature 1..431: note = source = chr14:76641864-76642294; Gene: GPATCH2L (intron)
  source 1..431: mol_type = genomic DNA
cggcactttaagttaataatttttctgctgtaacaaatagctcatttttcacccatcttttcccttggcccccctaccatgtctgtctgtgaccaggaggcatagctataagaaatgcagaacatgaagaatatagtatatgaaaacttctcatttaactccactaccgcccggactctgacctcagagtaatttttctacagccagttctgctgaaatgtgtagcctgatgtttagcacggtccacacacatagatgaatatagacacaaatgtgtttgaagaacagccttgatgttcttggcattcacgcccgtgacttgtgttctctcaacacaacagttactcagatgtgtgttggtatgctttcccaggtgccatggtaggtaagcattgtgaatgtactcaagttaaatgaagagtgaattgccg

SEQ ID NO: 1609 - DNA, 104 bp, Homo sapiens
  misc_feature 1..104: note = U/M: U (0.25:0.91) in Pancreatic Delta cells
  misc_feature 1..104: note = source = chr14:42359802-42359905; Gene: LRFN5 (intron)
  source 1..104: mol_type = genomic DNA
cggcaggctgaggcaggagaatggcgtgaacccgggaggcggagctttcattgagccgagattgcgccactgcactccagcctgggcgacagagcgagactccg

SEQ ID NO: 1610 - DNA, 360 bp, Homo sapiens
  misc_feature 1..360: note = U/M: U (0.28:0.87) in Pancreatic Delta cells
  misc_feature 1..360: note = source = chr20:41198544-41198903; Gene: PTPRT (intron)
  source 1..360: mol_type = genomic DNA
cggttccttacatagcaatagctgactattgcaaactactaagtctatgttacagaagaagacactgaagaccagaaggtttaagtaacttgcccaacattttatagaaagaatgaagctagtatataaatttaggtctgtctctaaagcagacaggcttctgctaccccacatggctccctctgtcctttggaaggacatccagtccttatacctggcaggacagccagtgtgtgtcgccagtgtgtgtcgtcagtgtctggggcatctctcccatctgtacctccttgacagtagcacaaaggtgacccttggacagatgctgtactgagtcaggatgtcacacctggaaacccgccg

SEQ ID NO: 1611 - DNA, 218 bp, Homo sapiens
  misc_feature 1..218: note = U/M: U (0.31:0.88) in Pancreatic Delta cells
  misc_feature 1..218: note = source = chr14:25700895-25701112; Gene: STXBP6 (Intergenic)
  source 1..218: mol_type = genomic DNA
cgggttcaagcaattctcccacctcagcctcccgagtagtagctgggatcacaggcatgcgctactgctcctggctaattatgtgtatatatatatatatatttcagtagagatgagttttcaccatgttggctatcctggtctcaaactcctgacctcaggtgatccacccgcctcggcctcccaaagtgttgggattacaggtgtgaaccaccgcg

SEQ ID NO: 1612 - DNA, 215 bp, Homo sapiens
  misc_feature 1..215: note = U/M: U (0.36:0.9) in Pancreatic Delta cells
  misc_feature 1..215: note = source = chr8:11300158-11300372; Gene: FAM167A (intron)
  source 1..215: mol_type = genomic DNA
cgcggtctgtcctggggcactgtgcatctcccctcacctcttataccccccaccaagagcaccaggggtgatagagcaccccagagatatggctcaaacccgcaggtgcctcatcttctccgaagccgacagcacatgcaccctctcgttactaaagacggatataatagaatggtgtgttctgagaagcactctcggtatcaagtgttaaaacg

SEQ ID NO: 1613 - DNA, 279 bp, Homo sapiens
  misc_feature 1..279: note = U/M: U (0.35:0.83) in Pancreatic Delta cells
  misc_feature 1..279: note = source = chr9:97152452-97152730; Gene: HIATL1 (intron)
  source 1..279: mol_type = genomic DNA
cgccactgcattccagcctgggcaacagagcaagactccatctcaaagaaaaataaaggttctcgtttgtgtgataaatgtttaccccgctcataagggaaacagacataatggaaagtgtcatacagactaaccctgtaaccaggatccattaatagaaattggaatggttggaaggaagggctgtttgtagagtaaggtgcttttcatatgttgaattgaaggtgttgccaggacatctaagtcattattttctagtcggtaaaagtagctgagacg

SEQ ID NO: 1614 - DNA, 235 bp, Homo sapiens
  misc_feature 1..235: note = U/M: M (0.86:0.05) in Pancreatic Delta cells
  misc_feature 1..235: note = source = chr17:74905997-74906231; Gene: MGAT5B (intron)
  source 1..235: mol_type = genomic DNA
cgtgtaagtgaggctatggggcagaggcaggttggtgccagagactaaagaggcagctacacgcctgtggctgtgttgagaagcactgtccaagtcgggggcgggctctgggggaggaaattctcaccttgaaatagcaggtccaggagctgcaaggaacccggctgggagctgtccccgagtgctagtgctgaacccacagatactcccaatgctgggagagggaaacagcacg

SEQ ID NO: 1615 - DNA, 254 bp, Homo sapiens
  misc_feature 1..254: note = U/M: M (0.87:0.06) in Pancreatic Delta cells
  misc_feature 1..254: note = source = chr5:138289132-138289385; Gene: SIL1 (intron)
  source 1..254: mol_type = genomic DNA
cgagcacgctgagccagctttctaaagagaaaagctcctttgtaccacgtgtcactctgtagcctctcagccagaaaggaagtacagggtgggtgccagcccgtcccacagcaactccacccctgtgtctgcagagcagcctggagatgggccagagtccctggggaagggaggctgacagctcctctccagataggcaggcaggcgctggcgcaggggggcctgggagctgagctgctcccctgccccccacg

SEQ ID NO: 1616 - DNA, 75 bp, Homo sapiens
  misc_feature 1..75: note = U/M: M (0.86:0.22) in Pancreatic Delta cells
  misc_feature 1..75: note = source = chr16:51188740-51188814; Gene: SALL1 (Intergenic)
  source 1..75: mol_type = genomic DNA
cgcacccgggggaggcgcttggcgagttttgcaaactcccatcttgggggattgatgctcgttcctactaatacg

SEQ ID NO: 1617 - DNA, 394 bp, Homo sapiens
  misc_feature 1..394: note = U/M: M (0.66:0.06) in Pancreatic Delta cells
  misc_feature 1..394: note = source = chr10:21581747-21582140; Gene: NEBL-AS1 (Intergenic)
  source 1..394: mol_type = genomic DNA
cgaatgacttacattcttggctctttttccacccacgcagggaaaccaggaggaattccagaatcaaagagaaccgcattcctctctaccacaaagtactcacacttggcaaatggcaaagatttgggtcatcattttttaaacgacagccaagcattaaagagcccaggcagagagcaagtaaaagagtctccgtggttcctcccagcgctagtctgtggcctcaacaacatagcacgttgcaggaaaaattccaaatttctgggtcccaaggggaggcattactcagcagtctcagcggtgacggcgtcagcaggacaagagccatttgctccgggaggactttgatgtttctttaaatggtttctgcatctagtccaatagaatggatacg

SEQ ID NO: 1618 - DNA, 469 bp, Homo sapiens
  misc_feature 1..469: note = U/M: M (0.73:0.13) in Pancreatic Delta cells
  misc_feature 1..469: note = source = chr6:170602017-170602485; Gene: DLL1 (Intergenic)
  source 1..469: mol_type = genomic DNA
cgtgaaccccctactgtttggttcagagcaaatggaggcttcagaagatgctgccacccccatgatggtgtcctttttggactctatagggacttgctgtcgccacagggaggggccagctcaaatcctaatttaatcttgccacctagtgtcaggatccttttttctctaggttgatgtttcctccaaaagctgacttcggagcattctgcttccctaaggcacaggagctgttccctgtgctgggggctgggggtgggggtgagggtaggtgaaagggtttcaggagcagaagaaatgtaaaaaaagaagagaatgcgaggtcagaatccagaatcctctgcctgcaacactgagtgtagatttcagtaagaaatgaaatatcaggaaccttttaattagaaaatggaagtggaaaacaggctcatttgaatgcctgtttagaaaactggaaataaaaagttccacg

SEQ ID NO: 1619 - DNA, 398 bp, Homo sapiens
  misc_feature 1..398: note = U/M: M (0.72:0.13) in Pancreatic Delta cells
  misc_feature 1..398: note = source = chr9:14321662-14322059; Gene: NFIB (intron)
  source 1..398: mol_type = genomic DNA
cgtttggaccacaatgttactcactgattcccgtcataagagtgtgtcacatgtactaaagttgccaacgctaaataataatgcatatttgcaaattagttctgcaaatgcagcactatagcccacaacctgtaaaacaaaaatgacatttaggaaaggggtaaaacagccactttgcaatccacaaacaggaaaagaaaaactgtgccagggataggagggggtgcaaagaacgaataaaagaagcaaacaaaacccatcagttcaaagccacataccatcgcactgtattgcattaaataaaagagatcttgagtctgtaacagaaccctgggccgctgacttgacgtgtctcaggtacagatttgtggattttctcaggggttgttttggtgtcg

SEQ ID NO: 1620 - DNA, 228 bp, Homo sapiens
  misc_feature 1..228: note = U/M: M (0.74:0.2) in Pancreatic Delta cells
  misc_feature 1..228: note = source = chr2:218518028-218518255; Gene: DIRC3 (intron)
  source 1..228: mol_type = genomic DNA
cgaaaacatgcccttggcaacccagccttctcttttatgagctgactcataggttctgagtgaaaaaagcccttccttaaacaccctctactgccacgtgtggatgaggctgcagtatcccagtgaccaatggagccaggaagtcgtggctctgtgaactgtgccagcatgacccaggacacttcatgagtcccttgtgcccaaaacgtcaccacttgggcaactacg

SEQ ID NO: 1621 - DNA, 148 bp, Homo sapiens
  misc_feature 1..148: note = U/M: M (0.68:0.15) in Pancreatic Delta cells
  misc_feature 1..148: note = source = chr17:61600872-61601019; Gene: KCNH6,KCNH6 (promoter-TSS,intron)
  source 1..148: mol_type = genomic DNA
cggggggacgatctggagtcctggttccgtgaaagggggggctggacccctttactaacttctaaccgggcaaggtggtgagtgccgggtgctgaatgaaaaatccttcttttgatgtccccaacaccttctcctccagggggacccg

SEQ ID NO: 1622 - DNA, 296 bp, Homo sapiens
  misc_feature 1..296: note = U/M: M (0.7:0.19) in Pancreatic Delta cells
  misc_feature 1..296: note = source = chr5:50760907-50761202; Gene: LOC642366 (Intergenic)
  source 1..296: mol_type = genomic DNA
cgactttacctgtctcttccacccccacctttctctttcaaagcatttttttcaatcagcacatgaggttctgaaataatacttagtcttggcttttccctcaactttattcagcaaagctactgacttgaacaaaagcagtactgtacctgctcctggccgccagaaacaatgacgagcgccttgataagattagatgtaattttaaatgcagcagggacaaagactccctcccattcgccccactcctaaccccctactgtaattccaccacagagagcagttgaaaaatcccg

SEQ ID NO: 1623 - DNA, 151 bp, Homo sapiens
  misc_feature 1..151: note = U/M: M (0.6:0.11) in Pancreatic Delta cells
  misc_feature 1..151: note = source = chr11:72353008-72353158; Gene: PDE2A (intron)
  source 1..151: mol_type = genomic DNA
cgaggcttgggcacagctctcagtgtgcactgcggtcccaccgtggactggaagctcagtgcttggggtggagccccggatccgaaaggagttcagagtctggggtgacgtgtggactgagagctggggcttcaagggctcttggtctgcg

SEQ ID NO: 1624 - DNA, 273 bp, Homo sapiens
  misc_feature 1..273: note = U/M: M (0.65:0.19) in Pancreatic Delta cells
  misc_feature 1..273: note = source = chr5:162992362-162992634; Gene: MAT2B (Intergenic)
  source 1..273: mol_type = genomic DNA
cggcagagccacctttgtggctttatgcagtcactgcacacacagatcttcccttttgttttcctgacactaagggaggtgccctttttaaccacgtttgtactcttttcgttgtaataaaaaggaaaatgagaatttaatacccatgcccgtctcaaaggaaaaaaaaaaatagaaaggtatagtaggagagccacatgtctcaagaaaaaaaaatgatcctaaatctagacctccctgctgtagcacttagagtaattgcctggccttgcg

SEQ ID NO: 1625 - DNA, 218 bp, Homo sapiens
  misc_feature 1..218: note = U/M: M (0.55:0.06) in Pancreatic Delta cells
  misc_feature 1..218: note = source = chr17:29297437-29297654; Gene: RNF135 (promoter-TSS)
  source 1..218: mol_type = genomic DNA
cgagttaaaaagccaagggttcgctcactcaaccttgaatgcgcgtcagaatcacctgggggaggttttacaaaatacccgtgctccacccaagacaatgaaatcagactccctgcgagcggggccgaacatcagcatttttgaggacgctccctgtggctgtgcatcggtgatctttaatcccctgctacttgttagaggagctggatgacacttcg

SEQ ID NO: 1626 - DNA, 373 bp, Homo sapiens
  misc_feature 1..373: note = U/M: M (0.86:0.12) in Pancreatic Delta cells
  misc_feature 1..373: note = source = chr22:25815475-25815847; Gene: CRYBB2P1 (Intergenic)
  source 1..373: mol_type = genomic DNA
cgtgaccaattcaggtgaatgaaagggactttaaaacattaatttccagcttaggtcttcctaagactgcctgcatgttccttaacaccactccagcctgagtgtcacgtggatcctgaatgcggacttgtgtgcacactgctgaaaaataagcaactgaaaaccccaggcagcggggtggagtgatgatgaaagacaccgagacctatcgggaagctggaaattcccccccagcttcggtgtttgggctgtatctcgcttttccacttccctaaatcacccccgtggtgcgagtgtgctcgcagcagatgctccctaattgtctcttgtatttgtagcaggatgagcagcaaacaaaactcctcagacaccg

SEQ ID NO: 1627 - DNA, 133 bp, Homo sapiens
  misc_feature 1..133: note = U/M: M (0.9:0.17) in Pancreatic Delta cells
  misc_feature 1..133: note = source = chr10:94828878-94829010; Gene: CYP26C1 (TTS)
  source 1..133: mol_type = genomic DNA
cgcggtgggacctgcaacccttgtaaggaagcgggcacgccgtgggcgcaaccctggcctggctttgggccatagaaaaaacacgcagaggatgcctgacggaaggccctctggcagctggcgtctggcttcg

SEQ ID NO: 1628 - DNA, 154 bp, Homo sapiens
  misc_feature 1..154: note = U/M: M (0.76:0.04) in Pancreatic Delta cells
  misc_feature 1..154: note = source = chr5:176038455-176038608; Gene: GPRIN1 (Intergenic)
  source 1..154: mol_type = genomic DNA
cgtgggactggcgtctccaggcagcacgccaggcaaggagaaaacctcagcgtgtcggaccggtttcagaaccacggacagcaccacaccagggctgcttcctcacatttccggtcctgaaaattgctcattcactgcccacaaggccatttcg

SEQ ID NO: 1629 - DNA, 78 bp, Homo sapiens
  misc_feature 1..78: note = U/M: M (0.78:0.08) in Pancreatic Delta cells
  misc_feature 1..78: note = source = chr10:94825641-94825718; Gene: CYP26C1 (intron)
  source 1..78: mol_type = genomic DNA
cggggccgtcgggtcagcgccccgggcgactccaccgcccgagactcagtgcagcccggggctgtcttgcaggagtcg

SEQ ID NO: 1630 - DNA, 190 bp, Homo sapiens
  misc_feature 1..190: note = U/M: M (0.77:0.09) in Pancreatic Delta cells
  misc_feature 1..190: note = source = chr10:94828683-94828872; Gene: CYP26C1 (TTS)
  source 1..190: mol_type = genomic DNA
cgctccgcgcccagaggaaggaaaatgtcgtgggccaagcaggaatggagggaatagatagatccccacgaggtgctgcttggcttccccttcccgagccaatccagggagggtgcatggatgggggaaggcgaggtaggggtggcaggggagtgggaatattgcaactcggggacattgcagagacccg

SEQ ID NO: 1631 - DNA, 231 bp, Homo sapiens
  misc_feature 1..231: note = U/M: M (0.78:0.1) in Pancreatic Delta cells
  misc_feature 1..231: note = source = chr17:29721727-29721957; Gene: RAB11FIP4 (intron)
  source 1..231: mol_type = genomic DNA
cgggctggagaagcagtgcttggtgtgtctgaatccacaaggctggttaaacattgcagggcaggaccatggacagggccccgaggcacttgtaggggtggttttcggcttatgctgtattgaccgagacccgtggaaatatattttgcatctctactcactacccatcttatcccctgatgcattaaaaaatcggagtgttgttttccagcggtggggtggcggggggcg

SEQ ID NO: 1632 - DNA, 83 bp, Homo sapiens
  misc_feature 1..83: note = U/M: M (0.8:0.14) in Pancreatic Delta cells
  misc_feature 1..83: note = source = chr11:31848747-31848829; Gene: DKFZp686K1684 (intron)
  source 1..83: mol_type = genomic DNA
cgccaggctggtgcccggcctgacccggcgttcgcggccgcccgctcgcccgccgcgggccgggagcgtacaggagtgtgacg

SEQ ID NO: 1633 - DNA, 291 bp, Homo sapiens
  misc_feature 1..291: note = U/M: M (0.72:0.11) in Pancreatic Delta cells
  misc_feature 1..291: note = source = chr7:156804561-156804851; Gene: LOC645249 (intron)
  source 1..291: mol_type = genomic DNA
cgccattagacccagttatcttccccagcaagcgtgagaactgggagggagttccaggttccagggcttgctatgcaggtgagaggtgaataaaggaccggaaggggctgtggagaggggagagagccaaagagaaactcagtgccaggtaaacttcaaaattagcacgccaggttgctacaagagggatttttaaaaaggcaaatatagagaccttgccacttctcctcaaaaggcttttgacctaggcgagagttgatgacagtgactctgttgccatgagtggtatcg

SEQ ID NO: 1634 - DNA, 146 bp, Homo sapiens
  misc_feature 1..146: note = U/M: M (0.78:0.19) in Pancreatic Delta cells
  misc_feature 1..146: note = source = chr19:11532740-11532885; Gene: CCDC151,CCDC151 (intron,exon)
  source 1..146: mol_type = genomic DNA
cgagggaggccattgtgggatggcctcctgaagaaatggccctctgctgcgggcaggataggtcttctgtctcgggctgctccagaactgcagataggtctccgagcttttcggggacagggtgggacttctttcccttggaggcg

SEQ ID NO: 1635 - DNA, 312 bp, Homo sapiens
  misc_feature 1..312: note = U/M: M (0.67:0.08) in Pancreatic Delta cells
  misc_feature 1..312: note = source = chr16:51190085-51190396; Gene: SALL1 (Intergenic)
  source 1..312: mol_type = genomic DNA
cgcgtactgtctgcccgcggcaaagttcgtctttctccgcttggagggctgttcctacaccggtattaagaaaccgacttcgctagcgactgcaagtgcttgcgattttgactttccgtccacagttgagcgtcttgcacttaaattcactgcgccccgcatgcaacagtgcctcgccaaggggcctctgggtatgaaattcctcccagaggaaatgtcccgacgtagagaaagtggaaaaggctaatcgaatttataaaaagaaaatctttcctccttttggttaaatccctttgcggttttctgagcgcg

SEQ ID NO: 1636 - DNA, 296 bp, Homo sapiens
  misc_feature 1..296: note = U/M: M (0.65:0.1) in Pancreatic Delta cells
  misc_feature 1..296: note = source = chr6:34110323-34110618; Gene: GRM4 (intron)
  source 1..296: mol_type = genomic DNA
cgcagcagggtggggatgggtgtggccacacatcctggcgctggactgtggacccctcaggaagtgagtgggagctgcagagcccttctaggcctgaacccggccccctgacccttctggctagcacactgctcagttccagtttcactcgatcgctcacccgctcgctctctcacctacctcgggctgcctgccgctgtgcaaggcgctccctctcagagaagtcacgcctccaacggaatgaagccgcccagacgcaggttgggggaggagggaggagggggggaggaggagcg

SEQ ID NO: 1637 - DNA, 154 bp, Homo sapiens
  misc_feature 1..154: note = U/M: M (0.61:0.1) in Pancreatic Delta cells
  misc_feature 1..154: note = source = chr20:21488274-21488427; Gene: NKX2-2 (Intergenic)
  source 1..154: mol_type = genomic DNA
cgcgatacaggagacattgaaaattaaagaggaagtatctccctcctccaacatggggagagacgctgttggaagaagtttctgaagtggtttcccatcgcaccaagaggccagtgggatggatccccgcgcataattcaaaggaacgcgcgcg

SEQ ID NO: 1638 - DNA, 214 bp, Homo sapiens
  misc_feature 1..214: note = U/M: M (0.53:0.09) in Pancreatic Delta cells
  misc_feature 1..214: note = source = chr11:113346279-113346492; Gene: DRD2,DRD2 (exon,promoter-TSS)
  source 1..214: mol_type = genomic DNA
cgccatcccttgttttgaggcgggaacgcaaccctcgaccgcccactgcgctcccacccacacccagagtaataagctgtgattgcaggctgggtcctcaccgtctgctcgccagtcttctcctttgaggactcagaagccaagggttgcgggaggcaccacccatccagcaagtcaggcaaggagaggaggtgttggaagaggtccgcatccg

SEQ ID NO: 1639 - DNA, 198 bp, Homo sapiens
  misc_feature 1..198: note = U/M: U (0.04:0.91) in Pancreatic Ductal cells
  misc_feature 1..198: note = source = chr5:133081567-133081764; Gene: FSTL4 (Intergenic)
  source 1..198: mol_type = genomic DNA
cgtccccctcacgttaatgacaaacaagttccccgtgatggatatacctgcaattaatattgaagggacagttaatgatttcaaggcaccacgatacaggcctcatatttcaaatttaaaactctcctttcaaagaaggactcattttcaaagcctagaaatgaatgctaataaattaggcaaaacaagttttttaac

SEQ ID NO: 1640 - DNA, 72 bp, Homo sapiens
  misc_feature 1..72: note = U/M: U (0.07:0.93) in Pancreatic Ductal cells
  misc_feature 1..72: note = source = chr7:157290520-157290591; Gene: MIR153-2 (Intergenic)
  source 1..72: mol_type = genomic DNA
cggctcaccgcatgcggcctggtgcccatcacccaggctgtgccagggctgggggtggcacccgtaagaggc

SEQ ID NO: 1641 - DNA, 206 bp, Homo sapiens
  misc_feature 1..206: note = U/M: U (0.04:0.9) in Pancreatic Ductal cells
  misc_feature 1..206: note = source = chr21:37749203-37749408; Gene: MORC3 (TTS)
  source 1..206: mol_type = genomic DNA
cgggagttcaagaccagcctgactaacatggagaaatgccgtctctgctaaaaatacaaaattagccgggtgtggtgatgcatgcctgtaatcccagctactcaggaggctgaggcaggagaatcacttgaacctgggaggtggaggttgcagcgagccgagatcacaccattgcactccagcctgggcaacaagagcgaaactcc

SEQ ID NO: 1642 - DNA, 76 bp, Homo sapiens
  misc_feature 1..76: note = U/M: U (0.05:0.9) in Pancreatic Ductal cells
  misc_feature 1..76: note = source = chr7:156781826-156781901; Gene: MNX1 (Intergenic)
  source 1..76: mol_type = genomic DNA
cgcccggggctcacactgatgtaaggcctgatgagcctgggcctcgccaagcagagccaagtctcaagcccacgcc

SEQ ID NO: 1643 - DNA, 341 bp, Homo sapiens
  misc_feature 1..341: note = U/M: U (0.04:0.89) in Pancreatic Ductal cells
  misc_feature 1..341: note = source = chr4:72091592-72091932; Gene: SLC4A4 (intron)
  source 1..341: mol_type = genomic DNA
cgattttagttattcatgctattgccgtgctaattactacaaataatttatcactgactgtgtataaacataaaactaagctacaatttctagagcttaaggcttatattgacattttgaatcctaattttatttgcaggtagctgccatccagcttctttataggtttacctaaacacattacagagttttatttgtccagttgcaggcctgatgagcaaaattgaactttcttataactttcctgctgcttctgggtatttattatttttttttagagatagatctcactatgttgcataggccggagtgcagtggctattcacaggcacgattgtaac

SEQ ID NO: 1644 - DNA, 346 bp, Homo sapiens
  misc_feature 1..346: note = U/M: U (0.04:0.88) in Pancreatic Ductal cells
  misc_feature 1..346: note = source = chr2:97169667-97170012; Gene: NEURL3 (intron)
  source 1..346: mol_type = genomic DNA
cgctctttctatgggtcctgtttgcaggcaggaccctgagctcagagaagctgagtgccctgcccatgggcgatcgctccaattactccacctgccccggggtccccactgctgagggggtggactgcctgcgggctaagcagggcctctggggtgtctctactccaggacaggtagagtcagattccagattctctaagatcttggaatctgagtggggcaggggcggccccttgctcagcaagagcctctagggatctccatcctcaccactcctccaggtgtcaagcctttcagggtgtcaggcacccataagcactttgcagcctctttttctcctcatccc

SEQ ID NO: 1645 - DNA, 387 bp, Homo sapiens
  misc_feature 1..387: note = U/M: U (0.07:0.9) in Pancreatic Ductal cells
  misc_feature 1..387: note = source = chr13:52359350-52359736; Gene: DHRS12 (intron)
  source 1..387: mol_type = genomic DNA
cgagactctgtctcaaaaaaaaccagaatgtttatggaacaaataaggtgcctttgttcgttaggtattttgattaataaatagttaacatattaaattcaggtgacccgttttcaaagaattggaatgtaaaaaaaaaaacaaacccttgtggcagattattgttcaatattcattctctcctcgccacctctgtgggagaagtacacttctctgattcttgatttggagctctgtgaaatgatttgctttgattaattggatatctgctgatttctggattggttaactggatatcatgtccagttaatcaaaggggcttggatgcaagcagaggcttggaattgctcgcacacctgggcctctgccattgccctgagaatatac

SEQ ID NO: 1646 - DNA, 139 bp, Homo sapiens
  misc_feature 1..139: note = U/M: U (0.12:0.95) in Pancreatic Ductal cells
  misc_feature 1..139: note = source = chr4:72074004-72074142; Gene: SLC4A4 (intron)
  source 1..139: mol_type = genomic DNA
cgggtgtggtggcgggcacctgtagtcccagctactcaggaggctgaggcaggagaatggtgtgaacccgggaggcggagcttgcagtgagctgagatcgcaccactgcactccagcctgggcgacagggtgagactcc

SEQ ID NO: 1647 - DNA, 174 bp, Homo sapiens
  misc_feature 1..174: note = U/M: U (0.05:0.87) in Pancreatic Ductal cells
  misc_feature 1..174: note = source = chr16:85230631-85230804; Gene: LOC400548 (Intergenic)
  source 1..174: mol_type = genomic DNA
cgcttaacttctgcgtttcctgtggggtcagacgaggggttggatgtgattgatttatcgatcagccatttattgagcacctcctgcatgccaggcacagagacaacaagacctggcccctcggagctcggagcctggcggggaagccagacacagggacgggcagttcagaac

SEQ ID NO: 1648 - DNA, 383 bp, Homo sapiens
  misc_feature 1..383: note = U/M: U (0.11:0.92) in Pancreatic Ductal cells
  misc_feature 1..383: note = source = chr21:41039727-41040109; Gene: B3GALT5 (Intergenic)
  source 1..383: mol_type = genomic DNA
cgacccacttacggaggccccattccatttacatctccgctcaagcctccgcctccgggttccagccctggctctgcaatttgctagctgtggccccaggtggtcattctctctgcacctcagtctctgcatctctataaaatgggatgataatagtgttcacctcagaaggttgtcagaggtgtggaaattaagataattcacattgagttcttggcacggctgtgcctagcactgggtgcaggctgaatgcatgggctgctatcgcgatgttgtatctaatggcctgcagtggttgcttagcagcaatgggtttgcttggttatttcctgatttggggtaaatagatccagagaccaaggctccatgttatccccagcacc

SEQ ID NO: 1649 - DNA, 233 bp, Homo sapiens
  misc_feature 1..233: note = U/M: U (0.12:0.92) in Pancreatic Ductal cells
  misc_feature 1..233: note = source = chr10:114877816-114878048; Gene: TCF7L2 (intron)
  source 1..233: mol_type = genomic DNA
cggtccatttccaaccatttccaggactcgctgggctcagcccagcagacggggtcgagaatttactggtggtgttttaattttctggccaggggagaacccttgatgttttttattatttatttgtttgattttggagagaaaaagtcaattaaaagcaaatgggtgataattaggtgaagcacattgggcagatgaataatggttttgtctctggcttggactatttggac

SEQ ID NO: 1650 - DNA, 259 bp, Homo sapiens
  misc_feature 1..259: note = U/M: U (0.13:0.92) in Pancreatic Ductal cells
  misc_feature 1..259: note = source = chr4:72065389-72065647; Gene: SLC4A4 (intron)
  source 1..259: mol_type = genomic DNA
cggagtcttgctttgttgcccaggctggagtgcagtggcgcaatctcggctcactgcaacctccaacctcctaggttcaggtagttctcctgcttcagcctcctgagtagctgggactacaggagcgcaccaccatgcctggctatgttttgaatttttagtagagatggagtttcaccatgttggccaggctggtctcgaacccctgacctcaggtgatccacctgcctcagcttcccaaagtgctgggattacaggc

SEQ ID NO: 1651 - DNA, 404 bp, Homo sapiens
  misc_feature 1..404: note = U/M: U (0.08:0.87) in Pancreatic Ductal cells
  misc_feature 1..404: note = source = chr17:33419036-33419439; Gene: RAD51L3-RFFL (intron)
  source 1..404: mol_type = genomic DNA
cgagctgcgtttatccacgctcctcctttctccaccttaggcattaccaccgtcactatttttcatctttatcatgcccttccacagaggcattcaataatgtacccattgtgcaagcaatccgaaatccttttcagcgagcaatagtatttagtagtgataaaacactaatttgtctaccaagtgacatatttataggagctgtttacttggacatatttttattatttctactcatttgctaagtactttccaacgcatatttatgaagcacaggcctttccccaaacagttgtgaaaaaataaatcatattatttcttttattagtagcagcacggcttggaagtcctagtgccctgattttagttatttctggcaagagctggaagaattaatagtgacc

SEQ ID NO: 1652 - DNA, 455 bp, Homo sapiens
  misc_feature 1..455: note = U/M: U (0.13:0.91) in Pancreatic Ductal cells
  misc_feature 1..455: note = source = chr4:72081451-72081905; Gene: SLC4A4 (intron)
  source 1..455: mol_type = genomic DNA
cgtgatgatcacaagtgaaccgtcccaaaggggctagcaaacagtgggtgctcaacaaacgatacatataattatcattattgataattctgtaatgcattgtacagagtcagttgttttaccgaacaaaataaattattattgcttgtctaccaactttgtcatttctatttttttttttttttttttgagatggagtcttgctctgtcgcccaggctggagtgcagtggcgtgatcttggctaattgcatcttccgcccccaccccggattcaagcaattctcctgtctcagcctcccaagaagctgggattacaggcgtgcaccaccaggcctggctaacttttgtatttttagtagagacggggtttcaccatgttggccatgctggtctcgaactcctggcctcaagtgatccacccaccttggccccccaatgtgctgggattacaggc

SEQ ID NO: 1653 - DNA, 135 bp, Homo sapiens
  misc_feature 1..135: note = U/M: U (0.05:0.83) in Pancreatic Ductal cells
  misc_feature 1..135: note = source = chr11:128609785-128609919; Gene: FLI1 (intron)
  source 1..135: mol_type = genomic DNA
cgttaaggcattttgacaggattttcctctagctgtgggagcaaagggccacgtctgagccgcatcaggcctggccagagccactggcaaggtctctcatccccacgtgtgagggacacatgggccttggttcac

SEQ ID NO: 1654 - DNA, 356 bp, Homo sapiens
  misc_feature 1..356: note = U/M: U (0.11:0.87) in Pancreatic Ductal cells
  misc_feature 1..356: note = source = chr8:97017363-97017718; Gene: LOC100500773 (Intergenic)
  source 1..356: mol_type = genomic DNA
cgaataagtgggagaacctgggaacaaacccagatctgtctgaaaccatgcccttccgatgcttcataccacttccctaccaaaggaaggccgtggaaagctggcccggacatacaaatgtggtgcctggagttccctccactggagtcattccttcaattagggcattatctgtaacagaaatatgttatctaagtaatccattagcagtcaggccacattagcaggaagggattttaaattttttgcttttccagaatagaaggaacgggacatggcacagctaaattttgatgtttcaagttcacacacttgtggtgttgagagtgtaaggaggaaccgacttagaaaatgcc

SEQ ID NO: 1655 - DNA, 248 bp, Homo sapiens
  misc_feature 1..248: note = U/M: U (0.14:0.89) in Pancreatic Ductal cells
  misc_feature 1..248: note = source = chr2:8478761-8479008; Gene: LINC00299 (Intergenic)
  source 1..248: mol_type = genomic DNA
cgttgttacaaatgacaggatcatttaatttcttaaatgagacatttttattacacatcgggcctttcatccaagtgaattttattggctgtgacaggtcctgaaactcatttttatttttcaaaatgcattttgtcaaatattttgcctctaatgaatgaatgtttagactccaaataaatccggctatgcttccccagttctcttcccaaggatcggaagagcactcactgtatacagagctcaac

SEQ ID NO: 1656 - DNA, 441 bp, Homo sapiens
  misc_feature 1..441: note = U/M: U (0.13:0.88) in Pancreatic Ductal cells
  misc_feature 1..441: note = source = chr1:59636210-59636650; Gene: HSD52 (Intergenic)
  source 1..441: mol_type = genomic DNA
cgatgcgtggaactgctgcagtcctcctgtgaccatgaagacaaagccaagagaatgagagtgatgttgttgatctggagtcacaagtcactgaactgctgaattaaaccagtcctggaactgagctacctctgcccatcttgctaaatgaaataatagctgtctttattatacaaggcaattttacttcaaattctaaaacttctgtgagccctcacattccatagtcctgtaactttggtttaggagtcagtcaggctctgatttccaagcctcactctgcccctcattagcgctgtgaacttggcaaattactcacctttaatagtccagagcgtctcaaactttggcttgcatcagagtcaccaggggggcttattataacatagatttctgaacaccacccctagagattcttattcaataagtttgtggtggagc

SEQ ID NO: 1657 - DNA, 67 bp, Homo sapiens
  misc_feature 1..67: note = U/M: U (0.12:0.86) in Pancreatic Ductal cells
  misc_feature 1..67: note = source = chr1:110202186-110202252; Gene: GSTM4 (intron)
  source 1..67: mol_type = genomic DNA
cggtggcattgacgtcgagtacgaaacccacaggcagtattcatagctactcccagaagctttgcac

SEQ ID NO: 1658 - DNA, 268 bp, Homo sapiens
  misc_feature 1..268: note = U/M: U (0.21:0.94) in Pancreatic Ductal cells
  misc_feature 1..268: note = source = chr4:72090796-72091063; Gene: SLC4A4 (intron)
  source 1..268: mol_type = genomic DNA
cggtggctcacgcctgtaatcccagcactttgggaggcctgggtgggtggatcacctgaggtcagtagttggagaccagcctggccaacatggtgaaaccccatctctactaaaaatacacaagttagctgggcatggtggcgcatgcctgtaatcccagctacttgggaggctgaggcaggagaatcgtttgaacccaggaggtggaggttgcggtgagctgagatcgtaccactgcactccagcctgggtgacagaacaagactcc

SEQ ID NO: 1659 - DNA, 121 bp, Homo sapiens
  misc_feature 1..121: note = U/M: U (0.02:0.92) in Pancreatic Ductal cells
  misc_feature 1..121: note = source = chr10:134471465-134471585; Gene: INPP5A (intron)
  source 1..121: mol_type = genomic DNA
cggccccagcacctgcagtcccgtgggacgcgatgatgtgcggctggggctgcagtgaaggtgaaactgtcatatcgatctttttagcactaaaatatgagccactttactccgctccccg

SEQ ID NO: 1660 - DNA, 89 bp, Homo sapiens
  misc_feature 1..89: note = U/M: U (0.02:0.87) in Pancreatic Ductal cells
  misc_feature 1..89: note = source = chr3:57025673-57025761; Gene: ARHGEF3 (intron)
  source 1..89: mol_type = genomic DNA
cgctctgtcgcccaggctggagtgcagtggcacgatcgcagttcactgaaggctctgcctcccaggttcaagcaattctcccacctccg

SEQ ID NO: 1661 - DNA, 409 bp, Homo sapiens
  misc_feature 1..409: note = U/M: U (0.05:0.9) in Pancreatic Ductal cells
  misc_feature 1..409: note = source = chr2:99149523-99149931; Gene: INPP4A (intron)
  source 1..409: mol_type = genomic DNA
cgaggtcggacttgaagggttggacctatatgagatttctggctttgtgttccactccatggacatgggaagcccccgtcagcgcagcctttcactgaagttatgacattgctgtcttggagggtggcggggagggggcgtgaaaagagattgtttcaaatttaaaaaatcacttccctgtgacaactgacgatgtgatcgtctcatctctttgaatgtcatttactctttgtgctttctttgaatgtgtttggaacagaaaactaatcagagtctggttttaaaggattcatttctttcccgtgttgattctgtagcttgcagtgagctgcatactccatcgctagatcgaaagccaaatagttttgttgcggtgagtgtcaccacccctcctcaggcattctggacg

SEQ ID NO: 1662 - DNA, 452 bp, Homo sapiens
  misc_feature 1..452: note = U/M: U (0.04:0.89) in Pancreatic Ductal cells
  misc_feature 1..452: note = source = chr5:66107801-66108252; Gene: MAST4 (intron)
  source 1..452: mol_type = genomic DNA
cgtgagtgccctaattttacaaatgaagcagttgatggctgtaaactgcttcttagccatggtctagggctgtgtttgggtcgggagggagagaaccgcaaacaacatgatgcaaggctggcgcgggctagttggataatggtgaaatcttatgcattagaaggctatcgataagtctcattaccacacagccattgggtacagagctgaccgctgagccacaccagaccaggaagtatgccaaggaaacaatcaatagaagatatattactgaaaattaatattctgctgctgaattatttttatcgatttagggattgtgaaaatggccttagatagttttatgaacaaaaagcctttgtatttcttgagtagaagaccaaaataacagaggaaatcccatcgctaacacaaaaccttgaaacatggcccaggaaacagaacacttatcg

SEQ ID NO: 1663 - DNA, 265 bp, Homo sapiens
  misc_feature 1..265: note = U/M: U (0.06:0.9) in Pancreatic Ductal cells
  misc_feature 1..265: note = source = chr1:179264758-179265022; Gene: SOAT1 (intron)
  source 1..265: mol_type = genomic DNA
cgaaacagagtacaataagacatttcgagagataccatgttcaagtgaattttaatacagtatattgttaatctcttactgtgcctaactttttgaaactttgcctcccaggttcaagggatattcatgccccagcctcccaagtagctgggattacaggcgtgtcccagtacgcccggctaatttttttttttttttttgagatggagtttggcgcttgttgcccaggctggaatggcacgatctcggctccccgcaacctccg

SEQ ID NO: 1664 - DNA, 206 bp, Homo sapiens
  misc_feature 1..206: note = U/M: U (0.07:0.9) in Pancreatic Ductal cells
  misc_feature 1..206: note = source = chr16:4039211-4039416; Gene: ADCY9 (intron)
  source 1..206: mol_type = genomic DNA
cgtctaaaagcgcctgtggaacagacgccactcagctgccccttgttaaaacagatctgtggaaagtccttcgcacctcaaagcataatcatattttgtgtttcaccttcgttaaagaatgaccatccaccatgattatagcacacatcatcagaaccttggttttttggggttttttttttttgaggcaaggtctcactctgtcg

SEQ ID NO: 1665 - DNA, 67 bp, Homo sapiens
  misc_feature 1..67: note = U/M: U (0.08:0.9) in Pancreatic Ductal cells
  misc_feature 1..67: note = source = chr3:29471784-29471850; Gene: RBMS3 (intron)
  source 1..67: mol_type = genomic DNA
cgagaaaatcgaccgctttcagcagaatttctagaatttacgaacaaggatatgacaaagaaaaccg

SEQ ID NO: 1666 - DNA, 178 bp, Homo sapiens
  misc_feature 1..178: note = U/M: U (0.08:0.9) in Pancreatic Ductal cells
  misc_feature 1..178: note = source = chr7:47633278-47633455; Gene: TNS3 (Intergenic)
  source 1..178: mol_type = genomic DNA
cggagagcaagctgggagatggcaaaggaatttgaacatagcaggtcatggccacgcgcctctgtggcacctgagctttctgtgaaccatttggctgctgctatgggactcttaaaagtcaaattttttggccgggcgcagtggctcacgcctgtaatcccagcactttgggaggccg

SEQ ID NO: 1667 - DNA, 198 bp, Homo sapiens
  misc_feature 1..198: note = U/M: U (0.08:0.9) in Pancreatic Ductal cells
  misc_feature 1..198: note = source = chr4:106834079-106834276; Gene: NPNT (intron)
  source 1..198: mol_type = genomic DNA
cgctggtgtgatcttggcttactgcaaactccgcctcttaggttcaagtgattctccagcctcaggctcctgagtagctgggattacaggcgcccaccacaatgcccggctaattttttatttttagtagagatggggttttgccatgttggccaggctggtcttgaactcctgacctcaggtgatctgccggcctcg

SEQ ID NO: 1668 - DNA, 420 bp, Homo sapiens
  misc_feature 1..420: note = U/M: U (0.05:0.87) in Pancreatic Ductal cells
  misc_feature 1..420: note = source = chr2:106553512-106553931; Gene: C2orf40 (Intergenic)
  source 1..420: mol_type = genomic DNA
cgcatacacacacacacactcacacacacacctacctttctgctcacagccccaccttgttgtcccattaacctagccatttttcttattgagtcacacttatgaatgggatctgcccagacttcttcaaggccgggtgacccaactaactggtagcttagctgagaagtcactcccagaccctgggagcaagtgtgcctttcgccaatattgggatgatcttcccgtgaccccacagaagctctacgtcatcttacagtctcttccttattccctggccagtcaccacattctgctcctgcttcctttgcaagctcttcagaactcatctggcatttccctggctaacaccccaacctgagtccagcttcctatttaaatggaatcttagtgggtctccctgcctctagcttctgttcg

SEQ ID NO: 1669 - DNA, 483 bp, Homo sapiens
  misc_feature 1..483: note = U/M: U (0.04:0.86) in Pancreatic Ductal cells
  misc_feature 1..483: note = source = chr4:72062018-72062500; Gene: SLC4A4 (intron)
  source 1..483: mol_type = genomic DNA
cgcagctcacacatttgcactttcacaggttgagctcctttgccagggaaaagggagaaggcggataggaaatgtctcaaaagatttagataaactagattagataatttctcttgaaaaatatattaagaaatgaaataaaaacaccactccaaaagcatcaaaagaaaatatagttcaaacacttacctatttttattgccaaaaccttaggcagtgaattctgcagttgaattgatcactttattgttttctgctttgcactgccctttaattgtttcatatgtgttcatgttgtctacacagtatactttcccatggtcctcacggtggccagaaaatgcttatttaatggagggatacttagtatttttaaaatgtgtactggctgggtgcggtggctaactcctatagtcccagctacttgggaggctgaggcaggagaatcgctggaacctgggaggcagaggctgcagtgagccg

SEQ ID NO: 1670 - DNA, 64 bp, Homo sapiens
  misc_feature 1..64: note = U/M: U (0.08:0.89) in Pancreatic Ductal cells
  misc_feature 1..64: note = source = chr16:3505114-3505177; Gene: NAA60 (intron)
  source 1..64: mol_type = genomic DNA
cgatctcggctcgctgcaacctcggcctcccgggttcaagccattctcatgtctcagactcccg

SEQ ID NO: 1671 - DNA, 128 bp, Homo sapiens
  misc_feature 1..128: note = U/M: U (0.05:0.86) in Pancreatic Ductal cells
  misc_feature 1..128: note = source = chr12:121603114-121603241; Gene: P2RX7 (intron)
  source 1..128: mol_type = genomic DNA
cggttccccccgtcactaatggccattttgcatgtctctctcccaggcctgctctcttgaacagtgccgaaaacttcactgtgctcatcaagaacaatatcgacttccccggccacaactacaccacg

SEQ ID NO: 1672 - DNA, 308 bp, Homo sapiens
  misc_feature 1..308: note = U/M: U (0.05:0.86) in Pancreatic Ductal cells
  misc_feature 1..308: note = source = chr11:2751716-2752023; Gene: KCNQ1 (intron)
  source 1..308: mol_type = genomic DNA
cgctcttcacaacctcccttcctccctctttctcttatggggagtgcaggggtgatctggaggagccggtcaatagcagcgtggtggggtctggcagagacagactgcagggggcctgggaggccccaggaggcaggtggactttgtccctaggcatccagtgcagaggtgagacctgtatggccacagagtctccctatccaggccccattaccctgggggaggcggattatggtatgaactgctgcaggtggtccaagaggggctgcccctgggagacgcagggttcttcagtaatggtggtttcg

SEQ ID NO: 1673 - DNA, 365 bp, Homo sapiens
  misc_feature 1..365: note = U/M: U (0.06:0.87) in Pancreatic Ductal cells
  misc_feature 1..365: note = source = chr4:24102403-24102767; Gene: PPARGC1A (Intergenic)
  source 1..365: mol_type = genomic DNA
cgcttgcgagtaacatggctgttcatttttttcttcccaggaaagcattatgacgggaactgcaaaataagagctgaattcatactttctagcttctgtctaaacagccataattttttaaggttctacaacaaataaactacaatttacaggtgcagaccatgtattaacctaacatccataaaactgagcatgcatttgcttaacactttcagggaggaggtggtaagagtagaaagacaaattctatgatttatttaatttacttttgatagggtttggatctgcatctgcacccaaatctcatatcgaattgtaatctccactgttggaggtggggcctggtgggaggtgattggaacacg

SEQ ID NO: 1674 - DNA, 79 bp, Homo sapiens
  misc_feature 1..79: note = U/M: U (0.07:0.87) in Pancreatic Ductal cells
  misc_feature 1..79: note = source = chr2:99409519-99409597; Gene: KIAA1211L,MGAT4A (TTS,Intergenic)
  source 1..79: mol_type = genomic DNA
cgcctcggctttggaagcaaggctagatggacggagctcttgtgttacagcatattcaccatggaattcggtattgacg

SEQ ID NO: 1675 - DNA, 102 bp, Homo sapiens
  misc_feature 1..102: note = U/M: U (0.08:0.88) in Pancreatic Ductal cells
  misc_feature 1..102: note = source = chr2:102727793-102727894; Gene: IL1R1 (Intergenic)
  source 1..102: mol_type = genomic DNA
cgctgctgcacatagggctggcgaccagaacactgtatctcttggccaaccttgtcctccgtgtgagacaagtggagacattttacaaaaatacgttctacg

SEQ ID NO: 1676 - DNA, 330 bp, Homo sapiens
  misc_feature 1..330: note = U/M: U (0.07:0.87) in Pancreatic Ductal cells
  misc_feature 1..330: note = source = chr13:52359408-52359737; Gene: DHRS12 (intron)
  source 1..330: mol_type = genomic DNA
cgttaggtattttgattaataaatagttaacatattaaattcaggtgacccgttttcaaagaattggaatgtaaaaaaaaaaacaaacccttgtggcagattattgttcaatattcattctctcctcgccacctctgtgggagaagtacacttctctgattcttgatttggagctctgtgaaatgatttgctttgattaattggatatctgctgatttctggattggttaactggatatcatgtccagttaatcaaaggggcttggatgcaagcagaggcttggaattgctcgcacacctgggcctctgccattgccctgagaatatacg

SEQ ID NO: 1677 - DNA, 464 bp, Homo sapiens
  misc_feature 1..464: note = U/M: U (0.02:0.82) in Pancreatic Ductal cells
  misc_feature 1..464: note = source = chr17:41800032-41800495; Gene: SOST (Intergenic)
  source 1..464: mol_type = genomic DNA
cgatgggaaccagtcccctgggcacatgctgctctctctcctccataccatgcaacacagtcctttgctgagatttgacaagggaaacacagtcatagatgaaaccccctacagctgctgcaaagcccttcagaaacatgagattggcctctgaaccagaggaaagtaacgtggggctgtacaacagcagccagcctgtgagactgatggataaagctttaatttatcggtgcaccttgtttggagaaagcttccctgccctcttggctgcccccacctccaacccctcctgttttgctaatgataaatgacaagcagtggacatttattaattaaaccacccgctgtagccattggtaaaacccaaggccacatgcaggggaagcattcaaagcattcctgctgcccctgcccagggcacaggccccagggttatcctttgctggagagagcaggccacggcg

SEQ ID NO: 1678 - DNA, 271 bp, Homo sapiens
  misc_feature 1..271: note = U/M: U (0.06:0.85) in Pancreatic Ductal cells
  misc_feature 1..271: note = source = chr2:171086612-171086882; Gene: MYO3B (intron)
  source 1..271: mol_type = genomic DNA
cgattatactacatgaataattatgcttcattcttctggtattaatctcatggggacctagtttttttttttgttttttttttttcgagacagagtcttgctctgttacccaggctggagtgcagtggagtgatcttggctcactgcaacctccgcctcccatgttcaagcaattctcttgcctcagcctccggagtagctgggatcacaggcatgtgccaccacgcctggctaattttttttttttttttttttttttttagtagagacg

SEQ ID NO: 1679 - DNA, 155 bp, Homo sapiens
  misc_feature 1..155: note = U/M: U (0.04:0.82) in Pancreatic Ductal cells
  misc_feature 1..155: note = source = chr10:117842780-117842934; Gene: GFRA1 (intron)
  source 1..155: mol_type = genomic DNA
cggagccaggagtctggtgtggaaataagcacctctctttcctcgcttctatcttcccaggcctcctctcctcccagtctatcatcctgtgcaaaatcccagcaccctggactggctctcaagcgcctcttctctggtggaagattaacgggccg

SEQ ID NO: 1680 - DNA, 185 bp, Homo sapiens
  misc_feature 1..185: note = U/M: U (0.03:0.81) in Pancreatic Ductal cells
  misc_feature 1..185: note = source = chr10:13772059-13772243; Gene: FRMD4A (intron)
  source 1..185: mol_type = genomic DNA
cgatgatcagatggctggtttgtctgcaggtctggggactgtgcaaccccctggtctcccaatgcctcagttactgacgctgcaaacaaggcagattgtcccagagattagagctctcaggctttctcgggcttcaatcaatcaaaggaacgtaaggacccctcccctacagagagagccggacg

SEQ ID NO: 1681 - DNA, 229 bp, Homo sapiens
  misc_feature 1..229: note = U/M: U (0.06:0.84) in Pancreatic Ductal cells
  misc_feature 1..229: note = source = chr4:187225006-187225234; Gene: LOC285441 (intron)
  source 1..229: mol_type = genomic DNA
cgaccagttccggtgggtatatgacaggggagccctgtcacagcgctacccaggacccagttccggtgggtatgacaggggaggcctgccacagtgttgtccagggctttgcagatggtttggaatttccctatcagtgcacttgaacacctttatggaggtctgtcctgtggcataattcagattccagagccacagtagaagaggtttcaccagatttgtattcacg

SEQ ID NO: 1682 - DNA, 229 bp, Homo sapiens
  misc_feature 1..229: note = U/M: U (0.13:0.91) in Pancreatic Ductal cells
  misc_feature 1..229: note = source = chr6:158616913-158617141; Gene: GTF2H5 (exon)
  source 1..229: mol_type = genomic DNA
cgtagctcaatttcatttgcagcaaagataacactgaaatgtctatggatgagattattggataaacttttttaaaaacactgttctcaagataggcaagtgattaagagcactgactgggccgggcgcggtggctcacgtctataatcctagcactttgggaggccgaggcgggcaaatcacaaggtcaggagatcaaaacaatcctggctaacaaggtgaaaccccg

SEQ ID NO: 1683 - DNA, 237 bp, Homo sapiens
  misc_feature 1..237: note = U/M: U (0.11:0.89) in Pancreatic Ductal cells
  misc_feature 1..237: note = source = chr19:5603471-5603707; Gene: SAFB2 (intron)
  source 1..237: mol_type = genomic DNA
cggaaatctaccttctcaaaagagaagcctacaattgtgttaaaaatataaacaacccacacctcccttgaaagatctgtccctacctccattttgattaaagatataaatcacccctttataaaaatagaacctcagacccatggttcccaactactacgccaaggtacgccaaggtaccccaaggtgccaccgtgaactcacagggtgccaccgtgaactcacagggtgccaccg

SEQ ID NO: 1684 - DNA, 295 bp, Homo sapiens
  misc_feature 1..295: note = U/M: U (0.11:0.89) in Pancreatic Ductal cells
  misc_feature 1..295: note = source = chr12:110788669-110788963; Gene: ATP2A2 (TTS)
  source 1..295: mol_type = genomic DNA
cgcactgtattaaatgtaacttatttaatgaaatcagaagcagtagacagatgttggtgcaatacaaatattgtgatgcatttatcttaataaaatgctaaatgtcaatttatcactgcgcatgtttgactttagactgtaaatagagatcagtttgtttctttctgtgctggtaacaatgagcgtcgcacagacatggtttcaggtaaataaatctattctatgataaattctcagtgtggtggtgactgttctgtgggagggggactgatgggcaccaagggcctccactccg

SEQ ID NO: 1685 - DNA, 343 bp, Homo sapiens
  misc_feature 1..343: note = U/M: U (0.09:0.87) in Pancreatic Ductal cells
  misc_feature 1..343: note = source = chr8:40026598-40026940; Gene: C8orf4 (Intergenic)
  source 1..343: mol_type = genomic DNA
cggggaaggtagaaagtgcctggcatgccatgaatagttgttgaactagtgaattaatgaatgattgacaactctttctggtctacaatactgaactataagcaacgtgaggatgggctactgtgtgactcagtgattcatagtcacaactcagttcagttgagttatttcttgagtaccaggttcaagagatgcaacgacaaataggtctgttttaaaatatcagcagtggggtcaggggaaagtgggaggagggaggaaggcagacacatagatcaatcattgtaacagggcagcaagcacaaccaaagaaaaatacgatcatcaatcagaggaggaagcg

SEQ ID NO: 1686 - DNA, 390 bp, Homo sapiens
  misc_feature 1..390: note = U/M: U (0.13:0.91) in Pancreatic Ductal cells
  misc_feature 1..390: note = source = chr2:242565207-242565596; Gene: THAP4 (intron)
  source 1..390: mol_type = genomic DNA
cgtctcaaaaaaaaaaaaaaaaaaaaaaaaaaagaaaaaagaaaactacagacaaatatctctcatgaacacagatgcaaaaatctctaagaaaacatttgcgattgaataaaaaaaatgtataaaaagaattatttgccatgacccagtgagatctattccaggtatgcaaggctggctctgtgctctaaaattgattaacgtaacccgtcacatcaacaggcaaatcatctgaccgtaaatcacaggatcacattaataggtgcaaaaaaatcatctgacacattccaacatcccattcatgataacagctctcagcaacaggaataaatgggaattctgtcaacttgataaaggacatataaaaaaactacagcttggtggctcacg

SEQ ID NO: 1687 - DNA, 310 bp, Homo sapiens
  misc_feature 1..310: note = U/M: U (0.12:0.89) in Pancreatic Ductal cells
  misc_feature 1..310: note = source = chr4:1362928-1363237; Gene: UVSSA (intron)
  source 1..310: mol_type = genomic DNA
cgtcagccttgaaggtgccgatgtgccctgtgggcctggcctgggtacccttggcggccttgctgggagtcgaccgggtgcgagcatgcagcaccagctgtaccagccccaggcgagggctggagggcccaaaggagggggcaggccctggtgacagagctgccctctggggtgcgcagggaggacccctggccccactcagcttcacaccccgggggccccaggagtgccggaggcggggaccaggcgggaagcgtgggggcaggcggaggggccagctcagttcataacactagtttatattctgccg

SEQ ID NO: 1688 - DNA, 73 bp, Homo sapiens
  misc_feature 1..73: note = U/M: U (0.14:0.9) in Pancreatic Ductal cells
  misc_feature 1..73: note = source = chr15:93874000-93874072; Gene: RGMA (Intergenic)
  source 1..73: mol_type = genomic DNA
cggaggtagtggtgagccaagatcatgccgagccaagatcgcgccactgcactacagcctgggcgacagagcg

SEQ ID NO: 1689 - DNA, 87 bp, Homo sapiens
  misc_feature 1..87: note = U/M: U (0.08:0.84) in Pancreatic Ductal cells
  misc_feature 1..87: note = source = chr4:1780269-1780355; Gene: FGFR3 (Intergenic)
  source 1..87: mol_type = genomic DNA
cgtgggcctggggtccatctgactggccgctggcctccacctcacgtgccctcgccacctggcagcaaaggggcctcccgcctcacg

SEQ ID NO: 1690 - DNA, 101 bp, Homo sapiens
  misc_feature 1..101: note = U/M: U (0.06:0.82) in Pancreatic Ductal cells
  misc_feature 1..101: note = source = chr21:46744900-46745000; Gene: LOC642852 (Intergenic)
  source 1..101: mol_type = genomic DNA
cggactcagcctgaggcctcctcacctgcaccagcttaacttggatccccagccaccacggcaccatagcgcccgattcccatcccggtgcccctgcttcg

SEQ ID NO: 1691 - DNA, 136 bp, Homo sapiens
  misc_feature 1..136: note = U/M: U (0.12:0.88) in Pancreatic Ductal cells
  misc_feature 1..136: note = source = chr16:15984709-15984844; Gene: FOPNL (Intergenic)
  source 1..136: mol_type = genomic DNA
cgggtgcggtggttcacgcttgtaatcccagcactttgggaggcctgaggcaggcagatcacaaggtcaggaattcgagaccagcctggccaacacagtgaaaccccatctctactaaaaatacaaaaattagccg

SEQ ID NO: 1692 - DNA, 184 bp, Homo sapiens
  misc_feature 1..184: note = U/M: U (0.15:0.9) in Pancreatic Ductal cells
  misc_feature 1..184: note = source = chr4:184004687-184004870; Gene: WWC2-AS2 (Intergenic)
  source 1..184: mol_type = genomic DNA
cgtcgcttaattaggtagtgtttgccagattactccaccgtaaagttatttttccctactcaattttttttttttgagatggagttttgctgttgtcacccaagctggagtgcagtggcgcaatctcggctcactgccacctccacctcccgggttcaagcaattctcctgcctcagcctcccg

SEQ ID NO: 1693 - DNA, 215 bp, Homo sapiens
  misc_feature 1..215: note = U/M: U (0.16:0.91) in Pancreatic Ductal cells
  misc_feature 1..215: note = source = chr10:134471997-134472211; Gene: INPP5A (intron)
  source 1..215: mol_type = genomic DNA
cgggtgggaaaacaattgccatgaggttaatttcatggtcggctccgtgcgttctgagcagacgggtgtttcctggctgcaggccgggccttggatgcagccttgacgcgtgtcgatctgtttacacacagggctgagtccgccggccccccgggggtgctcatgggtgcccgggtgtctgcaagctgcccgcagctgggtggtctctgggcacg

SEQ ID NO: 1694 - DNA, 242 bp, Homo sapiens
  misc_feature 1..242: note = U/M: U (0.09:0.84) in Pancreatic Ductal cells
  misc_feature 1..242: note = source = chr4:72135052-72135293; Gene: SLC4A4 (intron)
  source 1..242: mol_type = genomic DNA
cgtagcagtataatagcttttaccgtatttgaaattccagcagtttaggtgacagttgtgtctttctgaagggtgtgggcagattctgaacgggcttttcccgttgctcatcagcttggccatggctgctcttattacagcagtcactcattttcacagatgtctttaaaaatttttttttgtttttcttttctgagttcagaacatgtagaagtaacttctttttggcatattgcattgcg

SEQ ID NO: 1695 - DNA, 496 bp, Homo sapiens
  misc_feature 1..496: note = U/M: U (0.11:0.86) in Pancreatic Ductal cells
  misc_feature 1..496: note = source = chr10:30458261-30458756; Gene: KIAA1462 (Intergenic)
  source 1..496: mol_type = genomic DNA
cggctgaaaatcttagcaaggaccttcttttgcatgcagccaacttttgccccactctattttcttttaaagtctaaatcatgtttatttgcaaactcacagttttgcaacaaaggtaacatgatgccactctgcacccaagattggagcaaaatgcaaaaaataattgatttacccccttgcttgtagtcaattgctatttttcattgactacagttttatggtctcgagagcgaatctcatggcggttaaacttttatgacttacattaattcagtgtccttggctgtcatgtttctcaacttgctgtcaagccacagaaatatatttttaggatatttctaagggaagcagtgtggagacttagacaaaatttgtggcaagatttcttgagaaactaaagcaggtggcttcacacacacacgtgcgcatgcatgcacacacacacatgcacacacacacactgccttgcatgtaagaggacaggctgggtgcg

SEQ ID NO: 1696 - DNA, 73 bp, Homo sapiens
  misc_feature 1..73: note = U/M: U (0.04:0.78) in Pancreatic Ductal cells
  misc_feature 1..73: note = source = chr7:156781726-156781798; Gene: MNX1 (Intergenic)
  source 1..73: mol_type = genomic DNA
cgagcacgactgaccatggccaccgcggtgtttccctccctcctgctctggggaaggagccgtcaatccctcg

SEQ ID NO: 1697 - DNA, 128 bp, Homo sapiens
  misc_feature 1..128: note = U/M: U (0.15:0.89) in Pancreatic Ductal cells
  misc_feature 1..128: note = source = chr4:72171381-72171508; Gene: SLC4A4 (intron)
  source 1..128: mol_type = genomic DNA
cgtgtcctctgtgtttcatctgttcatgcattcataaaacatctacagagagacagcagtgtgtccaggcacactgtacgaggaatctaggaactggaaaaggagctaacacgtggcgtctattcccg

SEQ ID NO: 1698 - DNA, 165 bp, Homo sapiens
  misc_feature 1..165: note = U/M: U (0.13:0.87) in Pancreatic Ductal cells
  misc_feature 1..165: note = source = chr14:105454616-105454780; Gene: C14orf79 (intron)
  source 1..165: mol_type = genomic DNA
cgagcctttgtcttttccaaggtaaagtgctgtgcttactgtagtatgtataatttctttttttttttttttgagacggagtctctctctgtcacccaggctggagtgcagtggcacaatctcggctcactgcaacttctgccccccacccgccggattcaagcg

SEQ ID NO: 1699 - DNA, 229 bp, Homo sapiens
  misc_feature 1..229: note = U/M: U (0.17:0.9) in Pancreatic Ductal cells
  misc_feature 1..229: note = source = chr8:123731652-123731880; Gene: ZHX2 (Intergenic)
  source 1..229: mol_type = genomic DNA
cgcatgaatgagaaataaatctttgttttttaagccatcaaagtttgttgttattgttgtttttctgcaccatcatttaatctatcctgatggatacagtacctgaagttcagcatcctcctttaagcccgttccagctaccctgacccacaacaatttcttccaaaggataggaaaaaaaaatcttaattcacttttatcccggaacctaacataagagtcttgcgcg

SEQ ID NO: 1700 - DNA, 277 bp, Homo sapiens
  misc_feature 1..277: note = U/M: U (0.13:0.86) in Pancreatic Ductal cells
  misc_feature 1..277: note = source = chr2:129829412-129829688; Gene: HS6ST1 (Intergenic)
  source 1..277: mol_type = genomic DNA
cgttcttgtattgaaggcaccccacagtccattccaaacttgtccgcgatgtttttcaatcctccccgtgaaaataacattttcattctactttcccaacatgcctacaattctttatctttatagctttcattcattaatcaagtgattactgggccagtggttcacatgttggtgtcagaaagtaaagccaaagattggatagcaaaggcaaattggagaaatccttcagaggacttccataaatgttctgaagcacattgtgaatgggccaacg

SEQ ID NO: 1701 - DNA, 297 bp, Homo sapiens
  misc_feature 1..297: note = U/M: U (0.09:0.82) in Pancreatic Ductal cells
  misc_feature 1..297: note = source = chr5:76136006-76136302; Gene: S100Z (Intergenic)
  source 1..297: mol_type = genomic DNA
cgggataacttgaagcaaagaccagaaaagcagggaagggacttccaggtcacagataggtgagagacaaactctcttgcattcttttgagtttcttcctttccaaagaaggcaatcagatatgcatttatctcagtgagtggaggttgactttgaatagaacgggaggcaggttcgccctgtgcagtttccagtttgacttttaacttttagcgcagtgattttgggggcccaagatattttcctttcacaccaccttgggcacatgtcgtcaggacctccagaggctgtgtcacg

SEQ ID NO: 1702 - DNA, 323 bp, Homo sapiens
  misc_feature 1..323: note = U/M: U (0.09:0.82) in Pancreatic Ductal cells
  misc_feature 1..323: note = source = chr6:158615276-158615598; Gene: GTF2H5 (exon)
  source 1..323: mol_type = genomic DNA
cgagcaagttagaggaacgccacactttgagacgaatttaaaagtcctttatttagctggcagccaagaggtggctcacacttggaattctctcagctccgaggaaggggcttgattttcctttatactttggtttaggaaggggacgggagctcagttgcaacaattctacagaagtaaaaacatgcaaaaaattaaaaagacaaatggttacagagaaacaaacagttccaggtgcaggggctctaaatctatcataagatgtcaggtgtgggggctctgccagacacaaactcaaggctttatggtgtatctcttgagcg

SEQ ID NO: 1703 - DNA, 326 bp, Homo sapiens
  misc_feature 1..326: note = U/M: U (0.18:0.91) in Pancreatic Ductal cells
  misc_feature 1..326: note = source = chr3:128909292-128909617; Gene: CNBP (Intergenic)
  source 1..326: mol_type = genomic DNA
cgtgatctaaactagggtgccagccacatctcataaggggcttaatgcctgattaatgcaattaattgcagtgatgataagaaaaggagagcctaggttttaatactacccatttgttcattgagtctctagcccctttctttaaaaattaacacaaatggccattctagtttataaattagtcactcgtgagtttggcaaggatgaatcaataaatacgtcagtagttttcaatcttgagaaatgtgctcagacctcaatttatgaaatattaacttagactctaaatttttatactataaaaatatctttcatggccgggcacg

SEQ ID NO: 1704 - DNA, 403 bp, Homo sapiens
  misc_feature 1..403: note = U/M: U (0.16:0.89) in Pancreatic Ductal cells
  misc_feature 1..403: note = source = chr15:93830808-93831210; Gene: RGMA (Intergenic)
  source 1..403: mol_type = genomic DNA
cgctgtgtgctggattcaggcaggccggaatgtgcatcctggcctcattgcgtgatattgggcaagctaattcagctcttgaagacctactttcctcatttgaaaaatggggataattatagttgtggggagtggacgaggtgatccacgggaagcattggcactgggcctggcaccggctatgttcccagccaatgtcagctattaacgaatttcattgattccgagatgctcttttttgcatattaacatctttgaaatcagtctgcttctaaaaattgatggcatgtcatggtctcagtggtagcattttacccccttcttagggtctctaaaacaatggtgcaccttacaatagacagtgtctagacttagtgaaatacagggtgtgtaagggtccccg

SEQ ID NO: 1705 - DNA, 376 bp, Homo sapiens
  misc_feature 1..376: note = U/M: U (0.19:0.91) in Pancreatic Ductal cells
  misc_feature 1..376: note = source = chr4:141146610-141146985; Gene: SCOC (Intergenic)
  source 1..376: mol_type = genomic DNA
cgtgatgaccaattagcagcagctgtaaacaatggactgtgttgtcactgagatttacctttattatatttaatctggcctggcaatttcttcttactgattgtaataaattgggattggtatcatgatgtcattttaaatgcctctataaggtctttctttgactgctcggtgagaaaaaatagcaggttcgtcttcgacagtggcacaggataatgcattatttgttatcactgttcaatcaaaaagtgcatgaaggatacacataattcatctagacagcaatcaccatggagttatgcaggtctcttatgtaggtgatgaaacagccaaattccctgacagtggtgaattattcctcatgtcactaatagcg

SEQ ID NO: 1706 - DNA, 121 bp, Homo sapiens
  misc_feature 1..121: note = U/M: U (0.13:0.84) in Pancreatic Ductal cells
  misc_feature 1..121: note = source = chr10:134471323-134471443; Gene: INPP5A (intron)
  source 1..121: mol_type = genomic DNA
cgctgcctcctcacctgcctgggggcaagacagtcctgatgaagtgagagggggcgagattggttttctgagggcaccgggcccttcatgctcccctaaatcacgggctgtctcctcagcg

SEQ ID NO: 1707 - DNA, 149 bp, Homo sapiens
  misc_feature 1..149: note = U/M: U (0.16:0.87) in Pancreatic Ductal cells
  misc_feature 1..149: note = source = chr2:106985196-106985344; Gene: PLGLA (Intergenic)
  source 1..149: mol_type = genomic DNA
cgtgcccagcctcgaatgatgaatttcttaatggccttgtccttgggcacacgtcgggcacagtttgtgcaacgaataggctgcatgtggctgtgccccttttaggcacgattgttgttccttcttttctttgtcatcttggaggcacg

SEQ ID NO: 1708 - DNA, 277 bp, Homo sapiens
  misc_feature 1..277: note = U/M: U (0.19:0.9) in Pancreatic Ductal cells
  misc_feature 1..277: note = source = chr2:150946052-150946328; Gene: RND3 (Intergenic)
  source 1..277: mol_type = genomic DNA
cggggtttcaccgtgttagccaggatggtcttgatctcctgaccttgtaacccgccctcctcggcctcccaaagtgctgagattacaggcgtgagccaccgcatccggcctagaaattccttttttatttttaacgagacaagattttacttaatgaagggatttatctcgatgctcatagcagatcttgaaaatttttaactttggaagcttttaaaaatagcataaatggttgcagaagtcagtggaagataaattgatcttattagaagatacg

SEQ ID NO: 1709 - DNA, 285 bp, Homo sapiens
  misc_feature 1..285: note = U/M: U (0.19:0.9) in Pancreatic Ductal cells
  misc_feature 1..285: note = source = chr4:7792228-7792512; Gene: AFAP1 (intron)
  source 1..285: mol_type = genomic DNA
cggcgtgctgattatacttgcaattacatgtggacgtaggataggtttttatggaaatttagtatcttccaaataaatatagtgaacaaccataaccacttttatgtctgctagttgggcagattttgcaaaaatagacttacggatcttatatctctttaaaaacactttaaatgtgctttctttactgcatagtacttaaagaattggagaatcattataatttacctatattttgctgattagaaagaatataattaaacaataattagtataaacagaacg

SEQ ID NO: 1710 - DNA, 294 bp, Homo sapiens
  misc_feature 1..294: note = U/M: U (0.18:0.89) in Pancreatic Ductal cells
  misc_feature 1..294: note = source = chr1:179265091-179265384; Gene: SOAT1 (intron)
  source 1..294: mol_type = genomic DNA
cgcccggctaatttttttttttttttttttttttttttttttttttagtaaagactgatcagatcttactggtcaggctggtctcgaacttccaacctcaggtgatccacccgcctcagcctcccaaagtgctgggattacaggcgtgagccaccgcgcccagctcacccggctaatttttgtatttttagtagagacagggagggtttcactgtgttggccagactggtctcaaactcctgatctcagatgatcggtctgcctcggcctcccaaagaggtgggattacaggcg

SEQ ID NO: 1711 - DNA, 425 bp, Homo sapiens
  misc_feature 1..425: note = U/M: U (0.19:0.9) in Pancreatic Ductal cells
  misc_feature 1..425: note = source = chr18:44636607-44637031; Gene: HDHD2 (intron)
  source 1..425: mol_type = genomic DNA
cgcttcctgtcttatcttactgattataacttcttacaggaagggagccagcatcaaatgtacaaaggtaattaatatatacctcactctcgttagcaccctgaaggcacctgtccatagcatggtccccgcagcaagctctactgccagttttcttcccaagcttaaatatcgttagtataaactccttcacaaggtttctatttgatcttacaggtaagttaatgactaaatattactatatgacctactttctggatccagtggtctaagagacaaataaataagcttcctagccatggagttaaaggcttttgcttagtctggctctgcaagtggggtttctacaaaatagaaattgacaaaagtggcttaggtatatgttttagttctagcacctagcacacagcaggggctcaataacg

SEQ ID NO: 1712 - DNA, 390 bp, Homo sapiens
  misc_feature 1..390: note = U/M: U (0.11:0.81) in Pancreatic Ductal cells
  misc_feature 1..390: note = source = chr7:47632797-47633186; Gene: TNS3 (Intergenic)
  source 1..390: mol_type = genomic DNA
cgagatcgcaccactgcaccccagcctgggcgacagagccagactccgtctcaaaaaaaaaaaaaaaaaaaaaagtcccctcgccctctctctgcctgcctctgaactcccttgaagtgtgtcattgattaggaagctggagctctgccctggtctttttgatgccgggctagcccacagaggctgctgcattgctgctgttggggtggttgtttttttttcagcagcattactttttatttctaaataagtaaataaacattcaatcatgccactattttccttccactctggaaatcttcagagttccagcatgatgaggcacagcagttactggtcccctatctctgtcccaccttcctctccccagtgaaaagccccagccaagcg

SEQ ID NO: 1713 - DNA, 404 bp, Homo sapiens
  misc_feature 1..404: note = U/M: U (0.18:0.88) in Pancreatic Ductal cells
  misc_feature 1..404: note = source = chr15:36262769-36263172; Gene: MIR4510 (Intergenic)
  source 1..404: mol_type = genomic DNA
cgaagaacaaatgctcttcaggtatgaatagctctcacaaatttgataggtgggaactataaaaaatgtaactacaacatatattaaaataagaaggatttcagatggccccatgaggaatgtcctacagtgaattttgatatttggttattttccaggtggcttttgggctgctcttttctcaatcctcttctagcattctgtccatcacgaaactcagttgttacatacaactggtcgaagtaagcagaaaaaaaaaagctcacatcattttccttttatttctttttccttttttaaaagcacagttttattcatttttcccatcaacacttggaaatgtggcttctgaaagataacgaggcatggtccgtagcatgccataacctctctttttctccccg

SEQ ID NO: 1714 - DNA, 136 bp, Homo sapiens
  misc_feature 1..136: note = U/M: U (0.2:0.89) in Pancreatic Ductal cells
  misc_feature 1..136: note = source = chr1:203118091-203118226; Gene: ADORA1 (intron)
  source 1..136: mol_type = genomic DNA
cgccgcccgggttcaagcgattctcctgcctcagcctcctgagtagctgggactacaggtgcatgccaccaagactggctaatatttgtatttttagtagagacagggtttcaccatgttacccaggctggtcgcg

SEQ ID NO: 1715 - DNA, 145 bp, Homo sapiens
  misc_feature 1..145: note = U/M: U (0.19:0.88) in Pancreatic Ductal cells
  misc_feature 1..145: note = source = chr4:183210489-183210633; Gene: TENM3 (Intergenic)
  source 1..145: mol_type = genomic DNA
cggcctgttcctggccccgctctctggatatgtcatcgccccctctgctgggtgtgcgagggcggagggtgagcagtgcagggccctgccctctgcctgcccaggaggccactggcactctgcagggacacatgtatacttgtcg

SEQ ID NO: 1716 - DNA, 331 bp, Homo sapiens
  misc_feature 1..331: note = U/M: U (0.19:0.88) in Pancreatic Ductal cells
  misc_feature 1..331: note = source = chr4:72155538-72155868; Gene: SLC4A4 (intron)
  source 1..331: mol_type = genomic DNA
cggaacttccatggccgtggataatttgggatgaatttgattattgatttgattcaagggaacagtaggaaaatgccatcgattcttgagtatatgcaatgtgctgaaaatgacagatactggtaattatttaggcagcaacatctatgataggttggagtagtggagctaagggtggagaaagtattagggagctgttttgtaacctagatttaaagtaacgaaggtttagaggagggctttgggaaagtctgctgggttaggaaaaaaaatgagctcagtttttgagatactacttttcagatgtagcaatcatatcctgagatgaccg

SEQ ID NO: 1717 - DNA, 214 bp, Homo sapiens
  misc_feature 1..214: note = U/M: U (0.19:0.87) in Pancreatic Ductal cells
  misc_feature 1..214: note = source = chr4:72083022-72083235; Gene: SLC4A4 (intron)
  source 1..214: mol_type = genomic DNA
cgcctgtaatcccagcactttgggaggctgaggtgggcgatcctgaggtcaggagtttgtgaccagcgtggccaacatggtgaaaccccgtttctacaaatacaaaatattagctgggtgtggtggtgtgtgcctgtaatcccagctatttgggaggctgagacaggagaattgcttgaacctgggaggtggagattgtcatgagctgagatcg

SEQ ID NO: 1718 - DNA, 247 bp, Homo sapiens
  misc_feature 1..247: note = U/M: U (0.16:0.84) in Pancreatic Ductal cells
  misc_feature 1..247: note = source = chr8:29128535-29128781; Gene: KIF13B (Intergenic)
  source 1..247: mol_type = genomic DNA
cgaagtcttcctacctcctcaggagccagctctccccgcaacataatagtctacactgaccagcttcccttctccacctgtcattagtcaaccaatgattaattcaatcacgctttcacctgccttcacccctgcactaaaactgtcatgacaaagcacaccattgaccttcccttcgcaaatctaggagcgtggtttttggtcctcatttgatgtctctgtaatagttggtgttattgagcatccg

SEQ ID NO: 1719 - DNA, 388 bp, Homo sapiens
  misc_feature 1..388: note = U/M: U (0.24:0.92) in Pancreatic Ductal cells
  misc_feature 1..388: note = source = chr11:94916612-94916999; Gene: SESN3 (intron)
  source 1..388: mol_type = genomic DNA
cggctgaaacaattctcaaaatttatgagattgatgagttttaagacaggcagtagttttgaagccctcttttagatcaacagaactctatttttaaaaaatatattatgtgtgatcccagctactcaggaggctgagacaagagaaccgcttgaacctaggagacggaggttgcagtgagccaagatcacgtcactgaactccaccctgggtgacagagcaagactctgtctcaaaaaaaaaaaaaaaaaaaagttatgcacatagattacttttaaagagtttaaactttgtattgagtctatgctattttaatatcatttactatgtggtgttcaatatctttttagttgtaattgaaaagtttatttcctatttcagtccttcg

SEQ ID NO: 1720 - DNA, 385 bp, Homo sapiens
  misc_feature 1..385: note = U/M: U (0.2:0.87) in Pancreatic Ductal cells
  misc_feature 1..385: note = source = chr16:4038399-4038783; Gene: ADCY9 (intron)
  source 1..385: mol_type = genomic DNA
cgggggctcttccagggcaggtcggtggggagttcccttccagggcaggtggggggttcccttccagggcaggtgtgggggattcccttccagggcaggtgtggggggttcccttccagggcaggtgtcggggttcctttccagggcaggtggggaggggttcctttccagggcaggtgggggaccccttccatggcaggtggggggggttcctttaccagggcaggtgtgggggccccttccaaggcaggtgggggggtttccttccagggcaggttgggggtttcctttcaggacaggttgtggtgggggggccccttccaaggctggggatagcctggagatgccacggcagaggaaaggggctagtaatggcgaggctgcg

SEQ ID NO: 1721 - DNA, 46 bp, Homo sapiens
  misc_feature 1..46: note = U/M: U (0.24:0.9) in Pancreatic Ductal cells
  misc_feature 1..46: note = source = chr10:126205456-126205501; Gene: LHPP (intron)
  source 1..46: mol_type = genomic DNA
cgttcagcatccccgcacgtccttggggcgccaaatcactttgacg

SEQ ID NO: 1722 - DNA, 149 bp, Homo sapiens
  misc_feature 1..149: note = U/M: U (0.22:0.88) in Pancreatic Ductal cells
  misc_feature 1..149: note = source = chr2:10496564-10496712; Gene: HPCAL1 (intron)
  source 1..149: mol_type = genomic DNA
cggtgtgtgccaggacggtgggactcagagggtggtggggggcacatccactgtccccttccatcctgcagccactccctgaggtggcatttccttgaatgacaggagaggagcctgaggcacgggaagattaagtaaccggtcctacg

SEQ ID NO: 1723 - DNA, 216 bp, Homo sapiens
  misc_feature 1..216: note = U/M: U (0.18:0.84) in Pancreatic Ductal cells
  misc_feature 1..216: note = source = chr1:15187234-15187449; Gene: KAZN (intron)
  source 1..216: mol_type = genomic DNA
cgcatatgctgagtggagtttaattgtgttctcagaatacatctaagcaaagcaaagtttatcagctgaaaatataaagtcttttctcaacagacctaaaataaattattggaagaagctgaacctagttaatgaagaatctgtctgcatttttggcactggggttggtcatgaaaacgattacttcttatcagattcgagtggctaagcgtttcg

SEQ ID NO: 1724 - DNA, 230 bp, Homo sapiens
  misc_feature 1..230: note = U/M: U (0.26:0.92) in Pancreatic Ductal cells
  misc_feature 1..230: note = source = chr16:56960148-56960377; Gene: HERPUD1 (Intergenic)
  source 1..230: mol_type = genomic DNA
cggtggctcacgcctacaatcccagcactttgggaggccaaggcaggcagatcacctgatgtcaggagttcaagaccagcctgaccaacatggagaaacgctgtctctgttaaaaatacaaaaaaaattagctgggcatggtggcaggcgtaatcccagctacttgggaggcagaggcaggagaatcgctggaacccaggaggcggaggttgcagtgagccaagatcacg

SEQ ID NO: 1725 - DNA, 264 bp, Homo sapiens
  misc_feature 1..264: note = U/M: U (0.26:0.92) in Pancreatic Ductal cells
  misc_feature 1..264: note = source = chr4:72135834-72136097; Gene: SLC4A4 (intron)
  source 1..264: mol_type = genomic DNA
cgctcttgtcccccaggcaagagtgcaatggcgcaatctcggctcactgcaacctctgcctcctgggttcaagcgattctcttgcctcagcctcccgagtaactgggattacaggcacctgccaccatgcctggctaatttttttgtatttttagtaggggcggggtttcaccatgttggccaggctggtctcgaactcctgacctcaggtgatccgcccgcctcggcctcccaaagtgctgggattacaggcatgagccaccg

SEQ ID NO: 1726 - DNA, 286 bp, Homo sapiens
  misc_feature 1..286: note = U/M: U (0.21:0.87) in Pancreatic Ductal cells
  misc_feature 1..286: note = source = chr3:75378262-75378547; Gene: FAM86DP (Intergenic)
  source 1..286: mol_type = genomic DNA
cgcacacagtctttggcttcacttgccactgcaggttggcacggagatccatctgcttggctgggatctccttcaggtcatcttccgatagtgtcttggtactcaccttcttccccaggaggtctcggaagtccagctgctccatctcttcctggtggatcgcctcctcagtgtgctgcctcgtctccatgcacctcttcagcacccctcgcatgtcctcgccgtcttcctcctctggccaaccctgccctcttgctggccagccaggcatcagggacccatagcg

SEQ ID NO: 1727 - DNA, 287 bp, Homo sapiens
  misc_feature 1..287: note = U/M: U (0.19:0.84) in Pancreatic Ductal cells
  misc_feature 1..287: note = source = chr16:15984209-15984495; Gene: FOPNL (Intergenic)
  source 1..287: mol_type = genomic DNA
cgaggatagaggattgcttgagctcaggagttctagaccaagctgggcaacatgagacgcatttctacaaaaaaaaaaaaaaattagccagatatgatggtgcatgccagctactcgagaggctgaggagagaggatcacttgagcctggacggctgattgtaccactgcactccactctgggcgacagagtgagtccctttctcaaaaaaaaaaaaaaaaaaaaaaaaaaaagaaaagaaaaagagagaaagaaaaattgatatatcacaattatggggagggacg

SEQ ID NO: 1728 - DNA, 120 bp, Homo sapiens
  misc_feature 1..120: note = U/M: U (0.23:0.87) in Pancreatic Ductal cells
  misc_feature 1..120: note = source = chr8:25215773-25215892; Gene: DOCK5 (intron)
  source 1..120: mol_type = genomic DNA
cgtccttcatcacatggcggcagcaagaagtgccaagcaaaaaggaggaaaaccccttgtaaaaccatcagatctcgtgagaactcactcactatcacgagactagcatgagtgtaaccg

SEQ ID NO: 1729 - DNA, 236 bp, Homo sapiens
  misc_feature 1..236: note = U/M: U (0.24:0.88) in Pancreatic Ductal cells
  misc_feature 1..236: note = source = chr19:46181809-46182044; Gene: GIPR (intron)
  source 1..236: mol_type = genomic DNA
cggggtttcaccatgttggccaggctggtctccaactcctaaccttgggtagtccacccgcctcggcctcccaaagtgctgggattacaggcgtgagccatggcgcccagcccgttcattcattcgatacaaaatactgagctaggactgtcctgggctgtggggagcagcagggaccaggacaggagattggcggccccagcagtgctgcctgctagtgaagagtgagggcttcg

SEQ ID NO: 1730 - DNA, 265 bp, Homo sapiens
  misc_feature 1..265: note = U/M: U (0.28:0.92) in Pancreatic Ductal cells
  misc_feature 1..265: note = source = chr4:72189693-72189957; Gene: SLC4A4 (intron)
  source 1..265: mol_type = genomic DNA
cggtaccccttccaggtgtttttttgcagatagagggcatcaacagagggctgtagccaaaagaatcaatatgtgtgaaacatcccttggggacccagcaaattcttgggatgttaatttattagggggaatgcagtcttacgatatgcagatggcgcaattgggtgattaccgtttctgtgaacctatttcttctcaaagcctcatgaataccatgcaaacttggattaagtgaggaaaatggtatcatggaaggtgaaattcg

SEQ ID NO: 1731 - DNA, 87 bp, Homo sapiens
  misc_feature 1..87: note = U/M: U (0.19:0.82) in Pancreatic Ductal cells
  misc_feature 1..87: note = source = chr1:2954308-2954394; Gene: ACTRT2 (Intergenic)
  source 1..87: mol_type = genomic DNA
cgtcccgcccagagcgaggtgcagatgccagggaccctctacctgggtctcgtctgccgcggattgctctttgtgctccccagagcg

SEQ ID NO: 1732 - DNA, 291 bp, Homo sapiens
  misc_feature 1..291: note = U/M: U (0.24:0.87) in Pancreatic Ductal cells
  misc_feature 1..291: note = source = chr15:27818541-27818831; Gene: OCA2 (Intergenic)
  source 1..291: mol_type = genomic DNA
cgcaacctttaagattaatatttagggaattcagtcacttcagtcaaaacatcaatggacattcacttggtttaacaaatctaacatcctggatgctttggacacaccgcaaacacactttagcatgtagtgacactgatttaaattcctcaggaaatcaaacaaaaatgaatgaaaatcctggcgtgtacgttacatttcccactaacctactcttcagttctcctttgagatcttgtcttataaacccgttcttgttatcactgctcagtaaacccaggagactgtgcg

SEQ ID NO: 1733 - DNA, 155 bp, Homo sapiens
  misc_feature 1..155: note = U/M: U (0.21:0.83) in Pancreatic Ductal cells
  misc_feature 1..155: note = source = chr7:91240877-91241031; Gene: MTERF (Intergenic)
  source 1..155: mol_type = genomic DNA
cgataaatttgtcttaatagaaaaatgttacactacttctgtttctaaatttaaaacaattagaacttcagttccttagtcatattagccacatttgaagtccacagttgccacacgtggccggtggctagaccgcacaggtcccacctgatacg

SEQ ID NO: 1734 - DNA, 474 bp, Homo sapiens
  misc_feature 1..474: note = U/M: U (0.27:0.89) in Pancreatic Ductal cells
  misc_feature 1..474: note = source = chr5:37394810-37395283; Gene: WDR70 (intron)
  source 1..474: mol_type = genomic DNA
cgtgtaacaatctatgggaagggtaagtcagccgacagaactacaagtgcaaagaccttgttgtgaaccaaacttaacctgttcaattagaaagaaggccttggagtggagatttgagctatgcagtggctcaaatgtagaaactcagatttttatggaggtttgctagttcatatacctctgtttaagggtaacctgaatgtgagaatatattcttttcaatttttaacctagatgaaaacaaaaagaaaaatctcatgtttttccgtcagtagatattgagtgcctgttataggtgaagcattttttagatgctagaaatatgttagatgctagaacaaaacagaaattcgtgctttcctggagcttacataccagagatacttcattagaaggcagtgacacttttaatcttatcaaatatttgaaagattaattgatacaattaagaatgctgaatgctcaactctggcg

SEQ ID NO: 1735 - DNA, 133 bp, Homo sapiens
  misc_feature 1..133: note = U/M: U (0.26:0.86) in Pancreatic Ductal cells
  misc_feature 1..133: note = source = chr20:56577840-56577972; Gene: MIR4532 (Intergenic)
  source 1..133: mol_type = genomic DNA
cgcgtgtatacctatataacaaacctacatattctgcacatgcaacccagaacctaaagtataaaaaaaaaaaaagtccttgtgtgcctcctaagatcatcttgccaatgatatgtatgccgcacgttggacg

SEQ ID NO: 1736 - DNA, 279 bp, Homo sapiens
  misc_feature 1..279: note = U/M: U (0.25:0.85) in Pancreatic Ductal cells
  misc_feature 1..279: note = source = chr21:40983093-40983371; Gene: C21orf88 (intron)
  source 1..279: mol_type = genomic DNA
cgattccctgatttttatacttggagcgcaataagtgtattttaactgtttacatttaacatataaatgtaatttatatgtcggtattgacatgtatccaggcttggcttctgtggcccctgctgagactggccccctgcccctcagagcagagctctaagtctcagtctcccagggccctttctctgggtcctgcaccctcctcccccaccacctttattaaaaaaacacctgccccatgtcatagcccctcaggtgccggctcaattgaggtgtccg

SEQ ID NO: 1737 - DNA, 423 bp, Homo sapiens
  misc_feature 1..423: note = U/M: U (0.31:0.9) in Pancreatic Ductal cells
  misc_feature 1..423: note = source = chr2:10495617-10496039; Gene: HPCAL1 (intron)
  source 1..423: mol_type = genomic DNA
cgggacagccacaccactgatcactcagaagtaggtgggttgtgaatcttcagcattctggaaaatgtaaaaagttgttcagtgggcagcagtaaagagggtttcgttttcctggagacactgttgctactttgctggcttatacagggacacccagagagcggctgggaaaatcaagaactgtgtcacctcctccgttcttgcccactgtccagggctcaaggagattggggagcagtttgcaaaggcatttgaagattaggctccacagagatggacactttttttttttcctaaatagatacagagtagccttgtgaaggtttcttttgggtctgagtaggggacgcacagggcatggctatgagggtctcagaaactggtacctactttcctcttatttggcaccgggagcccctgccg

SEQ ID NO: 1738 - DNA, 197 bp, Homo sapiens
  misc_feature 1..197: note = U/M: U (0.32:0.9) in Pancreatic Ductal cells
  misc_feature 1..197: note = source = chr1:30153356-30153552; Gene: PTPRU (Intergenic)
  source 1..197: mol_type = genomic DNA
cgctcttgttgtccaggttggagtgcaatggagtgatctcggctcactgcaacctccgtctcctgggttcaagcaattctcctgtctcagtgtcatgagtagctgggattaagacatgtgtcaccacccacacctggctaatttttttgtacttttactacagatggggtttcgtcatgttggtcaggctggtctcg

SEQ ID NO: 1739 - DNA, 382 bp, Homo sapiens
  misc_feature 1..382: note = U/M: U (0.3:0.87) in Pancreatic Ductal cells
  misc_feature 1..382: note = source = chr7:68796860-68797241; Gene: AUTS2 (Intergenic)
  source 1..382: mol_type = genomic DNA
cgggcagctgtaaagtcactctaggttagtagatggttgttcaattattaatacttctcgttttgaagcaaaggcctctcagattataaaaattattaacatgactgctgttagtgagataaatgagcctagagacaaggtaatatttcatgcagatattgcatcaggattgtcagagtaacatcgaggtataccggagaggccaaagaaaacttgtgggaagaaagttaaattaacacctgtaaatataatagtgaagtggattttggcttaggctggattgagtgtatagcctgaaaatagggggaatctgaggactaagctgcctataatggcaaacactgctcctatggataagacatagtggaagtgggctacaacg

SEQ ID NO: 1740 - DNA, 305 bp, Homo sapiens
  misc_feature 1..305: note = U/M: U (0.33:0.88) in Pancreatic Ductal cells
  misc_feature 1..305: note = source = chr14:100695022-100695326; Gene: YY1 (Intergenic)
  source 1..305: mol_type = genomic DNA
cgccagaagtggaacagttctattctccatctaggaagctttgcatctagagtttaaaggtttgaagaaaaaaagggataagcagagtccaagggaaattactacttaatggctagaagaggtatgtgtgagcacgtctataaaacatccctaactacctgtaacacagattgcacactgttccctgctaacgactggcttaatacatcaatcaataagactggaaatcgttgttttctatggacgctgaatctgagcttgtcgaaatgattttcccaaaacacagtctacttcaaggatttccg

SEQ ID NO: 1741 - DNA, 364 bp, Homo sapiens
  misc_feature 1..364: note = U/M: U (0.33:0.86) in Pancreatic Ductal cells
  misc_feature 1..364: note = source = chr1:41325000-41325363; Gene: CITED4 (Intergenic)
  source 1..364: mol_type = genomic DNA
cggggcggtggggtgggcaaatgccagcccctctgagcccagagctcaggccagtcccttcccagaaggctctcttcctttctctcttcatcctgtcccagaaatcccatgatcttagggagacctttattcatttgccaaacacctcctgtcaccagccacattccatcctggtagcttcagagcacagtaggtcctgggagaactcacaggttggtggagggtcacatccacaaaaaagcctggcttgagagtcaagcccagctgctggggacagaaggtctcagcctggtgttcccctccagtgtccctggaatccatgctctcctagagaatgccccaccaccgcagcgtctctgacccg

SEQ ID NO: 1742 - DNA, 426 bp, Homo sapiens
  misc_feature 1..426: note = U/M: U (0.38:0.9) in Pancreatic Ductal cells
  misc_feature 1..426: note = source = chr7:26492211-26492636; Gene: LOC441204 (intron)
  source 1..426: mol_type = genomic DNA
cgtcccagcttcccttgcggctgtgctgctgagtgctaagacatcacctgaagagtgggagaggaagtgatgtgtttagcttctgcctcatttgctcggaatgcattccccagccctagatgtgtacccacctttccctcctgaggacaggagcgtggcggtgcccatgatcagcctgactgtgcagacaaggacacactctggagggtggcagagcaactggatggacagacatgggcctaaatggccacatgtggcagagcttcacccagcccagaccatttgccttgaaatgttccatgagtgcagaataaacctgcatgtctttaagccactatacttggtctctttgttatgtggcttaactttcagccagacggttgaatcaatagttattgaatgaatgactgaatcatcggaggctcg

SEQ ID NO: 1743 - DNA, 240 bp, Homo sapiens
  misc_feature 1..240: note = U/M: U (0.06:0.88) in Pancreatic Ductal cells
  misc_feature 1..240: note = source = chr4:20354428-20354667; Gene: SLIT2 (intron)
  source 1..240: mol_type = genomic DNA
cgggaggctgaggtgggagaatcgcttgaacctgggaggcagaggttgccatgagccgagagtgcgtcactgcaatccagcctgaaaactgagtgagactccatctaaaaataatgataataataatttgacttagtgaacaaatttgcagtaaaacagaaaaaataatatagattacacacctttataaaatctgttgtataatcatctagagatgcaatttgaatgcagcagtataac

SEQ ID NO: 1744 - DNA, 81 bp, Homo sapiens
  misc_feature 1..81: note = U/M: U (0.12:0.9) in Pancreatic Ductal cells
  misc_feature 1..81: note = source = chr2:85477590-85477670; Gene: TCF7L1 (intron)
  source 1..81: mol_type = genomic DNA
cgctctgtcgcccaggctggagtgcagtggtgctatctcggctcactgcaacctccacctcccgggttcaagcgattctcg

SEQ ID NO: 1745 - DNA, 90 bp, Homo sapiens
  misc_feature 1..90: note = U/M: U (0.04:0.81) in Pancreatic Ductal cells
  misc_feature 1..90: note = source = chr1:3196489-3196578; Gene: PRDM16 (intron)
  source 1..90: mol_type = genomic DNA
cgtcagccgagaagcatgagctcggtcaagacaaaacctcatggaatcccgagtcttttaaaagaaatattgatttattttccaatcacg

SEQ ID NO: 1746 - DNA, 238 bp, Homo sapiens
  misc_feature 1..238: note = U/M: U (0.15:0.9) in Pancreatic Ductal cells
  misc_feature 1..238: note = source = chr17:40528582-40528819; Gene: STAT3 (intron)
  source 1..238: mol_type = genomic DNA
cggccaggtgcggtggctcacacctgtaattccagcactttgggaggccaaagcgggcggatcacaaggtcaggagatagagaccatcctggctaacatggtgaaaccccgactctactaaaaatacaaaaaattagccgggcattgtgacgggcgcctgtagtcccagctacttgggaggctgaggcaggagaatggcatgaacccgggaggctgagcttacagtgggcccagatcg

SEQ ID NO: 1747 - DNA, 129 bp, Homo sapiens
  misc_feature 1..129: note = U/M: U (0.29:0.91) in Pancreatic Ductal cells
  misc_feature 1..129: note = source = chr1:158169496-158169624; Gene: CD1D (Intergenic)
  source 1..129: mol_type = genomic DNA
cgggcacctgtaatcccagatattcaggaggctgaggcaggagaatcacttgaacctgggaggcggaggttgtagtgagccgagatcgcaccatcgcactctagtctgggcaataagagcgaaactccg

SEQ ID NO: 1748 - DNA, 61 bp, Homo sapiens
  misc_feature 1..61: note = U/M: U (0.03:0.92) in Pancreatic Ductal cells
  misc_feature 1..61: note = source = chr16:72958470-72958530; Gene: ZFHX3 (intron)
  source 1..61: mol_type = genomic DNA
cgaatgagggtgagatggtaccaggcccacagagaggccgcggctgggtgcgcagaactac

SEQ ID NO: 1749 - DNA, 63 bp, Homo sapiens
  misc_feature 1..63: note = U/M: U (0.04:0.85) in Pancreatic Ductal cells
  misc_feature 1..63: note = source = chr1:46949367-46949429; Gene: DMBX1 (Intergenic)
  source 1..63: mol_type = genomic DNA
cgctgagcacagatgacaaatctccccagcgcggcctgcgcccccatatttcacgtcagggac

SEQ ID NO: 1750 - DNA, 155 bp, Homo sapiens
  misc_feature 1..155: note = U/M: U (0.19:0.92) in Pancreatic Ductal cells
  misc_feature 1..155: note = source = chr1:46949440-46949594; Gene: DMBX1 (Intergenic)
  source 1..155: mol_type = genomic DNA
cgcaggcagcgacagagctgggcctcgcctcgggtgaagacgtggcctggttggctggaagaaaagaaaaaagccagactcctggcacatggtacatccccctgcctctaccctgggcccacagcaccaacctgggtggagatttaagaccagcc

SEQ ID NO: 1751 - DNA, 361 bp, Homo sapiens
  misc_feature 1..361: note = U/M: U (0.18:0.88) in Pancreatic Ductal cells
  misc_feature 1..361: note = source = chr22:35966643-35967003; Gene: RASD2 (Intergenic)
  source 1..361: mol_type = genomic DNA
cgaggcctcctggggaagggatggttcagctgagcttacatcacaggcaaaaataaaatagggaaaagaatatccaccctccaagggcccatttaacttagcaagggagaaatggggcagggagattaatggaaagaaggaatttggtggccgtgcagcagggtcctgagcgtcagcggcccgtcatcccagtgttcctgggaggccagcactgggaggcactggcatcccagccagcagccagggtcaggattctagccaaagagacctgtcagggccttggcaccaccttggagggactgcaccgttccgctatccattgctcctggaagtggcattaccctgcctcctggctggtgcc

SEQ ID NO: 1752 - DNA, 56 bp, Homo sapiens
  misc_feature 1..56: note = U/M: U (0.02:0.86) in Pancreatic Ductal cells
  misc_feature 1..56: note = source = chr1:180223424-180223479; Gene: LHX4 (intron)
  source 1..56: mol_type = genomic DNA
cgccagaggctcccggtagcgggatggaggccgctgtgtcgcaggggagctgtgcg

SEQ ID NO: 1753 - DNA, 243 bp, Homo sapiens
  misc_feature 1..243: note = U/M: U (0.07:0.88) in Pancreatic Ductal cells
  misc_feature 1..243: note = source = chr6:14183709-14183951; Gene: CD83 (Intergenic)
  source 1..243: mol_type = genomic DNA
cgaaatggcttcaccgctgacagagtttaattctggagttcactagtgagagatacaactaataatagtaggatgtcactgtaaccttcattcataggtgactgcagattgagggaagaatcgaggcaattttcttgctaatccaaataacaaccacagcttcggccttagtcgtttgaattttcaggaagctataattattttccatctgaaatatccaaatgacagctttatgtttccacg

SEQ ID NO: 1754 - DNA, 39 bp, Homo sapiens
  misc_feature 1..39: note = U/M: U (0.13:0.9) in Pancreatic Ductal cells
  misc_feature 1..39: note = source = chr14:100198943-100198981; Gene: CYP46A1 (Intergenic)
  source 1..39: mol_type = genomic DNA
cgcgtcgccgtgggctgggcccctgccgtgtggcatgcg

SEQ ID NO: 1755 - DNA, 255 bp, Homo sapiens
  misc_feature 1..255: note = U/M: U (0.17:0.92) in Pancreatic Ductal cells
  misc_feature 1..255: note = source = chr15:61012461-61012715; Gene: RORA (intron)
  source 1..255: mol_type = genomic DNA
cgggagctagcctgatgcctccattcaccccacaagatgtagtcctcgccctgacggcaagacggcatgcgagagtcctatttgggttgtaaagtttaatgcgagcagaaagaggcagacgatagctaacataatctaagttaaccattgaaaaacccagactgtccaataaaaatactggaacgaacccagtcaccttttatcaagggtacatttaaccatcctcattggtggctacttccattcatggtcacg

SEQ ID NO: 1756 - DNA, 108 bp, Homo sapiens
  misc_feature 1..108: note = U/M: U (0.19:0.92) in Pancreatic Ductal cells
  misc_feature 1..108: note = source = chr20:21291421-21291528; Gene: XRN2 (intron)
  source 1..108: mol_type = genomic DNA
cgcccaggctggagtgtagtggcgcgatctcggctcactgcaagctccgccacccggtttcatgccattctcctgtctcagccttccgagtagctgggactacaggcg

SEQ ID NO: 1757 - DNA, 164 bp, Homo sapiens
  misc_feature 1..164: note = U/M: U (0.18:0.91) in Pancreatic Ductal cells
  misc_feature 1..164: note = source = chr14:77481139-77481302; Gene: IRF2BPL (Intergenic)
  source 1..164: mol_type = genomic DNA
cgaccagcctcaaagatttaccataatgaaggagaagtcatatatgacagtgcctggcccactgtcagttccaaagtctacagtcaataatttctctcccatggagcatggtggctcacgcctgtaatcccagcatattgggaggccgagaccggctgattacg

SEQ ID NO: 1758 - DNA, 180 bp, Homo sapiens
  misc_feature 1..180: note = U/M: U (0.04:0.77) in Pancreatic Ductal cells
  misc_feature 1..180: note = source = chr9:40537857-40538036; Gene: SPATA31A3 (Intergenic)
  source 1..180: mol_type = genomic DNA
cggaggggataatggtagacaaagagaagcatttgggtgaatcgtttatacagataacgtagcaaattttgttcagagaataatttacgggtacatatgcggattaatttcaaaaggaatctattttctgcaaatatttattttgaagttatgtgttgaggcttattaatcattaatacg

SEQ ID NO: 1759 - DNA, 406 bp, Homo sapiens
  misc_feature 1..406: note = U/M: U (0.15:0.86) in Pancreatic Ductal cells
  misc_feature 1..406: note = source = chr9:86999839-87000244; Gene: SLC28A3 (Intergenic)
  source 1..406: mol_type = genomic DNA
cgatttcaatttccactttgtcctggaaatgcatgtagattactgttgggctcagtagccactcaagaagatcccccatattaaagtgatctgatttatttatttttattttttagagatggagtcttgctctgacgtccaggctggagggcagtggcatgatcttggctgactgcaacctccacctcccaggttcaagcaattctcctgcctcaggcctcagcctcttgagtagctgggactacaggtgggtgccaccaggcctggctaatttttttttgtatttttagtagagacagggttttgtcatgttggctaggctggtctcgaactcctgacctcaagtgatctgcccgcctcggcctcccaaagctctaggatcacaggtgtgagccaccatgccccg

SEQ ID NO: 1760 - DNA, 421 bp, Homo sapiens
  misc_feature 1..421: note = U/M: U (0.17:0.87) in Pancreatic Ductal cells
  misc_feature 1..421: note = source = chr21:41040361-41040781; Gene: B3GALT5 (Intergenic)
  source 1..421: mol_type = genomic DNA
cgatatgaagaaggaggtcttgttaagatggcgtggtgtggagtgcccaggtgtgaaatggttgtctcaatggaagttgtagcctcctcctcccatgacatcatcctcacacgtgctcagtgttaggcattttttccccctcctgctctgaatcaatgcgagtgagatatgcatgcgggagggacaagcttgcatggcacccagctgtggtacatttagaactcggcctcagccctccagtgtgaccttgggcatacccttcacccccgggctctgttcgctggggcagggtctgcgctctggagtcaggctgcctgggtttgaattttaccttcctcgccaagtcccttgagtggcaagttacttatcttctcattgtctccgttttgttatctgaagaatgggaccatagtagttcccg

SEQ ID NO: 1761 - DNA, 468 bp, Homo sapiens
  misc_feature 1..468: note = U/M: U (0.15:0.85) in Pancreatic Ductal cells
  misc_feature 1..468: note = source = chr9:89131109-89131576; Gene: ZCCHC6 (Intergenic)
  source 1..468: mol_type = genomic DNA
cggttaccttttgtgtgattttctcacttatttaattttttccatattcagtacaatttgattacctatagtccccatgttgtacatttgatctctgtacttgttcatcctatacctctgctactttgtattttctgatctacatcttcccattttctattctgtcctgtcccctctccagctcccctctctgctgagagccatttccattgctaaataaaattctctgccttcaccatccgtcaagtgtccgcacaacctcattcttcttggatgctggacaagagcttgggacccaggcgacgaggcaaggggccaattgagctgataacacactactgttcatggacagtggagccaagagagcattgtaacacagcctttggggcttcggggtcgcaggcatccccaacagggtgccacctcaggccgagtaaacagagcttgctcctcctggggccctgagcg

SEQ ID NO: 1762 - DNA, 437 bp, Homo sapiens
  misc_feature 1..437: note = U/M: U (0.22:0.9) in Pancreatic Ductal cells
  misc_feature 1..437: note = source = chr20:25189013-25189449; Gene: ENTPD6 (intron)
  source 1..437: mol_type = genomic DNA
cggagtttgcagtgagccaagatcacaccattgcactgcagcctgggcaacaagagtgaaacttgatctcaaaaaatttttttttaagtggaactttttaaaaattaataattaaaaagtaaagcttcttcaaagctaagtgtgcaacagacatcagcctgcgatgcttttggagccatgtcccagggttttctctttggagagaaaagactttgcaaaaagttttgtccctgattttttctggtccagtcttcgcgtctgaatttagtatgcctccttattgtaagcacaagttcataccactcctaataatttaaaacactccattttttaaaatgaagaaaataccctaatcttgagaaccctttaataaattcatttcagaatcaaggaaatggtgttcctattttcagtttggagtcacttatcctattccg

SEQ ID NO: 1763 - DNA, 251 bp, Homo sapiens
  misc_feature 1..251: note = U/M: U (0.2:0.87) in Pancreatic Ductal cells
  misc_feature 1..251: note = source = chr6:17929475-17929725; Gene: KIF13A (intron)
  source 1..251: mol_type = genomic DNA
cgcatggggagggcagggtctcactctgtcaccaaggcaaggctagaatgcagtggcgccatcatagctcattgcagctttgaatttctgggctcaaacaatgctctagcttcagtctcccaaacagctaggactagaggtgtgtgcagcactctcgactattttttttttttttgagacagagtctcgctctgttggccaggctggagtgcagtggcacgatcttggctcactgcaagctctgcctcccg

SEQ ID NO: 1764 - DNA, 496 bp, Homo sapiens
  misc_feature 1..496: note = U/M: U (0.27:0.88) in Pancreatic Ductal cells
  misc_feature 1..496: note = source = chr20:30957274-30957769; Gene: ASXL1 (intron)
  source 1..496: mol_type = genomic DNA
cgaaatcctgacctcaggtgatccacctacctcggcctcccaaagtgctgggattacaggcatgagccaccgcacctggccagatgctgttggttctaaatggcactttgaggtgttctaatatgaatcagatattagaaattatttagtcatagcagctcttgtttgtgtgttcatcttttcttgtctatatctttgtagattgtacaaaactgaagcataactatggggataattgcagatgtgcctttttttttttttttttttttttattctgagatggagtctcactctgttgcccaggctggagtgcagtggtgcgatctcagctcattgcaccctccacctcccaggttcaagcaattcttctgcctcagcctcctgagtagctaagagtgcactaccatgcccaggtaatttttgtatttttagtagagacggggtttcaccatgttggccaggctcgtcttgaactcctgaccttgtgatccgtccg

SEQ ID NO: 1765 - DNA, 117 bp, Homo sapiens
  misc_feature 1..117: note = U/M: U (0.33:0.91) in Pancreatic Ductal cells
  misc_feature 1..117: note = source = chr14:65021983-65022099; Gene: PPP1R36 (intron)
  source 1..117: mol_type = genomic DNA
cgctgaaaatttcaaatcctggaaaatatagcattcctacacatgatgttaacatcgttctcgaacagttgttagccgaagattcaattgataaataagatttttccgaaatagacg

SEQ ID NO: 1766 - DNA, 458 bp, Homo sapiens
  misc_feature 1..458: note = U/M: U (0.32:0.9) in Pancreatic Ductal cells
  misc_feature 1..458: note = source = chr20:48305992-48306449; Gene: B4GALT5 (intron)
  source 1..458: mol_type = genomic DNA
cgatgtgaaaatttttaacatttttaaaccgttttattatgaaaaatttcaaatatacagcaaagttgaaaggattttacagtgaactcccatatactcaccatcttgattccactattaacttgcttatcacaaatatatccattaatccatcttactttgtgacctatttccaagtaaactgcggagatcagtatacttcctgctaaacacttcaacatgcatgttaattaattagattttttttcccttcttggtgtaaaagttcatgcaatgaataggtgtgcatttgcggagtttgacaaatgcacatacctgtgtaatctaaatccctatcaagatatgaaacattacaatcactcctgaaaggtttcccaagcccctttccagtcaatccctacccttatttccctctctcagaataaatgtttttttgtttgtttggagacggggtctcg

SEQ ID NO: 1767 - DNA, 251 bp, Homo sapiens
  misc_feature 1..251: note = U/M: U (0.32:0.85) in Pancreatic Ductal cells
  misc_feature 1..251: note = source = chr7:139656224-139656474; Gene: TBXAS1 (intron)
  source 1..251: mol_type = genomic DNA
cgtgagccaccacaccaggacttattttatttttattgtagaagtgagattttgccctctggccaattctagtatcttcttgcttttataggagcattgacgtgttgttatgcttggtattgattattgccatgatttctaaccattctgctgggctggtaaattccattcattccttgaccagtttcattcccgtttctgagccgatgtccatgggagcccgtcacctcactggctccgccctgaaatcg

SEQ ID NO: 1768 - DNA, 365 bp, Homo sapiens
  misc_feature 1..365: note = U/M: M (0.86:0.16) in Pancreatic Ductal cells
  misc_feature 1..365: note = source = chr7:39125198-39125562; Gene: POU6F2 (intron)
  source 1..365: mol_type = genomic DNA
cgaagcctcctgaatctctcacatgctagttgagctttaatagggtggggagtaatggagaactcatcggatctgtaatagctcttcacttgactgcagccagcaataacagcgggagcagccagagataagagagagaggagagagggagagtgtgtgtggaagagagagagagaagagagagggagagggagagagaggacacgcactctaaatctgccactttttttttcctccccttcactcttttcgcccatcctaggatccaatgatagctggacaagtcagtaagcccttgctgtcagtgcggagtgaaatgaatgcggagttgagaggtgaggacaaggctgctacttcagacagcg

SEQ ID NO: 1769 - DNA, 42 bp, Homo sapiens
  misc_feature 1..42: note = U/M: M (0.94:0.25) in Pancreatic Ductal cells
  misc_feature 1..42: note = source = chr13:28553792-28553833; Gene: PRHOXNB (intron)
  source 1..42: mol_type = genomic DNA
cgctgggaataggcgtggggtctgttggaaaaggcgcgcacg

SEQ ID NO: 1770 - DNA, 403 bp, Homo sapiens
  misc_feature 1..403: note = U/M: M (0.77:0.09) in Pancreatic Ductal cells
  misc_feature 1..403: note = source = chr13:28553842-28554244; Gene: PRHOXNB (intron)
  source 1..403: mol_type = genomic DNA
cgttcaatgaattttatctcaaagaagctgaaaattaaaccccctgtaaggtagacgtcctcttcctcaaacttattgtttctgtctaataaaaggatgattgatagtgcaccatctaactcatgaactaatttctccctgaaagacacggagaactgggggtaacatccccgtgtaagagaggattcagtgaaggctgaaaaagaactagtgacctgcctagggtcactcaccacactgcgcctggaccctctactccaaatcacaggcgttttcagggcacggctgcccctgcaaggttaaggaaagttcaaaacgaaagtcatgtcacctataatcccatccctctaacaccactgttttttgttttttgtgtgttttttcaagacagctctgtcgcccg

SEQ ID NO: 1771 - DNA, 246 bp, Homo sapiens
  misc_feature 1..246: note = U/M: M (0.76:0.1) in Pancreatic Ductal cells
  misc_feature 1..246: note = source = chr19:48232782-48233027; Gene: EHD2 (intron)
  source 1..246: mol_type = genomic DNA
cgcgggtttcagagcgattttggatgtcagatggaactttctcagggggaggctgccagggtggaggcggggcaggaagctgggcaggcagggaggccaagaaggttctagggggtggaggagcctgaggtgttggtttaaggagcagcgagagtgggtgagtcagagcccccacccccaccccaggaatcctccttcggagggagcggcccactgtggaccaggctgccactcctggaaccttcg

SEQ ID NO: 1772 - DNA, 91 bp, Homo sapiens
  misc_feature 1..91: note = U/M: M (0.74:0.13) in Pancreatic Ductal cells
  misc_feature 1..91: note = source = chr10:73982876-73982966; Gene: ANAPC16 (intron)
  source 1..91: mol_type = genomic DNA
cgctctgtcgcccaggctcactgcaacctccgcctcccgggttcaaatgattctcttgcctcagcctcctgagtagctgggatgagaggcg

SEQ ID NO: 1773 - DNA, 113 bp, Homo sapiens
  misc_feature 1..113: note = U/M: M (0.71:0.17) in Pancreatic Ductal cells
  misc_feature 1..113: note = source = chr6:91319986-91320098; Gene: MAP3K7 (Intergenic)
  source 1..113: mol_type = genomic DNA
cgatttcgtttttctctgtaccaaggaccaagaggagtatttggaagtctgggctccagtctcagctccccactcggctcgtcggtcgcgggccgacgttcctccagccctcg

SEQ ID NO: 1774 - DNA, 116 bp, Homo sapiens
  misc_feature 1..116: note = U/M: M (0.65:0.11) in Pancreatic Ductal cells
  misc_feature 1..116: note = source = chr8:142215723-142215838; Gene: SLC45A4 (Intergenic)
  source 1..116: mol_type = genomic DNA
cgctcggggggagcgttggttggcggggtgcaggtctggtgctcgctcaggtgggccaggcacccgcgcgccaggtgaggcgggcgggggaacacacgcccctggcccctgcgccg

SEQ ID NO: 1775 - DNA, 204 bp, Homo sapiens
  misc_feature 1..204: note = U/M: M (0.59:0.05) in Pancreatic Ductal cells
  misc_feature 1..204: note = source = chr2:235044324-235044527; Gene: SPP2 (Intergenic)
  source 1..204: mol_type = genomic DNA
cggtatcaaactctaaacagaaactggatcggggattctttagaagggattcctaaaatgggtggccccaagcctaaacgacttcagtggaatcttccagtcttgcattcaccgttaccagctgtttgtaatgggagagattcagtgactcttatcgggcactagatggcgatcaggcatcaataaggcccaacaaccgcctcg

SEQ ID NO: 1776 - DNA, 109 bp, Homo sapiens
  misc_feature 1..109: note = U/M: M (0.69:0.2) in Pancreatic Ductal cells
  misc_feature 1..109: note = source = chr2:110519027-110519135; Gene: RGPD5 (Intergenic)
  source 1..109: mol_type = genomic DNA
cgccccaggtatccctttgtgccacgctcacagctcgcagcccggggggcactccaggttccgtttctcggggatctcacactggggagctgctgtaggtaaatcgccg

SEQ ID NO: 1777 - DNA, 232 bp, Homo sapiens
  misc_feature 1..232: note = U/M: M (0.55:0.06) in Pancreatic Ductal cells
  misc_feature 1..232: note = source = chr2:199174486-199174717; Gene: PLCL1 (Intergenic)
  source 1..232: mol_type = genomic DNA
cgagtgctcgcttgcatttttgagggattgaattagagatgccgtggggtgaatggctcgcaaattccacgaaaaaaacctatcccaaaatggacacaagagggcgccaaagatgcagtagctgatggagatttaatggacgaatactctggcacttacaaatgaagccatgtttattttattctgggtaatatattatgcacctgcttgttttattttttagactgattcg

SEQ ID NO: 1778 - DNA, 133 bp, Homo sapiens
  misc_feature 1..133: note = U/M: M (0.56:0.09) in Pancreatic Ductal cells
  misc_feature 1..133: note = source = chr1:116961613-116961745; Gene: ATP1A1OS (promoter-TSS)
  source 1..133: mol_type = genomic DNA
cgtttcacttcattcgatttccatgtgtatggatttgtttctacatagctgtggtaaaacgcacatactaaactgaatccagggttgttttccactttgtaacatgaacattttcaccgtgttagtactgacg

SEQ ID NO: 1779 - DNA, 156 bp, Homo sapiens
  misc_feature 1..156: note = U/M: M (0.55:0.1) in Pancreatic Ductal cells
  misc_feature 1..156: note = source = chr10:102107626-102107781; Gene: SCD (intron)
  source 1..156: mol_type = genomic DNA
cgcccctaatgtatctgtacagtttcagggaacttttctccgttgcgtctcggatacaccctaccctcagtgaactacggcgctgcggaagggtccgtactgtccacccttcccccagcgtgattagagagcggagtggccccagctgcctccacg

SEQ ID NO: 1780 - DNA, 94 bp, Homo sapiens
  misc_feature 1..94: note = U/M: M (0.91:0.18) in Pancreatic Ductal cells
  misc_feature 1..94: note = source = chr1:29805277-29805370; Gene: PTPRU (Intergenic)
  source 1..94: mol_type = genomic DNA
cgcagcttaaccagcctgcgctgctgtcgccagcgccagttttaaatagccaaaccctactcacttcatccagcaacgcacccccaacttcacg

SEQ ID NO: 1781 - DNA, 171 bp, Homo sapiens
  misc_feature 1..171: note = U/M: M (0.79:0.13) in Pancreatic Ductal cells
  misc_feature 1..171: note = source = chr11:94883896-94884066; Gene: ENDOD1 (Intergenic)
  source 1..171: mol_type = genomic DNA
cgcggtgggccccacctgcctaccgtggccggccgggagctattacagcagggtctgcccgtccgacgacggcggctccaatctggggtcccgccggcgccgacccctcagctctctcccgatacctgctggcctctctcatctttggtggcactcgccgccacggggacg

SEQ ID NO: 1782 - DNA, 420 bp, Homo sapiens
  misc_feature 1..420: note = U/M: M (0.7:0.1) in Pancreatic Ductal cells
  misc_feature 1..420: note = source = chr12:106978811-106979230; Gene: RFX4 (intron)
  source 1..420: mol_type = genomic DNA
cgctgcgccctcaccacctcctgagaaccctaacattaaaaatgaatatccttaacaaacttaaacgcatgtctgcagagtttgtggccaagtattttcgagcggcccacgcagggacatagggtctccctacatcccaaacctgcagtggccctgctggggggcttttagctgcctcctccacagggccaggcccctcggtacttctggggaggactgtggggctgtggattcgtggcgttttctgttctcgatgcaactggtgctcgtgggggcaccgggtcctcttcacctcaactgcaaacactccagagacgttctgaaatgaaatcctttccccatccacttctctcccttttgtatatccgagacatccctaggtcaccaccctgaacgcaaaatcaaaagttttggtacacg

SEQ ID NO: 1783 - DNA, 264 bp, Homo sapiens
  misc_feature 1..264: note = U/M: M (0.75:0.17) in Pancreatic Ductal cells
  misc_feature 1..264: note = source = chr14:59103700-59103963; Gene: DACT1 (promoter-TSS)
  source 1..264: mol_type = genomic DNA
cgttgtaagtgcacagcccccacaatatatagcatatgctgcatactattataattcttcaacagcaggttcccatagcagctgctcccttttacagtggggggaacgtacacagagaagggagtaagttgcccgcacagctatttaggggtgaaactgggatacaaatccagacagtctgatttctgagtcagagctcttattgtaaacgcagactaagtaataataaaagctcaaacaaaaaccaaagcgcgcacgcgcgcg

SEQ ID NO: 1784 - DNA, 331 bp, Homo sapiens
  misc_feature 1..331: note = U/M: M (0.64:0.07) in Pancreatic Ductal cells
  misc_feature 1..331: note = source = chr5:115297291-115297621; Gene: AQPEP (promoter-TSS)
  source 1..331: mol_type = genomic DNA
cgccgggaaaaccagttccagcccaggaatttctgggtggaaacactggccgccgaattgttttattctctttgcttgattcgagtcggttctgaaagcaggtgtcccctctcccccggcttcaggaagggaaaccccggccccaggcagttgcagagctaagaaaaaccatcccgccaggccccttcttgtggtaacgcggtcctaaccctgctctgccccacaaccccatttcacccgggagacgcagacgccaggctccctagcactttgtcgcctcttcctccagcctggcttcctgagctctggaaaagttccgggcctccggacg

SEQ ID NO: 1785 - DNA, 107 bp, Homo sapiens
  misc_feature 1..107: note = U/M: M (0.66:0.1) in Pancreatic Ductal cells
  misc_feature 1..107: note = source = chr5:115297174-115297280; Gene: AQPEP (promoter-TSS)
  source 1..107: mol_type = genomic DNA
cgtgcgtgaatgcagactccagatccagcgcagacgccaagaattcgctcaggggcaccagctaaatagcaaacagatgccatgtcaaacatgtgaaagcctcagcg

SEQ ID NO: 1786 - DNA, 170 bp, Homo sapiens
  misc_feature 1..170: note = U/M: M (0.7:0.15) in Pancreatic Ductal cells
  misc_feature 1..170: note = source = chr5:115298920-115299089; Gene: AQPEP (exon)
  source 1..170: mol_type = genomic DNA
cgagctgcagcttagcttctcgggcctggtgaaggaagacctcagggagggactcttcctcaacgtctacaccgaccagggcgagcgcaggtaagggctgtacagcccggggcccctctcggcccccgcccctgcgtcccggtgcaggctgcgggtccagctgactaccg

SEQ ID NO: 1787 - DNA, 285 bp, Homo sapiens
  misc_feature 1..285: note = U/M: M (0.62:0.08) in Pancreatic Ductal cells
  misc_feature 1..285: note = source = chr6:26172931-26173215; Gene: HIST1H2BD,HIST1H2BE (TTS,Intergenic)
  source 1..285: mol_type = genomic DNA
cgcctcccaactccaaggagacctttcttgcatctcccttactgttctcacgcctgtagggctcttcgtgtgaggattcagtgtatgtatgtatgtatatgaatgtgtgcgaataattatttcctaattgagtttttttttaaaaaaatcatcttccggtacacgcagtgccgtactccattaaacagcaggcacggtgtctagggtccgcagttcttttggaggctcatgaaaatattttaatttcttctaaagtcagaaggaaaaaaatgaacatttaagtcg

SEQ ID NO: 1788 - DNA, 188 bp, Homo sapiens
  misc_feature 1..188: note = U/M: M (0.64:0.12) in Pancreatic Ductal cells
  misc_feature 1..188: note = source = chr2:112789506-112789693; Gene: TMEM87B (Intergenic)
  source 1..188: mol_type = genomic DNA
cgtttcaaattctctttcatagaaactcaaattacttttgtaagtggctcttgtaggcaaaaaaaagggagagaggaaacaggaagaaacaagtcgggttaattgtcttaaccgtgctggggctcaggatcaggaggtcgaaaggacaaggaaacagacatatgccagaagcactcgtgactggcacg

SEQ ID NO: 1789 - DNA, 325 bp, Homo sapiens
  misc_feature 1..325: note = U/M: M (0.56:0.05) in Pancreatic Ductal cells
  misc_feature 1..325: note = source = chr11:94884119-94884443; Gene: ENDOD1 (Intergenic)
  source 1..325: mol_type = genomic DNA
cgcgggccagcctctcgtccttcctcccgggacggggctctttccctttctccggatgcgggcctttgagagtcagcgacgccttagactcctcccagaaaaatgcaccctcatctacccaattctgccctaccctttggagctcctggaccctctaaccgctcggtggggtcagagcccacccccggaagggccgctggtcggggactggttcgccctctcctggcctcctcggaccagtgcgcggggaggatcccgctaacgccgggcgcctgcagaccttgagcggcctcgccctggtgacctccccgggaaaggctgggcg

SEQ ID NO: 1790 - DNA, 95 bp, Homo sapiens
  misc_feature 1..95: note = U/M: M (0.54:0.09) in Pancreatic Ductal cells
  misc_feature 1..95: note = source = chr13:28554355-28554449; Gene: PRHOXNB (intron)
  source 1..95: mol_type = genomic DNA
cgagccggcctaacaccactgtgatagagcccttctggtaggtgtcctgcccctcgggcactgcaaacaggaacgggtctttcccgcttcccgcg

SEQ ID NO: 1791 - DNA, 69 bp, Homo sapiens
  misc_feature 1..69: note = U/M: M (0.54:0.12) in Pancreatic Ductal cells
  misc_feature 1..69: note = source = chr21:46143588-46143656; Gene: TSPEAR (Intergenic)
  source 1..69: mol_type = genomic DNA
cgcctcgcggcctccgaggagcaaggaaaggcccgcgtgggagcgaagagccagggaggaacaaagacg

SEQ ID NO: 1792 - DNA, 242 bp, Homo sapiens
  misc_feature 1..242: note = U/M: M (0.54:0.13) in Pancreatic Ductal cells
  misc_feature 1..242: note = source = chr21:46130516-46130757; Gene: TSPEAR (intron)
  source 1..242: mol_type = genomic DNA
cgcaagccatctcctcgcctcccctgatagccgtgctgcggagcctgagtgctggagtcactaatttactgtccagtaactgagtttctagcgaccaggtctagttgtcgtgttactttattaaattttggtttgataagtaaaatccctcagtagaaactctagaaaagtattagcgtgtcatggtcatgagcaagccaaacagcctttctaaaaggtgggaaggagacccccaggcttcg

SEQ ID NO: 1793 - DNA, 65 bp, Homo sapiens
  misc_feature 1..65: note = U/M: U (0.1:0.9) in Endometrium Epithelium
  misc_feature 1..65: note = source = chr4:183272479-183272543; Gene: TENM3 (intron)
  source 1..65: mol_type = genomic DNA
cgtatgcatcgcttcccagaagcagccaggcatctattgttttttgtcatccagccggtgcgacg

SEQ ID NO: 1794 - DNA, 102 bp, Homo sapiens
  misc_feature 1..102: note = U/M: U (0.1:0.9) in Endometrium Epithelium
  misc_feature 1..102: note = source = chr1:88737996-88738097; Gene: PKN2 (Intergenic)
  source 1..102: mol_type = genomic DNA
cgatctaagtgagctttaccttgaaggccaagtttctcagggcaggccctattcagaaggcgtgtgcgaatttgacaaagcgtgggcattcccttgaatgcg

SEQ ID NO: 1795 - DNA, 189 bp, Homo sapiens
  misc_feature 1..189: note = U/M: U (0.08:0.88) in Endometrium Epithelium
  misc_feature 1..189: note = source = chr11:61264069-61264257; Gene: MIR4488 (Intergenic)
  source 1..189: mol_type = genomic DNA
cgccatgcctcgcttcctccccacactgctgcagacaggctctgcccaggacctttgtgatgggcaggtcaacctgaccagaggtgaggcgacctgcccaaagccatgcggtgccggccccgtgagcgcgctcgcactctcttctgaatccaagcctctccccaccccatcgcttccctgggggtctcg

SEQ ID NO: 1796 - DNA, 169 bp, Homo sapiens
  misc_feature 1..169: note = U/M: U (0.14:0.91) in Endometrium Epithelium
  misc_feature 1..169: note = source = chr10:43819264-43819432; Gene: FXYD4 (Intergenic)
  source 1..169: mol_type = genomic DNA
cggagtctcgctctgtcgcccaggctggagtgcagtggcgcaatctcggctcactgcaagctccgtttcccgggttcaagccattgtcctgcctcagccgcccgagtagctggaactacaggcgctcgccaccacgcccggctaattttttgtatttttagtagagacg

SEQ ID NO: 1797 - DNA, 329 bp, Homo sapiens
  misc_feature 1..329: note = U/M: U (0.12:0.88) in Endometrium Epithelium
  misc_feature 1..329: note = source = chr8:8094386-8094714; Gene: FAM86B3P (intron)
  source 1..329: mol_type = genomic DNA
cgagaaccagagctgtttttgtaaggaacaccagtgagtctggagatttttttcttttgcttcggtcttttgcagctttctctactaagggttctcctttttcacccaagtaattgcctttccatctaatggctcaaatggtcaaaaggcatctaatagtctcatatgatcgctgcctctctggcctcgccctgctgctgaggtcagcgtgacctggaactgtccgctggtccctttcagtaacctgaagctttcaccgtagatgtgctgtattgcccagaagccattgtgtcactggtcagggtcctgcggaggctggctgcctgccg

SEQ ID NO: 1798 - DNA, 46 bp, Homo sapiens
  misc_feature 1..46: note = U/M: U (0.16:0.91) in Endometrium Epithelium
  misc_feature 1..46: note = source = chr1:15194057-15194102; Gene: KAZN (intron)
  source 1..46: mol_type = genomic DNA
cgcaaggacgccgagaggatgaaatgacagagcacgtagttgtccg

SEQ ID NO: 1799 - DNA, 102 bp, Homo sapiens
  misc_feature 1..102: note = U/M: U (0.18:0.93) in Endometrium Epithelium
  misc_feature 1..102: note = source = chr13:106597373-106597474; Gene: LINC00343 (Intergenic)
  source 1..102: mol_type = genomic DNA
cgcctcccaggtacctgggattacaggcgtgaggccaccgcgcccagccgttcttcacttttgaagtgtttttgtctctaattttgcttgtttcagcttccg

SEQ ID NO: 1800 - DNA, 131 bp, Homo sapiens
  misc_feature 1..131: note = U/M: U (0.1:0.85) in Endometrium Epithelium
  misc_feature 1..131: note = source = chr19:1340629-1340759; Gene: MUM1 (Intergenic)
  source 1..131: mol_type = genomic DNA
cgggcatggtggtgcgtgcctgtaatctaagatactctggaggctgaggcaggagaatcgcttgaactgggaggcagaggttgcagtgagccaagatcgtgccactacactccagcctgggcgacagagcg

SEQ ID NO: 1801 - DNA, 131 bp, Homo sapiens
  misc_feature 1..131: note = U/M: U (0.13:0.87) in Endometrium Epithelium
  misc_feature 1..131: note = source = chr11:71506971-71507101; Gene: ALG1L9P,FAM86C1 (TTS,exon)
  source 1..131: mol_type = genomic DNA
cgctgcctctctggcctcgcccttctgctgaggtcagcatgacctggaactgtccgctggtccctttcagtaacctgaagctttcaccgtagacgtgctgtattgcccagaagccatcgtgtcgctggtcg

SEQ ID NO: 1802 - DNA, 295 bp, Homo sapiens
  misc_feature 1..295: note = U/M: U (0.17:0.9) in Endometrium Epithelium
  misc_feature 1..295: note = source = chr15:75839798-75840092; Gene: PTPN9 (intron)
  source 1..295: mol_type = genomic DNA
cgtggtggcagacaaaacaaaacaaaaaacaaaacaagacaaaaaaaacctctgtgccatacattttctcatccaaaaaaggaaacctgcctatgctgtctcgcatgatcaaataactggctatccttgaaggcattgtgtaaaacttaactacactgcattaagtaacaccagaccttaacaatagctaatatttactggatatagggttctttttttttttttttgagacgaagcctcgctctgtcacccaggctggagtgcagtgactcaatcttggctcactgcaacctcg

SEQ ID NO: 1803 - DNA, 78 bp, Homo sapiens
  misc_feature 1..78: note = U/M: U (0.18:0.9) in Endometrium Epithelium
  misc_feature 1..78: note = source = chr21:43495793-43495870; Gene: UMODL1 (intron)
  source 1..78: mol_type = genomic DNA
cgtatatggaccgtgagaaccctgtgcttcaggaagcatgcgtggggcccaggtggcacctcctcctcggtcacagcg

SEQ ID NO: 1804 - DNA, 284 bp, Homo sapiens
  misc_feature 1..284: note = U/M: U (0.18:0.9) in Endometrium Epithelium
  misc_feature 1..284: note = source = chr3:31983723-31984006; Gene: OSBPL10 (intron)
  source 1..284: mol_type = genomic DNA
cgccacaagaatgcaatgtatggctcaatataaaaagcgggctgagcgcagtggctcacgtctgtaatcccggcactttgggaggccaaggcgggcggatcaggagtttgagaccagcctggtcaacatggtgaaaccctgtctctactaaaaatacaaaaattagctgggtggcgggcacctgtaatcccagctacaagaggctgagagaggagaatcctttgaacccaggagttggaagttgcagtgagccaagatcgcatcattgcactccagcctgggcg

SEQ ID NO: 1805 - DNA, 51 bp, Homo sapiens
  misc_feature 1..51: note = U/M: U (0.2:0.91) in Endometrium Epithelium
  misc_feature 1..51: note = source = chr2:34978257-34978307; Gene: MYADML (Intergenic)
  source 1..51: mol_type = genomic DNA
cggaggcggtggctcacgcgtgtaatcccagcactttgggaggccgaggcg

SEQ ID NO: 1806 - DNA, 175 bp, Homo sapiens
  misc_feature 1..175: note = U/M: U (0.07:0.78) in Endometrium Epithelium
  misc_feature 1..175: note = source = chr14:105280371-105280545; Gene: LINC00638 (Intergenic)
  source 1..175: mol_type = genomic DNA
cggggtcctgagtataaaagagtgtgaagaatagggagtaggattgtaccctgtcctcccgtggtgtaaagagaagggaaactggatgcacatgagcacagtatgcgttttcacatgtacgaaatacttctggacagatcaaaagaggtttggttgcctgtggggagggaactcg

SEQ ID NO: 1807 - DNA, 200 bp, Homo sapiens
  misc_feature 1..200: note = U/M: U (0.17:0.88) in Endometrium Epithelium
  misc_feature 1..200: note = source = chr5:172371226-172371425; Gene: ERGIC1 (intron)
  source 1..200: mol_type = genomic DNA
cgacggggaagatcccaccctaggttgtctctgagccttgaggcctggttgggagatacaagagcgtggcagtggcaagggaccaagccactctcagtcaatgccaccacagtcctagggggtgaggattagtcttcctttttttttttttctgagacggagtttcactcttgttgcccaggctggtgtgcagtggcacg

SEQ ID NO: 1808 - DNA, 300 bp, Homo sapiens
  misc_feature 1..300: note = U/M: U (0.19:0.9) in Endometrium Epithelium
  misc_feature 1..300: note = source = chr6:125589059-125589358; Gene: HDDC2 (Intergenic)
  source 1..300: mol_type = genomic DNA
cgttgtgctttagtcaggagtacgccaaggtggccttctggtgcaccatgactcagagggtttggagtgcaggcacacaactgtgcacattatgtaaccccgccacatgaggcacattgtgaccactcacatgagcttgtgcttggcttgcagccactattgtctgtaaaaggtacaactacccagctgatgctgtacatatagctcacatccagagaaagaacaaagccatgtcaaaaccgcctgtgattccttgagtgtttttccagctacccaccacctgcccaccgtctcctctcg

SEQ ID NO: 1809 - DNA, 330 bp, Homo sapiens
  misc_feature 1..330: note = U/M: U (0.19:0.9) in Endometrium Epithelium
  misc_feature 1..330: note = source = chr2:188371809-188372138; Gene: TFPI (intron)
  source 1..330: mol_type = genomic DNA
cggtatgtgatgttcccttccctgtgtccatgtgttatcattgctcaacttccacttatgagtgagaacatgtggtgtttggttttctgttcctgtgttagtttgctgagaatgatggtttccagcttcatccatgtctctgcaaaggacatgaacacatccttttttatgtctgcatagtattccatggtgtatatgtgccacattttctttatacagtctatcattgataggcatttgggtgggttccaagtcttttccattgtgaatagtgccgtgacaaacgtgtgaaagcgtctttatgtagaatgatttatactgggtcaaacg

SEQ ID NO: 1810 - DNA, 73 bp, Homo sapiens
  misc_feature 1..73: note = U/M: U (0.23:0.93) in Endometrium Epithelium
  misc_feature 1..73: note = source = chr9:132048516-132048588; Gene: C9orf106 (Intergenic)
  source 1..73: mol_type = genomic DNA
cgggaggcagcgggcgacttgaaaatgcactccctaccacaggctcaagagtgacggcgcctgtcagggaccg

SEQ ID NO: 1811 - DNA, 146 bp, Homo sapiens
  misc_feature 1..146: note = U/M: U (0.16:0.86) in Endometrium Epithelium
  misc_feature 1..146: note = source = chr16:1194503-1194648; Gene: CACNA1H (Intergenic)
  source 1..146: mol_type = genomic DNA
cggtccgcacaccccatcctgcgccagcctccaggacacaatggcttccaggaagcgccggggaggggagagaaaagactcgcaacaatggccccggccggcctgttctgccctgtcccgccccagcctgccacgagaccctgccg

SEQ ID NO: 1812 - DNA, 161 bp, Homo sapiens
  misc_feature 1..161: note = U/M: U (0.11:0.81) in Endometrium Epithelium
  misc_feature 1..161: note = source = chr16:803569-803729; Gene: MSLN (Intergenic)
  source 1..161: mol_type = genomic DNA
cgcaagactgacaaagagactctggcaataagataccaaattataaaggaggcctaaggccctgccgggcagaggttaggtcacgcctgcttctcgccctcctgctacatgggtcactgtgacccagtggagggggcggactctgacacagcgtccttacg

SEQ ID NO: 1813 - DNA, 177 bp, Homo sapiens
  misc_feature 1..177: note = U/M: U (0.16:0.86) in Endometrium Epithelium
  misc_feature 1..177: note = source = chr15:38017168-38017344; Gene: TMCO5A (Intergenic)
  source 1..177: mol_type = genomic DNA
cggttcacaacaccccaaaacaattaaaatagtaacatccaagatcactgatcacaggtcaccgtacaaatacaataacaatgaaaaagttggaaatatggcagaataaccaaaacgtcacacagaggcacaaagtgagcacatgctgttaaaaaacgccaccaatagacttgctcg

SEQ ID NO: 1814 - DNA, 287 bp, Homo sapiens
  misc_feature 1..287: note = U/M: U (0.17:0.87) in Endometrium Epithelium
  misc_feature 1..287: note = source = chr19:10314970-10315256; Gene: DNMT1 (Intergenic)
  source 1..287: mol_type = genomic DNA
cgtgcacctgtagtcccggctacccagaaggctgaggcaggagaattgcttgaacccaggaggcggaggttgcagtgagccaagatcgtgccattgcactcaagcctgggcaacagaacaagactctgtctcaaaaaaaaccctcaaaaattagccgtgtgtggtgtcatgcacctgtagttccagctactcaggaggctgagacaggagaattgcttgaacccgggaggcggaggttgcagtgagccaagatcacaacactgcactccaacctgggcgacagagcg

SEQ ID NO: 1815 - DNA, 47 bp, Homo sapiens
  misc_feature 1..47: note = U/M: U (0.25:0.94) in Endometrium Epithelium
  misc_feature 1..47: note = source = chr21:37752927-37752973; Gene: CHAF1B (Intergenic)
  source 1..47: mol_type = genomic DNA
cgagtagcagtggcgcgatcacagctcactacagccgcaatctcccg

SEQ ID NO: 1816 - DNA, 124 bp, Homo sapiens
  misc_feature 1..124: note = U/M: U (0.17:0.86) in Endometrium Epithelium
  misc_feature 1..124: note = source = chr16:83914357-83914480; Gene: MLYCD (Intergenic)
  source 1..124: mol_type = genomic DNA
cgggcccctccctccccagccttccgactacagttcctggcaatgtggcaaaaccgcatctctacaaagaaatacaaaaaatttaccacatgtggtggcacacacctgtagtctcgtctgctcg

SEQ ID NO: 1817 - DNA, 309 bp, Homo sapiens
  misc_feature 1..309: note = U/M: U (0.19:0.88) in Endometrium Epithelium
  misc_feature 1..309: note = source = chr19:56758878-56759186; Gene: ZSCAN5A (Intergenic)
  source 1..309: mol_type = genomic DNA
cgctattagatgagatatgacatgaagcaggtgcaagggcgcctggcacacagagggagtgccctagataggaattgccaggatgtcggagtaaatattcattctccccacagagctttattttctgtttcattaggtccattgttttcgtacaggtttatgtgggtgtgtgttgctgttctttcttttattattttttttgagacggagtcttgttctgtcacccaggctggagtgcagtggtgcgatctcggctcactgccagctcagtctcccaggttcacatcattctcctgcctcagcctcccg

SEQ ID NO: 1818 - DNA, 66 bp, Homo sapiens
  misc_feature 1..66: note = U/M: U (0.19:0.87) in Endometrium Epithelium
  misc_feature 1..66: note = source = chr19:13692448-13692513; Gene: CACNA1A (Intergenic)
  source 1..66: mol_type = genomic DNA
cgcaggcccacccgcaggaccaatgcacggactccgtgccactttgtgatggattgtagtcatgcg

SEQ ID NO: 1819 - DNA, 178 bp, Homo sapiens
  misc_feature 1..178: note = U/M: U (0.25:0.93) in Endometrium Epithelium
  misc_feature 1..178: note = source = chr17:80348628-80348805; Gene: OGFOD3 (exon)
  source 1..178: mol_type = genomic DNA
cgcccgctccttcccaggggtcaccatgcctcagctggcctcacgcccgctccttcccaggggtcaccatgcctcagctggcctcacgcccgctccttcccaggggtcaccatgcctcagctggcctcacgcccgctccttcccaggggtcaccatgcctcagctggcctcacgcccg

SEQ ID NO: 1820 - DNA, 218 bp, Homo sapiens
  misc_feature 1..218: note = U/M: U (0.14:0.82) in Endometrium Epithelium
  misc_feature 1..218: note = source = chr1:16446059-16446276; Gene: EPHA2 (Intergenic)
  source 1..218: mol_type = genomic DNA
cggtgtgggtcttgggctgggcatgatcactggcatggcacactcactggcaccgtggcaagttaaaaccgtgtcgccaggcaccagccttagatttcctaattaattagcaactcctctaggaacaggcaatgctagaggaacgcccaccacctacaatggtaggtgttcagaaacattcaactgcttctccttaccagcttttgtggtccctcccg

SEQ ID NO: 1821 - DNA, 328 bp, Homo sapiens
  misc_feature 1..328: note = U/M: U (0.23:0.91) in Endometrium Epithelium
  misc_feature 1..328: note = source = chr17:27408345-27408672; Gene: MYO18A (intron)
  source 1..328: mol_type = genomic DNA
cgtgccatgccgtggtgaaccacggcagtggggcggggaagccggcattatctgcaataacaaaatgttgtttggccgaataaattaaaccaattagagggggctgctgggtgcttctggtgaggggccaggcttggggaaggggccttgggggagctggagaagggagggagagatgttactttttctacccagtctacctgctgtctctgggagaggatgaggaagggtgtgtcctggaggatcaggatgggcttgatcagggggttgggattctatgttgtgggggcagcagggatatggctttgtggggggtgaggggggagcg

SEQ ID NO: 1822 - DNA, 144 bp, Homo sapiens
  misc_feature 1..144: note = U/M: U (0.19:0.86) in Endometrium Epithelium
  misc_feature 1..144: note = source = chr6:45643631-45643774; Gene: RUNX2 (Intergenic)
  source 1..144: mol_type = genomic DNA
cgggagggaaggtcatgatgacctgtctcctctacagcttccaggcctcgcctttgcttgttttctgggagcctcggtgtctgcccacaatggcatggctccttcaagctgcccagattcttggcctggtgtgtgggccgcacg

SEQ ID NO: 1823 - DNA, 124 bp, Homo sapiens
  misc_feature 1..124: note = U/M: U (0.23:0.89) in Endometrium Epithelium
  misc_feature 1..124: note = source = chr1:214190986-214191109; Gene: PROX1 (intron)
  source 1..124: mol_type = genomic DNA
cgcacacacaaaaaaatctttgctttcctccctcacctcccgcacccccccacaaatgatctattggctctctcggcggctgtaccccaacaggcgaagccatttagcaaacacagaggtagcg

SEQ ID NO: 1824 - DNA, 165 bp, Homo sapiens
  misc_feature 1..165: note = U/M: U (0.18:0.84) in Endometrium Epithelium
  misc_feature 1..165: note = source = chr11:109709660-109709824; Gene: ZC3H12C (Intergenic)
  source 1..165: mol_type = genomic DNA
cgttatcacagttacaacaactatgtgctgcttcttaaatgagatgtgtttgatatgcccggctagcttggttggtagagcatgagagtcttaaatgagatggacgtgatggctgttattgcccaactgcagaagaccagctgaatcggagtgactcacagggcg

SEQ ID NO: 1825 - DNA, 173 bp, Homo sapiens
  misc_feature 1..173: note = U/M: U (0.2:0.86) in Endometrium Epithelium
  misc_feature 1..173: note = source = chr6:34432216-34432388; Gene: PACSIN1 (Intergenic)
  source 1..173: mol_type = genomic DNA
cgcaatccctacacatgtaaagggcagggacccattctggtcctgagcaatctcacttcttttcccttcctccggctttatttttatttttatttatttatttttttcttttctttcctttttttttttgagatggagtttcgctctgtcgcccaggctggagtgcagtggcg

SEQ ID NO: 1826 - DNA, 192 bp, Homo sapiens
  misc_feature 1..192: note = U/M: U (0.22:0.88) in Endometrium Epithelium
  misc_feature 1..192: note = source = chr7:26176043-26176234; Gene: NFE2L3 (Intergenic)
  source 1..192: mol_type = genomic DNA
cgctccgtcacccaggctggagtgctgtgttgtaatcttggctcattgcaacctccacctcccaagttcaagcgattcttctgcctcagacttccgagtagctgggattacaggcatccgccaccacgcctggctaattatttgtatcttttgtagagacggggtttcaccatgttgcccacactggtctcg

SEQ ID NO: 1827 - DNA, 313 bp, Homo sapiens
  misc_feature 1..313: note = U/M: U (0.19:0.85) in Endometrium Epithelium
  misc_feature 1..313: note = source = chr2:116301176-116301488; Gene: DPP10 (intron)
  source 1..313: mol_type = genomic DNA
cgcatataaactctttaaaggcagacacatgctgggtttttttttgtctccctcacatgcctagaatatagaatcagtatgtcttcagtcactagctgtgaaaaaaattcatttatctgacatcgaaaaacacaagtcattgcttttggttatgtgtgaatgtcgctgttgctgtaaataaattcagacacagtcaatgagcgttaacatttgattgttattccttctgcttataacaaagaactatgagatgaaatctaactgccaagaatcagtaggggaaagtagtcattgtgttaatttcaatgctgcg

SEQ ID NO: 1828 - DNA, 91 bp, Homo sapiens
  misc_feature 1..91: note = U/M: U (0.26:0.91) in Endometrium Epithelium
  misc_feature 1..91: note = source = chr2:61740650-61740740; Gene: XPO1 (intron)
  source 1..91: mol_type = genomic DNA
cggtttcaccctgttgaccaggctcgtctcgaactgctgacctcaagagatctgcctgcctcggcctcccaaattgctggaattacaggcg

SEQ ID NO: 1829 - DNA, 141 bp, Homo sapiens
  misc_feature 1..141: note = U/M: U (0.15:0.8) in Endometrium Epithelium
  misc_feature 1..141: note = source = chr4:183272701-183272841; Gene: TENM3 (intron)
  source 1..141: mol_type = genomic DNA
cggagctctcctgttggagtctagttccttcttccagcctcctcagcctgttagccctcttggagaaagatgacctttgatgtaaggcaggccagcaggcgttggcgctgctcttccacctcctcgtgactcaggaccccg

SEQ ID NO: 1830 - DNA, 170 bp, Homo sapiens
  misc_feature 1..170: note = U/M: U (0.13:0.78) in Endometrium Epithelium
  misc_feature 1..170: note = source = chr8:125977953-125978122; Gene: ZNF572 (Intergenic)
  source 1..170: mol_type = genomic DNA
cgagtcaacagcgcgtgatgtgcttccccctgcagagagcctatgaacagacgtgcagtcagggaggtttcacatcaccaagattcctatcccagaaaagcaaatgttcatagctctgggaatggaatgcgacccttgtggagaacctataaacggacgcatggggggcg

SEQ ID NO: 1831 - DNA, 200 bp, Homo sapiens
  misc_feature 1..200: note = U/M: U (0.16:0.81) in Endometrium Epithelium
  misc_feature 1..200: note = source = chr11:36501472-36501671; Gene: TRAF6 (Intergenic)
  source 1..200: mol_type = genomic DNA
cgcaataggaccaggccctgagaggcgaggctgcaggggctggatggactggagcccagaccacatggaattagagaaaggctgcgctgggagggccctgaaaatagggtcctgggaggtcaggctgacccctgtggactaaagatccttgacagcgttcgcgtgtgtgtgtgtgaacaaatttggcctctaaccttccg

SEQ ID NO: 1832 - DNA, 259 bp, Homo sapiens
  misc_feature 1..259: note = U/M: U (0.23:0.88) in Endometrium Epithelium
  misc_feature 1..259: note = source = chr11:3435238-3435496; Gene: OR7E12P (Intergenic)
  source 1..259: mol_type = genomic DNA
cggtgaaagcttcaggttactgaaagggaccagcggacagttccaggtcatgctgacctcagcagcagggcgaggccagagaggcagcagtcatatgagactagtagatgccatttgaccatttgggccattagatggaaaggcaattgcttgggtgaaaaaggagaacccttagtagagaaagctgcaaaagaccgaagcaaaagaaaaaaatctccagactcactggtgttccttaaaaaatgagctctggttctcg

SEQ ID NO: 1833 - DNA, 109 bp, Homo sapiens
  misc_feature 1..109: note = U/M: U (0.16:0.8) in Endometrium Epithelium
  misc_feature 1..109: note = source = chr7:1763593-1763701; Gene: ELFN1 (intron)
  source 1..109: mol_type = genomic DNA
cggaaacatgcccacgctgacctgtgagccacgtgggatgtggttagtcacaggggctatggggccaggctgccttggcttaggccccggccccaccacttagttgccg

SEQ ID NO: 1834 - DNA, 192 bp, Homo sapiens
  misc_feature 1..192: note = U/M: U (0.24:0.88) in Endometrium Epithelium
  misc_feature 1..192: note = source = chr4:182996382-182996573; Gene: MGC45800 (Intergenic)
  source 1..192: mol_type = genomic DNA
cgctctgccgcccaggctggagtgcagtgatgcagtctccgctcactgcaacctctgcctcctgggttcaagtgattctcctgcctcagcctcctgagtagctgggactacaggcacatgtcaccacaccctgctaattttttgtattttcagtagagacggggtttcaccatgttggccaggatggtctcg

SEQ ID NO: 1835 - DNA, 314 bp, Homo sapiens
  misc_feature 1..314: note = U/M: U (0.18:0.82) in Endometrium Epithelium
  misc_feature 1..314: note = source = chr4:181648322-181648635; Gene: LINC00290 (Intergenic)
  source 1..314: mol_type = genomic DNA
cgcctatgccattcttatattgagtaatgaagctttaccacatgatctctgcctcttaaatcctggaataatttcaaaaggaaaaacaaagcctaatgatatttagagtagcatgggactagaggacacctattccaagaacactgttagatgtgtactgtctcactagtgggaatatatatttttccaatatcagtatgtggatttcaccgtctcctaataaaataactgctctaattccgtaagtagcagcaggaggggttgatgttgtcaaatgcttttcttctttctaacacttgtggtataccgtatcg

SEQ ID NO: 1836 - DNA, 320 bp, Homo sapiens
  misc_feature 1..320: note = U/M: U (0.23:0.87) in Endometrium Epithelium
  misc_feature 1..320: note = source = chr8:28183689-28184008; Gene: PNOC (intron)
  source 1..320: mol_type = genomic DNA
cgagacctcatttctgctaaaaatttaaaaactaaccaagcatcctgggctcaaacaatcctcccagctacttgggaggctgaggtgggaggattgcttgcgcccaggagttcaacgcttcagtgagccgtgattgcaccactgcacaccagcctgggcaacagagcgagaccatctcaaacaaacaaaaagtcaattcattgatttaacaaacacttattgagcaccccagtagtcatcatcctctgggtatgaaatgctttgatgacgcacaagaagaactggggtgggctcagctgcaggtccctcctttgttcacg

SEQ ID NO: 1837 - DNA, 335 bp, Homo sapiens
  misc_feature 1..335: note = U/M: U (0.19:0.83) in Endometrium Epithelium
  misc_feature 1..335: note = source = chr10:87796575-87796909; Gene: GRID1 (intron)
  source 1..335: mol_type = genomic DNA
cggcttctgcagcctggagggaacactccagtcccccacactctgccacttcccattagtggttaaaacaatgtaggctacattacaaatcaaaataagcaacaaagcattttataattagccataacttgacaaattaattagtacaacagcacagtgtgttccctgaagcatggctcactatattttgcttagagaatatatgtcacaaattacagatgtgttattcaaggtacttatgcaatcagagtgagttctaaaggtgcccttttgataccactttctggaacggaaaatggggctcgaggtagctagaaatatcatcgaacctgccg

SEQ ID NO: 1838 - DNA, 192 bp, Homo sapiens
  misc_feature 1..192: note = U/M: U (0.2:0.83) in Endometrium Epithelium
  misc_feature 1..192: note = source = chr5:79332560-79332751; Gene: THBS4 (intron)
  source 1..192: mol_type = genomic DNA
cgtgagcttcatctgtttgaacttggtgcctgggttgatttattactgactgtggaagtaaaactggaagagacgcacaacttgaagtaaaagttgtttttcctcttgtagccagagcaaagactgcctatgagggcgttctcaacttccctgcctctcgctgctggaatcacccatttaaactgcatttcg

SEQ ID NO: 1839 - DNA, 194 bp, Homo sapiens
  misc_feature 1..194: note = U/M: U (0.22:0.85) in Endometrium Epithelium
  misc_feature 1..194: note = source = chr22:45903659-45903852; Gene: FBLN1 (intron)
  source 1..194: mol_type = genomic DNA
cggcctcccaaagtgttgggattacaggcgtgagccactgcgcctggccctgtttttcattttggatcctgttacccactggagtgaaaaggtcctgtgagttttgctacctaggtatgaagcccggcttcttgttttggcctagaactcctctatggacctgcacagtgccatttctgagagtcactgatgcg

SEQ ID NO: 1840 - DNA, 219 bp, Homo sapiens
  misc_feature 1..219: note = U/M: U (0.26:0.89) in Endometrium Epithelium
  misc_feature 1..219: note = source = chr4:8216134-8216352; Gene: SH3TC1 (exon)
  source 1..219: mol_type = genomic DNA
cgctgtcctcctgacagatgccccagagctcctggggacctctcgaattcctatttctttctcttaaggaattatcagccaggctgctgtccatccacagtgaccaggaccggatcgtggtgacgtttaagacttttgaagaaatctggaagttttccacctaccatgctctcggtaaagaggtgaccctcccagaattggtcatggggacgcccgtcg

SEQ ID NO: 1841 - DNA, 237 bp, Homo sapiens
  misc_feature 1..237: note = U/M: U (0.24:0.87) in Endometrium Epithelium
  misc_feature 1..237: note = source = chr6:151076033-151076269; Gene: PLEKHG1 (intron)
  source 1..237: mol_type = genomic DNA
cgacctcaggtgatccacctgccttggcctcccaaagtgctgagattacaggcatgagccactgtgcctggccggcatcaggactttttgtttttttgagataggatctcgctctgttacccaggctgtagtcctgtggcgtgatcatacctcgctgcagccttgatctcctgggctcaagcaaccctcccgccctagtttcccaagtagctgggactacagatacatggcaccacg

SEQ ID NO: 1842 - DNA, 332 bp, Homo sapiens
  misc_feature 1..332: note = U/M: U (0.2:0.83) in Endometrium Epithelium
  misc_feature 1..332: note = source = chr1:222960114-222960445; Gene: DISP1 (Intergenic)
  source 1..332: mol_type = genomic DNA
cgctcatgtttcttctgcccagatgacgatttctaccctttcactcccaggattccccatgatgcattctctgagcacctctggcctccgaagcctaagctgcttctcccctggctcccatcactcatcccttctcctttctacgctgccacaatctattgtaattgcccgtttatttgtctgtagcccagacggtagaaaccatgtgggtagagctatgtctcctcagtccctggcacagcaccagcccatagtaagtgttcaagcagtatttatcaaatggacatctacatgttgcatgaactcctgttgttgaggaattgggcccctcg

SEQ ID NO: 1843 - DNA, 67 bp, Homo sapiens
  misc_feature 1..67: note = U/M: U (0.18:0.8) in Endometrium Epithelium
  misc_feature 1..67: note = source = chr9:138111325-138111391; Gene: LOC401557 (Intergenic)
  source 1..67: mol_type = genomic DNA
cgtgaacctgggaggaggagcttgcagtgagccgcgatcgcaccactgcactccagcctggacgacg

SEQ ID NO: 1844 - DNA, 113 bp, Homo sapiens
  misc_feature 1..113: note = U/M: U (0.21:0.83) in Endometrium Epithelium
  misc_feature 1..113: note = source = chr18:858810-858922; Gene: ADCYAP1 (Intergenic)
  source 1..113: mol_type = genomic DNA
cgggtttcaccatcttggccaggctgatctcgaactcctgaccttaggcgacccacccgcctcggcctcccaaagtgctgggattacaggcatgagccactgcgcccagcccg

SEQ ID NO: 1845 - DNA, 147 bp, Homo sapiens
  misc_feature 1..147: note = U/M: U (0.22:0.84) in Endometrium Epithelium
  misc_feature 1..147: note = source = chr6:159279614-159279760; Gene: OSTCP1,OSTCP1 (promoter-TSS,Intergenic)
  source 1..147: mol_type = genomic DNA
cggaggacatgattggtcttctcgcctctcaagctgcggtggtgctgtccgatttgtgcatagccagaggaagatttcctgagaagccagtcaagcatgagctccagggtccttgcctgtgtgcccctcttccaaggtcctgtaccg

SEQ ID NO: 1846 - DNA, 197 bp, Homo sapiens
  misc_feature 1..197: note = U/M: U (0.24:0.86) in Endometrium Epithelium
  misc_feature 1..197: note = source = chr7:6974962-6975158; Gene: CCZ1B (Intergenic)
  source 1..197: mol_type = genomic DNA
cggtgaaagcttcagattactgaaggggaccagcggacagttccaggtcatgctgacctcagcagaagggcgaggccagagaggcagcggtcatatgagactagtagatgccatttgaccatttgggccattagatggaaaggcaattacttgggtgaaaaaggagaacccttagtagagaaagctgcaaaagaccg

SEQ ID NO: 1847 - DNA, 305 bp, Homo sapiens
  misc_feature 1..305: note = U/M: U (0.24:0.85) in Endometrium Epithelium
  misc_feature 1..305: note = source = chr17:17492886-17493190; Gene: PEMT (intron)
  source 1..305: mol_type = genomic DNA
cgatgtttctactggacagcacagcagcacagggctagcaccggagatcctgcagctcagacgcccatggggtgaacaaaaaccttgcaactctcccaggccagggactgacatattttaaaaccggagattttgattgaggagggagtagagctaccacataagcaaatatgtaatgttgtatgttgtatgtttctttctttctttctttaagaaaaatcccttggcaacaggaagcttaactgcaccaacaaggacagcagaagaaaagcagaatgttagtcaacaagggtcaccctgacccg

SEQ ID NO: 1848 - DNA, 442 bp, Homo sapiens
  misc_feature 1..442: note = U/M: U (0.23:0.84) in Endometrium Epithelium
  misc_feature 1..442: note = source = chr11:40413021-40413462; Gene: LRRC4C (intron)
  source 1..442: mol_type = genomic DNA
cgctgtgatgtaccactattgtctccattctgagatgagatgaagggattgagccaaaggtaagccacttctccaggaccatggggtgaaaaaataaaggagaagtatttgaactcagtccacctattgtttgagtctacgtattcagccattgcacagtatttccgctgcaagccaaatctgcacttgatagatcattatagcatcacaatttccctgtttttaccggtcaaatgttgataagtattgtattcaaagtgacaaaaccacacactgcatattagcaatggctggacttgaatggtaagtaaatgaaaaaaaaatatttacccaaataagctgaaattttatgtccacataaaaacctgtctgcgaatgttcctagcagctttaaacataattgcctaaaattggaaacaatcaagctgtccttcaccaggcg

SEQ ID NO: 1849 - DNA, 72 bp, Homo sapiens
  misc_feature 1..72: note = U/M: U (0.23:0.83) in Endometrium Epithelium
  misc_feature 1..72: note = source = chr3:2847616-2847687; Gene: CNTN4 (intron)
  source 1..72: mol_type = genomic DNA
cgctctgtcgcccaggctggagtgcagtggtgagatgtcggctcactgcaagctccatctcccgggttcacg

SEQ ID NO: 1850 - DNA, 246 bp, Homo sapiens
  misc_feature 1..246: note = U/M: U (0.23:0.82) in Endometrium Epithelium
  misc_feature 1..246: note = source = chr12:97092440-97092685; Gene: NEDD1 (Intergenic)
  source 1..246: mol_type = genomic DNA
cgccagggcctgcttgagggtgcagggtgagaggaggtgaggatcaaaaaaataacaattgggtactatacttgtcaccagtagagggctgtgactgcaagttgttcaggttcttggcgttttgaacaaagaactggacaaaacgcccagcaaagccaagaaagaatgaaacaagaaaagaatgaaagcagaggtttattgaaaatgaaagtacactccacagtgcgggagtgggtgtgagcagcg

SEQ ID NO: 1851 - DNA, 289 bp, Homo sapiens
  misc_feature 1..289: note = U/M: U (0.27:0.86) in Endometrium Epithelium
  misc_feature 1..289: note = source = chr12:78605315-78605603; Gene: NAV3 (exon)
  source 1..289: mol_type = genomic DNA
cgctttgcctatcctccaaaatattaaaataacccagaaatgctctttgaccgtcacttaaaacctaagacatgtggcgaaattccatccagttctaagtgaaagagtttcagaaggcagaagattttgaattattatccagcagggctggaagcactagatgcagcatgagcacaactattcggctttccttccctattgtttttgtttttttaatgagttttgacgcatgttgttttgattgctattgttgtacatgagaaattcagcattaaagaacactgaagcg

SEQ ID NO: 1852 - DNA, 444 bp, Homo sapiens
  misc_feature 1..444: note = U/M: U (0.26:0.85) in Endometrium Epithelium
  misc_feature 1..444: note = source = chr10:114972951-114973394; Gene: TCF7L2 (Intergenic)
  source 1..444: mol_type = genomic DNA
cggctctcatctagaagctgtctagggctcgccctccatgattcacctcattagcttacaaaagactgtaaattccaactgttacaggagctctgtgccatgaactgggaacaatgaccaaatatctacttgttttattatatcatatctttgatccgttaagtttttagaagtatgttatttaatttctaagtattttcgaattttactggatctctttggtttttgatttccaattctattgtcatcagacagtacattctgtatgatttcaatcctttaattttattgaaacttgttttaactccagcatatggtctattgtggtgaacaggtcatgtgctcttaaaaatgatgtgtgttctgctgttgctgggcatagtgttctttgaatgtcaattaggctaatgtggttgacgctgttactcagaaatttatgtctcg

SEQ ID NO: 1853 - DNA, 447 bp, Homo sapiens
  misc_feature 1..447: note = U/M: U (0.21:0.8) in Endometrium Epithelium
  misc_feature 1..447: note = source = chr10:125063726-125064172; Gene: BUB3 (Intergenic)
  source 1..447: mol_type = genomic DNA
cgacctggaaatactgggtcaatgaaaacacttggagttcaatgtgttattttcttatttgtttctgcagaaaaatctcagtttgggttctgttcctggtcatttagcaaaggtcctcaatttgatccattgtcttttatgacaaagaggtcgaggggttatgtgactagccgaatgcaagtctgctgggagccttggttttctgcttatgcaacagtgtcaaaaccacttttaaaaatgccatcccatggaaatcaccaacaggaggagcttattgccagaaatcttaatttgattactagtagggattttacttacgattgtgaagttaaaacagaactgccccctctttttgggagggatttttcccatcctcttccatattcaagattggttaaaaaatctctgcccaaaattgatctgagcagggctcaagaaatgaagacg

SEQ ID NO: 1854 - DNA, 58 bp, Homo sapiens
  misc_feature 1..58: note = U/M: U (0.28:0.86) in Endometrium Epithelium
  misc_feature 1..58: note = source = chr14:99661118-99661175; Gene: BCL11B (intron)
  source 1..58: mol_type = genomic DNA
cggccttcgataatagcaacccccgaggatgcagacaggcctgaaccacgggcacccg

SEQ ID NO: 1855 - DNA, 79 bp, Homo sapiens
  misc_feature 1..79: note = U/M: U (0.27:0.85) in Endometrium Epithelium
  misc_feature 1..79: note = source = chr11:126435371-126435449; Gene: KIRREL3 (intron)
  source 1..79: mol_type = genomic DNA
cgcgtgggttagtcttaattatttaggcggctacgttacaaggcgctaataagcacactgcagaaatttattaagtgcg

SEQ ID NO: 1856 - DNA, 296 bp, Homo sapiens
  misc_feature 1..296: note = U/M: U (0.27:0.85) in Endometrium Epithelium
  misc_feature 1..296: note = source = chr20:57392983-57393278; Gene: MIR296 (promoter-TSS)
  source 1..296: mol_type = genomic DNA
cgcctccatctcagctccaaggaggccttggcagcaggctcggggcgccatggaacggttcactgcgtctctgccctggcctcacgtgctgccggctggccttgccattcatcttctgaaggctattctctgatggctctgctggccaccttgatctgagtggcaggtctgtgctaacagtgttttgtgtggggccctgggagaagagtccatgaaccactgcctaactcaagtgctgccacggtgaagcacccctgcctagttctgaacagacgcagcacatcaaaggggagccg

SEQ ID NO: 1857 - DNA, 446 bp, Homo sapiens
  misc_feature 1..446: note = U/M: U (0.31:0.89) in Endometrium Epithelium
  misc_feature 1..446: note = source = chr2:18429524-18429969; Gene: RDH14 (Intergenic)
  source 1..446: mol_type = genomic DNA
cggggatatccaatcgctagatgactgtgttagactgttttcgcattgctctaaaggaatacctgagattgggcaatttatagagaaaaaagttgtaagtggctctctgttctgcaggctatccaggatgcatggtgccagcatctgctcatggtaaaggcctcaggaagcatacaatcatggtggaaaatgaaaggggagcaggtgtgtcacatggtgaaggcaggagcaagagaaagaggaaggctcttttaaaagaaaagcactgcccggctcttttaaaccatcagctattttttgaactaatggagtgagaactcactaatcaccaaggaccgtggtgctaaaccgttcatgagggatctgcccccgcgatccaacacctcccagcaggccccaccttcaacattggaagtcacatttcaccatgagatttggaggtggcg

SEQ ID NO: 1858 - DNA, 152 bp, Homo sapiens
  misc_feature 1..152: note = U/M: U (0.24:0.79) in Endometrium Epithelium
  misc_feature 1..152: note = source = chr5:178928923-178929074; Gene: RUFY1 (Intergenic)
  source 1..152: mol_type = genomic DNA
cggccgaggtgagctctccttgggtggctgtgcctgtgggaaagaccccgggggggtgttctggagcccaagcaccacatccccccagacggggcctgtcccgatctcacactcagctcacctctccctccctgtgccgatttctcacagcg

SEQ ID NO: 1859 - DNA, 211 bp, Homo sapiens
  misc_feature 1..211: note = U/M: U (0.24:0.78) in Endometrium Epithelium
  misc_feature 1..211: note = source = chr9:128745913-128746123; Gene: PBX3 (Intergenic)
  source 1..211: mol_type = genomic DNA
cgggaggccacaggctgcccctgagcccccagtccccaccatgcttagcaggcttctcccctcccactgcatctgtctggtcccctggcgtctgctcaactccaaacagttgcttaatttgtgcattataaaaaaatgagagtttcaaagcactcggcgatgtataacaataaataaggactcccacaatattgcctccttaaccctggcg

SEQ ID NO: 1860 - DNA, 339 bp, Homo sapiens
  misc_feature 1..339: note = U/M: U (0.26:0.8) in Endometrium Epithelium
  misc_feature 1..339: note = source = chr7:156882722-156883060; Gene: UBE3C (Intergenic)
  source 1..339: mol_type = genomic DNA
cgcaggtagtgcacaaactaattcattgctttggcaatcacgcaggtctttgttcattaaggatcttgatttatttctcatagggaagtccgcacgtgtgtgcccaaaatcacactgataaagggtcattcgatcattttgttccagacagttagaaactgactgtgaaatatgtctctggaatctggaccagggttgacttgcggaaggtgtggaaatgggcgacaggggcccccagtgctccaggcagctaggctcctggaagccctaggaagaggcagggcttcctctcacctgtgttgcacaaatttattttaaaataaaagtttcttaatggcg

SEQ ID NO: 1861 - DNA, 57 bp, Homo sapiens
  misc_feature 1..57: note = U/M: U (0.31:0.84) in Endometrium Epithelium
  misc_feature 1..57: note = source = chr18:76434443-76434499; Gene: SALL3 (Intergenic)
  source 1..57: mol_type = genomic DNA
cggcgctgggcaccagctcactcgcctccctcccctaagtgcctgggaaaacgcacg

SEQ ID NO: 1862 - DNA, 61 bp, Homo sapiens
  misc_feature 1..61: note = U/M: U (0.28:0.81) in Endometrium Epithelium
  misc_feature 1..61: note = source = chr1:22915453-22915513; Gene: EPHA8,EPHA8 (intron,exon)
  source 1..61: mol_type = genomic DNA
cgcagtgacatcacctacaatgccgtgtgccgccgctgcccctgggcactgagccgctgcg

SEQ ID NO: 1863 - DNA, 173 bp, Homo sapiens
  misc_feature 1..173: note = U/M: U (0.3:0.81) in Endometrium Epithelium
  misc_feature 1..173: note = source = chr20:1753923-1754095; Gene: LOC100289473,LOC100289473 (intron,TTS)
  source 1..173: mol_type = genomic DNA
cgtcaacttgtgctccacatggcaaacgacgtgggagaacacatcatcatccatcagcgggacaagcacactgctggtcacattgtaggtgtgtccactgtactggacgctggtctgggggtttgggagctcgtgtttgtttttaagccaggtcacagtaacctggtgtgtcg

SEQ ID NO: 1864 - DNA, 256 bp, Homo sapiens
  misc_feature 1..256: note = U/M: U (0.36:0.82) in Endometrium Epithelium
  misc_feature 1..256: note = source = chr7:151379729-151379984; Gene: PRKAG2 (intron)
  source 1..256: mol_type = genomic DNA
cgggccaagtatgctgggggtgttgaggaaggaggtgctaagatggattagagcaagtccctgtagtctgtaggagaaatggggacaaaaccaaaaaatcagccccaacaccaccatgcaataaagtcgagaaccaggaaagcaggggggagctcagggaagaggagagggcctgagggtgggggtgggacggtggctcagaaaccccaggaaagagctgggccccgatcctggaggaggacacaggtctgccccg

SEQ ID NO: 1865 - DNA, 403 bp, Homo sapiens
  misc_feature 1..403: note = U/M: U (0.02:0.83) in Endometrium Epithelium
  misc_feature 1..403: note = source = chr6:152133802-152134204; Gene: ESR1 (intron)
  source 1..403: mol_type = genomic DNA
cgtgctaagtgtgtttctttcttttccagacaactttgaatggagaggagcaaattagtcttttggtttaattctgtctcagtttgcttatctaaagaaaggaaaacagagtggctacacttgtttagaaccatatgcatactccagagaaagatgctctattaatccaaaaaatacagccacttgaaaccagccaaagcgaaagtgtaagggacttcatggaaaggaggcagttcaccaaagttattgaggggttttatattttaaactccgccagtgaattgacgtgtaatgtcacttacaaaaaaaaaaaaagtatgtctgagctgttcgctacttcgtctctaaaatatactcatactgatctctgaaatcccagaatttaagtgggctggaggttacg

SEQ ID NO: 1866 - DNA, 383 bp, Homo sapiens
  misc_feature 1..383: note = U/M: U (0.01:0.81) in Endometrium Epithelium
  misc_feature 1..383: note = source = chr6:152132806-152133188; Gene: ESR1 (intron)
  source 1..383: mol_type = genomic DNA
cgatacatttttccttttacttagataacatttcagcccccttcctttctgatcttacttttttattaatttaaattgttactgattacgtgacactttgtgctggtctaagaatagtccagagtcacatattccctggtgaatgagcatattttcggatgaaaacggaatcacatcttcaatccccatttcattttcacctcctccatgtggcttgtacctgtttggaagaaagctcctgaaggataattgccacttattctaatctttctcacactcatttaatttggatccctggctaaagttgttatttacttttgtgattatacttagtctatgacattcataatttgggaaaattctcaggtttgagaattttggcg

SEQ ID NO: 1867 - DNA, 476 bp, Homo sapiens
  misc_feature 1..476: note = U/M: U (0.19:0.92) in Endometrium Epithelium
  misc_feature 1..476: note = source = chr6:152001630-152002105; Gene: ESR1 (Intergenic)
  source 1..476: mol_type = genomic DNA
cggccagatggccaccttctccctgtgtcctcatgtagcagaaagagatcaaagagctcttttgtttcttttatgagagcactaatcccatcacaaggccctgacctcacaacctaatcaccttccaaaggccccacttcctgtcgccatcatattgggggtttggatttcagcatatggattttggggggacacaaatctttcagtccgtaatagttggcctcctcccttgttccactagaatataagcttcaggaggtcagggatctttgtctcttttgtttacagctatgttcctaacacctacaacaatgcctggcacatggtaggtgctcaggagataattattggatgaaaaaaaatgaaccggtctcctccttaacccctgaaatcctgttcgagtcgctgggtttgccttgctccactgggatgaagtcctggcttggtgtccttgtctcccaggggtagacgccccg

SEQ ID NO: 1868 - DNA, 263 bp, Homo sapiens
  misc_feature 1..263: note = U/M: U (0.24:0.91) in Endometrium Epithelium
  misc_feature 1..263: note = source = chr3:191661320-191661582; Gene: FGF12 (Intergenic)
  source 1..263: mol_type = genomic DNA
cgtataccaattatttacattgaatgtgtcagatttcccatttctgacagtggcaactcacctatcattaaatacgagagaaaataacaaagaagccacaaagcactgaaaatccgggaaacaattgcaagactagagcctaacagaagaggagaaaataaagcagtaggttgaggctagaagttgtttttgcgctacagtggcttacttaattgaataggaatttgactttttaaaatttttcatttagaaatgttgtcccg

SEQ ID NO: 1869 - DNA, 214 bp, Homo sapiens
  misc_feature 1..214: note = U/M: U (0.22:0.83) in Endometrium Epithelium
  misc_feature 1..214: note = source = chr16:83758968-83759181; Gene: CDH13 (intron)
  source 1..214: mol_type = genomic DNA
cgtcttctccactaatctgggaaggagggtcaagtggtacctctgtctccacctcctccaggcctacacagtttgtgactgacatactgagcaccaggtctgcatcacccaccttatcacatgtgggcacaggatctctgccgggggcaagcggtatgatgtgtcctggtcacggtctggctggtgatttggttacatccagacacggaagtcg

SEQ ID NO: 1870 - DNA, 338 bp, Homo sapiens
  misc_feature 1..338: note = U/M: U (0.27:0.85) in Endometrium Epithelium
  misc_feature 1..338: note = source = chr2:69013996-69014333; Gene: ARHGAP25 (intron)
  source 1..338: mol_type = genomic DNA
cgaaggcactttgaaatttaatatcccataattgaaagggatcactattgttttcttgtccccgctaagacctttttattttaaccaactaaagaaaataccaactttgaggatttccatttgcaagcaggtccacggatgaagttagagttcaagtctcagatctgatactaactaactgcatggtccaagacctgtgtttgatactctccttttccctctcttgcttctttcttcctttttcactttcccacattctttctcttcgtctccttctccctgctttctgttcccttcaatttctcccacctttttggtccatttgagaacaccaaccg

SEQ ID NO: 1871 - DNA, 131 bp, Homo sapiens
  misc_feature 1..131: note = U/M: U (0.2:0.77) in Endometrium Epithelium
  misc_feature 1..131: note = source = chr16:87716530-87716660; Gene: JPH3 (intron)
  source 1..131: mol_type = genomic DNA
cgtctgtctagtcccttgtcttacaaagggtgggcaggtcccctgcaggactcagcagagggagagacacagtcagggagcggccagaggggtgacgtgcccggctgcccacaggtacaatggctccttcg

SEQ ID NO: 1872 - DNA, 138 bp, Homo sapiens
  misc_feature 1..138: note = U/M: U (0.34:0.82) in Endometrium Epithelium
  misc_feature 1..138: note = source = chrX:44642544-44642681; Gene: DUSP21 (Intergenic)
  source 1..138: mol_type = genomic DNA
cgtgatcctcccgccttggcctcccaaagtgctgggattacaggcatgagccaccgcacccggccagaagattcatttttgattgtaccaatggctgagagtccccaggtgatgtatccagtgatatctgcagtcacg

SEQ ID NO: 1873 - DNA, 314 bp, Homo sapiens
  misc_feature 1..314: note = U/M: U (0.09:0.91) in Endometrium Epithelium
  misc_feature 1..314: note = source = chr1:233085132-233085445; Gene: NTPCR,NTPCR (promoter-TSS,Intergenic)
  source 1..314: mol_type = genomic DNA
cgactgactacaaattaagctgtacacatgttagactgaaagagtttacaggtaaatgtggcccaaggccactgccacgtcattcgttggccggaacacttgcagtggtaaagtgagacggagaagctatttaattctttgcaagaggagatctttatacactttggtgtgaaagtaaagagggaaaactgggcgtcctatgcatggctgaggacgggaagcctgcctacaccagtggttctcaaccctagcgcacttcaggaacttcctggagtttagaaagaagaaaaaagaatacaggtgctcaagactcg

SEQ ID NO: 1874 - DNA, 87 bp, Homo sapiens
  misc_feature 1..87: note = U/M: U (0.1:0.88) in Endometrium Epithelium
  misc_feature 1..87: note = source = chr16:89770185-89770271; Gene: SPATA2L (Intergenic)
  source 1..87: mol_type = genomic DNA
cggactaacacaccctcagaacccagccactagagtgagaaggccacggccgtgtgcagagcttttggcctgcaacttcgacctgcg

SEQ ID NO: 1875 - DNA, 130 bp, Homo sapiens
  misc_feature 1..130: note = U/M: U (0.12:0.88) in Endometrium Epithelium
  misc_feature 1..130: note = source = chr11:133704360-133704489; Gene: SPATA19 (Intergenic)
  source 1..130: mol_type = genomic DNA
cggctataatactaatatgggtccctctctccccaaactccagatgcgcgcgagagacagacagtgggagcctgtgggtgactcagccattcctgtccggctgctgccctccagccccttctgcaagccg

SEQ ID NO: 1876 - DNA, 175 bp, Homo sapiens
  misc_feature 1..175: note = U/M: U (0.14:0.9) in Endometrium Epithelium
  misc_feature 1..175: note = source = chr7:42237271-42237445; Gene: GLI3 (intron)
  source 1..175: mol_type = genomic DNA
cggtcagcgggaggtacagttcgctactcacaggcctaaaagcagtgtcgggcttagctaccccagacaggagagtcagcgcctgctcatgcattgagactgaaacaatggtctgggcgtcacagcagctgtgcaaatccctgaaaattcagtccacgttaacgcaaggctctcg

SEQ ID NO: 1877 - DNA, 119 bp, Homo sapiens
  misc_feature 1..119: note = U/M: U (0.2:0.94) in Endometrium Epithelium
  misc_feature 1..119: note = source = chr4:95461312-95461430; Gene: PDLIM5 (intron)
  source 1..119: mol_type = genomic DNA
cgctctgtcgcccaggctggagtgcagtggcgcgatctcggctcattgcaagctctgcctcccgggttcacacgccattctcctgcctcagcctcctgagtagtctgccaccatgcccg

SEQ ID NO: 1878 - DNA, 119 bp, Homo sapiens
  misc_feature 1..119: note = U/M: U (0.15:0.89) in Endometrium Epithelium
  misc_feature 1..119: note = source = chr12:60384612-60384730; Gene: SLC16A7 (Intergenic)
  source 1..119: mol_type = genomic DNA
cgtgtccacggccgggcgtggtggctcacgcctgtaatcccagcactttggaaggccgaggcgggtggatcacgaggtcaggagatcgagacaatcctggctaacactgtgaaaccccg

SEQ ID NO: 1879 - DNA, 324 bp, Homo sapiens
  misc_feature 1..324: note = U/M: U (0.12:0.84) in Endometrium Epithelium
  misc_feature 1..324: note = source = chr13:114812334-114812657; Gene: RASA3 (intron)
  source 1..324: mol_type = genomic DNA
cggaacaaagggatgtctacatggaaaaaacagaatcccgacccttttctttgtgctataagtgaaaattagcttgaaacagatcatggaactaaatgtgaacgctgaaagcacatgctttccaggagaaaaccgccacaaccgtggaataggcaagactttcttagacatgacaccacaggtacaaatcatacaagaaaaaaatgtgataaactggaccatcgaaattaaaaacttctgttcttcaaagccaatggtaagaaaatgaaatacaagccacaaactggaagaaaatatttgcaaagcacacttgtgatagactcg

SEQ ID NO: 1880 - DNA, 197 bp, Homo sapiens
  misc_feature 1..197: note = U/M: U (0.23:0.94) in Endometrium Epithelium
  misc_feature 1..197: note = source = chr12:94235572-94235768; Gene: CRADD (intron)
  source 1..197: mol_type = genomic DNA
cggctgtgctggaacgggacagtctcttcgctcagcttttttttctagtcccgcacacctgcagcatatgacacttacatcagtaacagtggttcactgcagccgtgagctggggtgactggtatattaccagaccctccggaggaatgtatatagtttttaaaagtgctaccccatgaccaacccagtcaccgtcg

SEQ ID NO: 1881 - DNA, 332 bp, Homo sapiens
  misc_feature 1..332: note = U/M: U (0.21:0.91) in Endometrium Epithelium
  misc_feature 1..332: note = source = chr5:171427293-171427624; Gene: FBXW11 (intron)
  source 1..332: mol_type = genomic DNA
cgatcaaacataaatcccaatgctcaatgtcaatataaactaatcaccagtctctttctgtcaggataccaggcataaaaataggactgggtgggttctctctgtagttacagcatagatctaattacgccaaattggtagtcattgaaatagtacctcccagattttccaagacagtattgactctgcatgatttcattgtttttcccaaagatggctcattaaatgtatggctaaaagcaactaaatgttagtcttctgtaaagcctcacaaataaatacatgcgcaactcaggagaaagaccttttccacaccatcggtcttgacttcg

SEQ ID NO: 1882 - DNA, 65 bp, Homo sapiens
  misc_feature 1..65: note = U/M: U (0.21:0.88) in Endometrium Epithelium
  misc_feature 1..65: note = source = chr9:133366689-133366753; Gene: ASS1 (intron)
  source 1..65: mol_type = genomic DNA
cggaggagagagcacctggccgggctgctccggggcctccacggaggctgatcccaccgtggccg

SEQ ID NO: 1883 - DNA, 250 bp, Homo sapiens
  misc_feature 1..250: note = U/M: U (0.21:0.87) in Endometrium Epithelium
  misc_feature 1..250: note = source = chr22:33711176-33711425; Gene: LARGE (intron)
  source 1..250: mol_type = genomic DNA
cgttataagcttaaaacaaaacaatgccaagggctctatcctacaaaggtcctcacttaactgctctgcaagggagcctggatgtgaacgtgttatacaactcccgaggtgattcaatctccctggacaaggttgagaagcagtgcattggcttgtaagctacatcagggcggggctcatgtccgtactgcctggaaatgcttgatggatgtttgcttcatcaatacacatagaaggaaaagaaacagcg

SEQ ID NO: 1884 - DNA, 308 bp, Homo sapiens
  misc_feature 1..308: note = U/M: U (0.15:0.81) in Endometrium Epithelium
  misc_feature 1..308: note = source = chr9:71192444-71192751; Gene: TMEM252 (Intergenic)
  source 1..308: mol_type = genomic DNA
cggagaacaatgtatgcacagccaattgtttttctctcataaagaagaatactgattgagtggtggtagagggtggttaagggagtcagcagaaacctgcaggtaatctacctaaaatcgtgactcctcccccaccgagtttccacctgcaactatattctttctgtagaagactttggctagacaggggttggagtccactttacaggacaggctactcccagggaggaggagctgtcacaggatgggtctgttgtaaggacattaattagaccatggtgctaggggatgatggacggggaggagcg

SEQ ID NO: 1885 - DNA, 158 bp, Homo sapiens
  misc_feature 1..158: note = U/M: U (0.2:0.84) in Endometrium Epithelium
  misc_feature 1..158: note = source = chr10:134795905-134796062; Gene: LOC399829 (Intergenic)
  source 1..158: mol_type = genomic DNA
cgccagcgccccaaggctggccacgggcaggacgcagagacagacgcgtcattagagcatgggcgcggcgtgtccgtggcacgtgaggccccgggccctgcctttgctttcggtctctgtgcacgctgcctcctgacctgatggtccagttgcctgcg

SEQ ID NO: 1886 - DNA, 233 bp, Homo sapiens
  misc_feature 1..233: note = U/M: U (0.27:0.88) in Endometrium Epithelium
  misc_feature 1..233: note = source = chr9:115630973-115631205; Gene: SNX30 (exon)
  source 1..233: mol_type = genomic DNA
cgacaacgaaagggtaggtcagagcagaattgaagctgacccgaaatcggaaactcaaagctgatactgtgtgtgtatgttgtcgttccagtgcctcatggcgtgggagtcgattattccactactgcaggagaaacaagaggccaagtaaagttctttcttgggacggagactcttctacctacacagggcctggcaccctataccggaatgtccctgcagtgccagagacg

SEQ ID NO: 1887 - DNA, 275 bp, Homo sapiens
  misc_feature 1..275: note = U/M: U (0.3:0.9) in Endometrium Epithelium
  misc_feature 1..275: note = source = chr6:13880933-13881207; Gene: RNF182 (Intergenic)
  source 1..275: mol_type = genomic DNA
cgcctgtattccagctacttgggaggctgaggcaggagaatggcgtgaacctgggaggtggagcttgcagtgagccgagatcggaccactgcactccagcctgggcgacagagcgagactccgtctcaaaacaaagcaaaacaaaaactcaggaacccagcccagctctaggactcacccctgaccacaaaggcaatgttgggcatgctggtaaaggaccactagaatccagcagcccggacccctttcttacatcagtgagtgtaactaatccg

SEQ ID NO: 1888 - DNA, 237 bp, Homo sapiens
  misc_feature 1..237: note = U/M: U (0.28:0.87) in Endometrium Epithelium
  misc_feature 1..237: note = source = chr22:42108873-42109109; Gene: MEI1 (intron)
  source 1..237: mol_type = genomic DNA
cgtgatctcggctcactacaaactccacctcccagattcatgccattctcctgcctcagcctcctgagtagctgggaccacagatgcctgccaccatacctggctaatttttttgtatttttagcagagacggggtttcaccgtgttagccaggatggtctccatctcctgacctcgtgatccgcccatctcggcctcccaaagcgctgggattacatgcgtgagccaccgcgcccg

SEQ ID NO: 1889 - DNA, 79 bp, Homo sapiens
  misc_feature 1..79: note = U/M: U (0.24:0.82) in Endometrium Epithelium
  misc_feature 1..79: note = source = chr19:1334184-1334262; Gene: MUM1 (Intergenic)
  source 1..79: mol_type = genomic DNA
cgttgatttctgagctgagatgtggcgaccaggcccggagcagggctgtattcacagtcgtcgaggggtctgccggccg

SEQ ID NO: 1890 - DNA, 292 bp, Homo sapiens
  misc_feature 1..292: note = U/M: U (0.28:0.86) in Endometrium Epithelium
  misc_feature 1..292: note = source = chr10:134610571-134610862; Gene: NKX6-2 (Intergenic)
  source 1..292: mol_type = genomic DNA
cgggccctcagcctcccaacgcccctgcgcccgttctcactggcacggctcagtgtccacaccgggccagcagcgcaggaactggaggctctgcttcgtgatttccgcagtggcagatgacaggaatcaggttcctgcgggtggcagcggatgggggtgcagaactgcctttttgctgtttgcctgtttaccctctttgtgcccgcgccaaggtgggagccgctacacccagggaggcgctggagcgtgtgcggaggtcagagcctgatgccgcctcggtctctgggtgccg

SEQ ID NO: 1891 - DNA, 323 bp, Homo sapiens
  misc_feature 1..323: note = U/M: U (0.28:0.83) in Endometrium Epithelium
  misc_feature 1..323: note = source = chr9:27490795-27491117; Gene: MOB3B (intron)
  source 1..323: mol_type = genomic DNA
cgtgaaactagaatcatttttaacataataaataccatcgatgctgtaggcacaatgggtagcttaaaagagggtctgaggaaagcccagaaaagcaaattcgaaggagaaatgtaacaacaatgacacctaccagaataaaaagagtatttatcaaagccctagatagcacatcatacagccttttttttttttaattcagaaaataaaggataccaggacagaggaagatgataataatagtgataataattgcaacaaacggtcctagtgtctcatactttaaaaaaatcctcctttgtatatattatttcttcggaacg

SEQ ID NO: 1892 - DNA, 397 bp, Homo sapiens
  misc_feature 1..397: note = U/M: U (0.24:0.78) in Endometrium Epithelium
  misc_feature 1..397: note = source = chr20:41976096-41976492; Gene: SRSF6 (Intergenic)
  source 1..397: mol_type = genomic DNA
cgggcatggtggcgggtggctgtagtcccagctactcaggaggctgaggcaggagaatggcgtgaacccaggaggcagagcttgcagtgagccaagattgcgccactgcactccagcctgggtgacagagcaagactccatctcaaaaaacacaacaaaaatcaaaacaaaacaaaaaaacaccatcctgggttttgtttcggggaggtaagttcaatctccctcccctactgcaattgtcttaaatagtctttctcgcctgattaactctgtccagtacagcaatgaataaaacacggatcctgccccaaaagaatgtaaggtctgatcaagacaaatgaaaactttccgaattgtagtaaatgctgtaatcccagcactttgggggatcaaggcg

SEQ ID NO: 1893 - DNA, 21 bp, Homo sapiens
  misc_feature 1..21: note = U/M: M (0.81:0.25) in Endometrium Epithelium
  misc_feature 1..21: note = source = chr1:208132328-208132348; Gene: CD34 (Intergenic)
  source 1..21: mol_type = genomic DNA
cggggcacccgtgtgcgcgcg

SEQ ID NO: 1894 - DNA, 167 bp, Homo sapiens
  misc_feature 1..167: note = U/M: M (0.72:0.17) in Endometrium Epithelium
  misc_feature 1..167: note = source = chr2:110372837-110373003; Gene: SOWAHC (exon)
  source 1..167: mol_type = genomic DNA
cggcggaggctccgtgacgctggaccccctggagcacgcgtggatgctctctgcctccgatggcaagtgggacagcctggagggcttgctcacctgcgagcccggcctgctggtcaagcgggacttcattaccggcttcacttgcctgcactgggccgccaagcacg

SEQ ID NO: 1895 - DNA, 101 bp, Homo sapiens
  misc_feature 1..101: note = U/M: M (0.72:0.21) in Endometrium Epithelium
  misc_feature 1..101: note = source = chr1:196866430-196866530; Gene: CFHR4 (intron)
  source 1..101: mol_type = genomic DNA
cggcagcgtctagggtaggcgtctgtgagtacagacgcccaagtggacgcgtgttacaaaactcagatttgctgtctgcagacggcttgtgtgttaatccg

SEQ ID NO: 1896 - DNA, 147 bp, Homo sapiens
  misc_feature 1..147: note = U/M: M (0.68:0.18) in Endometrium Epithelium
  misc_feature 1..147: note = source = chrX:17392781-17392927; Gene: NHS (promoter-TSS)
  source 1..147: mol_type = genomic DNA
cgatattctatagagcccgtgcccaaaacagggggccacgtgatgcctgggaaggggtataaacagcactctggctgctctggccacatggagatgcgcctacgccctttgccctccccagttgtctccttgcgttcatagagcccg

SEQ ID NO: 1897 - DNA, 166 bp, Homo sapiens
  misc_feature 1..166: note = U/M: M (0.63:0.13) in Endometrium Epithelium
  misc_feature 1..166: note = source = chr3:186490115-186490280; Gene: EIF4A2 (Intergenic)
  source 1..166: mol_type = genomic DNA
cgagtttttatctattctagataccagtactttgccagatacgtggtttgcacatattttctcctctatagcttatcttttcatccttatcttaacagggtctttcaaaagccgaggttttcctgtgcgctcggaggagccatagctgccagctgggctggcggcg

SEQ ID NO: 1898 - DNA, 139 bp, Homo sapiens
  misc_feature 1..139: note = U/M: M (0.72:0.24) in Endometrium Epithelium
  misc_feature 1..139: note = source = chrX:99663193-99663331; Gene: PCDH19 (exon)
  source 1..139: mol_type = genomic DNA
cgatctgtgctgccgggaaactgggcgcattgtcgttcaggtccttgatctccacctttatcacgcagatttccattgagctggacatgacctcgagcgagatgatgcacttggggctctggcggcacagcagatcacg

SEQ ID NO: 1899 - DNA, 160 bp, Homo sapiens
  misc_feature 1..160: note = U/M: M (0.58:0.12) in Endometrium Epithelium
  misc_feature 1..160: note = source = chr3:157260711-157260870; Gene: C3orf55 (promoter-TSS)
  source 1..160: mol_type = genomic DNA
cgtggcacacgggcaaactggcgggctttggccttgggcgcggcccgcagatgcgtgcagcatgcggggctgtggagcgcttattggtttttctgtgtgaatctgggggttttcaaagaagggacaaggctggacaggaccttaaatcctgctccaggcg

SEQ ID NO: 1900 - DNA, 84 bp, Homo sapiens
  misc_feature 1..84: note = U/M: M (0.72:0.27) in Endometrium Epithelium
  misc_feature 1..84: note = source = chr10:62761559-62761642; Gene: RHOBTB1 (promoter-TSS)
  source 1..84: mol_type = genomic DNA
cggcctcgccattctccgctcagggcccgaggggccgcccttcctggaggcctccccaggacccacccacctctgggacttgcg

SEQ ID NO: 1901 - DNA, 113 bp, Homo sapiens
  misc_feature 1..113: note = U/M: M (0.6:0.18) in Endometrium Epithelium
  misc_feature 1..113: note = source = chr3:71802355-71802467; Gene: GPR27 (promoter-TSS)
  source 1..113: mol_type = genomic DNA
cgtgattactgttgagggagataatgcttgccaagctccccagcacactgccacccacatcagtgcgcacctgagtatcagcggttttaggattacgatgactattactatcg

SEQ ID NO: 1902 - DNA, 141 bp, Homo sapiens
  misc_feature 1..141: note = U/M: M (0.74:0.32) in Endometrium Epithelium
  misc_feature 1..141: note = source = chrX:117958654-117958794; Gene: ZCCHC12 (intron)
  source 1..141: mol_type = genomic DNA
cgcgctcttgtttcagagttcgtgtaagaatctgagaaataacaagggggacgggcgtggggggcactttgagaagggggtgtggttgagaccagagaccatgaggttaatgagatcttattttatttccacaaatctgcg

SEQ ID NO: 1903 - DNA, 142 bp, Homo sapiens; identical to SEQ ID NO: 400
  misc_feature 1..142: note = U/M: M (0.63:0.28) in Endometrium Epithelium
  misc_feature 1..142: note = source = chr19:49112138-49112279; Gene: FAM83E (intron)
  source 1..142: mol_type = genomic DNA

SEQ ID NO: 1904 - DNA, 66 bp, Homo sapiens
  misc_feature 1..66: note = U/M: M (0.61:0.27) in Endometrium Epithelium
  misc_feature 1..66: note = source = chr8:16801894-16801959; Gene: FGF20 (Intergenic)
  source 1..66: mol_type = genomic DNA
cggcagcgaggctgggggaggggcgcccgccattgcccaggcttgattaggtaaacaaagcagccg

SEQ ID NO: 1905 - DNA, 103 bp, Homo sapiens
  misc_feature 1..103: note = U/M: M (0.54:0.22) in Endometrium Epithelium
  misc_feature 1..103: note = source = chr7:94023466-94023568; Gene: COL1A2 (promoter-TSS)
  source 1..103: mol_type = genomic DNA
cgggtgccaagcagcctcgagcctgctccccagcccacctgccaacaaaaggcgccctccgactgcaacccagccctccacagacaggacccgccctttcccg

SEQ ID NO: 1906 - DNA, 284 bp, Homo sapiens
  misc_feature 1..284: note = U/M: M (0.86:0.14) in Endometrium Epithelium
  misc_feature 1..284: note = source = chr16:51168402-51168685; Gene: SALL1 (Intergenic)
  source 1..284: mol_type = genomic DNA
cgcagcccctggacacctttggagagggccggcgaggcgccgggcatgtgcggcagggtggcgctgtcgaagcctgcccctctcggtgggcggcagccccccggatcacttccctcagatgtccccaggccctgtccctgggcgtaaagggcgcgcagcccggggcagcccctcctcgccacgcccagcgatgggaagttgtggacgtcgtctgtgcaacggaaacagctccatctggcccgcgcagaaccagagttctggctggaactccggccttcaatccg

SEQ ID NO: 1907 - DNA, 269 bp, Homo sapiens
  misc_feature 1..269: note = U/M: M (0.82:0.13) in Endometrium Epithelium
  misc_feature 1..269: note = source = chr16:51168132-51168400; Gene: SALL1 (Intergenic)
  source 1..269: mol_type = genomic DNA
cggaaagagaagtgacttttgctccccttaactcactttcagaaaccgctggaaggtgggaggttagtgatgagagggaaagggaacacagcgcccccgctcccctctccccactgcctgcctcttggaaatggacgcgcagcccaaggtggtgcagggcggtgaccttcgcgcccggcccggagtgcgggagccccggggacttggcggcggcggccattggagagcggggtccagctgctggcagacgctcggtggaaagtgtcgcg

SEQ ID NO: 1908 - DNA, 276 bp, Homo sapiens
  misc_feature 1..276: note = U/M: M (0.69:0.05) in Endometrium Epithelium
  misc_feature 1..276: note = source = chr4:106066999-106067274; Gene: TET2,TET2 (promoter-TSS,intron)
  source 1..276: mol_type = genomic DNA
cgcccccttctactcagcccacgtggctaaagtaaacagaaggtgggccggggcggggagaaacagaactcggtcaatttcccagtttgtcgggtctttaaaaatacaggcccctaaagcactaagggcatgccctcggtgaaacaggggagcgcttctgctgaatgagattaaagcgacagaaaagggaaaggagagcgcgggcaacgggatctaaagggagatagagacgcgggcctctgagggtaaggtgggcgcaagcggaggtgtggtgcg

SEQ ID NO: 1909 - DNA, 85 bp, Homo sapiens
  misc_feature 1..85: note = U/M: M (0.73:0.1) in Endometrium Epithelium
  misc_feature 1..85: note = source = chr5:138923135-138923219; Gene: UBE2D2 (Intergenic)
  source 1..85: mol_type = genomic DNA
cggcgacgacacgggggaccggacggagcctcgggccgccagggaggggcctggctgcagaggcagctttctcactagcgactcg

SEQ ID NO: 1910 - DNA, 199 bp, Homo sapiens
  misc_feature 1..199: note = U/M: M (0.74:0.13) in Endometrium Epithelium
  misc_feature 1..199: note = source = chr12:130647890-130648088; Gene: FZD10 (exon)
  source 1..199: mol_type = genomic DNA
cggaaactccccaacaagaacgaccccaactacctgtgcatggaggcgcccaacaacggctcggacgagcccacccggggctcgggcctgttcccgccgctgttccggccgcagcggccccacagcgcgcaggagcacccgctgaaggacgggggccccgggcgcggcggctgcgacaacccgggcaagttccaccacg

SEQ ID NO: 1911 - DNA, 297 bp, Homo sapiens
  misc_feature 1..297: note = U/M: M (0.77:0.16) in Endometrium Epithelium
  misc_feature 1..297: note = source = chr20:9489269-9489565; Gene: LAMP5 (Intergenic)
  source 1..297: mol_type = genomic DNA
cgctaccaggaactttcgtcgccctttaaaattgtcagatagacaagtaaaaacagtaactaactaagggaacaatggactcttgtgacatgtgtaactcttccaggtaccccaacactaaagaccccgtggttcctgtcgccatggcctgaacgtactcaactccagccccggggctgacctctctccctgagctttggagcgggtttggacctagccgttgcaagtaggcatgacttttatcacccatcgctatacccagagcagctgctcgaatgtgccaaggagcccaactcg

SEQ ID NO: 1912 - DNA, 356 bp, Homo sapiens
  misc_feature 1..356: note = U/M: M (0.63:0.03) in Endometrium Epithelium
  misc_feature 1..356: note = source = chr14:105512062-105512417; Gene: GPR132 (Intergenic)
  source 1..356: mol_type = genomic DNA
cgaaggttccgcggtggcggggacactgctccggctccgctcccgcccgcccgagcgctcggatggggccgcctctgcactgcgtggccacaggcgcggcccggctgcccacgggcgccctttgcagctgctgccccctggcggccgcgggcggctactagcgggaaagcgaaacccgcccggtccattcaagccccgctgcctggcgccctctagggtcgttcttgggaacgggcggacctttcgtcaacactttgcctgcaagatcccccattgggggaaccgaggaggaagttaaaggaagatgtgtgtttttgagcgctgctttgtgccaggctcatcttaggtgtgggacg

SEQ ID NO: 1913 - DNA, 256 bp, Homo sapiens
  misc_feature 1..256: note = U/M: M (0.68:0.09) in Endometrium Epithelium
  misc_feature 1..256: note = source = chr20:9488976-9489231; Gene: LAMP5 (Intergenic)
  source 1..256: mol_type = genomic DNA
cgttggggctcttcgggggaatttccctgggcacggatactgtgctggcggtttagaaaagaaaaagaaaaagaagcgaagcctctgtaacctggtctcctccctctcctcggtttaataccctgcctcccctactagtctccaggcttttctctggacaggggagggacccgagaagcccgcggccagtgatcgccagggtctgtctcgtcgcccatcctccccgccccagagcaaggtcggcagaggcttcccg

SEQ ID NO: 1914 - DNA, 245 bp, Homo sapiens
  misc_feature 1..245: note = U/M: M (0.64:0.08) in Endometrium Epithelium
  misc_feature 1..245: note = source = chr10:8097552-8097796; Gene: GATA3 (exon)
  source 1..245: mol_type = genomic DNA
cggaccgccctccctccccgcgcgcgggttccgggcccggcgagagggcgcgagcacagccgaggccatggaggtgacggcggaccagccgcgctgggtgagccaccaccaccccgccgtgctcaacgggcagcacccggacacgcaccacccgggcctcagccactcctacatggacgcggcgcagtacccgctgccggaggaggtggatgtgctttttaacatcgacggtcaaggcaaccacg

SEQ ID NO: 1915 - DNA, 220 bp, Homo sapiens
  misc_feature 1..220: note = U/M: M (0.63:0.1) in Endometrium Epithelium
  misc_feature 1..220: note = source = chr2:54798129-54798348; Gene: SPTBN1 (intron)
  source 1..220: mol_type = genomic DNA
cgtttattcctataaaggtttaaacgacttgctgtacaattcagtcttgcaatgacagagagattacacactatctgcaaacaactgccaagcagatgaaatcctggctgtgggaagtctgcggtgaagagtggtgggggtggtcaggagagcagtggaagggaagtggctcagaacattgtagtggtggtttggcgtgcctgtcaagggctgtgggacg

SEQ ID NO: 1916 - DNA, 183 bp, Homo sapiens
  misc_feature 1..183: note = U/M: M (0.56:0.15) in Endometrium Epithelium
  misc_feature 1..183: note = source = chr10:102473118-102473300; Gene: PAX2 (Intergenic)
  source 1..183: mol_type = genomic DNA
cgccccaggcctccccagcctccgtacccaggaggcagccagcttagcagggtaggcatgtgggtggcccaccagctcctggaatggagcgtactccgtttctggggaggttccccgcgtcctgcctggagtctagaagggagcggggaagtgaccagcactagattagaggcgggaactccg

SEQ ID NO: 1917 - DNA, 152 bp, Homo sapiens
  misc_feature 1..152: note = U/M: M (0.6:0.24) in Endometrium Epithelium
  misc_feature 1..152: note = source = chrX:99663395-99663546; Gene: PCDH19 (exon)
  source 1..152: mol_type = genomic DNA
cgagttggacaccacgcgaaaggctgaagcctgccgggggtccagcgcgaagcccgcctctcgcgcgtctttggccacgttggcaatcaccgtcccggcgcgctgctcctcttctaccgagtacttgagattaatgagggcggcagcctgcg

SEQ ID NO: 1918 - DNA, 143 bp, Homo sapiens
  misc_feature 1..143: note = U/M: U (0.02:0.91) in Fallopian Epithelium
  misc_feature 1..143: note = source = chr1:172579244-172579386; Gene: SUCO (exon)
  source 1..143: mol_type = genomic DNA
cgaagacgatctaaagtccaagaccaaggaaaattgataaaaactctaatacagactaagtcgggatcattgccgagcctgcatgacataatcaaaggaaacaaagagatcaccgtgggaacatttggtgttacagcagtctc

SEQ ID NO: 1919 - DNA, 165 bp, Homo sapiens
  misc_feature 1..165: note = U/M: U (0.05:0.94) in Fallopian Epithelium
  misc_feature 1..165: note = source = chr17:63004755-63004919; Gene: AMZ2P1,GNA13 (Intergenic,TTS)
  source 1..165: mol_type = genomic DNA
cgagcgaatgtaatgtcgtgtgctggatggatcctggaacacaagtaaggcattaggggaaaactaaggaaacaagaacaaagcatgggctttagtgaataatgttatcagtattggttcattaattatgacaaatgtaccaaagtaatgcaaggcggtaactac

SEQ ID NO: 1920 - DNA, 162 bp, Homo sapiens
  misc_feature 1..162: note = U/M: U (0.04:0.92) in Fallopian Epithelium
  misc_feature 1..162: note = source = chr4:22604364-22604525; Gene: GPR125 (Intergenic)
  source 1..162: mol_type = genomic DNA
cgagaccacccttaaacatcagtagactgggagctgtacgtggatgggagcagcttcgtcaagccctgcaaagtgactctgaagaagatgacaagccctgctccagtcacacccggaagctgactgctccacacacggccgaaacatgaggaaactcatcgc

SEQ ID NO: 1921 - DNA, 482 bp, Homo sapiens
  misc_feature 1..482: note = U/M: U (0.06:0.94) in Fallopian Epithelium
  misc_feature 1..482: note = source = chr17:12902144-12902625; Gene: ELAC2 (intron)
  source 1..482: mol_type = genomic DNA
cgtcttcacaagcgtccacttcctacttgcgctcctctgccacgttatgatgcagcatggaagccttcactggaagctagggccgtgaccttcaattctcagcccgcagaaccgtgaactaaatacacctcttttcttgataaattacccagtctcacatattcttttataataacaaaacacagactaagacagatgggtaagcaacatagttctatccagcttcccaggagggggactggcaggcccctggcaaccgctctgaaacaaaggacttcgcaccagtgtgggacccacaggctatctgtcaccaaaaggctaagaagaacaaataaattctccagtcctttcttcaaaagaattgctgtaattcttttacatttaaaaaatgacatttctttatgctgggaactgtcatttatttcaagagaacagtgtgtgccttgcatccagctctcactgcaagaccatgcacttcggtc

SEQ ID NO: 1922 - DNA, 326 bp, Homo sapiens
  misc_feature 1..326: note = U/M: U (0.03:0.9) in Fallopian Epithelium
  misc_feature 1..326: note = source = chr6:167457159-167457484; Gene: FGFR1OP (Intergenic)
  source 1..326: mol_type = genomic DNA
cggtgcccggcctagtcttcctgctctaggaagggacgtgtttggggaggaaatccagggcagctacctttgtgagttgtcctaatgctgcgttcagagttccacacgttcaacaagcatctgacatttaaggaaagtgaatgtatgtcatgaaagacagatgaacaaagaactgatcttgaagaaaatgtaatcaggaaacgagataattcaagaacaaaaacctgtgaaggactgaatgtgtcccccaaaatgtgtatgtcgaaacctaatcccacataggatggaattaggtagggcctctggaagttgatgagatcattagc

SEQ ID NO: 1923 - DNA, 208 bp, Homo sapiens
  misc_feature 1..208: note = U/M: U (0.03:0.89) in Fallopian Epithelium
  misc_feature 1..208: note = source = chr1:111967898-111968105; Gene: OVGP1 (intron)
  source 1..208: mol_type = genomic DNA
cgctagctttgctgtccgcatggccaagctgccttccccctctgtcttcacgtctaaccagcctgctccaccctcccagggagaagagaataacagcaaagtctcaccttgaggtgccaaagttccacccgccgatggacagtagtgttttcagctctctgttcctatgatgtgagagagagggttgatgagctgggttcttcactcc

SEQ ID NO: 1924 - DNA, 227 bp, Homo sapiens
  misc_feature 1..227: note = U/M: U (0.02:0.88) in Fallopian Epithelium
  misc_feature 1..227: note = source = chr8:17350396-17350622; Gene: SLC7A2 (Intergenic)
  source 1..227: mol_type = genomic DNA
cgtctcaaaaaaaaaaaaaaaaaaaaaagcataacaacctagattgtgaagattgatggagttaagaatgattcaataatttaatcttaagagtgccttagttagcaagcaagacaaaaggttattcaggatagtaggaggaaaactaagagaccgtggaagccaaggaggagatagtttcgagaaagaaagaaagcaggagcgagtttgaggcacaagagaactgc

SEQ ID NO: 1925 - DNA, 82 bp, Homo sapiens
  misc_feature 1..82: note = U/M: U (0.01:0.86) in Fallopian Epithelium
  misc_feature 1..82: note = source = chr10:88403481-88403562; Gene: OPN4 (Intergenic)
  source 1..82: mol_type = genomic DNA
cgccagctctgatgaggtcagacgagtaaaagccactcatgctggtactaaatctccgaatgccagcaaagcaacgaggatc

SEQ ID NO: 1926 - DNA, 464 bp, Homo sapiens
  misc_feature 1..464: note = U/M: U (0.09:0.93) in Fallopian Epithelium
  misc_feature 1..464: note = source = chr4:22603266-22603729; Gene: GPR125 (Intergenic)
  source 1..464: mol_type = genomic DNA
cgtggtagctcttttccaggattctacagcctggagtaataagtcatgccaagctctctctgctatatcccgaagtccctgcgggtcagccactgagggccatccagcttccgtctcccaacactaagttcacttagtgtctctcatggcagggaggagacttagcattccttggagacctgaagggatgcagtgagcttaagaattttcaagagcttatcaaccagtcagcccttgttcatccctgagcggatgtgtggtggtattgcggtggacctttactgggcaatctgctgaataactagggttgcacttgtgctttagtccatttggctatccctttcaccctggcatttcatcaaccagaggaaggaaaaaaaaaaaataataagacatcgtaaagcgagagaagcctcttataggtctttcaactctcacatctatttagatgcaattggagcccc

SEQ ID NO: 1927 - DNA, 287 bp, Homo sapiens
  misc_feature 1..287: note = U/M: U (0.08:0.91) in Fallopian Epithelium
  misc_feature 1..287: note = source = chr8:145249327-145249613; Gene: MROH1 (intron)
  source 1..287: mol_type = genomic DNA
cgaaccctcagtctgcatcataactgatgggaagtgttaggcaattccctgtaaggtcaataacaggaaggacctgcctctcaatgcggatcgggtcctctgctggttctatagggaaacaaaagaaccaggagggaagggaagatggtcattattcatcacctgtccacctttctggccaagctattaggactaatcagaagttcctgcaaggcgtggtggctcacatctgtaatcccagcactttgggaggctgaggaggaagaactgcttgagcccaggaattc

SEQ ID NO: 1928 - DNA, 275 bp, Homo sapiens
  misc_feature 1..275: note = U/M: U (0.04:0.85) in Fallopian Epithelium
  misc_feature 1..275: note = source = chr21:16915668-16915942; Gene: USP25 (Intergenic)
  source 1..275: mol_type = genomic DNA
cgacagtgtgttttaaaggaggaattaagaaatagggaggtggaaaggcagagcaagataacgaatagaagcctcccccaattgttcttcccataagaacaccaaatgtgacaacactctacacacggaaaaagcacctacataagaaccaacaatcaggagagagatcacagtacctagttttaacttcatattgccgaaagaggcactgaagaaggtggaaaagacagtcttgaatggctgaaccacctctctcccatcccccagcaatggcc

SEQ ID NO: 1929 - DNA, 192 bp, Homo sapiens
  misc_feature 1..192: note = U/M: U (0.12:0.92) in Fallopian Epithelium
  misc_feature 1..192: note = source = chr1:111985459-111985650; Gene: WDR77 (intron)
  source 1..192: mol_type = genomic DNA
cgagcttgtaaaagttaaccattctgagcatcagttttctcttttgcaaagtaggaataataagtcactggatcattgtgaaaattaagttaatgaacgaagcagttattattttaaccacaaactatgtcaccatatacacagcctcatgaccacgatagcgctacacctacccacagtaggacagaattc

SEQ ID NO: 1930 - DNA, 329 bp, Homo sapiens
  misc_feature 1..329: note = U/M: U (0.06:0.85) in Fallopian Epithelium
  misc_feature 1..329: note = source = chr2:148404745-148405073; Gene: ACVR2A (Intergenic)
  source 1..329: mol_type = genomic DNA
cgcacagcgaccgtatttcgaaattcaagtcttttaaaaactggttagaagaatgagaacagctgctgcaaagaagggagggaaactgctgctaacagtaaaccaagctacagagtaaaactgagaattgtgtccttattgtcaaggtgaggataaaaagcaacaaagggctgaagccaaaagaattctctcaccagaaactcaatggcagactttaaaagctaagcccctggcaagccttaggctgggggagatggagacgggaagagaacaaaataaagaggcaaggtagaaaaagaggcgagtgttggaagagagagaaaaaccac

SEQ ID NO: 1931 - DNA, 387 bp, Homo sapiens
  misc_feature 1..387: note = U/M: U (0.08:0.87) in Fallopian Epithelium
  misc_feature 1..387: note = source = chr3:178101164-178101550; Gene: KCNMB2-IT1 (Intergenic)
  source 1..387: mol_type = genomic DNA
cgatatcctgttcctatgcgtgggatgcacaattgagagaaagagggagagaggcagctgatcttccctagtgcccctagcatagtagtcgggaggtcaggcaatttcctaaactcaatgtactatcatagcaataactcaatccataactccttccttattattctatatttcgcactagaaaaaaaatggcacttctctggactggctatattgtttacaggaactaataccctgttcttagggtcttcccaatgcaaaattggaaaaagtatagaaaaacattctcctggtattttattactaaatctttagatatacatcttaatttttggatgcttctatttctctcacagccccagaaatccagcgtttcttaggactttc

SEQ ID NO: 1932 - DNA, 222 bp, Homo sapiens
  misc_feature 1..222: note = U/M: U (0.12:0.9) in Fallopian Epithelium
  misc_feature 1..222: note = source = chr13:20513194-20513415; Gene: ZMYM2 (Intergenic)
  source 1..222: mol_type = genomic DNA
cgctctgtcacccagggtggagtgcaatggcgtgatctcggctcactgcaacctccgcctcctgggttcaagtgattctcgtgcctcaggctcccgagtaactgggattacaggtgcctgccaccacgcccagctaatttttgtatttttagtagagacagggtttcaccatgttgcccaggctggtcttgaactcctgacctcaagtgatccacccacctc

SEQ ID NO: 1933 - DNA, 376 bp, Homo sapiens
  misc_feature 1..376: note = U/M: U (0.13:0.91) in Fallopian Epithelium
  misc_feature 1..376: note = source = chr8:64032053-64032428; Gene: TTPA (Intergenic)
  source 1..376: mol_type = genomic DNA
cgccccagatctaaaggaccaagagaacttctcattatccattcatcaaagagtagacatttgggcatgatgcctggaaataaaccttatatactaatacctcacaaactcaatagggaggatgaatatcttatcatcattcacagtcggcgaagatttctacagaatttgtgaataatagcttaggagaaacaagaagcatttctttcagatccatgaccactcctaaagagtcagtgagtcagtgccagggaaggcggaagagaactactatatgctatttagcaaattttttttttttgagacagagtctcgctctgttgcccaggctggagtgcagtggtgcgatctcggctcactgcaagctccgcctccc

SEQ ID NO: 1934 - DNA, 238 bp, Homo sapiens
  misc_feature 1..238: note = U/M: U (0.11:0.87) in Fallopian Epithelium
  misc_feature 1..238: note = source = chr3:9312551-9312788; Gene: SRGAP3 (Intergenic)
  source 1..238: mol_type = genomic DNA
cggaaatgccttacctctggtaccaataaccgctgaagacaaaagcagaagactggtacagcatgtatgtgtatgctgtgctgcccagatccccctgcagaggatttttgttttgtttttctttcattgcctgggcttttggactaaggctcacactccctcaaatgcctaaagtgttggctatcagccgggcccagtggctcgtgactgtaatcccaacactttgggaggccaaggc

SEQ ID NO: 1935 - DNA, 239 bp, Homo sapiens
  misc_feature 1..239: note = U/M: U (0.1:0.86) in Fallopian Epithelium
  misc_feature 1..239: note = source = chr16:83997324-83997562; Gene: OSGIN1 (intron)
  source 1..239: mol_type = genomic DNA
cggcaggtggcacaggattctcccgtatgggagttcatcttgaaccatgagcccacaagctgggtagattaactcatctaaggtcacacagtgagatacaggaaggtgctagaatgatgcaaagcctgtcattcaaccgccacaagaatgggcctgcagtcactgcccctggaaagagtgacaatccaaacaacaacaacaataatagaatacctcctgctgctgcgtgggctgggaac

SEQ ID NO: 1936 - DNA, 104 bp, Homo sapiens
  misc_feature 1..104: note = U/M: U (0.15:0.9) in Fallopian Epithelium
  misc_feature 1..104: note = source = chr7:123510738-123510841; Gene: HYAL4 (intron)
  source 1..104: mol_type = genomic DNA
cgggaggcagaggttgcagtgagccgagattgtgccactgcactccagcctgggcgacagagcgaaactccatctcaaaaaaaaaaaaaaagaaagaaagttac

SEQ ID NO: 1937 - DNA, 497 bp, Homo sapiens
  misc_feature 1..497: note = U/M: U (0.25:0.93) in Fallopian Epithelium
  misc_feature 1..497: note = source = chr2:173721702-173722198; Gene: RAPGEF4 (intron)
  source 1..497: mol_type = genomic DNA
cgcccgcctttatttctgcctgttctcagtcattctccactgccttcagataattttattattgtttttaaatattttatccaggacttataattgttatctgtgggagagctggcctgaattgaattacttttgtgaccagaagcagaactctattatcccactttacaggtgaatttaaaatacgcgcgtgtgcgcgcgcacacacacacacacacacacacacacagagcgagtcttagtactttgcccaaggtcatacagctggtaagtggcagaaccatgatttgaagacaggcaaatccaagtcttaggatttcttccaatgggagcttttaatggtgtgaattttcaggacaatggaaggaagtctacaaaatattctggaacgtatagggccttatggtgtcaattccttatgcaccagactcatcccaagatctcattactcagtggatacttcatatgtctttcggtgtatacattatttgagacgc

SEQ ID NO: 1938 - DNA, 161 bp, Homo sapiens
  misc_feature 1..161: note = U/M: U (0.05:0.94) in Fallopian Epithelium
  misc_feature 1..161: note = source = chr2:101548181-101548341; Gene: NPAS2 (intron)
  source 1..161: mol_type = genomic DNA
cgtgatctgcccatctcggcctcccaaactgctgggattacaggcgtgagccaccgcgcccggccataactcagctctttacatcttttgttcatgagtagctgctgcattcactaagattcattcattcaaatggcagaatgcattcctcatgcgccacg

SEQ ID NO: 1939 - DNA, 256 bp, Homo sapiens
  misc_feature 1..256: note = U/M: U (0.04:0.93) in Fallopian Epithelium
  misc_feature 1..256: note = source = chr3:195237882-195238137; Gene: MIR5692C1 (Intergenic)
  source 1..256: mol_type = genomic DNA
cgggcacagtggttcatgcctgtaatcccagcactttgggaggtggatcacttgaggccagaagttcaagaccagcctggccaacatggcaaaacgccatctctactaaaaatacaaaaattagctgggcagtggtgcgtgcctgtagtcccagctacgcgggaggcttgaggtgggaggatcacttgaacctgggaggcagaggttgcagtgagctgaaatcacaccattgtgctctagcctgggcgacagagcg

SEQ ID NO: 1940 - DNA, 88 bp, Homo sapiens
  misc_feature 1..88: note = U/M: U (0.05:0.92) in Fallopian Epithelium
  misc_feature 1..88: note = source = chr10:27488102-27488189; Gene: ACBD5 (intron)
  source 1..88: mol_type = genomic DNA
cgatgaacccccaatctttttttcttttttttttgagatggagtctcgctctgtcgcccaggctggagtgcagtggcgcgcgacctcg

SEQ ID NO: 1941 - DNA, 172 bp, Homo sapiens
  misc_feature 1..172: note = U/M: U (0.01:0.87) in Fallopian Epithelium
  misc_feature 1..172: note = source = chr2:5640117-5640288; Gene: SOX11 (Intergenic)
  source 1..172: mol_type = genomic DNA
cgatattcttttctgtttaaccgtcacccaggagggagtgtagaatagtgattgccagccagactgccttcttgtgaattataacttcaatttttactgctgcttagccttgctgtgcctcatatgctcatttgtaaagttaaggttaaaatatgtctcgaacacggggccg

SEQ ID NO: 1942 - DNA, 291 bp, Homo sapiens
  misc_feature 1..291: note = U/M: U (0.04:0.89) in Fallopian Epithelium
  misc_feature 1..291: note = source = chr6:155328330-155328620; Gene: TIAM2 (Intergenic)
  source 1..291: mol_type = genomic DNA
cgtctcttttccctgcatgatgcccctttgcataggcttgcataggattgtgaggatctaaccatgttagttaacttgccagagatgggcaagagatttgtaggccagtcacatataaatgcagcacaggttttcttatttcagggtgatccatggtttgacaggaaccatttttctttttctttctttctttctttttttttttttgagagggagtctcgctctgtcgcccaggctggagtacagtggcacaatctcggctcactgcaagctccgcctcccgggttcacg

SEQ ID NO: 1943 - DNA, 484 bp, Homo sapiens
  misc_feature 1..484: note = U/M: U (0.04:0.89) in Fallopian Epithelium
  misc_feature 1..484: note = source = chr5:61694414-61694897; Gene: DIMT1 (exon)
  source 1..484: mol_type = genomic DNA
cgggaaagacacatcagaggaacagttagtatgatgttcctgaaaatgtgaggacatacctgataaggcaaatttgccacacaagtatcaaagaatggcaaatctgttttcagcacatcacccaccagtacttgaagtttgctggccacaggcctgatgagaaaagaagaaatgtaaaaagaatgttgtttcatgagattgaaatgcactttaattctattatgtatactcacgtgccctgaactcttttgtgaagttcagctactagccttgggtcaagttcacaagcaacaacctaatttaaaaaaaataaaaattatttaggttaattatggaatataaatcttttattgttatcccaacaggaactcttacatgatttatgtgacaaacttcttctcccatttctaccatcaatattcctttaattatactcgcatacttcaaacaacaaacaaaaatgggccgggtgcagtggctcacg

SEQ ID NO: 1944 - DNA, 84 bp, Homo sapiens
  misc_feature 1..84: note = U/M: U (0.04:0.88) in Fallopian Epithelium
  misc_feature 1..84: note = source = chr17:60790869-60790952; Gene: MARCH10 (intron)
  source 1..84: mol_type = genomic DNA
cgccggctcggttcctttatgtgcgccctttgcagagctggtgatgctcgacaaaggggctcagcccaccaatcagagcaggcg

SEQ ID NO: 1945 - DNA, 96 bp, Homo sapiens
  misc_feature 1..96: note = U/M: U (0.08:0.92) in Fallopian Epithelium
  misc_feature 1..96: note = source = chr3:185745309-185745404; Gene: LOC344887 (Intergenic)
  source 1..96: mol_type = genomic DNA
cgctctgtcgcccaggctggagtgcagtggcgcaatcttggctcactgcaagctccgcctcccgggttcacgccattctcctgcctcagcctcccg

SEQ ID NO: 1946 - DNA, 182 bp, Homo sapiens
  misc_feature 1..182: note = U/M: U (0.09:0.92) in Fallopian Epithelium
  misc_feature 1..182: note = source = chr9:135486165-135486346; Gene: DDX31 (intron)
  source 1..182: mol_type = genomic DNA
cgtgaagtaactaaaaatatggattttcctccccctagtgtagttgagatcgaggctcggagacgttaagaaaagggaaggccccaaactcacatcagaacggagccgacttcaatccaacttccctgactgcaagaccaatggtcacttccctccactgggtggtccctctgtctttgccg

SEQ ID NO: 1947 - DNA, 260 bp, Homo sapiens
  misc_feature 1..260: note = U/M: U (0.02:0.85) in Fallopian Epithelium
  misc_feature 1..260: note = source = chr11:71923939-71924198; Gene: FOLR2 (Intergenic)
  source 1..260: mol_type = genomic DNA
cgtatcgaactcctgagctcaagtgatcctcccacctctgcctctcaaagtgctgggaggacagccatgaactaccgcacctggctcaaatgtttaaagaacaattcataccaatcctttacaaactctttcaaaaaataaaaggaggaaatatttctcaactcattctgtaagttgtattatatgagccagtattaccttgttataaaatcggacaaagatatcacaagaaaagaaaacatagatcaatattccttacg

SEQ ID NO: 1948 - DNA, 179 bp, Homo sapiens
  misc_feature 1..179: note = U/M: U (0.07:0.89) in Fallopian Epithelium
  misc_feature 1..179: note = source = chr4:57633113-57633291; Gene: SPINK2 (Intergenic)
  source 1..179: mol_type = genomic DNA
cgtgacaaatggatattcacatgcaaaagaattaagttggggccgggtgcggtggctcacgcctgtaatcccagcactttgggaggccgaggcgggcggatcacaatgtcaggagatcaagaccatcctggctaacatggtgaaatcctgtctctactaaaaatacaaaaacttagccg

SEQ ID NO: 1949 - DNA, 221 bp, Homo sapiens
  misc_feature 1..221: note = U/M: U (0.01:0.83) in Fallopian Epithelium
  misc_feature 1..221: note = source = chr4:145268668-145268888; Gene: GYPA (Intergenic)
  source 1..221: mol_type = genomic DNA
cgtttatcactcacagccagtcttgaaatggtgttagccctcctacggtgtgcaccacaggaaactgaggcaattagggagatctttgtcctccagtagggtctttcattccatacgaatgcaagggaaaaagttgaatccattgtagtcaattacaaaactaaaatgttctgtttcattatttagttagttaatacgtctctatgttgtacaaagcaccg

SEQ ID NO: 1950 - DNA, 453 bp, Homo sapiens
  misc_feature 1..453: note = U/M: U (0.07:0.89) in Fallopian Epithelium
  misc_feature 1..453: note = source = chr1:244476799-244477251; Gene: C1orf100 (Intergenic)
  source 1..453: mol_type = genomic DNA
cgatgacatagcatgtacatcatgagccagagaatgtggtccaggagcttacagcacagcagcttggcctggcggcaggtggcccggggccctgaagcttggagagggtctctgtaggtgcactacgggaggcttgttttcctatctgtatctcaactgcttatttccaagttgcaacactccccttcctggcgggctatgaaaggactttgggtgtgtggctctcccaggctcccttccctccttatgacagtgctggaaaaactggccagtatggctattattctggatgatttttttaaatgacaataattgatgctgatgggggagtttcaaagactctccccttttcttcttaattgcaatagctcttaccacaaaggccaaggaatcaacgtagattgattctacattaattgcatattcaggttctggggcaatgcccaccagacg

SEQ ID NO: 1951 - DNA, 217 bp, Homo sapiens
  misc_feature 1..217: note = U/M: U (0.1:0.91) in Fallopian Epithelium
  misc_feature 1..217: note = source = chr12:110801079-110801295; Gene: ANAPC7 (Intergenic)
  source 1..217: mol_type = genomic DNA
cgaggcaggcggatcacaaggtgaggagttcaagaccaacctggccaacagggtgaaaccctgtctctactaaaaatacaaaaaattagctgggcgtggtggcgggcacttataatcccagctacgtgggaggctgaggcagaagaattgtttgaacccaggaagcggagcttgcagtgagccgagattgtgccattgcactccagcctgggtgacg

SEQ ID NO: 1952 - DNA, 230 bp, Homo sapiens
  misc_feature 1..230: note = U/M: U (0.03:0.83) in Fallopian Epithelium
  misc_feature 1..230: note = source = chr2:1545713-1545942; Gene: TPO (intron)
  source 1..230: mol_type = genomic DNA
cgtctttgcacctggctcccacgcatggaaccaaaaggacctggcctggaagtgaggctctttgtgaatttaaatagcttttccagccacagcaagggcagtgccagcaagtcccctgggcccctaattagtctgactgacaccaggggcaaggccaggcgttctgttcatctgtggtcgcagggacctgtgtgctcagcacggcttcttcctgaaggaccctgcctgcg

SEQ ID NO: 1953 - DNA, 271 bp, Homo sapiens
  misc_feature 1..271: note = U/M: U (0.08:0.88) in Fallopian Epithelium
  misc_feature 1..271: note = source = chr7:29350848-29351118; Gene: CHN2 (intron)
  source 1..271: mol_type = genomic DNA
cgttccattgtccttcctgtcaccgacaacctggcaaatgtgatccatcttaagaggttcaagggccacgtgttctcttggagtctttcctggcagtccccacttttgtctccagaactgatccttctttatgcctcactctttgttctgaatcctctcacagaaccttttaatctctactgcgcttcctgacacttactttgtgccaggtactttatatttctcccgtatcctggctgtatccctgtgaggatcatagccccacttcacg

SEQ ID NO: 1954 - DNA, 337 bp, Homo sapiens
  misc_feature 1..337: note = U/M: U (0.05:0.85) in Fallopian Epithelium
  misc_feature 1..337: note = source = chr5:176810230-176810566; Gene: SLC34A1 (Intergenic)
  source 1..337: mol_type = genomic DNA
cgatagctaactgcctcccccactaaacccagagctccgtgacagcagggaaggcaaacttcaaaaatatcaaaaagcacaaccttattaaaaaggagaaacacccccagttcaccaggagcaccttggattcagctgctcctgccaagggtctgaactgcacgggggaatggagagaaacaggtcacgtgggccggggtctctgggcccgctgtgggggtgtcagtttgctcataggtggagacactcgatgtgacattaacagcaccttcaagcccaaggacccagagattctgacacaagaactgagaactgattgcatttccgtgactcagcg

SEQ ID NO: 1955 - DNA, 431 bp, Homo sapiens
  misc_feature 1..431: note = U/M: U (0.08:0.88) in Fallopian Epithelium
  misc_feature 1..431: note = source = chr18:19717464-19717894; Gene: GATA6 (Intergenic)
  source 1..431: mol_type = genomic DNA
cgtggtggcactcctctgtagtcccagctactcagaagtctgaggcaggagaatcacttgaacccggcttgaacccgggaggtggaggttgcagtgagcagagatcatgccactgcactccagcctgggtgacaaactgagactctgtctcaaaaaaaaaaaaaaagtaaaatgtttttataactattaaaaatgtgaaacaattgaaatatagggaatctaagaatacttccttttctcactgacaaatgtaatgtcaaaattcatgtgataaggccaatagattctttattttattttttttagacgcattctttctctgttgcccagactggagtacaatggcacaatcttggctcactgcaacctccacctcccaggtttaagcgattcttctgccttagcctcctgagtaactgggattataggcg

SEQ ID NO: 1956 - DNA, 438 bp, Homo sapiens
  misc_feature 1..438: note = U/M: U (0.07:0.87) in Fallopian Epithelium
  misc_feature 1..438: note = source = chr11:97778616-97779053; Gene: JRKL-AS1 (Intergenic)
  source 1..438: mol_type = genomic DNA
cgtacaaagaggcatattgcgattcttttctaagatgttattccaatgactttccagctgaatatttggaggcaatttttcttaagaggaaatgttgataagctgtcacataagtccctctaatttataatttaacgtaagatatactacttaatcaaaatttcagtctttcacagcacgttaacaatgttatcgggaaaactggactatgactcttaaaggagttagagagtctatacaattctgacagggagagccaagatcaaggagtggatttcttcaggaaacaattagtactaaacaacatgggaatagaagtaatttaaaatgttcaagacatattaaatgtgcgactgtggctccaaattgccatttagtatgcttgtattataggatatagaaactactgcaccccatctttgcaaagttaagctgacg

SEQ ID NO: 1957 - DNA, 67 bp, Homo sapiens
  misc_feature 1..67: note = U/M: U (0.06:0.85) in Fallopian Epithelium
  misc_feature 1..67: note = source = chr11:69013717-69013783; Gene: MYEOV (Intergenic)
  source 1..67: mol_type = genomic DNA
cgtgacgcttccctacaccccagcccaacaggtggcgggtcttttttctgccgcgcagctcccgccg

SEQ ID NO: 1958 - DNA, 190 bp, Homo sapiens
  misc_feature 1..190: note = U/M: U (0.1:0.89) in Fallopian Epithelium
  misc_feature 1..190: note = source = chr8:24133807-24133996; Gene: ADAM28 (Intergenic)
  source 1..190: mol_type = genomic DNA
cgatctcggctcactgcaagctctgcctcctgggttcacgccattcccctgcctcagcctcccgagtaggtgggactacaggcgcccgccaacacgcctggctaattttttgtatttttactagagacgggatttcaccgtgttagccaggatggtctcgatctcctgacctcgtgatccgcccgcctcg

SEQ ID NO: 1959 - DNA, 190 bp, Homo sapiens
  misc_feature 1..190: note = U/M: U (0.01:0.8) in Fallopian Epithelium
  misc_feature 1..190: note = source = chr10:14320514-14320703; Gene: FRMD4A (intron)
  source 1..190: mol_type = genomic DNA
cgactcctccaagcagctttgaaacatttgttcttacaaccctttgttgaaataaataaatagggccagactgcactttcttaacagcaacaaaagcccaaagaagcggcacgtgttaggtggttctacgggtaagatggggaaaagaatctcgcttgcctgagcccagaatttgaatggggatcatgcg

SEQ ID NO: 1960 - DNA, 234 bp, Homo sapiens
  misc_feature 1..234: note = U/M: U (0.13:0.92) in Fallopian Epithelium
  misc_feature 1..234: note = source = chr5:60822108-60822341; Gene: ZSWIM6 (intron)
  source 1..234: mol_type = genomic DNA
cgcattacgttctcatgggtaccccagagaagcactgagactagcaatagctattgttaatacattaagacgacagcagcagaaacagttggaaatgttccgaacccaaaaaaaaggtgaatgtgaaggagtttgtttccattggaatgggattcttagtgatgacattactaggttttgtgttctgggagagatggcttttagaactaaaaccatagatgatggctttactcg

SEQ ID NO: 1961 - DNA, 384 bp, Homo sapiens
  misc_feature 1..384: note = U/M: U (0.1:0.89) in Fallopian Epithelium
  misc_feature 1..384: note = source = chr1:94165060-94165443; Gene: BCAR3 (intron)
  source 1..384: mol_type = genomic DNA
cgggggcgggggtggatgggcagaagaactcatgaggtgatcatataccggcctcagtgattctctcctcctcccggccccatgtcttgtttttaaactccagcaaggaagaatcttctttccctccagccagcctttcaacccactgctcaaacaaagcattttctctcagaggatgattgccaagacccacagtttagttcatgtgggagtggagaggggccataaataataatagccaagtttactgagtgcttattatgtaatagccaagcactgttccagagacattacatatagacccatttcacacacacaggtgcacacacacacacacacatacacacagtacaaatgaggaaacagacccagagaggttgcccg

SEQ ID NO: 1962 - DNA, 130 bp, Homo sapiens
  misc_feature 1..130: note = U/M: U (0.1:0.88) in Fallopian Epithelium
  misc_feature 1..130: note = source = chr10:3709640-3709769; Gene: KLF6 (Intergenic)
  source 1..130: mol_type = genomic DNA
cggagagcccaaggtttgattgttccaagtccgagcactaaggagggaggtgctcacacttacagctcaggtgaaaatccacagcagaagattcctggtagcctcctctctgcgtgcccacaagtcgtcg

SEQ ID NO: 1963 - DNA, 166 bp, Homo sapiens
  misc_feature 1..166: note = U/M: U (0.07:0.85) in Fallopian Epithelium
  misc_feature 1..166: note = source = chr17:75113353-75113518; Gene: SEC14L1 (intron)
  source 1..166: mol_type = genomic DNA
cgagaggtggaggttgcagtgagccaagatcgagccactgcactccagcctgggtgtcagagcgagactctgtctcagaaaagcagaacaaaacaaaacaaaaaaaatgcagctgaagtaagctctacacagaggcaccgttggggtgcacgtagaaacccaatcg

SEQ ID NO: 1964 - DNA, 305 bp, Homo sapiens
  misc_feature 1..305: note = U/M: U (0.14:0.92) in Fallopian Epithelium
  misc_feature 1..305: note = source = chr2:236909064-236909368; Gene: AGAP1 (intron)
  source 1..305: mol_type = genomic DNA
cgcgtgacagctcaaataataaacagttgttcagagacagtggtactgcgtccccctcctccagtccagtcccccaccctgagcgttgatggtggggtgtgcatcccccaccccccaagcctgttcctagaaggccatggcgcacctgctctgtgcagaggctgggcgaacaccagcccgagcctgacttaagcaggatgggcatggacatcgttggcactcacttccctgcagggaggtgcacagtgaagaataaaacacaggtgatttcagatagtggcacatgcctgaggcaatcagccccg

SEQ ID NO: 1965 - DNA, 362 bp, Homo sapiens
  misc_feature 1..362: note = U/M: U (0.08:0.86) in Fallopian Epithelium
  misc_feature 1..362: note = source = chr17:74807275-74807636; Gene: MGAT5B (Intergenic)
  source 1..362: mol_type = genomic DNA
cgctctatgctgtctaagaagggggaggtgggagttacacagtcagtgtgtcttcagggtcagagagatgcactctcggagtccctgtcactggtttttaggctgctggttgatctgaaggcacatgttttcaattctgcagcagctgcgggccttcctagttcctggagccttgctctttttctttctttctttgtttctttttttcttttttattttttttgacatggagtctagctttgtcgccaggctggagtgcagtggtgcgatctcagctcattgcaacctccacctcccaggttcaagccattctcctgcctcagcctcccacatagctgggactatagacgcacactaccacg

SEQ ID NO: 1966 - DNA, 169 bp, Homo sapiens
  misc_feature 1..169: note = U/M: U (0.08:0.85) in Fallopian Epithelium
  misc_feature 1..169: note = source = chr3:5450781-5450949; Gene: MIR4790 (Intergenic)
  source 1..169: mol_type = genomic DNA
cgtgaaatacgactgaagaaatccatgatattgtttatactgccgcgtgaatgtggaacatgacgaatgagagtaatagctggtaaccaatattagatcatgatgacaaggaaattcattgttgggaactttcctataaagaatggatagtactatcaatccattctcg

SEQ ID NO: 1967 - DNA, 195 bp, Homo sapiens
  misc_feature 1..195: note = U/M: U (0.12:0.89) in Fallopian Epithelium
  misc_feature 1..195: note = source = chr3:11289659-11289853; Gene: HRH1 (intron)
  source 1..195: mol_type = genomic DNA
cgaaccatttctccatgagggttgtaaaggggtcatctattctagaatttttagctaactcatttatttgataaggaggtaaggccttgtaaggcttttgttattgttccatcgggggcggtgttattaggaataaaagtacaacattggactccaatcgtgacacaaactccgcctttttcagctaatatcacg

SEQ ID NO: 1968 - DNA, 323 bp, Homo sapiens
  misc_feature 1..323: note = U/M: U (0.09:0.86) in Fallopian Epithelium
  misc_feature 1..323: note = source = chr11:11092363-11092685; Gene: LOC729013 (Intergenic)
  source 1..323: mol_type = genomic DNA
cggtctccctgagcctatggaaagtgcacacagaatgctcaggtttgtttctcatccagtctgagcaggtaaccaggagtccgcctccacctgcggtggcattttcagtagaaactgctggctccccaaagagccctgtgggggcattcaatcctcaagctctccttgggcacatatgtctgccttgtagttctcatttcaaggagaatttctactttttccgttaagaaggaagtcacgcctcagtagctggctctggggttggaacctgtgttatctcgttatatatggccccatctgttggggccgcccagaaagactcg

SEQ ID NO: 1969 - DNA, 326 bp, Homo sapiens
  misc_feature 1..326: note = U/M: U (0.11:0.88) in Fallopian Epithelium
  misc_feature 1..326: note = source = chr17:53549234-53549559; Gene: MMD (Intergenic)
  source 1..326: mol_type = genomic DNA
cgcctctttaatacttctagaggccttcaaaatcacaggctatgctccacttaccctctatagttctcacaaccttcaagcattaatatcctcatcgcacctgtcatatttattgtctgcccctcgactcctccagctctattcactttttgttgaaactccaacagtaactattacccatgggcctgatttcaacccagcttctcacttagcacccaacgcaactgaaccacatgactgtatttcactaatacacatagcatcttccccctttcctcatatttctattcttccaattccaaacctagaccacacttggtttatcg

SEQ ID NO: 1970 - DNA, 154 bp, Homo sapiens
  misc_feature 1..154: note = U/M: U (0.09:0.85) in Fallopian Epithelium
  misc_feature 1..154: note = source = chr19:29512635-29512788; Gene: LOC100505835 (Intergenic)
  source 1..154: mol_type = genomic DNA
cgcagcctcctacaaccagggacagggctgggagtggaaggcaaagcgttgttccatcaggaatagattattcataatttcatgcccttcggaccagccagggtcattaatctacggagagcctcaagtcctagaatggtggaagccttgaccg

SEQ ID NO: 1971 - DNA, 258 bp, Homo sapiens
  misc_feature 1..258: note = U/M: U (0.07:0.83) in Fallopian Epithelium
  misc_feature 1..258: note = source = chr2:129666820-129667077; Gene: HS6ST1 (Intergenic)
  source 1..258: mol_type = genomic DNA
cgtttgcttaattgctcaattctagtatacacgtgtaatggtattagaagtgttaaccttatccctgtcaaagtgaaaaatgcactgaacacaattaacaagaagggaatactttattcaatactatcacaatagaagaaaaggactgaactcaactccactgaaacaaaaggtggcaggtttgttgagtgctgagcgagctattggaaaagtactggaggatcttagcgggatggttgctcaataggatgtgtcacg

SEQ ID NO: 1972 - DNA, 380 bp, Homo sapiens
  misc_feature 1..380: note = U/M: U (0.13:0.89) in Fallopian Epithelium
  misc_feature 1..380: note = source = chr5:173113621-173114000; Gene: BOD1 (Intergenic)
  source 1..380: mol_type = genomic DNA
cgctttgttatggcaaagcactcaggcaagccaatatgccacgtctctgctgctctgctaggtctcggtgactctctctgacatacagcatgtgctcggtgatacaccagaagaatagaaatcacacttagaatccagctccttcctggtctggcccattacaggcctttccaacttcacatgccactcccccgtcactggccactgttccatgggaaaatacacccagcttgttcctactactgaccctgtacttgccgagccctctgcatgggtctgtttttttcctgccttggtcttgcttgttactgaggtttggcagaaacaccagctcctcagagaggacttttgggcacccagtccccaaaactcatttcccg

SEQ ID NO: 1973 - DNA, 402 bp, Homo sapiens
  misc_feature 1..402: note = U/M: U (0.09:0.85) in Fallopian Epithelium
  misc_feature 1..402: note = source = chr12:83788743-83789144; Gene: TMTC2 (Intergenic)
  source 1..402: mol_type = genomic DNA
cgtggacctcttgcaaaaactttgccaagtttccaggatctatggccaaaaggtcgggaatcacctctttggcaaatctgtattttaatttagtcttagattttttttaatgaatctggactgattttaatatctagactgattttttggtaatttcttaaataaatcataatcctttaatgcctcttgtctctccgttgttatctcttactatgttttgtcatctctcagatatatcagaataattcaagcctttctacaatgctagtcttatcgctctcattattctacatcttttgctcctgttaaacagctctttcctgtttcctggaattatcttgtactccttttcttgctcttttgtcattccttttgtggctctttgtgttgaaataccttccg

SEQ ID NO: 1974 - DNA, 408 bp, Homo sapiens
  misc_feature 1..408: note = U/M: U (0.16:0.92) in Fallopian Epithelium
  misc_feature 1..408: note = source = chr16:87511831-87512238; Gene: ZCCHC14 (intron)
  source 1..408: mol_type = genomic DNA
cgaaagttcagaatctacagtgtcatccctagaccagccactaaaatcacgcaacgaaggaagccaacagataataagccagcaagaattccatgattctgcttaaatgaagttttagaataggcgaaactgatcagtggtggaaaacaatagaaaaaaggcctgggagtcggggtgcagagaaggttggaaccgactggaaaatggcctgagttctcacgtatgaaagatactctaccaggaacctggagtcaggagaatctcccagaggtggtgtgcaagttctgtgagtatctatttgtgtccgggtagagtttacacaccacacagtgcttcccacacaacctcaatactctgtgctttcaaagtatctcattaattttactaattttttttttttttgagacg

SEQ ID NO: 1975 - DNA, 429 bp, Homo sapiens
  misc_feature 1..429: note = U/M: U (0.1:0.86) in Fallopian Epithelium
  misc_feature 1..429: note = source = chr1:111962901-111963329; Gene: OVGP1 (intron)
  source 1..429: mol_type = genomic DNA
cgcaagctgtgctgcagaagttaatgtctaagccattccttttctcctttggtgcttcaaagggtctgtctatcaaagcttctttgcccttcaagaacattgtttcaactatgccagcactcataaaaatgcttcattgggttagaaaaacaccctcatccatccagcgcagagcagagattggagagacttgcagcacctccactactgcctaaagtactcaccctgtccctctgtacctgctgtcctctacctgggaagtccttcccgtctagtcattcctgtccatcaggattttcctgtgcttcaaactctgctcaaactctacctgctccataagacctttccaggtcactacagccacacagttatgtggctcgtattgccacctctggtggttacattcccttggaaacatgtctctttccg

SEQ ID NO: 1976 - DNA, 430 bp, Homo sapiens
  misc_feature 1..430: note = U/M: U (0.1:0.86) in Fallopian Epithelium
  misc_feature 1..430: note = source = chr4:170641059-170641488; Gene: CLCN3 (exon)
  source 1..430: mol_type = genomic DNA
cgcctccttggcattataacaaaaaaagatatcctccggcatatggcccagacggcaaaccaagaccccgcttcaataatgttcaactgaatctcacagatgaggagagagaagaaacggaagaggaagtttatttgttgaatagcacaactctttaacctgagggagtcatctacttttttttcctcctttacaaaaaaagaaaggaaatataaaagccgggtttttgcaacatggtttgcaaataatgctggtggaatggaggagttgtttggggagggaaaggagagagaaggaaaggagtgaggtatttcccgtctaacagaaagcagcgtatcaactcctattgttctgcactggatgcattcagctgaggatgtgcctgatagtgcaggcttgcgcctcaacagagatgacagcagagtcctcg

SEQ ID NO: 1977 - DNA, 478 bp, Homo sapiens
  misc_feature 1..478: note = U/M: U (0.1:0.86) in Fallopian Epithelium
  misc_feature 1..478: note = source = chr1:111986202-111986679; Gene: WDR77 (intron)
  source 1..478: mol_type = genomic DNA
cgagtcacaggcaagtttcaggcacgaatcatgacgataacaattctggcccctttgtcctaccatctaataaagtaaatcacccacccaggaactggcccttcctcttggtattcattgcacagaatggggttagcagagcctcactggaaaagaaggagattatgtcactcatgtcacagtaactacactgggcatctagcaactatgctttgacactggccaaagacagtctcttctatcagggttccaagtactattctcccaccaatgaatctcagactcaccaatctgtgatgctggcttgggacagcgggtatcccagagtaaaattctattgtcctagaggaaggtggaacagaaaaaggatttcataatccaaaggagcagttgcaggccagaaagtctccccactagagactttggcctatggatggctggagtgtgtttagggaagaaggagctatctcttacctcg

SEQ ID NO: 1978 - DNA, 99 bp, Homo sapiens
  misc_feature 1..99: note = U/M: U (0.12:0.87) in Fallopian Epithelium
  misc_feature 1..99: note = source = chr8:25184019-25184117; Gene: DOCK5 (intron)
  source 1..99: mol_type = genomic DNA
cgtatgtgcaagtaaaagcatcctcaccaaaaatgaagccagaaacataaaagacgtgacaaaaccgtcagcaacataccccgtgttatggacaaagcg

SEQ ID NO: 1979 - DNA, 252 bp, Homo sapiens
  misc_feature 1..252: note = U/M: U (0.07:0.82) in Fallopian Epithelium
  misc_feature 1..252: note = source = chr8:30008237-30008488; Gene: MIR548O2 (intron)
  source 1..252: mol_type = genomic DNA
cgactggaaacagcaacattctttaacagtcccattacaaaaggagaacctggtccatactgattaatagcttgtttaaaattctttgagtaatttaaaaggaaaaggctcaaatgtagctgtaatagttccctgttgatcaggtgggtgtattctaacagggaactgccaagcctctatatcaccctctcgtctagcttgctgaattcctgcctgaatagaactgagagtggtcgctggaggcgctgctcg

SEQ ID NO: 1980 - DNA, 432 bp, Homo sapiens
  misc_feature 1..432: note = U/M: U (0.12:0.87) in Fallopian Epithelium
  misc_feature 1..432: note = source = chr6:53401718-53402149; Gene: GCLC (intron)
  source 1..432: mol_type = genomic DNA
cgattctacttttctcatgcttttaaagtacaacataacctctactttttgagaactagacaaagacttctacaagctggctaaacctattcactgcatttacaacactaaactgcacaataaccttcacatactatccaatggtatttctcacctttcctcctttgttacactgttcttttgaccataatgccttcctttctccccttcatctaattaatgaccacacactctttaaggcagtttctcaaaggtggtgtctgaaggaaaaccagaatcaactgaagtgctctccccctctctctctagcatacacgcatgcacacacgtgcaaagggcacaagggaacttctgggggtgggtaggggttaacggacaataaatgctgttgaatcaatgtccagtgacagctaaaaaagatagagagatgcg

SEQ ID NO: 1981 - DNA, 325 bp, Homo sapiens
  misc_feature 1..325: note = U/M: U (0.15:0.89) in Fallopian Epithelium
  misc_feature 1..325: note = source = chr15:90586693-90587017; Gene: ZNF710 (intron)
  source 1..325: mol_type = genomic DNA
cgcccctggagagggagcaactccccttgggggtgtaacctgtttcggggaagcctttacagcagctctttgatgtttctccagtggaactgaatttattttttgtacttttaggaattaacttgcagtgctcagcctctccctccccagaaaggagagaaggagaaaagaagaaagggtttgcattgtcaccgtgattggcaccgcctgtgaatgaggggtcactgcttcaggctgctccttttcaagcaggcctttctcccctgcacgctgcattcacgctagaacattctttctttcaaagcttctgtctttctctcccccg

SEQ ID NO: 1982 - DNA, 94 bp, Homo sapiens
  misc_feature 1..94: note = U/M: U (0.12:0.85) in Fallopian Epithelium
  misc_feature 1..94: note = source = chr6:162254595-162254688; Gene: PARK2 (intron)
  source 1..94: mol_type = genomic DNA
cgaacaatacctgagctctccctcacagcagccgtctcccacagactcccctcggatgtccgggtgggcaggtggggatggagtgagcagatcg

SEQ ID NO: 1983 - DNA, 183 bp, Homo sapiens
  misc_feature 1..183: note = U/M: U (0.13:0.86) in Fallopian Epithelium
  misc_feature 1..183: note = source = chr2:15948155-15948337; Gene: MYCN (Intergenic)
  source 1..183: mol_type = genomic DNA
cgtgtcagctgtgagggctcagtctggctccccagtccataaacccaacctcacagaaggtctttgagctcacctggaaaaccatgggaacacactcctcccacacgtcaccgtcctctccagccatggtgaacagtgcgaacctaatgaggcctagaagcctttccactccctccagccacg

SEQ ID NO: 1984 - DNA, 237 bp, Homo sapiens
  misc_feature 1..237: note = U/M: U (0.13:0.85) in Fallopian Epithelium
  misc_feature 1..237: note = source = chr11:100080833-100081069; Gene: CNTN5 (intron)
  source 1..237: mol_type = genomic DNA
cggggccagtggatcacctgagcccaagagttcgagatcagcctgggcaacacagtgaaaacctgcctctatacaaaaaaaaaaaaaaaaaaatacaaaaaattatccaggcttgatggcatgtatctgtagtcccagctacaagggagacaggtgggaggatcgcttgagcccaggaggcagaggttgccgtgagccaagaacctgccactgcactccaacctgggtgacagggcg

SEQ ID NO: 1985 - DNA, 247 bp, Homo sapiens
  misc_feature 1..247: note = U/M: U (0.2:0.92) in Fallopian Epithelium
  misc_feature 1..247: note = source = chr9:125566583-125566829; Gene: OR1K1 (Intergenic)
  source 1..247: mol_type = genomic DNA
cgggaggctgaggcagaagaattgcttgaacccgggaggcaaaggttgcggtaagccgagattgtgccactggactccagcctgggtgacaaagagagactccgtctcaaaagaaaaaaaaaaaaaaaagacttcataaatccactgaagtagttttccctggatctttttcacatgaaatataaagagaccgatttttaacaccttaaataaaacaagtatatccaaatgaccgactcccttcccg

SEQ ID NO: 1986 - DNA, 360 bp, Homo sapiens
  misc_feature 1..360: note = U/M: U (0.12:0.84) in Fallopian Epithelium
  misc_feature 1..360: note = source = chr21:43940842-43941201; Gene: SLC37A1 (intron)
  source 1..360: mol_type = genomic DNA
cgggatcttggtttctgcatggcatctcccactaaaaggagccaggagtccttggagacctggccaatgccaggactggggcagggcaaggaatagatgagcccagaacatcttgtgccagaaaataaggaagtacttacaaacaaagggactctgacttgtcaaatctaggacaatctgagatttacaataaatgagactcatgaatgatagcccattgaatagcgtaagattcggcgagtcctactgatataactaaagaagtaggagaaatgcacgctcgccgtacagtggaagctggccgctaggtggagcggggatgtggagccgctgcagggtacccagcgcaggcacagaacg

SEQ ID NO: 1987 - DNA, 228 bp, Homo sapiens
  misc_feature 1..228: note = U/M: U (0.16:0.87) in Fallopian Epithelium
  misc_feature 1..228: note = source = chr18:76546040-76546267; Gene: SALL3 (Intergenic)
  source 1..228: mol_type = genomic DNA
cgaagaagcaaagatttcagaaatcggagaatggagctgttacactctttgaggaagtttctcacttgctcaacataccttggcccagcagtgaggagttggggaggagtgggtgccgcagcaccctgaagctctgcgtacacccaactgtgcactgttcaaagtgtcttcagagagaaattctgttgtctctcctggagaaactaaaaatgagccagagaaaccccg

SEQ ID NO: 1988 - DNA, 285 bp, Homo sapiens
  misc_feature 1..285: note = U/M: U (0.2:0.91) in Fallopian Epithelium
  misc_feature 1..285: note = source = chr11:12233727-12234011; Gene: MICAL2 (intron)
  source 1..285: mol_type = genomic DNA
cgtttaccctgcaccagctgctgtgatcctccatagcactgccattcaagagcaattttaatgtaaatcattgaaaacaagaattagagcactaagcctgggcaacatgatgaaactgtgtctccacaaacacttaaaaaaaaataaataaggcagtcatggtgacacatgcatattgtcccagctacttgctggctgaggtgggaggatcgcttgaccctgggaggtcgaggctgcagtgagccatgattggcaccgctgctttccagcctgggcaacagagcg

SEQ ID NO: 1989 - DNA, 474 bp, Homo sapiens
  misc_feature 1..474: note = U/M: U (0.18:0.89) in Fallopian Epithelium
  misc_feature 1..474: note = source = chr1:22819009-22819482; Gene: ZBTB40 (intron)
  source 1..474: mol_type = genomic DNA
cgctgccccggcaggcttgctcctctgattggtagggggtagtgtgggccgatcctcccatgttgctataggcaattttgtattagtccaagtaatacatgccttctaataattaaatgttttcctgattcatagcaacttttttaaaaaacaaattcaaggtctagtatttattttagctgtgttaactgacagtcgactatacattgttttcttgggagacaagctatttacaaggctaggctaaccctgatgactctctttgggaggtttcaagtcataaatccttggtactctttgtactgattatgctgaaggacattatggttttatatttttgcacttgcgtgttctcttaactgttcaatccatcatttttgtcattagtttgttaccttgatagcttctaaacacacctcttcattttctcttaaagcttcctctccacttaactttggctacagaggagtaacg

SEQ ID NO: 1990 - DNA, 497 bp, Homo sapiens
  misc_feature 1..497: note = U/M: U (0.17:0.88) in Fallopian Epithelium
  misc_feature 1..497: note = source = chr3:11215119-11215615; Gene: HRH1 (intron)
  source 1..497: mol_type = genomic DNA
cgctctgtcgcccaggctggagtgcagtggcatgatctcggctcactgcaagttcctcctcccgggttcatgccattctcttgcctcagcctccgagtagctgggactacaggcacccgccaccacacccagctaataattatatttttgatatttattattagattatcctttataaaaatatattttaaatatatataaattagtttttgttttactcttaaaggctctgagaagtcctgcagtaaaatctgcttgacttaactcaatgtttgtgaatttatttgatcttggagtctcttttttcatataacatagaggaatttcctgaggaattcatcttctgtgggactcacttacagaaatactgattttgtgttttggaaacagtttggggaggccagtgtgtctgagccaggattcagtccaaagacagactctgccaggtgtaaagagttgtgtttcagcctcagttctttctttatttcctcttcccg

SEQ ID NO: 1991 - DNA, 65 bp, Homo sapiens
  misc_feature 1..65: note = U/M: U (0.21:0.91) in Fallopian Epithelium
  misc_feature 1..65: note = source = chr5:15937562-15937626; Gene: FBXL7 (exon)
  source 1..65: mol_type = genomic DNA
cgctgttccttgagcaaggcgcttactctcctccgctcaggcccccaaggccgccctttccctcg

SEQ ID NO: 1992 - DNA, 100 bp, Homo sapiens
  misc_feature 1..100: note = U/M: U (0.13:0.83) in Fallopian Epithelium
  misc_feature 1..100: note = source = chr4:146298122-146298221; Gene: SMAD1 (Intergenic)
  source 1..100: mol_type = genomic DNA
cgccatttgggcaagtggtttctacatcactggacaccagttctgagcgttagtttgagaactcgttcccgaatgtgctttcctccctctcccctgcccg

SEQ ID NO: 1993 - DNA, 129 bp, Homo sapiens
  misc_feature 1..129: note = U/M: U (0.17:0.87) in Fallopian Epithelium
  misc_feature 1..129: note = source = chr1:230916064-230916192; Gene: CAPN9 (intron)
  source 1..129: mol_type = genomic DNA
cggctatgccatttatgaggtaggtgggaaccacactgcatttcagagttctccatctgagttctaaattcgcggctcctcctcggtctcacacccgagactcaaccaagagtccatgaattgtgtccg

SEQ ID NO: 1994 - DNA, 138 bp, Homo sapiens
  misc_feature 1..138: note = U/M: U (0.24:0.94) in Fallopian Epithelium
  misc_feature 1..138: note = source = chr3:136690262-136690399; Gene: IL20RB (intron)
  source 1..138: mol_type = genomic DNA
cgcgcccggccacttctatctaactgtatgtttttaccatttaacctacgtctcttcatcctcccactcccaccccactcactcttcccagtttctgttatctgtcttttcgctctctacctctgtatgataaaatcg

SEQ ID NO: 1995 - DNA, 298 bp, Homo sapiens
  misc_feature 1..298: note = U/M: U (0.12:0.82) in Fallopian Epithelium
  misc_feature 1..298: note = source = chr14:93342482-93342779; Gene: CHGA (Intergenic)
  source 1..298: mol_type = genomic DNA
cgcaacaacccacacacatgcacacacatacacacacacacacacactcacttacggagttggctttgagttttgactggtactgaacataatgtcttggaacctttttttccccccactgaatatattatgaacactttcccctgtgattaaatattgtgtcacaatatcatttcaatggttacaccgtgtttcattctgtgaacctatcatcatttatttcaccagtctattgtggaacagttagtactttggtgaaaacctttgtggctcgatctttgtgcacatctatggttcg

SEQ ID NO: 1996 - DNA, 301 bp, Homo sapiens
  misc_feature 1..301: note = U/M: U (0.19:0.89) in Fallopian Epithelium
  misc_feature 1..301: note = source = chr2:221081171-221081471; Gene: MIR4268 (Intergenic)
  source 1..301: mol_type = genomic DNA
cggaggggtccacaggtgggttcgcttataatgtcagtgtttagaataacaataaatctgcctgtgttcttcgcagaaatgagtaacttcagatatgaaaataaactcaggcctttgtaaatagaagtagccaaaccattaatctaatgagaatatcagggaagtggctgaggtagcctttaaacagcctttgtggtgtaagtcaggggccgttgtattttcccgagagatgatgagccaagatggcttctcagctaataagaaggcaacaggatatagctgaatatatatgtggagtccg

SEQ ID NO: 1997 - DNA, 309 bp, Homo sapiens
  misc_feature 1..309: note = U/M: U (0.13:0.82) in Fallopian Epithelium
  misc_feature 1..309: note = source = chr20:60537308-60537616; Gene: MIR1257 (Intergenic)
  source 1..309: mol_type = genomic DNA
cggtcatgtttccctgataaggggaaggcggatgggcctggggagtgtggtgcagggtgggctgaggccagaggagaggctgccacagggcgtggagcagagtttgtggggcacactgtgcacagtgacctccaccattgtttaattggattgggtcccagagttctacttggctcatgagccctgatcagccattcacaggctgtaggaccaggaagttttccagatagaacaggaagatgtctccaggcagcagtgattcaggaacagcaggcaccgataatgaccagaaagcagacactcccagcg

SEQ ID NO: 1998 - DNA, 150 bp, Homo sapiens
  misc_feature 1..150: note = U/M: U (0.16:0.84) in Fallopian Epithelium
  misc_feature 1..150: note = source = chr4:8476417-8476566; Gene: TRMT44 (intron)
  source 1..150: mol_type = genomic DNA
cgagccttctgtcgtgagcggtttcctagcttccagcgagaaccaggaaggaggtggttgctttggccatgtttcacggggagttgttggattcccacaaggaaacggccaaatgggagcgtaggggggtatctcggcccaatttgggcg

SEQ ID NO: 1999 - DNA, 244 bp, Homo sapiens
  misc_feature 1..244: note = U/M: U (0.18:0.86) in Fallopian Epithelium
  misc_feature 1..244: note = source = chr8:37167163-37167406; Gene: ZNF703 (Intergenic)
  source 1..244: mol_type = genomic DNA
cgagacacagtgacctgcttcacccccctgctccaaaaccctcagggctcctcctgcctatatgacaaaggctaagctcccagaaaccacttccaaccttgtctcccctcacttccctccctgcaccctgcgacatgttgcacagaatcacgacggcctctcctgagtaagttcagacagactgtatcacggacaatgctttgccaggcaagttgttaccattattggagggagagctgaatcg

SEQ ID NO: 2000 - DNA, 433 bp, Homo sapiens
  misc_feature 1..433: note = U/M: U (0.18:0.86) in Fallopian Epithelium
  misc_feature 1..433: note = source = chr2:113623217-113623649; Gene: IL1B (Intergenic)
  source 1..433: mol_type = genomic DNA
cgtaactccttcattagtattctcctcaccttctgctttgtttctcttgaaagagtgccttcacttacttctcctcccactcatcagccctcaacaattttgcttcttcctactacttaagcaaaacttctttcataaaagttattcttattcacatagtcaatgaataattctaagcttaaaaaaaaaatccgtgagtttctctgcagcatttcatactatttgacaattttctttccttcttgaactacaaccccctcccaccccagtttctgtaatactgcaccgggattcctttgtctattcctctctcagtctcctgtataatcttcttttgtctaccccttctaaactgcacgtattgtccattccccaccctcctcctcgattcctagtccatgaatgtcttaccatccacccagatacctgggcg

SEQ ID NO: 2001 - DNA, 236 bp, Homo sapiens
  misc_feature 1..236: note = U/M: U (0.21:0.88) in Fallopian Epithelium
  misc_feature 1..236: note = source = chr14:95339286-95339521; Gene: GSC (Intergenic)
  source 1..236: mol_type = genomic DNA
cgcaaattctaacttcttatcttgtctttgagtggttgagacaactggcttcttcctttcagctgggagactttctctccaactgttcacttcccttcattcataaactcaataaatatttattaagtaattactgtgtagcagaccttagagttacaggagaggacataccccattgcagcccgttctccgtggcaaggattcatgaattttgcttccagaaaattaaacgaacg

SEQ ID NO: 2002 - DNA, 451 bp, Homo sapiens
  misc_feature 1..451: note = U/M: U (0.22:0.89) in Fallopian Epithelium
  misc_feature 1..451: note = source = chr7:142999320-142999770; Gene: CASP2 (intron)
  source 1..451: mol_type = genomic DNA
cgtctttactaacaaaacgacgttaaattgtgattttctcatcctatatccagggatttaatacactattggatctggataaggagtaattgctcttttctggagtaatctggatcttttgctctgtctctctaacttttctgaaattaaatccttcaaggaatgaccagtagccaattgttccattgaaaatttgagttcacctgtcttcctgctgtatttggttaatataattaatgtctagaaaaagctccacccccctgccccagtcagcttctaaactggagtgtaagctccatgacggcaggaattttctcttcactctatccctaggccttaaagtaagacagtgcccaacacatggcagttgcttgacacatttttattaaacctgtgctttggtccttttcccccaattcttgaagcttcccttctttcctaggctccctcg

SEQ ID NO: 2003 - DNA, 113 bp, Homo sapiens
  misc_feature 1..113: note = U/M: U (0.28:0.94) in Fallopian Epithelium
  misc_feature 1..113: note = source = chr1:6938724-6938836; Gene: CAMTA1 (intron)
  source 1..113: mol_type = genomic DNA
cgctcccccaaggatccccagcgatttgttctagttccgttgccatcagcaggaagctggatcagtaagggacgtgggcagatggtaaagtccatggcagttcaccatgaccg

SEQ ID NO: 2004 - DNA, 155 bp, Homo sapiens
  misc_feature 1..155: note = U/M: U (0.25:0.91) in Fallopian Epithelium
  misc_feature 1..155: note = source = chr3:72058519-72058673; Gene: LOC201617 (Intergenic)
  source 1..155: mol_type = genomic DNA
cgctttccttgaaccatttcccaatcctggaatcacgtcaccctctgcctcacccaactaatatccgcccctcctttaaggtccgtcaagagcctgcctttgggaacaggtctcaccacggctctcaccttctatgactctgaacttacctcccg

SEQ ID NO: 2005 - DNA, 213 bp, Homo sapiens
  misc_feature 1..213: note = U/M: U (0.24:0.9) in Fallopian Epithelium
  misc_feature 1..213: note = source = chr17:62663832-62664044; Gene: SMURF2 (Intergenic)
  source 1..213: mol_type = genomic DNA
cgctttgttcccaaccacccgactaacataatttgtagccttgtattaggtaatagaagttaggatttcagaacgtgatgggagacctgggggaggctgctgcttcttttttttttcctctctctttttttttttttcagacagagtcttgctctgttgcccaggctggagcgcagtggcgaaatcttggctcactgtaagctccaccttccg

SEQ ID NO: 2006 - DNA, 275 bp, Homo sapiens
  misc_feature 1..275: note = U/M: U (0.17:0.83) in Fallopian Epithelium
  misc_feature 1..275: note = source = chr4:79878229-79878503; Gene: LOC100505875 (Intergenic)
  source 1..275: mol_type = genomic DNA
cgtgatctaatttgtgcctgtgtatatgtaaatgcatgtctttgacggtggaggtagtagtcatggtgctggcagggcagtgtgggaaggacagtgtgacactacaggcttcactctgctccttaccaaggggtggcttgtttagtcagttctgctcgccaccactcagcctgcctgtcagtgggggaatgacagttttgtcttctttcgttttaacttctttatgatagtcctcccttctgcaaatagataaatagattttttaaaaagacacg

SEQ ID NO: 2007 - DNA, 440 bp, Homo sapiens
  misc_feature 1..440: note = U/M: U (0.27:0.92) in Fallopian Epithelium
  misc_feature 1..440: note = source = chr9:138356237-138356676; Gene: LOC100506599 (exon)
  source 1..440: mol_type = genomic DNA
cgcagtccaaaaagctgagatggttccttagagccttgagcctggccactctcccacctgctagcatctgaataaaagttgctttcctttcaccacacctcgcttctcctgcggcaagcagccaaacttgagtcagttacaagacatctctacctcccctgatcccacagctacaggaggacgcgcaccagaagggaaatgtggccggccacagtagctcacgcctgtaatcccagcactttgggaggccggggcgggcagatcacttgaggtcaggagttcgagaccagcctggccaacatggtgaaacctcatctcaactaaaaatacaaaaattagccgggcgtggtggtgcacacctgtaatcttagctactcaggaagctaaggcacaagaatctcttgaacccaggaggtggaagatgcaatcagccaagatcg

SEQ ID NO: 2008 - DNA, 244 bp, Homo sapiens
  misc_feature 1..244: note = U/M: U (0.25:0.89) in Fallopian Epithelium
  misc_feature 1..244: note = source = chr7:66397994-66398237; Gene: TMEM248 (intron)
  source 1..244: mol_type = genomic DNA
cgccaccacacccggctaattttttgtgtttttagtagagacagggtttcaccatgttgccctggctggtctcgaactcctgacctcaggtgatccgcctgcttcgacctcccaaagtgctgggattacaggcgtgagccactgtgcctagctcccgctttgttttggtggttgtgggggataagaactcactctgttgctcaggctagagtgcagtggcgtaatcaatcatagctcactgccg

SEQ ID NO: 2009 - DNA, 339 bp, Homo sapiens
  misc_feature 1..339: note = U/M: U (0.25:0.89) in Fallopian Epithelium
  misc_feature 1..339: note = source = chr8:77932187-77932525; Gene: PEX2 (Intergenic)
  source 1..339: mol_type = genomic DNA
cgccctgataggcaggtaggagatgaatagcccctggcacaaggtgaagtttagtggctaatcattttgctgataatgacctggaaaaatgtcctggtgaaagggaatgctgaggaaggtgccatggtgctggcatttgagatatataggatgaaccatgcctgccaacacagtgaaattggctggttaccgccttgttgaaattaggtgcttcagaaggatagcgtaagattgcctgacattaatatgtgattaatggctaagtgtgagaaccacaaagcttggatggcagtagcatattgaaagagagggataatcggccaggtgcggttgctcacg

SEQ ID NO: 2010 - DNA, 446 bp, Homo sapiens
  misc_feature 1..446: note = U/M: U (0.27:0.91) in Fallopian Epithelium
  misc_feature 1..446: note = source = chr18:42862917-42863362; Gene: SLC14A2 (intron)
  source 1..446: mol_type = genomic DNA
cgtagggtgtgaagactagaaataccatcaacagtgatggacctccggcccggttaaagacacatgacatggtcacagctttaagcccctgcctcatccttttccctcctccgtgagaacgaatcattaccccacattgtgtgtatctgactgtgaccctcctgacttactgagacttctataagcccaaagtgcccagacactgacttaatacccgctctaaggaaaatttccctctgactctgagcagggcacatgagagaaatttctgaacacgtcgagtctcctaattgataaaagtggaagctattaaaaactaatatatcatcatccaacatcaaccaaaaaaatgctgcagtcactagcacagcttataatgctgtgaccctcctgacttactgagacttctataagcccaaagtgcccagacactgacttaatacccg

SEQ ID NO: 2011 - DNA, 433 bp, Homo sapiens
  misc_feature 1..433: note = U/M: U (0.19:0.82) in Fallopian Epithelium
  misc_feature 1..433: note = source = chr2:219787077-219787509; Gene: CDK5R2 (Intergenic)
  source 1..433: mol_type = genomic DNA
cgggaatgggtgagaacaaaacatttttgtgggagtgaaataaatatctttagataatccacgtaggagggtaaggagggaataacaggaacttcatcaacacatgatatattaatccattttaactataaagaactacctgagactgagtaatttatgaagaaaagaggtttaatttcctcacatttccacaggcttaacaggaagcatggctggtaacttacaattgtggtggaggggttaggggaatcaagcatgtcttaccgtggtggagcaggaaagagcgagagtgaagagggaagtgccacacacttttgaacaaccagatcttgtgagaactcactctcacaagaatagcaagcgggaactccaccccaatgattcaatcacctgccaccaggcccctccccccacatgtggggattacaattcg

SEQ ID NO: 2012 - DNA, 453 bp, Homo sapiens
  misc_feature 1..453: note = U/M: U (0.21:0.84) in Fallopian Epithelium
  misc_feature 1..453: note = source = chr5:112799248-112799700; Gene: MCC (intron)
  source 1..453: mol_type = genomic DNA
cgtaagtgggtgtacatggtcacattcactgagagagcaagcctggaagattagttttgtgggaagaatcctgaatccattgttggacttgtggagtttaaaatgccttacaaatacctggcaggagatgatttataggcagttgggtcaattagttatgcaagtctgagatgcagaaaagaggaccgagctggacatttactaagggagtcactgtcacatacaaagagaactgaagctgaaacgtaaataagagacgaaacgtaaatacctagagagaatgtctgaggttaaaagagaagtgagcaaaaattgatgccttaaaatattctaacactcaatagctaggtagaggaggataagcctgcaaaggagatagaaaggaatgagccaaagaggtgggagaacagcaagaagactgtggggtcttggcagccaggaaaaggggatgcg

SEQ ID NO: 2013 - DNA, 293 bp, Homo sapiens
  misc_feature 1..293: note = U/M: U (0.26:0.88) in Fallopian Epithelium
  misc_feature 1..293: note = source = chr5:65538308-65538600; Gene: SREK1 (Intergenic)
  source 1..293: mol_type = genomic DNA
cggtcagtctcctttggtgccgtctgctatagcagccccttcatctctctgacctttacggctggactccgctagcttcttttgtgtggttttccacttagtttctattaggacagatcttgaatgtgagcagccatgcattcacccctggatgagaattctagttagctcttttatttggtcatttagaatttattggcttatgtatctatctgagcacttgtggataaatgtgggcatgatgcatgggtatgccctctattgtgtgctttaaagagatcataaatgtatcg

SEQ ID NO: 2014 - DNA, 308 bp, Homo sapiens
  misc_feature 1..308: note = U/M: U (0.3:0.92) in Fallopian Epithelium
  misc_feature 1..308: note = source = chr21:35515274-35515581; Gene: MRPS6 (TTS)
  source 1..308: mol_type = genomic DNA
cgaccaatgtattatatggacaacttttgctttgagtaataaacttgattgtaggaatgtgggaggtgttttgtccctttacttacccagtgcagtgcacttccagggccccgcagctccagtctagctggcagtgcctggcagtgtcggggaggcattacccagtacccactgaggtccagagccggggtggggcaggggaggaggggtgtctgtctgttccttactgggcacgccacaaaatcagtgacttttccctgcacacctcacttgtcattgtggtttgtgctgctctttgtggtgggacg

SEQ ID NO: 2015 - DNA, 336 bp, Homo sapiens
  misc_feature 1..336: note = U/M: U (0.32:0.94) in Fallopian Epithelium
  misc_feature 1..336: note = source = chr2:173448055-173448390; Gene: PDK1 (intron)
  source 1..336: mol_type = genomic DNA
cgctctgtcacccaggctagagtgcagtggtacaaccttggctcactgcaacctcctcctggattcaagagattcttgtgcctcagcctcccgagtagctgagattacaggcgtgcaccatgacgcctgactaatttttgtatttttagtagagacagggttttgccatgttggccaggctggtctcgaactgctgacctcaagtgattcgccggccttgcctcccaaagtgctgggtttataggtgtaagccaccacacccagccacaagttcctaataaagtccttgtatactttattattgatagtgtaattacttaattttagatgtattcg

SEQ ID NO: 2016 - DNA, 366 bp, Homo sapiens
  misc_feature 1..366: note = U/M: U (0.26:0.88) in Fallopian Epithelium
  misc_feature 1..366: note = source = chr13:37788409-37788774; Gene: CSNK1A1L (Intergenic)
  source 1..366: mol_type = genomic DNA
cgcctcccaggttcaagtgattttcctgcctcaccctccctagtagctgggattacaggcctgtggcaccgtgcccagctactttttgtatttttagtagagacagggctttaatatgttggccaggctggtctcaaactcctgacctcaagtgatccacccgccgtggcctcccaaagtgctgggattataggcttgagccactgcgactggcctaaaacttacacttcttatctgtacccataaaggttctgtttcagtgggtttgcaatgggatttaggaatctatgtttaaaatctcctttggaggtctgggtgtgatttagataagaggattccaatccaactctttttagagctgttacg

SEQ ID NO: 2017 - DNA, 201 bp, Homo sapiens
  misc_feature 1..201: note = U/M: U (0.25:0.86) in Fallopian Epithelium
  misc_feature 1..201: note = source = chr4:17533070-17533270; Gene: CLRN2 (Intergenic)
  source 1..201: mol_type = genomic DNA
cgcgctccttctcccataccttgctccatgcatctctttatctgtatcctttgtgatatcctttgtaataaaccagtaaatagaagtgtttccctgagttctgtgagctgccccagcgaattagccaaacccaaagacgaagttgtggatttggctaatttgaggccaatcagtcagaagttccagaaacccagacttgcg

SEQ ID NO: 2018 - DNA, 243 bp, Homo sapiens
  misc_feature 1..243: note = U/M: U (0.33:0.94) in Fallopian Epithelium
  misc_feature 1..243: note = source = chr3:130635214-130635456; Gene: ATP2C1 (intron)
  source 1..243: mol_type = genomic DNA
cgcgccactgcactccagcctgggcaacagaacaagactccatctcaaaaaataaaaataaataaaaaaataaagtgaggtcgaaactatgattttcttggaggacgggcccaaaaggtgattgattagtagggttaaagattaaatttgtgcttaaatttatatatatattttttctttcttctttttttcttttcaaagccattatgtattgctgcagtaccaatttcttttgccttagcg

SEQ ID NO: 2019 - DNA, 312 bp, Homo sapiens
  misc_feature 1..312: note = U/M: U (0.29:0.9) in Fallopian Epithelium
  misc_feature 1..312: note = source = chr17:66671291-66671602; Gene: FAM20A (Intergenic)
  source 1..312: mol_type = genomic DNA
cgaggataactgagagtaactgaatcctgcctctggtatgtttttgtgtctgtcttgacaaaatttgtcctataaatgtgatgtttatagttcccaaaagagagctggaagttcatttgagtctatggaaacgattgcgtgaactgtgttgagcctgcttgccaataattatttattgaataaatgtccatgcgataggacaaatttggtttgagacttgcttttcttacagcctggaaggaacattgtgagagaatagatacattcttcaccaactaccattgtctacaaatagaacttgtgagttggccg

SEQ ID NO: 2020 - DNA, 405 bp, Homo sapiens
  misc_feature 1..405: note = U/M: U (0.31:0.91) in Fallopian Epithelium
  misc_feature 1..405: note = source = chr1:41973448-41973852; Gene: HIVEP3 (exon)
  source 1..405: mol_type = genomic DNA
cgcagaggagcgggactagagtccggaggagggggttagagctgtgcccagtgacatatacccaggctggtggcattggttctgtccctctgggcacggcatcaatgtggaggcagccctttggtgagattctatttgtgcatttacccccatcatttagaaatagtctccagtgactcctggcccctgtggcttctctgcctgagcctgacgggcccggtgactgccgggcctctgccctgccggctgcactgttcattgctaggctgcccagggaggaaaccttgggtgggtaggctgtttgagtacagggagaaaaatgcccaggagagctggaaggcagggtggggtggagtggtgtggggccccccaccaatgtcaggggctagtccaccagagcccccg

SEQ ID NO: 2021 - DNA, 209 bp, Homo sapiens
  misc_feature 1..209: note = U/M: U (0.35:0.92) in Fallopian Epithelium
  misc_feature 1..209: note = source = chr12:92588638-92588846; Gene: BTG1 (Intergenic)
  source 1..209: mol_type = genomic DNA
cgagaatgggtaagaagcaggccccaggtagactagcgaatgaatttaacggtttgttggatggttactcaggacgacctttatttaaatatatacaatgggccaggcgaggtggctcatgcccgtaatcctagcactttgggaggccgaggtgaacagatcaactcggatcaggagtttgatggatcaggcaacatggcaaaaccccg

SEQ ID NO: 2022 - DNA, 324 bp, Homo sapiens
  misc_feature 1..324: note = U/M: U (0.3:0.85) in Fallopian Epithelium
  misc_feature 1..324: note = source = chr12:8828813-8829136; Gene: MFAP5 (Intergenic)
  source 1..324: mol_type = genomic DNA
cgtataccaccacactcagctaattttttgtattttttgtagagacaggttttcaccatgttacctgggctggtctcgagctcctgagcttgagtgatcccccagtcttggcctcccaaagtactaggattataggagtgagccactgtgctcaacccccaacagcttttttttttttttttttttttttttttttttttgagacagagtcttgctctgttgcccaggctggagtgcagtggcataatctcggctcactgcaacctctgcctcccgggttcaagtgattctcctgcctcagcctcctgagtagccaggactacg

SEQ ID NO: 2023 - DNA, 430 bp, Homo sapiens
  misc_feature 1..430: note = U/M: U (0.08:0.8) in Fallopian Epithelium
  misc_feature 1..430: note = source = chr10:123448794-123449223; Gene: FGFR2 (Intergenic)
  source 1..430: mol_type = genomic DNA
cgtgtactcccatgtcacagatggcactggggagaatagtgtagtatgtggtgtgccaagacactaattagtatgtaaggatttacttgaaaaagacatgaaatagttcatatgtaaacccacaaaaaatgggtgagaaaagaccaataaagtagagttatatacatacaaacacacagatacaaagatcaaatgaatcgtgtgcttgcttttttatttgatttttccctttttcttctgtttcagaggcttgggggcatatcacctcagagagaaagagaaactcctacggggtttgaatcgatcatcaagaagctattttagtttcatctactatgaaagcctgtggggtctcaccccttctggattgctgaggaaggttgttctgaacacgccggggagtgagagagagtgaataggcaggagaacg

SEQ ID NO: 2024 - DNA, 242 bp, Homo sapiens
  misc_feature 1..242: note = U/M: U (0.24:0.86) in Fallopian Epithelium
  misc_feature 1..242: note = source = chr2:193278545-193278786; Gene: TMEFF2 (Intergenic)
  source 1..242: mol_type = genomic DNA
cggaggaggtgtagctggtgctgcatgctccactgagctgataagagctgggaacaggcgggagtcccgaccactactgaattaatgggatgggagtcccaggttcctgggggcagctgcagccatccagcccaggctccggacccaggcatccctgtgttctctggggcccgggaagctcccctgccgctgcaggctaggaaatgcctgctctgctcccttgcctctccctgctcccagcg

SEQ ID NO: 2025 - DNA, 373 bp, Homo sapiens
  misc_feature 1..373: note = U/M: U (0.04:0.94) in Fallopian Epithelium
  misc_feature 1..373: note = source = chr21:45483246-45483618; Gene: TRAPPC10 (exon,intron)
  source 1..373: mol_type = genomic DNA
cggctgtcagtgctgggagccgaatgcatcactagaccacagggggtgggccagtgttcatagaaaaactggttatgaagctgcctgtttgcccaccatcctcagcctgagcaggaagctcaggaaggtgaagtacctgcaatcagcacctttcatgatgtgtgtttgtttagatggtgccaactggctgacttttttctgccagccagtgaagagctggaacggattgatcctccgaaaacccatagatatggagaagcgggaatcgatccagaggcgagaagccaccctgttagatctgcgcagttacctgttctctcgccagtgcaccttgctgctcttcctgcagaggccgtgggaggtggcccagcgc

SEQ ID NO: 2026 - DNA, 291 bp, Homo sapiens
  misc_feature 1..291: note = U/M: U (0.08:0.9) in Fallopian Epithelium
  misc_feature 1..291: note = source = chr14:46854120-46854410; Gene: RPL10L (Intergenic)
  source 1..291: mol_type = genomic DNA
cggcccttatgcgggcgagacagagggctcacctcttgccttctaggtcacttttcacaatgtcccttcagtacctgaccctatacctgccagttattccttggtaatatgagtaatacaacaaagagtaatattaaaagctattaatgtttatactaatgattgataattgtccatgatcatctctgtatctaatttgtattataactattcttattctaactattttctttattatactgaaacagtgtgtgccttcagtctcttgcctccgcacctgggtaatccttc

SEQ ID NO: 2027 - DNA, 415 bp, Homo sapiens
  misc_feature 1..415: note = U/M: U (0.18:0.9) in Fallopian Epithelium
  misc_feature 1..415: note = source = chr14:51894318-51894732; Gene: LINC00640 (Intergenic)
  source 1..415: mol_type = genomic DNA
cgtgttggctataagttgcagaattaggatttttacctaagacagccttacttcaaacatgctgttcccgtgttttccacttcgtatagagatgtgaacataagtgagcatgcagtggtatacttgttagcttgtgctgtcttgtgaaaggtaattgtacattttcaggaagtttgcaagctttctgatgttgcgctgaacttgaaagcagccatggtgggagtatctacaccacagaaattggcacccactatacatcaaagatttttcttccccaaagacctggttgttaaacattgaccagcaaacaacggatgtacaatactaccacattctttaaaaattcacaaaatataactacatttttacaaagaggtacatccagtggatgtgaactttttgtggcacgggaatc

SEQ ID NO: 2028 - DNA, 213 bp, Homo sapiens
  misc_feature 1..213: note = U/M: U (0.27:0.94) in Fallopian Epithelium
  misc_feature 1..213: note = source = chr5:15937192-15937404; Gene: FBXL7 (exon)
  source 1..213: mol_type = genomic DNA
cgctgaatgtccaggactgcgaggtctccgtggaggccctgcgctttgtcaaacgccactgcaagcgctgcgtcatcgagcacaccaacccggctttcttctgaagggacagagttcatccggcgttgtattcacacaaacctgaacaaagcaaatttttttaaaagcagcgtatgtaagcaccgacacccactcaaaacagctctttcttcc

SEQ ID NO: 2029 - DNA, 329 bp, Homo sapiens
  misc_feature 1..329: note = U/M: U (0.32:0.94) in Fallopian Epithelium
  misc_feature 1..329: note = source = chr2:206890514-206890842; Gene: INO80D (intron)
  source 1..329: mol_type = genomic DNA
cgtgattacgccactgaattccagcctgggcgacagactgagaccttgtctgaacgacaacaaaaagaatcagaatttgaactctatttccttaaagtaagataatgttttgaaatttttttttttggaaggcagtcccactctgtcgcccaggctagagcacaatggtgtgatctctgctcactgcaacctcctactcccaggctaaagccatcctcccacctcaacgttcctagtagctaggactacaggtgcacgccaccacacctggctaatttttgtattttttagtagagatggggtctcatcacgttgtccaggctaatctc

SEQ ID NO: 2030 - DNA, 106 bp, Homo sapiens
  misc_feature 1..106: note = U/M: U (0.04:0.89) in Fallopian Epithelium
  misc_feature 1..106: note = source = chr14:66423698-66423803; Gene: LINC00238 (Intergenic)
  source 1..106: mol_type = genomic DNA
cgagctccccgagtgagtaattcctgtcccttttaagggctcacaactctaaggatttcacatgaaagggtcgtgattgatttgagcaagcagggggtacgtgacg

SEQ ID NO: 2031 - DNA, 453 bp, Homo sapiens
  misc_feature 1..453: note = U/M: U (0.06:0.91) in Fallopian Epithelium
  misc_feature 1..453: note = source = chr14:75363159-75363611; Gene: DLST (intron)
  source 1..453: mol_type = genomic DNA
cgaatctacttttcattagagaaatttgcttttctttggaaagggtttgaaaaatagggagaagggagtgttttcttgatagtgcgctgtggcattgttcagagtagggctctgtgacctgttttactagatgtcatccattctgttgggaaactttccgaagagactggatgacattcaagccaaagatttctctcttgttcataggatgtaggggaaggaccttgactaatgaatcacaaaggctgcagcttatgtttcagtgcattagggccaaattgtacacaaattgaattggactttgaaattctacccagtttcttaagacaaaacatgtaaatatttgtggccctgaaagatgcagttggcccaacagctttgattggaaaggaagcgtaatagctggatctcctttcagcagctaatcaaggtgtcacttaacaatggcctgcg

SEQ ID NO: 2032 - DNA, 145 bp, Homo sapiens
  misc_feature 1..145: note = U/M: U (0.03:0.87) in Fallopian Epithelium
  misc_feature 1..145: note = source = chr12:51844686-51844830; Gene: SLC4A8 (exon)
  source 1..145: mol_type = genomic DNA
cggatgccgcttggccggcagagccatcggcatcaccgcactcatggccagaagcaccggagacgagggcggggcaaaggagccagccagggggaggaaggcctggaagccctggcccacggtaagggccttgggagacagggcg

SEQ ID NO: 2033 - DNA, 320 bp, Homo sapiens
  misc_feature 1..320: note = U/M: U (0.05:0.87) in Fallopian Epithelium
  misc_feature 1..320: note = source = chr9:78935216-78935535; Gene: PCSK5 (intron)
  source 1..320: mol_type = genomic DNA
cgcacctctagtcccagctactcaggaggctgaggcaggagaatcgcttgaacctgggaggcagaggttgtggtgagccaagatcgtgccatgcactccagcctgggtgacacagcaagactctgtctcaaaaaaaaaaaaagaaaaaaaaaaagtacattgtagctttttttttttttttttttttgagacagaatctcgctctgttatctaggctggagtgcagtggagtggcacaatcttggctcacctcaacctctgccttcctggttcaagcaattctcctgtctcagcctcccgagtagctgggactacaggcg

SEQ ID NO: 2034 - DNA, 393 bp, Homo sapiens
  misc_feature 1..393: note = U/M: U (0.12:0.94) in Fallopian Epithelium
  misc_feature 1..393: note = source = chr10:134593141-134593533; Gene: INPP5A (intron)
  source 1..393: mol_type = genomic DNA
cggcctttgacagcccctgccttctggggctggagtttggacaggctctccccatggggccacccagtgggcagcgggtgtgcaggacaagcagacgggcgccgggcgcgctccgcagcctcatccatcatgacacgcgccgtcacctcgtcaccaagctccgttctgcctccggagccctaaaacaccaaaaggggctcgggacgcgggcggtgctgcttggggagcctcggtgacaagtgttcagtgaggtgtgccgcacgctgcctgtgcccgccgtaatttgtttatctgtccaaagattatgcagttgaaaatccacaattttatgctgcctttgtaaattaccacgctgcgtttgatgaatgtttctccacttctgcggaggcgccg

SEQ ID NO: 2035 - DNA, 426 bp, Homo sapiens
  misc_feature 1..426: note = U/M: U (0.08:0.89) in Fallopian Epithelium
  misc_feature 1..426: note = source = chr9:86409444-86409869; Gene: GKAP1 (intron)
  source 1..426: mol_type = genomic DNA
cgtaagagagaacttgctattgtgcacatactaacagacatgtcacttcagagtgagaaaaataccagtgacgtgtagagtttgaatcaatacagtaacagaagaaatacacaataaaatttggtctgttaatcactgaaacccttaagaagagatttttctacttattttttgagtcatgacttttaaaaaaaggtacactggaatcaatagtatcagtgcatcatgcataaagcagattatacctgaaaaacatctacacagagatttattcctaggcaacagctgttggtgaacaatatgtttcttgatcttgatttaatcgttttaaaaaacagtggctgggtgtggtggctcgcgcctgtaatcccagcactttggtaggtggaggtggggaggggaggatcatctgaggtcaggagttcg

SEQ ID NO: 2036 - DNA, 445 bp, Homo sapiens
  misc_feature 1..445: note = U/M: U (0.12:0.92) in Fallopian Epithelium
  misc_feature 1..445: note = source = chr14:53200200-53200644; Gene: STYX (intron)
  source 1..445: mol_type = genomic DNA
cgcaaggctgcccccaacctcagatggtaatcacaagtagtaggttgtcacctatacactcctgactgactgtaaatcagggttcccgttactccctccttggttcagttaacttgctagagtgacttacaggactcagggaagtacatttacgggtttattataaaggatactacaaaagatcagtgaacagccagtaggaagagatgaatagggcaaggtatgggggaaggggcacaccaccatcccagtgtcaccagtagagtcatgattgcaagctgtccaggttcttggcgttttgaacaaagaattggacaaaactccaagcaaagaaagaatgaagcaacaaaagaacaaaagcagggatttattgaaaacaaaagtacactccacagtgtgggagctgccctagcagcactcccccccgacccccgctgctttaccg

SEQ ID NO: 2037 - DNA, 110 bp, Homo sapiens
  misc_feature 1..110: note = U/M: U (0.12:0.91) in Fallopian Epithelium
  misc_feature 1..110: note = source = chr7:155871852-155871961; Gene: SHH (Intergenic)
  source 1..110: mol_type = genomic DNA
cgttgcccacggtgaagacctggttgaaccaagaaatctctgtgggttgtttgtttccctctggcccgcagcgttgcccatggtgaagacctggttgaaccaagaagccg

SEQ ID NO: 2038 - DNA, 181 bp, Homo sapiens
  misc_feature 1..181: note = U/M: U (0.08:0.83) in Fallopian Epithelium
  misc_feature 1..181: note = source = chr6:550533-550713; Gene: EXOC2 (intron)
  source 1..181: mol_type = genomic DNA
cggccttgagttactctatggctaggaaatggggtataagacaaggtaaatagggttgtattatgtatgatactcctccacgtttcgtgaataaacggccagaaggaaaacagtgaataagcactggaaactcgcccaggtgagggagggacgaggacgctacattcccctccagtccccg

SEQ ID NO: 2039 - DNA, 384 bp, Homo sapiens
  misc_feature 1..384: note = U/M: U (0.17:0.92) in Fallopian Epithelium
  misc_feature 1..384: note = source = chr6:25262929-25263312; Gene: LRRC16A (Intergenic)
  source 1..384: mol_type = genomic DNA
cgggggcaggatagggagagatttgttaaaggacaaaattacaggtagataggaggaataagttctattgttctataccactgtaggtaatacatagtttcgaatagctagaggaggaggaggatacagaatgttcccaacccaagaaatgaccattgtttcagatgatggatatgctaattaccctgatctaatcaccatacattatgtttcaaaacaatactatatacccccatgaatatgtacaattattatttgtcagtttaaaggtttttaaaagattaaaattaaaaaaaaaaagaaaaaaacccggccgggcgccgtggctcacgcctgtaatcccaacactttgggaggccgaggcgggcggatcatgaggtcccg

SEQ ID NO: 2040 - DNA, 350 bp, Homo sapiens
  misc_feature 1..350: note = U/M: U (0.18:0.86) in Fallopian Epithelium
  misc_feature 1..350: note = source = chr11:71888432-71888781; Gene: FOLR1 (Intergenic)
  source 1..350: mol_type = genomic DNA
cgccctgccccctcccacagctctggtctccttcaagggtaaagcggctgagatacgtggctgacaggagtgttccgtctcctccccactcaggtcaaccagagctggcgcaaagagcgcattctgaacgtgcccctgtgcaaagaggactgtgagcgctggtgggaggactgtcgcacctcctacacctgcaaaagcaactggcacaaaggctggaattggacctcaggtgagggacggaggagatgaggtgaggagtgggagtggggctttggggttgggaggggtgtggtctggcccagaagctaagggtcttacattctcctccctcagggattaatgagtgtccg

SEQ ID NO: 2041 - DNA, 231 bp, Homo sapiens
  misc_feature 1..231: note = U/M: U (0.08:0.74) in Fallopian Epithelium
  misc_feature 1..231: note = source = chr20:23666367-23666597; Gene: CST4,CST4 (exon,intron)
  source 1..231: mol_type = genomic DNA
cgccctgctgagcaacaaaggactcctgcagccttctctgtctgtctcttggcacaggcacatggggaggcctcccgcagggtgggggccaccagtccaggggtgggagcactacagtgggtgggagtgggtggtggtcggtgtgactggcctggcacagacccctaggcttcttgacacctggaattcaccagggacattctgtcctcccagggaacttcgtagatctcg

SEQ ID NO: 2042 - DNA, 112 bp, Homo sapiens
  misc_feature 1..112: note = U/M: U (0.32:0.84) in Fallopian Epithelium
  misc_feature 1..112: note = source = chr7:121090-121201; Gene: FAM20C (Intergenic)
  source 1..112: mol_type = genomic DNA
cggtctgggactccttggaccaagcattactgggaggcaacctgaatgccctcggtgtgagcgtggaaagatggcagcttcaaggctgggctccgcagtggggcaggccccg

SEQ ID NO: 2043 - DNA, 204 bp, Homo sapiens
  misc_feature 1..204: note = U/M: M (0.82:0.09) in Fallopian Epithelium
  misc_feature 1..204: note = source = chr10:95361578-95361781; Gene: RBP4 (promoter-TSS)
  source 1..204: mol_type = genomic DNA
cgttaaaaccctccctgttaaatattctccagaaacgcaaccctggtcaggacaggaaatattttagcagcctcggtggtcgcctgcttactccgtggcacttccctgaaaccactttgaaaaacacctaccgattgtttatgatgcaattttatttcaaacccatgttggaattttcatttattttcaaaacagctaaggtcg

SEQ ID NO: 2044 - DNA, 113 bp, Homo sapiens
  misc_feature 1..113: note = U/M: M (0.84:0.13) in Fallopian Epithelium
  misc_feature 1..113: note = source = chr2:120188912-120189024; Gene: TMEM37 (promoter-TSS)
  source 1..113: mol_type = genomic DNA
cggcaagagccccacctttcacattcattatttcccttactaaccgaggctccgagacgctaaacaagcagcccaaggtcacaccgcagagtgagggcagcagagcctctgcg

SEQ ID NO: 2045 - DNA, 156 bp, Homo sapiens
  misc_feature 1..156: note = U/M: M (0.8:0.18) in Fallopian Epithelium
  misc_feature 1..156: note = source = chr11:115227865-115228020; Gene: CADM1 (intron)
  source 1..156: mol_type = genomic DNA
cgggcctttcaggaaccccagctagatgtgctggcagaagcccaggctcccccaaaggcattcgctcctgctgtaccccagcctgcttcccattcaggtttctgccagtataaacagagccacgtgtaggaaaacaacgctgctctattaataccg

SEQ ID NO: 2046 - DNA, 282 bp, Homo sapiens
  misc_feature 1..282: note = U/M: M (0.78:0.17) in Fallopian Epithelium
  misc_feature 1..282: note = source = chr11:41480355-41480636; Gene: LRRC4C (intron)
  source 1..282: mol_type = genomic DNA
cgagagaatcagtgcaaaaagagagaggttcaaaatactaaacaatttccactttgttctcatttgctccaattaagagctggtgaagcagcttttctgtattccacgcattcgctactctctagagcagatataactattcaagaagaaaaaaatagagctatggggagggggaagtctactattaagttatcgtgaaagtccggattacatccccacctccccagcccccagtctctgagcagatacactttgcctctaactcagagcctctgccagtcg

SEQ ID NO: 2047 - DNA, 250 bp, Homo sapiens
  misc_feature 1..250: note = U/M: M (0.76:0.16) in Fallopian Epithelium
  misc_feature 1..250: note = source = chr5:67535502-67535751; Gene: PIK3R1 (intron)
  source 1..250: mol_type = genomic DNA
cgaaaggggcgccgggggttaatgttcacactgcttgatgctgctgacttccgaccagccacaaggcaccccggagccaaaggcagatgactccctggcttgccagtgacgtgtgatgcggtctgatatgacaaagtgagttaaacaagcagatttttcctctcaggaaacagacacaagaacaactgaaaagaataaagcagatgtgtgagttactattccttacagcaaaagaacctcatcagaaccg

SEQ ID NO: 2048 - DNA, 65 bp, Homo sapiens
  misc_feature 1..65: note = U/M: M (0.83:0.24) in Fallopian Epithelium
  misc_feature 1..65: note = source = chr5:59190362-59190426; Gene: PDE4D (promoter-TSS)
  source 1..65: mol_type = genomic DNA
cgggagtggtcctcgctggaaatcaaggcgagtcgtccttagttgcagagccatggctgagcccg

SEQ ID NO: 2049 - DNA, 54 bp, Homo sapiens
  misc_feature 1..54: note = U/M: M (0.66:0.1) in Fallopian Epithelium
  misc_feature 1..54: note = source = chr5:64398711-64398764; Gene: CWC27 (Intergenic)
  source 1..54: mol_type = genomic DNA
cggggcgagcggtgggcaaagctttctgtgtatttgcagctcagcagtcgagcg

SEQ ID NO: 2050 - DNA, 94 bp, Homo sapiens
  misc_feature 1..94: note = U/M: M (0.73:0.2) in Fallopian Epithelium
  misc_feature 1..94: note = source = chr18:3013769-3013862; Gene: LPIN2 (Intergenic)
  source 1..94: mol_type = genomic DNA
cgctctgttaccccggctggtctccaactcctgggctcaagcatccccgcacctcggcctcccaaagtactggaattacaggcatgagccaccg

SEQ ID NO: 2051 - DNA, 217 bp, Homo sapiens
  misc_feature 1..217: note = U/M: M (0.69:0.16) in Fallopian Epithelium
  misc_feature 1..217: note = source = chr6:96024313-96024529; Gene: MANEA (promoter-TSS)
  source 1..217: mol_type = genomic DNA
cgatgtgccagtctagtttatgggaaatggacttgtatacagacgaatctcaaaacctctcaaaacctaaattagtgaaaaaaggggaaaaatgaagaatgattcacatatgaaatataaaactaggaaaatagtatttttagggaatcgtacatatgtaactattttcagaaatacaacggaatgagtaatataaaattcagcataatggtgaacg

SEQ ID NO: 2052 - DNA, 90 bp, Homo sapiens
  misc_feature 1..90: note = U/M: M (0.65:0.16) in Fallopian Epithelium
  misc_feature 1..90: note = source = chr16:3015411-3015500; Gene: KREMEN2,KREMEN2 (intron,exon)
  source 1..90: mol_type = genomic DNA
cggtctgaggcaggatggacccagcgggaggagagccgcaaagctcaggagctcacttctgcttttaagtggggttggaggccaggcgcg

SEQ ID NO: 2053 - DNA, 141 bp, Homo sapiens
  misc_feature 1..141: note = U/M: M (0.69:0.21) in Fallopian Epithelium
  misc_feature 1..141: note = source = chr5:87066677-87066817; Gene: CCNH (Intergenic)
  source 1..141: mol_type = genomic DNA
cggagccaaccttcttcgcagctccccactccccagctccccggctccccacctccccacctcctggtggtgcaagccaagttttctgccgaggcctggaagttaagggatgcgcagggcttgcctgaggttgccatagcg

SEQ ID NO: 2054 - DNA, 146 bp, Homo sapiens
  misc_feature 1..146: note = U/M: M (0.59:0.12) in Fallopian Epithelium
  misc_feature 1..146: note = source = chr12:125399869-125400014; Gene: UBC (promoter-TSS)
  source 1..146: mol_type = genomic DNA
cgggcgtggccctaaagctggggaacgctcgagaactttccaggggagacactgcagaggagctgggtgtccaggttaaatttggaaaaaagaggcggaaaccccacacagttttattttagctggaacgcaaggctgagcgaacg

SEQ ID NO: 2055 - DNA, 271 bp, Homo sapiens
  misc_feature 1..271: note = U/M: M (0.66:0.19) in Fallopian Epithelium
  misc_feature 1..271: note = source = chr11:46696375-46696645; Gene: ATG13 (exon)
  source 1..271: mol_type = genomic DNA
cgttatcagctctttattgctcttacataacaactcaccctggagggaaaaacaacagtgcaaggcagggagtgcagggctccccaagccatctgggggatttgtggctgagcaagcagaagagaagtagcaggaagttaaaggtccatgcaagtttgttagctgccttgatctgactggcggtgcttgagcagccaggaagagtagaagagccccggggtatgcgtcctgtctggctcctggggcctggggctgcaggcctctcaacccg

SEQ ID NO: 2056 - DNA, 299 bp, Homo sapiens
  misc_feature 1..299: note = U/M: M (0.64:0.18) in Fallopian Epithelium
  misc_feature 1..299: note = source = chr6:47276031-47276329; Gene: TNFRSF21 (intron)
  source 1..299: mol_type = genomic DNA
cgttaagcccttttggggaaggagacagcaagcctgcttttcccttacacagccctgtcgtgaaaacaagctcttgtttcttgggggtttttttgttcggtttttagctaagaatttccatccctcctgcagtgataaaagataggcaagggaagctcaagggtttgatctcaaattttcttccacctaacttgccccttcaccccaatatttggaaataaagggagggaatttgggggaagttgagggtaagtttttggtcaagatgattgacccgagatgtggatgcagcttagacg

SEQ ID NO: 2057 - DNA, 128 bp, Homo sapiens
  misc_feature 1..128: note = U/M: M (0.58:0.16) in Fallopian Epithelium
  misc_feature 1..128: note = source = chr1:45279151-45279278; Gene: BTBD19 (intron)
  source 1..128: mol_type = genomic DNA
cggcaggaaccactcatcccggtggggacgcggggaaccggcccagctccactcagcagggggtacagggcgctgggagggggcaggagcagcccggcccacggtcctcggggcgaggggccaccgcg

SEQ ID NO: 2058 - DNA, 252 bp, Homo sapiens
  misc_feature 1..252: note = U/M: M (0.71:0.29) in Fallopian Epithelium
  misc_feature 1..252: note = source = chrX:86773263-86773514; Gene: KLHL4 (intron)
  source 1..252: mol_type = genomic DNA
cgcgcacaagatttggagatgatggctgatgacaatatagaagattctacagcaaggtaagagtttttggtcgcataactgaatgccgtaacttcagttaacttatcctctacaattcatgtttagtgtttaaatagaaagtgtcataataatctctgagtttgtattcagccaatcagagtctctcagaaaccgtctcctctaagtttataaaagaaaacagcaataatgaatacgtctttataattaccg

SEQ ID NO: 2059 - DNA, 90 bp, Homo sapiens
  misc_feature 1..90: note = U/M: M (0.62:0.23) in Fallopian Epithelium
  misc_feature 1..90: note = source = chr4:83482420-83482509; Gene: TMEM150C (intron)
  source 1..90: mol_type = genomic DNA
cggcctcccgccgaaaaaccaaaaatcccatttcttcccaagtgtgcgcccaggaaaggaaggaagactgtgcatttagagtggagggcg

SEQ ID NO: 2060 - DNA, 257 bp, Homo sapiens
  misc_feature 1..257: note = U/M: M (0.55:0.16) in Fallopian Epithelium
  misc_feature 1..257: note = source = chr21:46898103-46898359; Gene: COL18A1 (intron)
  source 1..257: mol_type = genomic DNA
cgcgggtgcgaggacatcgggggaaggcgtctgccgcctcgtggggacttggagcgtggggtgcatttccatgtagacactgtaggtggcgccggaggagtcatttcccatcactaatggcttctcttgcacacccagggcgaccccggtgaagacggaaagccggtgagtctgcttttctttctgacccctgtgttatctgtgatgtttgcttagaccccagggctttgttgccagtgacactctttttaaacgcg

SEQ ID NO: 2061 - DNA, 202 bp, Homo sapiens
  misc_feature 1..202: note = U/M: M (0.54:0.22) in Fallopian Epithelium
  misc_feature 1..202: note = source = chrX:24483799-24484000; Gene: PDK3 (intron)
  source 1..202: mol_type = genomic DNA
cggggggctctcctggggctcggatttcggggcgcggaggggcagggcctggccccctcgcacccagcctgggacttacccggagacacagaaacggcgtctcattgcaggaccctcatcgcaggcgagactccccaaacctgcggtcgttagcttcaaatctgcttgacacaaacctcacagcccttaaaacttcagaacg

SEQ ID NO: 2062 - DNA, 349 bp, Homo sapiens
  misc_feature 1..349: note = U/M: M (0.69:0.05) in Fallopian Epithelium
  misc_feature 1..349: note = source = chr17:16284988-16285336; Gene: UBB,UBB (exon,intron)
  source 1..349: mol_type = genomic DNA
cgcttggtaagagagcgctctggattttccgctgttgacgttgaaaccttgaatgacgaatttcgtattaagtgacttagccttgtaaaattgaggggaggcttgcggaatattaacgtatttaaggcattttgaaggaatagttgctaattttgaagaatattaggtgtaaaagcaagaaatacaatgatcctgaggtgacacgcttatgttttacttttaaactaggtcaaaatgcagatcttcgtgaaaacccttaccggcaagaccatcacccttgaggtggagcccagtgacaccatcgaaaatgtgaaggccaagatccaggataaggaaggcattccccccg

SEQ ID NO: 2063 - DNA, 219 bp, Homo sapiens
  misc_feature 1..219: note = U/M: M (0.76:0.14) in Fallopian Epithelium
  misc_feature 1..219: note = source = chr16:10274415-10274633; Gene: GRIN2A (intron)
  source 1..219: mol_type = genomic DNA
cggactccattccgagtccccgacgccatccacatccctcgatccatctctaactctatccacaactccaattcgagctaattctccatcccccagccccttctcgcatccagcttcctcatcccctgtctccaggcacttccccatccccatctctgtccatatcccccaccgcattccccaagttcgccgcgggccacagaccctaagcgccgcgcg

SEQ ID NO: 2064 - DNA, 176 bp, Homo sapiens
  misc_feature 1..176: note = U/M: M (0.78:0.17) in Fallopian Epithelium
  misc_feature 1..176: note = source = chr5:59187838-59188013; Gene: PDE4D (intron)
  source 1..176: mol_type = genomic DNA
cgacccctctactttactattagatgtgccaaggatcagcagctcctgaaatctttttcctgtgcctgtgtgggggaggggattcacggcgtggaaggcctgggacagggaagaaaggagctgtccctgggttatcaggaaagggaccaaacgtgggccccacatccacctccacg

SEQ ID NO: 2065 - DNA, 73 bp, Homo sapiens
  misc_feature 1..73: note = U/M: M (0.61:0.08) in Fallopian Epithelium
  misc_feature 1..73: note = source = chr17:48619146-48619218; Gene: EPN3 (intron)
  source 1..73: mol_type = genomic DNA
cgacctcccggtgtagggctctgaaccccgggtcactcaaagccactctcgttctgcaggtctcagcgctccg

SEQ ID NO: 2066 - DNA, 223 bp, Homo sapiens
  misc_feature 1..223: note = U/M: M (0.62:0.16) in Fallopian Epithelium
  misc_feature 1..223: note = source = chr3:151985697-151985919; Gene: MBNL1 (promoter-TSS)
  source 1..223: mol_type = genomic DNA
cgtttttcactagaatcatccttgaacaagttatccgaattccttacattcaaaggaaatcctgcccccagtctccaaaacttcatcacatcacagacgttcaggattctttccattcaaagcaaagccaagttacatcttatagcacccagtgaattatgatatggggctgcggtttatttgctctggcgacaatatggcttacttgccgtggaatatcccg

SEQ ID NO: 2067 - DNA, 66 bp, Homo sapiens
  misc_feature 1..66: note = U/M: M (0.59:0.17) in Fallopian Epithelium
  misc_feature 1..66: note = source = chr14:105189951-105190016; Gene: ADSSL1 (promoter-TSS)
  source 1..66: mol_type = genomic DNA
cgagccacagcgcgcccgggcgggacgcggggcccctgccgtggggcagaagtgcgggcagttgcg

SEQ ID NO: 2068 - DNA, 73 bp, Homo sapiens
  misc_feature 1..73: note = U/M: U (0.09:0.96) in Kidney Epithelium
  misc_feature 1..73: note = source = chr19:39180344-39180416; Gene: ACTN4 (intron)
  source 1..73: mol_type = genomic DNA
cgctctgttgcccaggctggagtgcagtggcgcgatcttggctcattgcaacctttgcctcccgggttcaagc

SEQ ID NO: 2069 - DNA, 382 bp, Homo sapiens
  misc_feature 1..382: note = U/M: U (0.07:0.94) in Kidney Epithelium
  misc_feature 1..382: note = source = chr3:125062531-125062912; Gene: ZNF148 (intron)
  source 1..382: mol_type = genomic DNA
cgccagccagcagcagcaatccgctcgggtccccatccacactgtggaagctttgtcctttcttcaaaataaaccttgctaccgctcactctttgggtccgtgccatctttaagagctgtaacactcactgaacgcaaaggtccatggcttcattcttgaagttagagagaccacgaacccaccgacaggaaccaactccggacacaccaacaataaactgaaaagtctatgacaaatggggactctgttgagctgtctataaatactttagatttggtacaattatactgaaagttgagttcatttgaaatgttcaaaaaaaatgttcctgttaatcttcaaatggtgcttgttatagtttaacagttctgttaaatgcac

SEQ ID NO: 2070 - DNA, 100 bp, Homo sapiens
  misc_feature 1..100: note = U/M: U (0.08:0.88) in Kidney Epithelium
  misc_feature 1..100: note = source = chr7:12583963-12584062; Gene: SCIN (Intergenic)
  source 1..100: mol_type = genomic DNA
cgggcgtagtggcctgcacctctaatcccagctactcaggaggctgaggaggagaattgctcgaacctgggagatggaggttgtaatgagccgagatcac

SEQ ID NO: 2071 - DNA, 251 bp, Homo sapiens
  misc_feature 1..251: note = U/M: U (0.15:0.95) in Kidney Epithelium
  misc_feature 1..251: note = source = chr2:39015988-39016238; Gene: GEMIN6 (Intergenic)
  source 1..251: mol_type = genomic DNA
cgctataggagaagggttactgagcctaggaactaaagtttttaatcaggcttcactttaaacatcctacagtcagccaggtgcggtggctcatgcctgtaatcccagcactttgggagaccaaggcgggtggatcacctgagatcaggaattcgagaccagcgtgatcagcatggtgaaaccccgtctctactaaaaattagccaggtggtaattagcgtggtggtgagtgcctgtaatcccagctactc

SEQ ID NO: 2072 - DNA, 220 bp, Homo sapiens
  misc_feature 1..220: note = U/M: U (0.15:0.93) in Kidney Epithelium
  misc_feature 1..220: note = source = chr7:87640622-87640841; Gene: ADAM22 (intron)
  source 1..220: mol_type = genomic DNA
cgaggcgggcggatcacaaggtcaggagattgagaccatcctggctaatggggtgaaacccgtctctactaaaaatacaaaaaattagccaggcatggtggcaggcacctgtagtcccagctacttcagaggctgaggcaggagaatggcgtgaacccggcaggcagagcttgcagtgagccgagatcgcaccactgcactccagcctgggtgacagagc

SEQ ID NO: 2073 - DNA, 96 bp, Homo sapiens
  misc_feature 1..96: note = U/M: U (0.14:0.9) in Kidney Epithelium
  misc_feature 1..96: note = source = chr19:8064907-8065002; Gene: ELAVL1 (intron)
  source 1..96: mol_type = genomic DNA
cgccttggcctcccaaagtgctgggattacaagcatgagccaccacgcttggccgcttttttatgttttgtagaggcgggggcgggggggtgtctc

SEQ ID NO: 2074 - DNA, 359 bp, Homo sapiens
  misc_feature 1..359: note = U/M: U (0.16:0.92) in Kidney Epithelium
  misc_feature 1..359: note = source = chr2:203529169-203529527; Gene: FAM117B (intron)
  source 1..359: mol_type = genomic DNA
cgagaatgagacaactgaggcattggccctggatacatgtttttggtgtctgccagaaagcttggtaattgagataaataatatttaaataaaatgcttcaaaataaaaattaatttaacacaattcaaagaactaattatgaaaattttaaagatagggtccaacagggcaaagattaagagtcatgcaagtacatgattgagtcctgtttaaaattttgatagttcgttatcatgcatgacttaccttgagtaatttatctatctagtaagttattttgccctcagaacacgtgcctcatttgccttaccgtagtagttttggcctcgcttataagaagtcagtctgaaggaattac

SEQ ID NO: 2075 - DNA, 194 bp, Homo sapiens
  misc_feature 1..194: note = U/M: U (0.21:0.96) in Kidney Epithelium
  misc_feature 1..194: note = source = chr1:70661377-70661570; Gene: LRRC40 (intron)
  source 1..194: mol_type = genomic DNA
cgcagtcctggctcactgcaacctccgcctcccgggttcaagggattctctgcctcagcctcccgagcagcagctggacttacaggcatgtgccaccatgcctggctaatttttgtatttttagtagaggcggggtttcgccatgttggccaggctggtctcgaactcctggcctcaagtgatccacctgcctc

SEQ ID NO: 2076 - DNA, 270 bp, Homo sapiens
  misc_feature 1..270: note = U/M: U (0.15:0.9) in Kidney Epithelium
  misc_feature 1..270: note = source = chr4:28642378-28642647; Gene: MIR4275 (Intergenic)
  source 1..270: mol_type = genomic DNA
cgcgtctgtaatcccagcactttgagaggcccaggcgggcggatcacaaggtcaggaaatcgagaccatcctgactaacacggtgaaaccccatctctactaaaaatacaaaaaattagccgagcgtggtgacatgcgcccagtaactcccaagtcccagttactcgagaggctgaggcaggaaaatcgcttgacgggaggctgaggttgcagtgaactgagatcgcgccactgcacgccagtctgggcaacaaaagcaaaactccgtcc

SEQ ID NO: 2077 - DNA, 102 bp, Homo sapiens
  misc_feature 1..102: note = U/M: U (0.21:0.92) in Kidney Epithelium
  misc_feature 1..102: note = source = chr6:241052-241153; Gene: DUSP22 (Intergenic)
  source 1..102: mol_type = genomic DNA
cgtgtaccaccgcgcccggctaattttgtatttttaatagagtcggggtttctccatgttggtcaggctggtctctaactcccgacctcaggtgatccgccc

SEQ ID NO: 2078 - DNA, 120 bp, Homo sapiens
  misc_feature 1..120: note = U/M: U (0.22:0.93) in Kidney Epithelium
  misc_feature 1..120: note = source = chr5:112953981-112954100; Gene: YTHDC2 (Intergenic)
  source 1..120: mol_type = genomic DNA
cggcaacccgcttgggtcccctttcacgctgtggaagctttgttctttcgctcttcacaataaatcttgccgctgctctctttgggtctgcactgttttatgagctgtaacactcacagc

SEQ ID NO: 2079 - DNA, 274 bp, Homo sapiens
  misc_feature 1..274: note = U/M: U (0.23:0.92) in Kidney Epithelium
  misc_feature 1..274: note = source = chr10:972671-972944; Gene: LARP4B (intron)
  source 1..274: mol_type = genomic DNA
cgctttcaaatttgtgttaaacatggccgggcgcagtggctcacgcctgtaatcccagcactctgggaggccaaggcagatgggtcacttgaggtcagaagttcaagaccagcctggccaacacagtgaaacccaatttgtactaaagtacaaaaattagccgggcgtggtggcacgcacctgtatgtagtcccagctactcaggaggctgaggcaggggaatcgcttaaaccctggaggcagaggttgcagtgagccgtgatcgtgccagtgc

SEQ ID NO: 2080 - DNA, 370 bp, Homo sapiens
  misc_feature 1..370: note = U/M: U (0.3:0.93) in Kidney Epithelium
  misc_feature 1..370: note = source = chr10:99251294-99251663; Gene: MMS19 (intron)
  source 1..370: mol_type = genomic DNA
cgcctgtagtcccagctactcaggagactgaggcagaagaattgcttgaacctgggaggcagaggttgcagtgagccgaaatcacgcctgggcgatagagcgagactccgtctcaaagaaaaaaaaagaaaaatgcttctttggcattctgcatacattaatatgaaaatggctgctttataattacaaataaatagccatttgcatgtggttccttgaatcccagtatgtgggtgaactctcctggcaaagccctttagtcttcatatagctttcacaaaattcttgaattaatgcagcacaaacataaaagtgactataaggccgggcacggtggctcatgccagtaatcctagtactctgggaggcc

SEQ ID NO: 2081 - DNA, 185 bp, Homo sapiens
  misc_feature 1..185: note = U/M: U (0.06:0.91) in Kidney Epithelium
  misc_feature 1..185: note = source = chr21:35212230-35212414; Gene: ITSN1,ITSN1 (TTS,intron)
  source 1..185: mol_type = genomic DNA
cgcaacaaagaatgatctggccccagatgtcaccagagctgaggttgagaagcgcaggtctcaccccactggccactgtggttaatgttcacctggttattcaccaccagaaaggctgccccggtaactcctgttgaataaatttaatcacctaagctcatgtcgtgtatctgcagcatcaaacg

SEQ ID NO: 2082 - DNA, 301 bp, Homo sapiens
  misc_feature 1..301: note = U/M: U (0.09:0.91) in Kidney Epithelium
  misc_feature 1..301: note = source = chr2:99302337-99302637; Gene: MGAT4A (intron)
  source 1..301: mol_type = genomic DNA
cggagaagcccagaggtagccagcattgtcctcggggtagttctagactcgagcaacctagaagtttatgtagttctagtctaccagttccttctcctctcccttcctctggcccacaggttaagggttccagggacagggggcgctcattaaaatgtttagggccgtaatcctgaagattaacttgggacagagagggttttccaagtatccagtgaacaccagtttcaaaggtctcttacatggcattatcaagattattctggttttggagtactccagtcaggatccaacacatacg

SEQ ID NO: 2083 - DNA, 472 bp, Homo sapiens
  misc_feature 1..472: note = U/M: U (0.1:0.89) in Kidney Epithelium
  misc_feature 1..472: note = source = chr5:40996004-40996475; Gene: MROH2B (Intergenic)
  source 1..472: mol_type = genomic DNA
cgattctatacagaaattcgtatacaactttgctaggatcatggactctctgtgtaacagttacctactggtgcctagcaaattacctcaaaacccagtggcttaaaacactaaagttttattatctcacacagtttcatggttcaggaatttgggaatagcttggttaatgattctggttaaagattctcattagattttgcttgaattgctagattttgctaataaaaatacaagatgctcagctaaatttgaattcatgataaacaagaaatagttttttagtgtaatatataactaggatatatttttaccaaaaaattcaacatttatctgaaattcaaatttagctgggcaggtgtattttatctcacactcctaggtttcagtcaatgtgtgagtgagctggggtttcagtcgtctgtagactaatgggctcttgggtccattccggagatgattcacttacacg

SEQ ID NO: 2084 - DNA, 94 bp, Homo sapiens
  misc_feature 1..94: note = U/M: U (0.08:0.86) in Kidney Epithelium
  misc_feature 1..94: note = source = chr15:61181729-61181822; Gene: RORA (intron)
  source 1..94: mol_type = genomic DNA
cgaaggcaaaggctgaacagttggggagagcgacagttggagagaagagcatcagaggcctcgtggtaaacccaaatgagagctgcgctgtgcg

SEQ ID NO: 2085 - DNA, 104 bp, Homo sapiens
  misc_feature 1..104: note = U/M: U (0.17:0.93) in Kidney Epithelium
  misc_feature 1..104: note = source = chr1:96985133-96985236; Gene: PTBP2 (Intergenic)
  source 1..104: mol_type = genomic DNA
cgtgcgatctcggctcgctgcaagctctgcctcccgggttcacgccattctcctgcttcagcctcccgagtagctgggattataggcacccgccatcacgcccg

SEQ ID NO: 2086 - DNA, 279 bp, Homo sapiens
  misc_feature 1..279: note = U/M: U (0.13:0.89) in Kidney Epithelium
  misc_feature 1..279: note = source = chr6:170564874-170565152; Gene: LOC154449 (intron)
  source 1..279: mol_type = genomic DNA
cgtgacccactccctcgtccacgaccatggagccagccgtgacccactccctcgtccgcgaccatggaaccgagcccctgtctcctgcacaccacaccagccagccgtgaccccactccctcgtccgcgaccatggaaccgagcccccgtctcctgcacaccacaccagccagccgtgaccccactccctcgtccgcgaccatggaaccgagcccccgtctcctgcacaccacaccagccagccgtgacccactccctcgtccgcgaccacgtaggtcg

SEQ ID NO: 2087 - DNA, 234 bp, Homo sapiens
  misc_feature 1..234: note = U/M: U (0.16:0.9) in Kidney Epithelium
  misc_feature 1..234: note = source = chr8:116559924-116560157; Gene: TRPS1 (intron)
  source 1..234: mol_type = genomic DNA
cgggaaaggcttcattcctttcactcccgaagagtagctgcctttatcttagccatctctccaccattccttctacgctgcacttatttcggttttccttttgtgtcctgttgtctactttgaacagtgaattaattacctgagaactaaactgtgctgggttgtaaacactagaaataaattaacttgtggctactctaaggatcacttctattttaagagaaaacttctacg

SEQ ID NO: 2088 - DNA, 238 bp, Homo sapiens
  misc_feature 1..238: note = U/M: U (0.17:0.91) in Kidney Epithelium
  misc_feature 1..238: note = source = chr20:3371067-3371304; Gene: C20orf194 (intron)
  source 1..238: mol_type = genomic DNA
cggtggcacgatcttggctcactgcaacctctacctcctgcgttcaagtgattttcctgcctcagcctccctgtagctgggattacaggcgtgtgccaccatgcccagctaatttttgcatttttagtagagacagggtttcaccatgttggccaggctgttctcgaactcctgacctcaggtgatttgcccgccttggcctcccaaagtgctgggattacaagtgtgaggtgccacg

SEQ ID NO: 2089 - DNA, 37 bp, Homo sapiens
  misc_feature 1..37: note = U/M: U (0.12:0.85) in Kidney Epithelium
  misc_feature 1..37: note = source = chr7:68500931-68500967; Gene: AUTS2 (Intergenic)
  source 1..37: mol_type = genomic DNA
cgcgggcactcgagatgatctgtacggcctcccagcg

SEQ ID NO: 2090 - DNA, 154 bp, Homo sapiens
  misc_feature 1..154: note = U/M: U (0.1:0.83) in Kidney Epithelium
  misc_feature 1..154: note = source = chr6:153471717-153471870; Gene: RGS17 (Intergenic)
  source 1..154: mol_type = genomic DNA
cgggacacagcacagggagaaggaagaaaccccgttgcaggctcgcccagggatgcaccggaaaatagagcatgagcagctgttgggccccaagggtgggcccagagcccctctactgtggtggagcacacttcctctggtccctgtgcccccg

SEQ ID NO: 2091 - DNA, 234 bp, Homo sapiens
  misc_feature 1..234: note = U/M: U (0.15:0.88) in Kidney Epithelium
  misc_feature 1..234: note = source = chr11:11626479-11626712; Gene: GALNT18 (intron)
  source 1..234: mol_type = genomic DNA
cgtgagtctgcggaggtaaaaaaaaagaatggaatagtcctttttaaatgacattttcaatttttcccctatgtctactatgccctcttccacgctactgcctaaatgactcttctcaaattgaaaatatcagagaataataggaaaagaaaaatcatagttgtctgaggctccggctaatgggctgtgctgtcccgacaggcagagtctgaggaggaacttttactgtgtccg

SEQ ID NO: 2092 - DNA, 248 bp, Homo sapiens
  misc_feature 1..248: note = U/M: U (0.16:0.89) in Kidney Epithelium
  misc_feature 1..248: note = source = chr4:37984614-37984861; Gene: TBC1D1 (intron)
  source 1..248: mol_type = genomic DNA
cgagactgctggggggagtagcagaggcgaatgaggaccaggatgagcatggcatacagacccctttggtattttattctggagcagtgaagacccattaggggccaaagatgatctttccccaaactcttttttttttttttttttttcagacggagtctcgctctgtcaccaggctggagtgcagtggtgcgatctcggctccctccacctcccaggttcaagtgattctcctgcctcagctcccg

SEQ ID NO: 2093 - DNA, 199 bp, Homo sapiens
  misc_feature 1..199: note = U/M: U (0.16:0.88) in Kidney Epithelium
  misc_feature 1..199: note = source = chr3:153086894-153087092; Gene: C3orf79 (Intergenic)
  source 1..199: mol_type = genomic DNA
cggcgcatctggagtcgttcgttcttcccgtccggaggagttgtttgtccctcccagtgggttcatggtctcgctggcttcaggagtgaagctgcagccttcacggtgagtgttacagctcataaaggtgacacagacccaaagagtgagcagcagcaagatttattgcaaagagcaaaagaacaaagcttccacagcg

SEQ ID NO: 2094 - DNA, 225 bp, Homo sapiens
  misc_feature 1..225: note = U/M: U (0.07:0.79) in Kidney Epithelium
  misc_feature 1..225: note = source = chr13:23423085-23423309; Gene: BASP1P1 (Intergenic)
  source 1..225: mol_type = genomic DNA
cgctttaaagtatagaagctgctccagggcttccgcagccccggccgtcctggagatactcgttccctggagtccgtagttgagaatttacagctcctggacagccacgtgcagtctcagaactgcaggcgtctttaccgaaatgttaaacacagcttgaagttaggcaggataactgccagagctggatggaccttagaggtgccagctaatgcgctgtgagcg

SEQ ID NO: 2095 - DNA, 363 bp, Homo sapiens
  misc_feature 1..363: note = U/M: U (0.18:0.9) in Kidney Epithelium
  misc_feature 1..363: note = source = chr3:43261018-43261380; Gene: SNRK (Intergenic)
  source 1..363: mol_type = genomic DNA
cggagtcccaattctctaggactttggctatctcacggcagagtagcttataaatttttgccaatgcagtaattttaacagtcattttcaaagcaggcttcaaagcactggtgggatacaagaattctcctgatgagtgcaaactgctttccaaagaggtaaattccctctgctcctctgagtgaatgccacacagtcctccaactgtcgcttttatggagagttcattgcttcttactagtaacctattaagagaatcagtaaggatgggtgaatttggaatttgtgaaccaaaagcactgtgtgacctgaatactttaattcaggcttctactccaaattctgtcatccgtgcagcaagcg

SEQ ID NO: 2096 - DNA, 452 bp, Homo sapiens
  misc_feature 1..452: note = U/M: U (0.12:0.84) in Kidney Epithelium
  misc_feature 1..452: note = source = chr12:124388479-124388930; Gene: DNAH10 (intron)
  source 1..452: mol_type = genomic DNA
cgcagccgagaggctccgttcctgggtcagtaatgggcttccattctgggctcccgctggagcggtgcatgttccctgtgcttcctatttctctgcctctgtgctgcctgtgaaggctgagcagcgctccttgtccaagtccgtgcccttgttttcttattggtgaaacatttgtgaatttgagcatggaattcagctcactccaggacagaatgacctcccggttcattcttgggaggtcacttggaggtgctgctgtggtcagcaagaagtcattagttcagtgttgaggatggtgtcaaggagggtataaggatcgatgtattaaaacttcagcactaggcgttggaagtttaggctgaggtaccaggacacagtggaagtgcacacccagcggaggggtaggagacacggtcagcacacacatcctccagggaaatttctagctaccg

SEQ ID NO: 2097 - DNA, 473 bp, Homo sapiens
  misc_feature 1..473: note = U/M: U (0.19:0.91) in Kidney Epithelium
  misc_feature 1..473: note = source = chr2:236883965-236884437; Gene: AGAP1 (intron)
  source 1..473: mol_type = genomic DNA
cgtgcatgcatatcgtacagtgttgttttttttcttgcaggaaagcaatacgtgggtgcgtggaagctctcagttaatctgtaaccatccggttagatggactatcatgcagcttgagccattgctgggtagtttggggattttgcatgccgtgattgggagggcagtgtgcttgttttgttatttagaatataacaaggttgtaagagtcttattagcacaaggctctcatcttttctcactcctggggtgcaattagtgtgcacatgacggtgagcacatgactggcaaggagtcagggcccagaaactgttaccttccaggtttatatccagtctacaggggctttcacattgaattctgtgttatttggaggtggctggaggggagatccagttgcacaagtgttactgtcattcttccctcaggttttctccttttcttctccatgaacattccaccggcacctcccg

SEQ ID NO: 2098 - DNA, 216 bp, Homo sapiens
  misc_feature 1..216: note = U/M: U (0.19:0.9) in Kidney Epithelium
  misc_feature 1..216: note = source = chr7:151151464-151151679; Gene: CRYGN (Intergenic)
  source 1..216: mol_type = genomic DNA
cgtgcccagccttgtttttgttttttaattaaaaccggcctgcggcaggagctccacgcgtggaatgtggaagacagcggctttcccaggccttcctcctcgtctcggttcacttgcactgctgtaacaaaattcctgagactgggtaatttagaaggagaagaaactcatgttctcacagttctggagtctgggaagtccaggttatggtgctcg

SEQ ID NO: 2099 - DNA, 229 bp, Homo sapiens
  misc_feature 1..229: note = U/M: U (0.14:0.85) in Kidney Epithelium
  misc_feature 1..229: note = source = chr3:56769039-56769267; Gene: ARHGEF3 (intron)
  source 1..229: mol_type = genomic DNA
cggtggctcactcctgtaatcccagcactttgggaggccgaggtggacggatcacttgaggtcaggaattcaagaacagcctggccaacatggtgaaaccccatctctactaaaaatgcaaaaattagccaagcgtggtgttgggtgcctgtaatcccagctactcgggaagctgaggcaggagaattgcttgaaccctggaggtggaggttgcagtgagccaagatcg

SEQ ID NO: 2100 - DNA, 132 bp, Homo sapiens
  misc_feature 1..132: note = U/M: U (0.2:0.9) in Kidney Epithelium
  misc_feature 1..132: note = source = chr3:192778355-192778486; Gene: MB21D2 (Intergenic)
  source 1..132: mol_type = genomic DNA
cggaacgccagtgcggacaccagggaggctgctaagaacataaccgcttctcatcttgggtctccagtcacagatgcgctgatctgtcttaccatattacccctacgctgagcatggcacagacaaccagcg

SEQ ID NO: 2101 - DNA, 138 bp, Homo sapiens
  misc_feature 1..138: note = U/M: U (0.17:0.87) in Kidney Epithelium
  misc_feature 1..138: note = source = chr2:240722873-240723010; Gene: LOC150935 (TTS)
  source 1..138: mol_type = genomic DNA
cgtgctgtaaaacgggccgtaaaataccccaaatcatttattccactccctcttgccctgtgaaaatgagctggtgagaagaagcgtgaagggggaggtgcttctattttgctggaccctcgctctgccaaccacccg

SEQ ID NO: 2102 - DNA, 145 bp, Homo sapiens
  misc_feature 1..145: note = U/M: U (0.13:0.82) in Kidney Epithelium
  misc_feature 1..145: note = source = chr1:5902819-5902963; Gene: MIR4689 (Intergenic)
  source 1..145: mol_type = genomic DNA
cggtggcagcagcacctagcatgtgccctgatggatgctcattcgtcagcttaatgtgccgtaaggagcagtggcactgccccccttggggcgtaaatctctccactcccagcgcaggctttgggggtgcgggaggagccgtgcg

SEQ ID NO: 2103 - DNA, 255 bp, Homo sapiens
  misc_feature 1..255: note = U/M: U (0.22:0.91) in Kidney Epithelium
  misc_feature 1..255: note = source = chr2:127895700-127895954; Gene: BIN1 (Intergenic)
  source 1..255: mol_type = genomic DNA
cgggggcaggggcagcagggtggggggcacaaccctgggggtttgcacatctttttgctctgcctttctcactgtcagcttctggggctgcccgctggcctttcaggcagacatcccacccccacctccaccccccaccccacagtggccctgggggcaccagagattgagagccactggtttaggcattaacccttctgctgggatgtaccctcccttcctcggactctgccctgtgctcagccatgcgcttcg

SEQ ID NO: 2104 - DNA, 156 bp, Homo sapiens
  misc_feature 1..156: note = U/M: U (0.2:0.88) in Kidney Epithelium
  misc_feature 1..156: note = source = chr5:180015927-180016082; Gene: SCGB3A1 (Intergenic)
  source 1..156: mol_type = genomic DNA
cggctcactgcagcctgacctgtctggctcaagtgaacctcagcctcccgagaagctgggattacaggcacacgtcaccatgcccggataacttcggtacttttttttttttagacggagtctcgctctgtcaccagcctggagtgcactgacacg

SEQ ID NO: 2105 - DNA, 162 bp, Homo sapiens
  misc_feature 1..162: note = U/M: U (0.13:0.81) in Kidney Epithelium
  misc_feature 1..162: note = source = chr6:153471499-153471660; Gene: RGS17 (Intergenic)
  source 1..162: mol_type = genomic DNA
cggctatgtggccgcagcaagagctgtggtacctggtggcagtggtgctgcttggatgggtcccagtggaaacgtgggagacggtgcactggtctcccatgagtgtggagaaggagctgaagcacctggaagtgcacagcaccgagaagtatgcctttgccg

SEQ ID NO: 2106 - DNA, 197 bp, Homo sapiens
  misc_feature 1..197: note = U/M: U (0.23:0.91) in Kidney Epithelium
  misc_feature 1..197: note = source = chr19:38443593-38443789; Gene: SIPA1L3 (intron)
  source 1..197: mol_type = genomic DNA
cgggcacggtggctcacgcctgtaatcccagcactttgggaggccgaggtgggtggattacaaggtcgggagatcctggctaacatggtgaaactccgtctgtactaaaaatacaaaaacaattagccaggcgtggtggcggaggcctgtagtcccagctactcaggaggctgaggcaggagaatggcgtgaacccg

SEQ ID NO: 2107 - DNA, 286 bp, Homo sapiens
  misc_feature 1..286: note = U/M: U (0.22:0.9) in Kidney Epithelium
  misc_feature 1..286: note = source = chr19:18595135-18595420; Gene: ELL (intron)
  source 1..286: mol_type = genomic DNA
cgtggtggcaggtgcctgaaattccagctacccgggaggctgaggcaagaaaatcgcttgaacctgggagggggaggttgcagtgagccaagatcataccactgcactccagcctgggcaacagagtgagactcagtctcaagaaagaaaaataaaaaatttaaaaattagccaggtgtggtaatgcgcacctgcagtcccagctactcaggtgctgaggcagaaggatcacctaagcacaggcgatcgaggctgcagtgagccatggttccaccactgcactccg

SEQ ID NO: 2108 - DNA, 106 bp, Homo sapiens
  misc_feature 1..106: note = U/M: U (0.24:0.91) in Kidney Epithelium
  misc_feature 1..106: note = source = chr13:76871766-76871871; Gene: C13orf45 (Intergenic)
  source 1..106: mol_type = genomic DNA
cgagctatatcacgtaaagcctcttaggccatgacgaaatttttgggtcgcattctgagtgagatgggagcctttggaaggtttgagtggaggggtaaggtgatcg

SEQ ID NO: 2109 - DNA, 182 bp, Homo sapiens
  misc_feature 1..182: note = U/M: U (0.2:0.87) in Kidney Epithelium
  misc_feature 1..182: note = source = chr15:99943993-99944174; Gene: HSP90B2P (Intergenic)
  source 1..182: mol_type = genomic DNA
cgaaccgcccacctcagcccctaccatccatcggcaaacccccgagggctctgggtcagtggctcacagcacgggcactgccacccagggagcattcagacctttgtggggggcgctttcggttgtcacgtgactccagggcactgccaacagaggtgggtgggagaggatgcaggacagcg

SEQ ID NO: 2110 - DNA, 76 bp, Homo sapiens
  misc_feature 1..76: note = U/M: U (0.09:0.75) in Kidney Epithelium
  misc_feature 1..76: note = source = chr13:23422878-23422953; Gene: BASP1P1 (Intergenic)
  source 1..76: mol_type = genomic DNA
cggcctttgttccgggccgctgccaggcctgaggccctcctgggtttcggttcagcgttagttaacagttaacccg

SEQ ID NO: 2111 - DNA, 136 bp, Homo sapiens
  misc_feature 1..136: note = U/M: U (0.21:0.87) in Kidney Epithelium
  misc_feature 1..136: note = source = chr17:1210620-1210755; Gene: TUSC5 (Intergenic)
  source 1..136: mol_type = genomic DNA
cgcctgtaatcccagcactttgggaggccgaggtgggcagatccagaggccaggacttcaagatcatcctggctaacacggtgaaaccccatctctactaaaaatacaaaacattagtggggcgtagtgctgggcg

SEQ ID NO: 2112 - DNA, 101 bp, Homo sapiens
  misc_feature 1..101: note = U/M: U (0.26:0.91) in Kidney Epithelium
  misc_feature 1..101: note = source = chr17:1299134-1299234; Gene: YWHAE (intron)
  source 1..101: mol_type = genomic DNA
cgggctcagtggctcacgcctgtaaccccagcactctgggaggccgaggcgggcggatcacctgaggtcaggagttcgagatcagcctggccaacatggcg

SEQ ID NO: 2113 - DNA, 176 bp, Homo sapiens
  misc_feature 1..176: note = U/M: U (0.22:0.87) in Kidney Epithelium
  misc_feature 1..176: note = source = chr10:1514522-1514697; Gene: ADARB2 (intron)
  source 1..176: mol_type = genomic DNA
cggctcaggggtcagccaggtgtgacgagctctgtgccataggggcgagggccacgcggctcaggggtcagccaggtgtgaggaggtctgggccataggggcgagtgccatgcggctcggggttcagccaggtgtgacgagctctggaccgtgggggtgtacccaagtggacaccg

SEQ ID NO: 2114 - DNA, 190 bp, Homo sapiens
  misc_feature 1..190: note = U/M: U (0.23:0.88) in Kidney Epithelium
  misc_feature 1..190: note = source = chr7:150684071-150684260; Gene: NOS3 (Intergenic)
  source 1..190: mol_type = genomic DNA
cgttctcactctggatccccggaataaaggacaatttcggccaggcgctgtggcttacgcctgtaatcccagcactttgggaggccgaggcgggcggatcatgaggtcaggaaatcgagaccatcctggctaacacggtgaaaccccatctctactacaaatacaaaaaaattagctgggcttgatggcg

SEQ ID NO: 2115 - DNA, 347 bp, Homo sapiens
  misc_feature 1..347: note = U/M: U (0.25:0.9) in Kidney Epithelium
  misc_feature 1..347: note = source = chr10:132891205-132891551; Gene: TCERG1L (exon)
  source 1..347: mol_type = genomic DNA
cgtatcacggtgattagaaatgcatcaaactctgaatgtacaaaagagagagcttcaatatgaaacagtaatcctctgagaacgaagaccccgcagtgccggtgcccgctgggccgtgcaggtctcggccgccccacgcccgtgtccgtctccaccgtgaccccctcgcccccggcacgcccagggtcaacccccgggcttattgcattttttcacaaactcatctcattttccgcagccttagtctgttttccttgtcccgtttcttaagaataagtatgaattggttgaaaaaatgctcctggtcctttcttttttgaacaagtcggaacctctgatcccggccg

SEQ ID NO: 2116 - DNA, 200 bp, Homo sapiens
  misc_feature 1..200: note = U/M: U (0.2:0.84) in Kidney Epithelium
  misc_feature 1..200: note = source = chr11:64733146-64733345; Gene: C11orf85 (Intergenic)
  source 1..200: mol_type = genomic DNA
cggctgggcacagtggctcatgcctgtaatcccagcactttgggaggccgaggcgggctgatcacgaggtcaggagatcgatactatcctggctaacacggtgaaaccccatctctactaaaaatacaaaaaattagccaggcgtggtggcaggcgcctgtagtcccagctactcaggaggctgaggcaggagaatggcg

SEQ ID NO: 2117 - DNA, 329 bp, Homo sapiens
  misc_feature 1..329: note = U/M: U (0.27:0.91) in Kidney Epithelium
  misc_feature 1..329: note = source = chr15:69370689-69371017; Gene: MIR548H4 (intron)
  source 1..329: mol_type = genomic DNA
cgtgaacccaggaggcagaggttgcagtgagctgagatcgcgccactgcactccagcctgggcaacagagcgagactctgtctcaaaaaaaaaaaaaaaaaagatgcatcattaatttatgcaccactaagaaaaatgctgccaattgaaccgtgacgtgttgtggattttatcaagatctgttctaatttcagagatgtgaaaatgtaacggggtggtagggaggtgaggaatgtgcattttattttatttatttattttgagagacagggtctgtctttgtcactcacacaggctggagtgtagtggtgcaatctcagctcactgcg

SEQ ID NO: 2118 - DNA, 85 bp, Homo sapiens
  misc_feature 1..85: note = U/M: U (0.27:0.9) in Kidney Epithelium
  misc_feature 1..85: note = source = chr12:127756296-127756380; Gene: LOC440117 (Intergenic)
  source 1..85: mol_type = genomic DNA
cgccacctcattaactccagggcgaccagcccgcacctcagaaagcaagatgcatccgtcaagagtcgcacctccatggaaggcg

SEQ ID NO: 2119 - DNA, 162 bp, Homo sapiens
  misc_feature 1..162: note = U/M: U (0.24:0.87) in Kidney Epithelium
  misc_feature 1..162: note = source = chr12:131507099-131507260; Gene: GPR133 (intron)
  source 1..162: mol_type = genomic DNA
cgctgtccggctctatcattacggattctgttgctcccgttgtcgcggccgtgaccgtcgggagctctgtccagttggtttctgcctcctttgatgcctccctcattttctgagtccctccttacattcaggcattaaagatatgctgggctcatggaatcg

SEQ ID NO: 2120 - DNA, 226 bp, Homo sapiens
  misc_feature 1..226: note = U/M: U (0.27:0.9) in Kidney Epithelium
  misc_feature 1..226: note = source = chr19:39529370-39529595; Gene: FBXO27 (Intergenic)
  source 1..226: mol_type = genomic DNA
cgcaattcgcccgcctcagcctcccaaagttatgggattacaggcgcgagccacggcgcccggccagctttctattattattattattattattattattattattattattattattaagacagagtcttgctctgtcggccaggctggagtgcagtggtacaagctcagctcactccaacctctgcctcccaggtgcaagcgattctcctgcctcagcctcccg

SEQ ID NO: 2121 - DNA, 270 bp, Homo sapiens
  misc_feature 1..270: note = U/M: U (0.3:0.93) in Kidney Epithelium
  misc_feature 1..270: note = source = chr4:129506564-129506833; Gene: PHF17 (Intergenic)
  source 1..270: mol_type = genomic DNA
cgggaggctgaggcaggagaatcgcttgaacccaggaagtggaggttgtggtgagccgagaacgcaccattgcactccagcctgggcaacaagagcaaaactccatctcaaaaaaaaaaaaaggaaagaaagaaagaaacccaaatgacagaataatattcagtctcattaaaacccagtcaagcctgtaatcccaggactttgagaggccgaggtgggaagatcgcttgcttgagcctaggagtttgacattagcctggcaacacagcg

SEQ ID NO: 2122 - DNA, 329 bp, Homo sapiens
  misc_feature 1..329: note = U/M: U (0.27:0.9) in Kidney Epithelium
  misc_feature 1..329: note = source = chr13:33764942-33765270; Gene: STARD13 (intron)
  source 1..329: mol_type = genomic DNA
cgaactcctgaccttgtgatccaccggccttggcctcccaaagtgctgggattacaggcatgagccaccgtacccggccactacacccgtttattaaagtactgaatataaattacacagtcttaaaaataccagcattcaaaaaaaacccaaaatatcagctttcaaaaatacaaaaacaaaataccaagtattactgcaatgccttattatactcatttccaaaaagatgttgggattttgtaaacaatttacaaggtatgtttattttaataagttacgacataaacaattactaaagtaaggtcatgtcaaaaactatatacgcg

SEQ ID NO: 2123 - DNA, 389 bp, Homo sapiens
  misc_feature 1..389: note = U/M: U (0.27:0.9) in Kidney Epithelium
  misc_feature 1..389: note = source = chr3:167925108-167925496; Gene: EGFEM1P (Intergenic)
  source 1..389: mol_type = genomic DNA
cggagtcttgctctgtcgcccaggctgtgcagtggcgcgatctcggctcactgcaacctccgcctgccgggttcacaggggttgtacaccccctgcgatattgcaagtaatatcaacctctctcaaaacaaaaagcaagcaagcaaaaaaacccaaaccaaaatatttatggtaggctactgtgtgcaatgcagaatgttgaacatagctattaagtttcagtggtagcaggtgttcatttcagattacaaattcaagtgtacatgaagggaagtaactgggacttcaggtgcccgccaccacgcctggctaattttttgtatttttagtggagacgggttttcaccacgttagccaggatggtctcgatctcctgaccttgtggtccg

SEQ ID NO: 2124 - DNA, 175 bp, Homo sapiens
  misc_feature 1..175: note = U/M: U (0.24:0.86) in Kidney Epithelium
  misc_feature 1..175: note = source = chr17:1200827-1201001; Gene: TUSC5 (intron)
  source 1..175: mol_type = genomic DNA
cgtctcaccaaatgacgccttggtctccatcctgctgctgcttgttattttagccaggacttttttttttttttttttttttttttccccagacagagtcttgctctgtcgcccaggctagagtgcaatggcacaatctcggctcactgcaacctctgtctcccaggttcaagcg

SEQ ID NO: 2125 - DNA, 238 bp, Homo sapiens
  misc_feature 1..238: note = U/M: U (0.23:0.85) in Kidney Epithelium
  misc_feature 1..238: note = source = chr5:79794683-79794920; Gene: FAM151B (intron)
  source 1..238: mol_type = genomic DNA
cgtctttgctgatcaggaggaattcctggattttggcctttaccttttctattgtgtccgagggttcaaccttgagggtagtggtcttccccggaagggtttttacgaaatctgcattttggtggcagctccaccacagatggcagatggaaaaaaaaaaaaaagtagttttaggtttttaactgtagttaggcagagttaacaaacaaataattaacagaggaaagaatctcatgcg

SEQ ID NO: 2126 - DNA, 223 bp, Homo sapiens
  misc_feature 1..223: note = U/M: U (0.24:0.85) in Kidney Epithelium
  misc_feature 1..223: note = source = chr5:2237991-2238213; Gene: IRX4 (Intergenic)
  source 1..223: mol_type = genomic DNA
cgcatgttttcaatcgtgtgtgtgggagctaagcaatttgatctcacggagttagaaagcagcatgacagacaccagaggtatctgtatgagagggatggctacaagcttgcagttacatagaagacatcagttcttttttttttttttttttttttgacggattctcgctctgttgcccagctggagtgtagtggtttgataccagctcactgcaacctccg

SEQ ID NO: 2127 - DNA, 257 bp, Homo sapiens
  misc_feature 1..257: note = U/M: U (0.18:0.79) in Kidney Epithelium
  misc_feature 1..257: note = source = chr16:86523650-86523906; Gene: FENDRR (intron)
  source 1..257: mol_type = genomic DNA
cgtttgtaccacgttcagaattaggcaggactatctctgtggctgcaagtcaggagacgggtgacctgtgagtggcgataacaggagggggcttctggaggatggagatgatgtgtctggatgtgcacactgctcagagaatgtgtttcctttgagaaagctcatcgagccaattggtggacgtctctgtgtgtatgtgatgtttcaataaaaagtttaccttaaaatgtaaatccgatgttttctggttatctacg

SEQ ID NO: 2128 - DNA, 334 bp, Homo sapiens
  misc_feature 1..334: note = U/M: U (0.31:0.92) in Kidney Epithelium
  misc_feature 1..334: note = source = chr2:227191218-227191551; Gene: LOC646736 (Intergenic)
  source 1..334: mol_type = genomic DNA
cgcctcccaggttcaagccattctcctgcctcagcctcacgagtagctgagattacagatgcccgccaccacgtccggctaatttttttgtatttttagtagagacggggtttcactgtgttagccaggatggtctcgaattcctgacctcatgatccgcccacctcggcctcccaaagtgctgagattacagacgtgagccaccgcgctcggttgctcctggcatttttaccttccctcggatgggcctgacaaattcacgcttctcaggaacattttaatactggccaccttcgagcaaataaatcaatttaaattgttgatgtagtctccg

SEQ ID NO: 2129 - DNA, 137 bp, Homo sapiens
  misc_feature 1..137: note = U/M: U (0.28:0.88) in Kidney Epithelium
  misc_feature 1..137: note = source = chr3:11111968-11112104; Gene: SLC6A1-AS1 (Intergenic)
  source 1..137: mol_type = genomic DNA
cgctggcttcaggagtgaagctgcagacctttgcagtgagtgttacagttcttaagccagcgcgtctggagttgttcattcctcccggtgggtttgtggtctcgctggcctcagaagtgaagctgcagacctttgcg

SEQ ID NO: 2130 - DNA, 319 bp, Homo sapiens
  misc_feature 1..319: note = U/M: U (0.26:0.86) in Kidney Epithelium
  misc_feature 1..319: note = source = chr10:80538472-80538790; Gene: ZMIZ1-AS1 (Intergenic)
  source 1..319: mol_type = genomic DNA
cgctgttacccgggatcagaggacagagggacctgatgagcccaagagagcatggcaggcttctctcaccaggaggacagatgggagctgggtgagaggatggggtcaatcagatttccagggtcagagctggagggcaggatactctgggcagagcaaacccctcatgccaaagcacactggttaaaagattatgccaggagaggaaggagtcgggtgcaaggcagccccatccctgaccacatttcccacccgcaaatccatccaggaatggtgccccctgtagcggctcccttgcactttccccattgagtcaccg

SEQ ID NO: 2131 - DNA, 357 bp, Homo sapiens
  misc_feature 1..357: note = U/M: U (0.27:0.87) in Kidney Epithelium
  misc_feature 1..357: note = source = chr11:27970403-27970759; Gene: MIR610 (Intergenic)
  source 1..357: mol_type = genomic DNA
cggggctagtggggacatctattgaaaggggcaggtttcagaggacaagaaaggaaaactgcaagagggctgactagggagccttccaacttgtctcccatccctgctactggcaccatcctccctccatcctttctcgcagcgaccctgtgatgcctgatgaaattaaacctgccccaacaggagcaaactatggatgtctggttccctggcacttttagtctaattgctgcccaatgaatataatagcttcctgactatcttttcagcaacatgggcttctgaagccattcagaaagggctgaactccaataacactcaccctactgtctgcaggctgaaatctaatatcggccg

SEQ ID NO: 2132 - DNA, 266 bp, Homo sapiens
  misc_feature 1..266: note = U/M: U (0.25:0.84) in Kidney Epithelium
  misc_feature 1..266: note = source = chr17:32956139-32956404; Gene: TMEM132E,TMEM132E (exon,intron)
  source 1..266: mol_type = genomic DNA
cggcgccctgcctgacctggagcgggcagtcactgagctgacggtcattcagcgggatgtgcaagccatcctgcccctggccatggtgagcaggcaggtgaccagcccagaagatgcctgggtctatgcatgtgtgcacatttgtgtgacaagaatgtgaaccactgagtatatgtacaaattgacatgtgtgtatatgtgagacttcctgccatgcccaggtatgcctgtgtgagaaggtgcatgcatgtgttttatatttgtcg

SEQ ID NO: 2133 - DNA, 341 bp, Homo sapiens
  misc_feature 1..341: note = U/M: U (0.26:0.85) in Kidney Epithelium
  misc_feature 1..341: note = source = chr10:13763955-13764295; Gene: FRMD4A (intron)
  source 1..341: mol_type = genomic DNA
cgtgaggacggagagaggctgcagggcagagctcctctggctcttggccttcctgttcaaaggccagagaagagacacccatgacaaggctgtgctcgctccagggggtacagggaccccacgcagtgcagcagatgccagggtacacctttcagaaagattataagcattggcaaagagatttgcaaaatcccgtgcagcagaaacacctgttggaaaagctagagagaaagaattgggtggttgcatgaactattccactggccagggctctttttttttttttttttttcctgactcagggtcttgttctgttgcccaggctggagtgcagtgatgcg

SEQ ID NO: 2134 - DNA, 429 bp, Homo sapiens
  misc_feature 1..429: note = U/M: U (0.34:0.93) in Kidney Epithelium
  misc_feature 1..429: note = source = chr3:155268258-155268686; Gene: PLCH1 (intron)
  source 1..429: mol_type = genomic DNA
cgtcgcacatttcaaaatcactttgatagaattatatactagtctttgtcaaaaaataaaaataaaaaccagccaagcattcattctacaccagcactcaggtttctgcacagaaaacatgagatccatgtaaataattacctaaaggagttggtggctaaggcagaaaggagatcagggctgattacatgattttactcctctctcaaccttattttttcctcagaataagaaattatttcaaattcaggttcattgacttttttctagttttccgttacatgtcttcagacataataggcaatatatttaaatcacctaatatatcaacatataccaatatttaaatcacctaatatatcaatgtgcagaaaaactttttccaggctttcatgacaagcacaagttccacaatacgggctatgaccg

SEQ ID NO: 2135 - DNA, 74 bp, Homo sapiens
  misc_feature 1..74: note = U/M: U (0.28:0.86) in Kidney Epithelium
  misc_feature 1..74: note = source = chr14:95215739-95215812; Gene: GSC (Intergenic)
  source 1..74: mol_type = genomic DNA
cgaggatggcttactgcaacttcgacctcccaggctcaagctatcctcccgcctcagcgccccaggtagctgcg

SEQ ID NO: 2136 - DNA, 364 bp, Homo sapiens
  misc_feature 1..364: note = U/M: U (0.35:0.93) in Kidney Epithelium
  misc_feature 1..364: note = source = chr15:49183985-49184348; Gene: SHC4 (intron)
  source 1..364: mol_type = genomic DNA
cgattcccaaaggaagtggggagaggtcagagagaggaatgcagacccatttttgttttgttttgttttgttttgtttttgttttgagacggagtctcgctctgtcgcccaggctggagtgcagtggcgcgatctcagctcactgcaagctccgcttcccgggttcatgccattctcctgcctcagcctcccgagtagctgggacaacaggcgcccaccaacacgcccggttaatttttttgtatttttagtagagatggggtttcaccgtgttagccaggatggtctcgatctcctgacctcgttatccgcccgcctcggcctcctaaagtgttgggactacaggcgtgagccaccgcgcccg

SEQ ID NO: 2137 - DNA, 308 bp, Homo sapiens
  misc_feature 1..308: note = U/M: U (0.3:0.86) in Kidney Epithelium
  misc_feature 1..308: note = source = chr18:11993675-11993982; Gene: IMPA2 (intron)
  source 1..308: mol_type = genomic DNA
cggacggccacacgggcgacctcctggagcagctgtgctggagtagatggaggctgagagcacagacaggcagaaggtggccagggatgtcattgcaggcacaagggatcgtgtccaaagacatggaggtacaggagggaggacactcgagggggcttgagcctggcatggggcatgctgccctggctgggtgtgaagggccttgcacacctgatgcaagacagcagcccgattgtgaggccaggtctagtggaagaggctggccacagggtcacctgccctgctggtaggaggtacaggcatgttcg

SEQ ID NO: 2138 - DNA, 383 bp, Homo sapiens
  misc_feature 1..383: note = U/M: U (0.32:0.88) in Kidney Epithelium
  misc_feature 1..383: note = source = chr16:71872180-71872562; Gene: ATXN1L (Intergenic)
  source 1..383: mol_type = genomic DNA
cggctaccttcctactaatagatgatgataaatcaacagggctgttaactgtagactcagggaactgcagttaattaacatatgcaatatttatttcacctgaacctttctcagaatcagagatcatcagttttttagtttattgaggggttaatgactcatgtgacccataggaatgaggaaagagcaaaaggcaacagaaaacaagttgaacttaagaaaaacaacactcagcactacccctgctcatgggtgtactctgacttgagctgtcacctgatggaaggaatagcattgtgtgtgcgtgtttgaaaaaaggtaaaggagccaggcgcggtggctcacgcctgtaatcccagcactttgggaggccgaggctggcg

SEQ ID NO: 2139 - DNA, 210 bp, Homo sapiens
  misc_feature 1..210: note = U/M: U (0.3:0.85) in Kidney Epithelium
  misc_feature 1..210: note = source = chr2:131675881-131676090; Gene: ARHGEF4 (intron)
  source 1..210: mol_type = genomic DNA
cgcttctgtccaggataggttagcagggtcaggcacagaacggagcagagaagggttggatttctcatcccagctgcccttggaaggagagagcttttctggaaattgcagagcgtgccctggagactgcgaaaagtaaaaagtaaggctccctcagcttctttagaccaagcgatgccgagtcttccgcgcgcccagagccggggagcg

SEQ ID NO: 2140 - DNA, 175 bp, Homo sapiens
  misc_feature 1..175: note = U/M: U (0.34:0.87) in Kidney Epithelium
  misc_feature 1..175: note = source = chr9:134719922-134720096; Gene: RAPGEF1 (Intergenic)
  source 1..175: mol_type = genomic DNA
cggtggacacgcgagaccaggccatcgaaggcaccgtggctggccgccggccctccctaggattcctcacctgcaggggtcagtggccacatgaccacatgggaggacactccagacgctcagatggtgactcccacatggtgaggcgccgaggcctcctaccgacagccacgcg

SEQ ID NO: 2141 - DNA, 309 bp, Homo sapiens
  misc_feature 1..309: note = U/M: U (0.37:0.9) in Kidney Epithelium
  misc_feature 1..309: note = source = chr4:1551616-1551924; Gene: FAM53A (Intergenic)
  source 1..309: mol_type = genomic DNA
cggcaatgcccctgggcagcgaggggtcccgagtccaggggctcaaatgcttcggggcacggtgacaatgccacctcctccaggaagtctccccagactgcactgcccagtggtgactctgagctgactgcacctcccctgaactcccgccctaggagcagccactctccggctgcatgactctctaagactcgggaggtttggggcgcagtcccagaggtttttcaggaaacagccactaaatggatgaatgaatgatgaaacctgctgctcaagggctgcagacctgggctctccctgcactgcccg

SEQ ID NO: 2142 - DNA, 72 bp, Homo sapiens
  misc_feature 1..72: note = U/M: U (0.14:0.85) in Kidney Epithelium
  misc_feature 1..72: note = source = chr16:22937329-22937400; Gene: HS3ST2 (Intergenic)
  source 1..72: mol_type = genomic DNA
cgggaggcagagcttgcagtgagccgagatcgctccactgcactccagcctgggcaacagagcgagactccg

SEQ ID NO: 2143 - DNA, 79 bp, Homo sapiens
  misc_feature 1..79: note = U/M: U (0.18:0.89) in Kidney Epithelium
  misc_feature 1..79: note = source = chr8:68323403-68323481; Gene: ARFGEF1 (Intergenic)
  source 1..79: mol_type = genomic DNA
cggagtctcgctctgtcgcccaggctggagtgcagtggcgcgatctctgatctctgctcactgtaagttctgcctcccg

SEQ ID NO: 2144 - DNA, 108 bp, Homo sapiens
  misc_feature 1..108: note = U/M: U (0.32:0.88) in Kidney Epithelium
  misc_feature 1..108: note = source = chr21:47049353-47049460; Gene: SLC19A1 (Intergenic)
  source 1..108: mol_type = genomic DNA
cgggagggatgttcgcaatggctgctcaagccggacagcaaggcgaccatgccagcctcagtgacctgaacggaacccgagacgtgcatgcaggagccgggagggacg

SEQ ID NO: 2145 - DNA, 105 bp, Homo sapiens
  misc_feature 1..105: note = U/M: U (0.06:0.94) in Kidney Epithelium
  misc_feature 1..105: note = source = chr18:42290985-42291089; Gene: SETBP1 (intron)
  source 1..105: mol_type = genomic DNA
cgccacgtcgtatgaagtctgcctgaggctgaattatatattaactggtggatcagtgagcccccgctgctgggggagtgcaagctgaggccgccatctgagtgc

SEQ ID NO: 2146 - DNA, 266 bp, Homo sapiens
  misc_feature 1..266: note = U/M: U (0.08:0.91) in Kidney Epithelium
  misc_feature 1..266: note = source = chr16:12609458-12609723; Gene: SNX29 (intron)
  source 1..266: mol_type = genomic DNA
cgaagtcacctcctcccaggtgccttcctgtcctagccacccaagccaagtccatctctgtgccagcactctttatgatgtattcacgtatctgcttgttggctctactggatctaagctccggagggcaggggtcacatctgtttgccaatacgttccttcaaggcacggtgccttggacatatgcaggcatgcggcagatagtcactgagtgaaccatgcaggagccagcacaattaacgcgagtgccagtaaccagcctgggc

SEQ ID NO: 2147 - DNA, 327 bp, Homo sapiens
  misc_feature 1..327: note = U/M: U (0.13:0.93) in Kidney Epithelium
  misc_feature 1..327: note = source = chr6:96084977-96085303; Gene: MANEA (Intergenic)
  source 1..327: mol_type = genomic DNA
cgctggctaccagggcagcgggctctggcaggctgctcccagggtcaggctctgaggactacccgcctcttctccatgtttaccctgcagcatacagcgggggagagcggtgatgcggtaccagggttcagagtggcagaggctctgggcctgggagtgggtcctgctcaaccatgcgagagtgggggtggtgtagtcgcttgcctcagggatgcagggcacagggcactgttaccactgctgctccagcagccactcctgccgccaacaaccttgcctcccagctgcagctggtgtgatggcagcgaccgctctagacagaccacc

SEQ ID NO: 2148 - DNA, 183 bp, Homo sapiens
  misc_feature 1..183: note = U/M: U (0.2:0.94) in Kidney Epithelium
  misc_feature 1..183: note = source = chr18:76151081-76151263; Gene: SALL3 (Intergenic)
  source 1..183: mol_type = genomic DNA
cggggctcccgtccacacagtgcgcaggtcaacactaggagtcggtggcttctgcggcctggcacggtccacggtgctgcgggttccaaaacgccaggcgagccccacggcctgcgggtgcccgggaggtgcagactgaagggcaagaccttgtcagagagagaaagaagcaataacgcatcc

SEQ ID NO: 2149 - DNA, 95 bp, Homo sapiens
  misc_feature 1..95: note = U/M: U (0.12:0.85) in Kidney Epithelium
  misc_feature 1..95: note = source = chr20:26118583-26118677; Gene: NCOR1P1 (Intergenic)
  source 1..95: mol_type = genomic DNA
cgctctgttgcccaggctggaatgcagtggcatggtctcagcttactgcaagctccgactcccgggttcacgccattctccagcctcagcctccc

SEQ ID NO: 2150 - DNA, 257 bp, Homo sapiens
  misc_feature 1..257: note = U/M: U (0.23:0.93) in Kidney Epithelium
  misc_feature 1..257: note = source = chr16:74659275-74659531; Gene: RFWD3 (intron)
  source 1..257: mol_type = genomic DNA
cgggtatggttggtgtgcacccagctacttgggaagctgaggcacaagaattgcttgaacctgggaggtggaggtggcagtgagccgagattgcgcctctgcactccagcctgggtaacagagcgagaccgtctcaagaaaaaaaaaaaaaggacagaccaggcgcaatggctcacgcctataatccaaccttttttcttctgccattgacttgttgtggaagccagatcagctgtcttatagaacgcccacaaccc

SEQ ID NO: 2151 - DNA, 237 bp, Homo sapiens
  misc_feature 1..237: note = U/M: U (0.24:0.94) in Kidney Epithelium
  misc_feature 1..237: note = source = chr6:149868192-149868428; Gene: PPIL4 (Intergenic)
  source 1..237: mol_type = genomic DNA
cgcctcccgagttgctggggctacaggtgtccgccatcacgcccggctaattttttgtgtttttagtagagaccgggtttcaccgtgttagccaggatggtctcgacctcctgacctcgtggatccgcccgcctccgcctcccaaagtgctgggattacaggcttgagccaccgcacctggcggaaaagccagagcttttataatgatttacaagatcctctcctaccccatcctac

SEQ ID NO: 2152 - DNA, 339 bp, Homo sapiens
  misc_feature 1..339: note = U/M: U (0.24:0.91) in Kidney Epithelium
  misc_feature 1..339: note = source = chr10:119543627-119543965; Gene: EMX2OS (Intergenic)
  source 1..339: mol_type = genomic DNA
cggacagtggcggtggggctgggtggaggggctgccctgtgaacgcttgtgcccgagcagagctctaagccttgacctcagctgaggaccccggctgaccccctcgcagccctgtgacggccttgcgagcctttctttctgggacagcggttatggacttctcgtgcctgacctcaacccctctccttcccatttcagttgtcagagttgagtctggagaatttttgcctcatgctttttctttcacatgcaaacttcctgggtattaaaactaaggttggccctttattttgcccattttctcacctgctcagcttgatcacaatcaacaaccccagc

SEQ ID NO: 2153 - DNA, 244 bp, Homo sapiens
  misc_feature 1..244: note = U/M: U (0.27:0.93) in Kidney Epithelium
  misc_feature 1..244: note = source = chr17:80100626-80100869; Gene: CCDC57 (intron)
  source 1..244: mol_type = genomic DNA
cgtatatttaatatggttgttaaatagaataaaataaaaagtagtattccgcacatttggtttaataaataaccaaaggaattctgaaattccccctaacaagtagctcgtgaaatagaaaaacagcccacactggccgggtacgtggctcacgcctgtaatcccagcactttgggaggccgaggtgggtggatcacctgaggtcaggagttcgagatcaacctgaccaacatggagaaacccc

SEQ ID NO: 2154 - DNA, 235 bp, Homo sapiens
  misc_feature 1..235: note = U/M: U (0.29:0.95) in Kidney Epithelium
  misc_feature 1..235: note = source = chr11:35515942-35516176; Gene: PAMR1 (intron)
  source 1..235: mol_type = genomic DNA
cgcgatctcggctcactgtaagctctgcctcccgggttcacgccattctcctgccgcagcctccagagtagctgggactacaggcgcccaccactacgccaggctaattttttgtatttttagtagagaccgggtttcaccgtgttagccaggatggtctcgatttcctcacctcgtgatccacccgcctccgcctcccaaagtgctgggattccaggcgtgagccaccgcaccc

SEQ ID NO: 2155 - DNA, 302 bp, Homo sapiens
  misc_feature 1..302: note = U/M: U (0.29:0.94) in Kidney Epithelium
  misc_feature 1..302: note = source = chr5:55330568-55330869; Gene: IL6ST (Intergenic)
  source 1..302: mol_type = genomic DNA
cggagtctcactctgtcgcccaggctggagtgtgagtgcagtggcaccatctcggctcaccgcaacctctgcctcccgggttgaagcaattctcctgccgcaggctcccaagtagctgggactccaggcgcgccaccacgcctggctaatttcttgtatttttagtagagatggggtttcaccgtgttaaccaggatagtctcagtctcctgaccttgtgatctgcctgccttggcctcccaaagtgctgggtttagaggcgtgagccaccgcgtctggcctctttcagtttattaagcatc

SEQ ID NO: 2156 - DNA, 490 bp, Homo sapiens
  misc_feature 1..490: note = U/M: U (0.3:0.95) in Kidney Epithelium
  misc_feature 1..490: note = source = chr6:15525028-15525517; Gene: DTNBP1 (intron)
  source 1..490: mol_type = genomic DNA
cgtattagtagatgacatatgccagtctggcactttaaatgcatcctaaatcacccttggcaactattattaccttttacacttccttaatctgttcatccccagccctttgggacgctgaagactaatctctgcattaagtgagtcccggctgttttgagtaggacgctcagcctgtctcaaagaggccaacattcctgcagcaacagttagcgaccttcctccctgccagccacagctctgcttcctgcctacaggtgccctgaaccttcccggcaggcgcactcctctaattgcaagtggagtttccactggccttggaacatttctcgggcctaacggcagaaggggtttgacctacatctgtaagctgtaagagctccctgcagtggaagcacagactaggagaaaacaaaacccagcccaccagcagacggcgaccccatgaaacagcacatgcctagttggcctctgcccgggcactgagcac

SEQ ID NO: 2157 - DNA, 184 bp, Homo sapiens
  misc_feature 1..184: note = U/M: U (0.11:0.93) in Kidney Epithelium
  misc_feature 1..184: note = source = chr1:117715692-117715875; Gene: VTCN1 (intron)
  source 1..184: mol_type = genomic DNA
cgtgaaggaccgcagcttcattcctgaagtcagagagaccagaacccacagggaggagcaaacaactccggaacaaacaactccggacgcgccacctttaagagctgtaacactcaccgcgaggtcagcggcttcattcttgaagtcagcaagaccatgaacccaccagaaggaataaattccg

SEQ ID NO: 2158 - DNA, 64 bp, Homo sapiens
  misc_feature 1..64: note = U/M: U (0.11:0.88) in Kidney Epithelium
  misc_feature 1..64: note = source = chr9:85557951-85558014; Gene: RASEF (Intergenic)
  source 1..64: mol_type = genomic DNA
cgggaggcagaggttgcagtgagccgagatcgcgtcactgcattccagcctgggcgacagagcg

SEQ ID NO: 2159 - DNA, 228 bp, Homo sapiens
  misc_feature 1..228: note = U/M: U (0.15:0.92) in Kidney Epithelium
  misc_feature 1..228: note = source = chr13:49397756-49397983; Gene: CYSLTR2 (Intergenic)
  source 1..228: mol_type = genomic DNA
cggtctcaatctcttgacctcatgatccgcccacctcagcctcccaaagcactaggattatatgcatgagccaccgcgcccggccgcattgttaatttttaattggtttgcaacattagtgtgcctgtttacagatgacagatcattgaaagagtaacacatttgtttatatgtttgtgtttgcatatatatatctgcaaatgagaaggaataaaatcaactcattcg

SEQ ID NO: 2160 - DNA, 231 bp, Homo sapiens
  misc_feature 1..231: note = U/M: U (0.09:0.86) in Kidney Epithelium
  misc_feature 1..231: note = source = chr14:62056738-62056968; Gene: FLJ22447 (intron)
  source 1..231: mol_type = genomic DNA
cgtaaatcaccccagtcagctaccatcactggagctccctttgtaaatgttgacagcagctgctatcaacttgggcagccaactgggctcagccaagaagcctttggggaagatgtgggttaatcatcaagcaaggctttaaaagcggacggaggccagaggccagacccccgctggtgcagatgcacagacctgtgacagaggtgcaggctgtggggcggcgtggaggcg

SEQ ID NO: 2161 - DNA, 347 bp, Homo sapiens
  misc_feature 1..347: note = U/M: U (0.17:0.94) in Kidney Epithelium
  misc_feature 1..347: note = source = chr13:25026065-25026411; Gene: PARP4 (intron)
  source 1..347: mol_type = genomic DNA
cgaaggagcaaagcagcctggcggggtctgcctggaggtcacatgcccccagcacgagtccagcacagccagtgaggaggtttacccaggcccttcgggacaagcggagatttggattcttatgctaaataataacatctaactgatttggtgcttttggttcagttctgttctgagtgctttctatgtatgagctcatttattcctcagcaatcctaggaggtaggtattttcattatcaccttggttttacagatgagaggttaaggaacttgctcaaggtcacggctaagctaatgagtggccaacccaggttctgagactcaggcagtctggctgggagcccg

SEQ ID NO: 2162 - DNA, 144 bp, Homo sapiens
  misc_feature 1..144: note = U/M: U (0.13:0.89) in Kidney Epithelium
  misc_feature 1..144: note = source = chr5:16681956-16682099; Gene: MYO10 (exon)
  source 1..144: mol_type = genomic DNA
cgaggaagcagggcaggcagtcacctctcacgatgaattcctggccctccactctggtgtcccctttggacctctgcagcagggttatccagtggtgcatctcctccggcgtgtcggcgttgcagtgcagcacccggttggccg

SEQ ID NO: 2163 - DNA, 239 bp, Homo sapiens
  misc_feature 1..239: note = U/M: U (0.16:0.92) in Kidney Epithelium
  misc_feature 1..239: note = source = chr16:12084268-12084506; Gene: SNX29 (intron)
  source 1..239: mol_type = genomic DNA
cgctcatttccatgcctcacctgaccccttgggcactgcgggggtccctcctggtcttgtatgtgccccgggcatatattgggcagccctttctgcccccctcctcctttgcttctgctttctttcagtttctttatttggaatggttgtggattttggggggtgggatgggagttaaacaatagcagcaacactaaagtcatcattgggctggtagcgccgggcatcccagatgcccg

SEQ ID NO: 2164 - DNA, 300 bp, Homo sapiens
  misc_feature 1..300: note = U/M: U (0.17:0.93) in Kidney Epithelium
  misc_feature 1..300: note = source = chr11:939169-939468; Gene: AP2A2 (intron)
  source 1..300: mol_type = genomic DNA
cgaacccgggaggtggaggttgcagtgagccgagatcgcaccattgcactccagcctggtgacagcaagactctgtctcaaaaaaaaaaaaaaaaaaaggtttaagaagttaattataaaacattgcccctgccttgcccacatttctaaacctgagtgaattattttcattttatagctgtttcttcttaaaaatttactttaagaatgattgctttttaagtctaaattgtgtgttcctactatttatgggtgttctttcccccatttagtcattacttattgactttttttgagacg

SEQ ID NO: 2165 - DNA, 433 bp, Homo sapiens
  misc_feature 1..433: note = U/M: U (0.18:0.93) in Kidney Epithelium
  misc_feature 1..433: note = source = chr7:151781437-151781869; Gene: GALNT11 (intron)
  source 1..433: mol_type = genomic DNA
cgggcaacagagggagaccctgtctctttaaaaaaaaaaaaaaaaaaaaaaaacttttacattttcaagttgattttgttagaactatacaaaatcacctcttttaaatattttctctcacagtgttttcaaatttattgttaagaaatcatggactaagaggaagacttcgtacttttgttggcgtgttgagtattttgtttcataatgaaaccgtctaatgaaactgtttaaactggttagccgtctttcttgcctctccttcttcacaataagcattcatttccgaggatgtggtctgctcacacattatactcttctctaagatttcgcattgcacagaatgtgaacaatgtcctttaacctcttctggaacagaaatacacttcaaaaattatacaaacaagtatgtattaattgttaatactaagcg

SEQ ID NO: 2166 - DNA, 109 bp, Homo sapiens
  misc_feature 1..109: note = U/M: U (0.16:0.9) in Kidney Epithelium
  misc_feature 1..109: note = source = chr7:47605153-47605261; Gene: TNS3 (intron)
  source 1..109: mol_type = genomic DNA
cggggtttcaccatgctggccaggcttgtctcgaactcctgacctcgggtgatcagcccgcctcagcctcccaaattactgggattatagataggcatgagtcactacg

SEQ ID NO: 2167 - DNA, 141 bp, Homo sapiens
  misc_feature 1..141: note = U/M: U (0.14:0.88) in Kidney Epithelium
  misc_feature 1..141: note = source = chr8:1132808-1132948; Gene: LOC286083 (Intergenic)
  source 1..141: mol_type = genomic DNA
cggcaactctgggcagtggcgcgtgggggacggactccgcagcctgtgggatcggcagcatccagtgaggtggagcggggctcaggggcactcaggatgcagtgagcgcacagccctgcggtggcatgggtgggagacgcg

SEQ ID NO: 2168 - DNA, 367 bp, Homo sapiens
  misc_feature 1..367: note = U/M: U (0.17:0.91) in Kidney Epithelium
  misc_feature 1..367: note = source = chr1:6750284-6750650; Gene: DNAJC11 (intron)
  source 1..367: mol_type = genomic DNA
cgattcatccaaattatataagtaaccaataaaagccttccttattaatggctatgctcatgacactaatagaaatacacggcattcatttgacagtcgcatatccactgctatgtcaagcatttccatgcactcccacttcattcccacaaaagctctacgacagtaaaactgtctggattttctggatgaacgggctcagacaggttaggtaatttgccccccacaaaacctgctagaaactcaaacttggatctgactcctgcggctgtgctctctatcttcacaatgaccccttttgaagctccaccactgtcccaggacattcaaatcatcaccaatgaatgctccttgatgcttaaacacg

SEQ ID NO: 2169 - DNA, 412 bp, Homo sapiens
  misc_feature 1..412: note = U/M: U (0.2:0.94) in Kidney Epithelium
  misc_feature 1..412: note = source = chr17:36967440-36967851; Gene: CWC25 (intron)
  source 1..412: mol_type = genomic DNA
cgccactgcactccagcagcctgggcgacagagtgagactccatctcattaaaaaaaaacaaaaagcccaggcggggtggctcatacctgtaatcccagcactttgggaggccaaggcgggtggatcacaaggtcaggagaaggagaccatcctggctaacacggtgaaacaccatcactactaaaaatacaaaaaattagctgggcatggtagcaggcgcctgtagtcccagctactcaggaggctgaggcaggagaatggcatgaacctgggaggcggagtttgcagtgagctaagatcgtgtcactgcaccactgcactccaccttgggcaacagagcgagactccgtctcaaaaaaaaaaaaaaaaaaaaagattactgagacccctatcagtctcctttgaggggcg

SEQ ID NO: 2170 - DNA, 187 bp, Homo sapiens
  misc_feature 1..187: note = U/M: U (0.16:0.89) in Kidney Epithelium
  misc_feature 1..187: note = source = chr12:4554786-4554972; Gene: FGF6 (promoter-TSS)
  source 1..187: mol_type = genomic DNA
cgcccttcttgtttttctccctccggcatggcggcaggggcttatttttggaaggcagatgaaggctgctgacatgaaaccaaagcctccatcgggcactcgggttgagagcagagggacccaggctgagccgcggccggtagagaccatggctcggggacgctctctagctcgcccgcttgctccg

SEQ ID NO: 2171 - DNA, 355 bp, Homo sapiens
  misc_feature 1..355: note = U/M: U (0.18:0.91) in Kidney Epithelium
  misc_feature 1..355: note = source = chr7:8175827-8176181; Gene: ICA1 (intron)
  source 1..355: mol_type = genomic DNA
cgagcggtctgctttttgataacattgtaccacggcttagccattacttgtctaacagaattaccacagggagtgaaccggcccccaagcagcagggtgctagagcttatcgtccccaagtcctataaagtcagccatccctggattaagctctttttatttcttgactgtttaatgtcgtgcatattgtaatcagcattttaattcaggatttgggccttccagcagttttccaaagggcacacattttgaagtcaacaaattaatgagtgttcttttcttcagtcaccacaagttctctgtgcactgagagaatatttttattctaccgaccacgttaatatttaagccgacg

SEQ ID NO: 2172 - DNA, 393 bp, Homo sapiens
  misc_feature 1..393: note = U/M: U (0.22:0.94) in Kidney Epithelium
  misc_feature 1..393: note = source = chr16:81765201-81765593; Gene: PLCG2 (Intergenic)
  source 1..393: mol_type = genomic DNA
cggtgattacccttatcttgtctcctgctaaatcatgggggtttggggagttccttcagacccccaataaacttgcctgtggaggcctggggagttatttcagacccccagtaaaacttgtttaatcctaaacaggtcctgttaagaattccttcgttatcctgtcatgcttcaaggcccaggaaaggcccaggcaaaactcttggtgggcttttgtgacattccagcctttgtagaagggcactggctctctcagctattaatgtttcactgaactactcggtcagtgccgaagccgttgtgatgaagcctgcgttagtgagacccggcctgcacaggagcacatgaagagggaaccagaagcctcttactgacctccttccactccccccg

SEQ ID NO: 2173 - DNA, 80 bp, Homo sapiens
  misc_feature 1..80: note = U/M: U (0.21:0.92) in Kidney Epithelium
  misc_feature 1..80: note = source = chr9:92053603-92053682; Gene: SEMA4D (intron)
  source 1..80: mol_type = genomic DNA
cggagtctcgctctgtcgcccaggctggaatgcagtggcgcaatctcggctcactgcaagctctgcctcccaggttcacg

SEQ ID NO: 2174 - DNA, 155 bp, Homo sapiens
  misc_feature 1..155: note = U/M: U (0.18:0.88) in Kidney Epithelium
  misc_feature 1..155: note = source = chr22:33952731-33952885; Gene: LARGE (intron)
  source 1..155: mol_type = genomic DNA
cgcctgtaatcccagcactttgggaggcagaggtgggcagattatgaggtcaggagatcaagaccagcgtggccaacatggtgaaaccctgtctctagtaaaatacaaaaaatcagccaggcgtggtggtgcacgcctgtagtcccagctactcg

SEQ ID NO: 2175 - DNA, 188 bp, Homo sapiens
  misc_feature 1..188: note = U/M: U (0.2:0.9) in Kidney Epithelium
  misc_feature 1..188: note = source = chr7:156883572-156883759; Gene: UBE3C (Intergenic)
  source 1..188: mol_type = genomic DNA
cggctgacaccgtgactttcgggtggcacagaagctgtaggcatcagcggagagcagcgcaaagtggacagcagagatttgcacagctggacagggcagctccgtcacccgtgaccatgagagtgagccacctgctcgttgcggtgggctgtgccgccccatgattttgccaactgtgggctcatgcg

SEQ ID NO: 2176 - DNA, 216 bp, Homo sapiens
  misc_feature 1..216: note = U/M: U (0.22:0.92) in Kidney Epithelium
  misc_feature 1..216: note = source = chr5:71714704-71714919; Gene: ZNF366 (Intergenic)
  source 1..216: mol_type = genomic DNA
cggggtttcaccgtgttagccaagatggtctcgatctcctgacatcgtgatctgcccgcctcggcctcccaaagtgctgggattacagccatgagccaccgtgcccggcccatgccaggttaatttttatactggttaatttttatatactggttatacaggttaatttttataccggggagggggagtctcgcagtgttgcccaggctggtctcg

SEQ ID NO: 2177 - DNA, 259 bp, Homo sapiens
  misc_feature 1..259: note = U/M: U (0.21:0.91) in Kidney Epithelium
  misc_feature 1..259: note = source = chr4:187564589-187564847; Gene: FAT1 (intron)
  source 1..259: mol_type = genomic DNA
cgtagtgcttttccctaatgccatctccagagagaggccgtgcatgagtgtcctatgggggtggcaccaggtgatgcaccccctctgcgaaaaattacagtaaaattagggcttcctgtgggattttcatacaaaatgaaaacagaatttcctaatgatgtaatttaatactaggcattctgggtgtcttttcgaggtgcgctttaccttacagcaatcaaccacactgagtgcctaacaccccggggaacgctacccg

SEQ ID NO: 2178 - DNA, 182 bp, Homo sapiens
  misc_feature 1..182: note = U/M: U (0.23:0.92) in Kidney Epithelium
  misc_feature 1..182: note = source = chr9:97412072-97412253; Gene: FBP1 (Intergenic)
  source 1..182: mol_type = genomic DNA
cgctaatgacttttgtgaccagcgaaagggcagtgggcaatctcagctcgctgcaacctccgcctcccggattcaagcgattttcctgcctcagcctcccgaatagctgggattacaggcacgtgccaccaccattagctcagctaattttttgtatttttagtagagatggggtttcaccg

SEQ ID NO: 2179 - DNA, 461 bp, Homo sapiens
  misc_feature 1..461: note = U/M: U (0.22:0.91) in Kidney Epithelium
  misc_feature 1..461: note = source = chr1:46131210-46131670; Gene: GPBP1L1 (intron)
  source 1..461: mol_type = genomic DNA
cgagaccagcccgaccaacatggtgaaaccctgtctctgctaaaaatacaaaaactagccgggtgtggtggtgcatgcctgtaatcccagctactcagaaggctgaggcaggagaatcgcttgaaaccgggaggcggaggttgcagtgagccaagatcacgccaccactgcactccagcctgggcaacagagcgagacgccgtcttaaaaaaaaaaaaaaaaaaaaaaaaggaaagtttccaagtcttgtttatttcattacttcttttccacctgttactttcgactcttcaaggtcaaattactctctaacttaaaaaactaattttttaggcactactagtctctttccaccatctgcctcagcctctcctactggttgccactctctgttcctagacttaggttgtaattatatcactaccctgctcaaaaagttctgatttcccaccaacaatacg

SEQ ID NO: 2180 - DNA, 324 bp, Homo sapiens
  misc_feature 1..324: note = U/M: U (0.17:0.85) in Kidney Epithelium
  misc_feature 1..324: note = source = chr19:31213711-31214034; Gene: ZNF536 (Intergenic)
  source 1..324: mol_type = genomic DNA
cggtgaggtccacataaatacttcaaaaataattcatgatgaagaggaacgcttctggaatggatgatggcacgacaaattaaacgctttgtagggccaagcgtaaattattttaatgcatgtaatagatccgcccagggagacttgagcccctctcggtcatgcctctgtgcccccagggcctggagggtggtgggagcaggtggctgggagcctgttctgctggggtgtgaatcatttccttctccaaagacctattcccccagcacttaggtcctcctaacctgaggagagaatgggaatgtgtcgatgtctggccaggcg

SEQ ID NO: 2181 - DNA, 277 bp, Homo sapiens
  misc_feature 1..277: note = U/M: U (0.19:0.86) in Kidney Epithelium
  misc_feature 1..277: note = source = chr7:157427089-157427365; Gene: PTPRN2 (intron)
  source 1..277: mol_type = genomic DNA
cgtcaaagtaagtttgctcaaagtaccatagaaaattaactgcccatagctaaaccccaaatttaaaatgtaaagacaaccgaatcactaacctaacctgggacgccgtgatgtgcttgtccacagatgaggcaactcctgaaacacagaccaaggcatccgggtgcctgtgtgcacacagggctgcgttgtcaatgcatcgcgaccgggcatggtcctgggagtgaattatcccccacaggtcagaggggccgtacgacctcttccagaccccccg

SEQ ID NO: 2182 - DNA, 327 bp, Homo sapiens
  misc_feature 1..327: note = U/M: U (0.24:0.91) in Kidney Epithelium
  misc_feature 1..327: note = source = chr22:45613514-45613840; Gene: KIAA0930 (intron)
  source 1..327: mol_type = genomic DNA
cggagcatcgccttgtctgacctcagctggaaacctgtgtcaggtaaggaatttttcgacactgcatgaatgtcagtcattaacccgaaagtgccatgagtactgattttagggttacaaataaatttcagtgagtaggtgaatccgtgaataatgacaatggcctggaccaggaaaactgatatttgccaggagttctggtgatccagctgtctcccctgcctcaagcgagtgacctgcttctgtaagtcactctcttcgaactccagaactggaagagccctttccaggtgagtgactccagggactagcaggggagagggcgcg

SEQ ID NO: 2183 - DNA, 171 bp, Homo sapiens
  misc_feature 1..171: note = U/M: U (0.19:0.85) in Kidney Epithelium
  misc_feature 1..171: note = source = chr7:157280199-157280369; Gene: MIR153-2 (Intergenic)
  source 1..171: mol_type = genomic DNA
cgagttcccacgcaggggagatgaagaccagggcgggcaggggcctggcccaggttctggagaagcaaggggtgcttctcggatatcacggtggatgagagtgacccagagtcgttaaccagagtgtctatgcggccgtgacgaggcgtggactcggctgtccccatcacg

SEQ ID NO: 2184 - DNA, 277 bp, Homo sapiens
  misc_feature 1..277: note = U/M: U (0.26:0.91) in Kidney Epithelium
  misc_feature 1..277: note = source = chr12:57211212-57211488; Gene: HSD17B6 (Intergenic)
  source 1..277: mol_type = genomic DNA
cggagtctcgctctgttgcccaggctggagtgcagtggcgcgatcttggctcactgcaagctccgcctcccgggttaacgccattctcctgcctcagcctgccgagtagctgggactacaggcgctggccaccacgcccggctaattttttttttgtgtttttagtagagatggggtttcaccgtgttagccaggatggtctcgatctcctgacctcgtgatccacccgcctcggcctcccaaagtgctgggattacaggcgttaactgctttatcg

SEQ ID NO: 2185 - DNA, 169 bp, Homo sapiens
  misc_feature 1..169: note = U/M: U (0.26:0.9) in Kidney Epithelium
  misc_feature 1..169: note = source = chr4:1534879-1535047; Gene: CRIPAK (Intergenic)
  source 1..169: mol_type = genomic DNA
cgccacggggagcctgccaggaacatcagttcacgggggtctctttcgagtgcccgtcggcggctgagcgtggcaagctaaatccacctggacgcgaacacagtgcgcggcctcctcatcctgggggttttctgggcctgggtggggcaggcagggagggtctcgggcg

SEQ ID NO: 2186 - DNA, 235 bp, Homo sapiens
  misc_feature 1..235: note = U/M: U (0.27:0.91) in Kidney Epithelium
  misc_feature 1..235: note = source = chr14:101492031-101492265; Gene: MIR323A (promoter-TSS)
  source 1..235: mol_type = genomic DNA
cggaagagccactgtcctggtgtcagtacggctgctgcttggtacttggagagaggtggtccgtggcgcgttcgctttatttatggcgcacattacacggtcgacctctttgcagtatctaatcccgccttgcaagctttcctggagctaacatcaactgcgggggtgggggccactaggtctgcgctcagtgtgacccagcggggtttgtgatgtgtttgtcttgtgtgtgacg

SEQ ID NO: 2187 - DNA, 351 bp, Homo sapiens
  misc_feature 1..351: note = U/M: U (0.23:0.87) in Kidney Epithelium
  misc_feature 1..351: note = source = chr12:131572350-131572700; Gene: GPR133 (intron)
  source 1..351: mol_type = genomic DNA
cgcggctggggagggccatgacctggatcattggcggcaatttaaagaaaattaaacagagtaaatgaaaccacaccagagggcggtgaacgtagaaacagttcctgggtttaaatttcttgccatggaccaggcctcagtttgaggagcaccgtcctctgcggacggccgtgacgccttctctctcctcccacgggctccgtttctcctctcccctcccgccagggcccggcccacagggctccctttgggcttccctcgtggtgtcgtagggagcagcccaggggagaaggcgcagagctgcccccatggagagcacctgttcgttcctggagatgggcggactgcacg

SEQ ID NO: 2188 - DNA, 82 bp, Homo sapiens
  misc_feature 1..82: note = U/M: U (0.24:0.85) in Kidney Epithelium
  misc_feature 1..82: note = source = chr2:148776876-148776957; Gene: ORC4 (intron)
  source 1..82: mol_type = genomic DNA
cggccgggcgcggtggctcacgcctgtaatcccagcactttgggaggccgaggcgggaggatcatttgaggtcaagagatcg

SEQ ID NO: 2189 - DNA, 259 bp, Homo sapiens
  misc_feature 1..259: note = U/M: U (0.32:0.93) in Kidney Epithelium
  misc_feature 1..259: note = source = chr7:120477404-120477662; Gene: TSPAN12 (intron)
  source 1..259: mol_type = genomic DNA
cgcccaggctggagtgcagtgacgtgatctcggctcactgcaacctccgcctcccgggttcacaccattctcctgcctcagcctcccgagtagctgggactacaggtgcccgccaacatgcccggctaatttttttgtatttttagtagagacagggtttcaccgtgttagccaggatggtcttgatttcttgacctcgtgatctgcctgcctcggcctcccaaagtgctgggattacaggcgtgagccaccttgcccg

SEQ ID NO: 2190 - DNA, 436 bp, Homo sapiens
  misc_feature 1..436: note = U/M: U (0.33:0.94) in Kidney Epithelium
  misc_feature 1..436: note = source = chr19:33584939-33585374; Gene: GPATCH1,GPATCH1 (exon,intron)
  source 1..436: mol_type = genomic DNA
cgccagatgtaatgtgggtgagggcaagggcccaggcaagacaggcctaggaactgagcaggaactcagaagccgcttatttcatattctttgttaatgttattttgaaaagttcattttcaatgccttgctatcctagattatctgttggtttcgaattgctaagaaaaatgggttggaaagaaggacaaggagttggtcctcgagtaaagagacggccacgccgacagaaacctggtgtgtatgttaattgattaactgttatcactgctgcagcgtactttttttttttttttgagacagggtcttgctctgtcgcccaggctggagtgcagtggtgcgatcccggcatactgcagccttgacctcccgggctcaagtgatccttccacgttagccccgcaagtagctgggaccacaggcatgtgccactgcg

SEQ ID NO: 2191 - DNA, 462 bp, Homo sapiens
  misc_feature 1..462: note = U/M: U (0.25:0.86) in Kidney Epithelium
  misc_feature 1..462: note = source = chr14:33564388-33564849; Gene: NPAS3 (intron)
  source 1..462: mol_type = genomic DNA
cggtgtgttctttaccttttgtggttgaaaggtaggagtgcaatgagtgtgtgtggtctgagtttttgtggacgtgatctacatttaatctggggaaattaattccctaagctgctggcaggcagcatgtacttgttaattattcaggtggatgacaaatgcagagcagaggttctcgcaaagacaaagtttgtatgatgcatgtttagtaactgataggcctgacattctgtggtgtcttattcagtgctaatcctaataagctgcctggtgcgatgaacgccttttctcctgtcctctgcagagaaaacagagatctgaaagaacttcattatggcaataaatcctgtacttcatggtattcttggtgaaaaggtattttgtccagatgaaaaacaacagaaagtctggatgttagtatggtatcaagtcctaaagcaaataaagccttacacaaaggcg

SEQ ID NO: 2192 - DNA, 366 bp, Homo sapiens
  misc_feature 1..366: note = U/M: U (0.32:0.89) in Kidney Epithelium
  misc_feature 1..366: note = source = chr16:72038677-72039042; Gene: DHODH (Intergenic)
  source 1..366: mol_type = genomic DNA
cgctgctgctggtgaagtagaacaccatgatgctggcgggggtgcggtgactccaccgtggagcagcagcgttcaactgtggcggttgcctggtccccggaactctcctcttttttttttttttaatgcattatggaaacttttttatgtgatttttgtacataaggaatatgagagtaactcttttacaaatgaaactaatttactagaacaaacagtgacaaaactgaactgatatttgatgtgaatccataggagtttaagcttcaaatccagccaagaaatttgttacaactccatcagctttgcatctgagtcttctgagatctttccatcagccctgatagtgcccaacagggcttagcg

SEQ ID NO: 2193 - DNA, 190 bp, Homo sapiens
  misc_feature 1..190: note = U/M: U (0.29:0.85) in Kidney Epithelium
  misc_feature 1..190: note = source = chr8:143662736-143662925; Gene: ARC (Intergenic)
  source 1..190: mol_type = genomic DNA
cgcttgtcccagaagctttgctagggagactgatcagccccggccgtgagtgactgccccgtctgcccgtccacccgcaaacagcagaagctttgctagggagactgatcagccccagccgtgggtgaccgccccgtctgcccgtccgtgagtgaccgccccgtctgcccgtccgtgggtgaccgccccg

SEQ ID NO: 2194 - DNA, 171 bp, Homo sapiens
  misc_feature 1..171: note = U/M: U (0.35:0.87) in Kidney Epithelium
  misc_feature 1..171: note = source = chr7:5886722-5886892; Gene: ZNF815P (exon)
  source 1..171: mol_type = genomic DNA
cgcggaggtcaccagtgtggaagtgctttaagctgtgacgagggagttcctgcagctcagggagccagtagtgagaaaccccacgaatgcacgaagtgtgggaaagccttgtgctgcagatcggacctcagggtacatcacggggtccacgcgggggagaagtcctctgcg

SEQ ID NO: 2195 - DNA, 117 bp, Homo sapiens
  misc_feature 1..117: note = U/M: M (0.83:0.15) in Kidney Epithelium
  misc_feature 1..117: note = source = chr5:72597296-72597412; Gene: TMEM174 (Intergenic)
  source 1..117: mol_type = genomic DNA
cgcagaaaccgggtcctggacgctggtcctccttgccttcagatcctgatgggggttggagggggttgcactggagccccgtggatgaagagttctagtcctgaacacagagtcccg

SEQ ID NO: 2196 - DNA, 172 bp, Homo sapiens
  misc_feature 1..172: note = U/M: M (0.85:0.24) in Kidney Epithelium
  misc_feature 1..172: note = source = chr5:72597061-72597232; Gene: TMEM174 (Intergenic)
  source 1..172: mol_type = genomic DNA
cgcctagcgcgcactcggtttcgcaccagctttctctccctaagctcctttccagaaagttgctccgctgcttaattttgctcctgtgtttgtcttcaggtgaggccaagggcaggtacatggttctcccttcaaaatatagaaacttggctaggcccagagttcgccgacg

SEQ ID NO: 2197 - DNA, 362 bp, Homo sapiens
  misc_feature 1..362: note = U/M: M (0.71:0.1) in Kidney Epithelium
  misc_feature 1..362: note = source = chr11:3465188-3465549; Gene: OR7E12P (Intergenic)
  source 1..362: mol_type = genomic DNA
cgaggcgggctcacccgggccctgggttcgctctgattgcagcggtttcccgccagctccttggagagctggcagatgacccagccccacagcaggagctgtgaatggcagaacgagatacaacaattagatatccacttgccagatgagccgggtgtcgtcagtcgcctggctctgcgccaacctctttttgcacaaacacttatgaattcagccagaaggaaaagcactctgattatgaattgagcagaaggaaacaaagttctgcagataaacaccaatgagacaaaaaaaccacaattaagaaaaatgacagaaaaggagaaccttcccagaagcctcctgccagtgaacggccaccg

SEQ ID NO: 2198 - DNA, 337 bp, Homo sapiens
  misc_feature 1..337: note = U/M: M (0.81:0.21) in Kidney Epithelium
  misc_feature 1..337: note = source = chr1:47912004-47912340; Gene: FOXD2 (Intergenic)
  source 1..337: mol_type = genomic DNA
cgacctctccggcccctgatctgagcacccctcaccttggtccatctgctgaccatctaaaatgtgtaagcccagcgtcagggctcagtgtgtgaccaagaacagttttcctgtttgaggagttacctgataatgctcaaacacaggcgagttaatttgtccccaactctggagatctttttcctgtctggctccttctttccttccttaaatatttagtgagcacctactgtgtgctgggcattgtcctggaggtacaagcagtgaacttctgcctggcatcattacaagcaatctaacttggtagttgagaaaacaaagaaagatataacgatcg

SEQ ID NO: 2199 - DNA, 313 bp, Homo sapiens
  misc_feature 1..313: note = U/M: M (0.68:0.15) in Kidney Epithelium
  misc_feature 1..313: note = source = chr7:27231866-27232178; Gene: HOXA11-AS (Intergenic)
  source 1..313: mol_type = genomic DNA
cggcacgagaggagggcgctggctgagccgcagggagggggacgctgctctctccagcctcctccacccaatagcagtccgctcgacccacgccagctgcgcgctcaccccctttccccctccattttgtgcagtgtccgcagacccgcggccggaaacaaagcccccagccctgctctcaccacccttcttgcaagctgctgtcgccaaccccccagaccagaggctcagagctaacgctaagccccttaaggccctctccagggccctcttctctcgccagccgccctcagccagctcctgaccccagccg

SEQ ID NO: 2200 - DNA, 279 bp, Homo sapiens
  misc_feature 1..279: note = U/M: M (0.63:0.11) in Kidney Epithelium
  misc_feature 1..279: note = source = chr7:128520172-128520450; Gene: KCP (intron)
  source 1..279: mol_type = genomic DNA
cgccctccccgccatgcctctcgcagaccctcccagaaaaccaagcatctcccaggagtctccagggatctccaggactctggctcccaggctccctgtgagtgaggtcagggcaccacatcgtggtcgcactgggaacagcactgtccccagctcccagctggcggcaggagcccagcctccctctctgatgcctggtcacaccaggatggcggtaccatgtgcccccaccctgaccctccccaccattttagattgcggcactcacggggccacacg

SEQ ID NO: 2201 - DNA, 67 bp, Homo sapiens
  misc_feature 1..67: note = U/M: M (0.68:0.18) in Kidney Epithelium
  misc_feature 1..67: note = source = chr5:72596986-72597052; Gene: TMEM174 (Intergenic)
  source 1..67: mol_type = genomic DNA
cgcataggtggcgcgggcatccatcccaccgccactgcgaacacccctgggcacgccttgttccccg

SEQ ID NO: 2202 - DNA, 166 bp, Homo sapiens
  misc_feature 1..166: note = U/M: M (0.7:0.21) in Kidney Epithelium
  misc_feature 1..166: note = source = chrX:10050924-10051089; Gene: WWC3 (intron)
  source 1..166: mol_type = genomic DNA
cgtctggcacttccctcatggccatggtttctgtagtgggttgctgggctcagcgcccgttgctttgccttggctccatcgttctggtgaactccatttccttatttgaagacaaaggccatatagcagtgtcagctgtagatggactgatttagaaactgaaacg

SEQ ID NO: 2203 - DNA, 306 bp, Homo sapiens
  misc_feature 1..306: note = U/M: M (0.65:0.19) in Kidney Epithelium
  misc_feature 1..306: note = source = chr12:54371022-54371327; Gene: HOXC11 (TTS)
  source 1..306: mol_type = genomic DNA
cgttggtctctgtttcaaattcgttatttgggggcagaggttcaggacaactcatctcatctttccctcctctttctgtctttgtataattcaaagaaaatatttttgtcaatacaattctgttggatgaaaggaaaaagcatcatgactatcaaatctaggttctgtcatttttgatggtaggaatccctgcagcttaggtatctaaatttctaatttgtaaacgtgggtcgggtcgtgagacaagatttgcaaactagggtgtatatgcagcccacaattccctcatgtgcccacacacaaacg

SEQ ID NO: 2204 - DNA, 106 bp, Homo sapiens
  misc_feature 1..106: note = U/M: M (0.72:0.27) in Kidney Epithelium
  misc_feature 1..106: note = source = chr13:27077217-27077322; Gene: WASF3 (Intergenic)
  source 1..106: mol_type = genomic DNA
cggtttctagaacgcctgctgtttcctgcactggctgggtagcgtgctgactttcccatccagaactacccgttaagacagccaggaagtagataaggatgagacg

SEQ ID NO: 2205 - DNA, 103 bp, Homo sapiens
  misc_feature 1..103: note = U/M: M (0.67:0.23) in Kidney Epithelium
  misc_feature 1..103: note = source = chr16:89119471-89119573; Gene: ACSF3 (Intergenic)
  source 1..103: mol_type = genomic DNA
cgccagccccggccaccctgtcccctgcccagccccccgcctcccccaacggtctgccacggtgaccacacccagctccctgcgtttcttctcttgaaaggcg

SEQ ID NO: 2206 - DNA, 213 bp, Homo sapiens
  misc_feature 1..213: note = U/M: M (0.61:0.17) in Kidney Epithelium
  misc_feature 1..213: note = source = chr6:134215938-134216150; Gene: TCF21 (exon)
  source 1..213: mol_type = genomic DNA
cggggatgttaagggtggggagtatcctgcctgtgacctctaggttatgaaaactatcttagaaggtgcttttagaaagaaccaggagaacaaccaaagcagcttacagacgcctgaacggagaatgaagtgtttcaagtaagcgagtctgcaagttctcagaagcagacagatatccaatctggactgcagccagggaagtcctctctctcg

SEQ ID NO: 2207 - DNA, 111 bp, Homo sapiens
  misc_feature 1..111: note = U/M: M (0.63:0.2) in Kidney Epithelium
  misc_feature 1..111: note = source = chr16:89070761-89070871; Gene: CBFA2T3 (Intergenic)
  source 1..111: mol_type = genomic DNA
cgccatcaacatgcagacagcctgagcgactggcattccagatagaataagcacgcacggccgcgctattactgagaccttattaatccgcctgcaggcgtttaaatgccg

SEQ ID NO: 2208 - DNA, 225 bp, Homo sapiens
  misc_feature 1..225: note = U/M: M (0.59:0.2) in Kidney Epithelium
  misc_feature 1..225: note = source = chr11:9340682-9340906; Gene: TMEM41B (Intergenic)
  source 1..225: mol_type = genomic DNA
cgactccagccctaaggtggttttcccctatctcagtagatggaatatacaatcggctttacaccgagacattccattgcccagggaccagcaggagacagaagccttcctcttatctcaactgcaaagaggcgttccttcctcttttactaatcctcctcagcacagaccctttacgggtgtcgggctgggggacgatcaggtctttcccttcccatgaggccg

SEQ ID NO: 2209 - DNA, 153 bp, Homo sapiens
  misc_feature 1..153: note = U/M: M (0.58:0.25) in Kidney Epithelium
  misc_feature 1..153: note = source = chr20:61926633-61926785; Gene: COL20A1 (intron)
  source 1..153: mol_type = genomic DNA
cgtcttcctcctaagttgaatgcgtgctgaattcacagcagctcccacaacaaaggcaagacgggagggagcgtgtgctcccgccaaaccttcagcctcgccttgggagcacatctctgtggtttagttctctgttatattaatgcttggccg

SEQ ID NO: 2210 - DNA, 356 bp, Homo sapiens
  misc_feature 1..356: note = U/M: M (0.85:0.12) in Kidney Epithelium
  misc_feature 1..356: note = source = chr5:72677395-72677750; Gene: FOXD1 (Intergenic)
  source 1..356: mol_type = genomic DNA
cgacattgggaagcagcccctgcgctcccgcggcgcctcagcctccggtccccgccccgaggtgcgcgttcctcctcccgcatgcccgtctcgggccccacggagcaagaagatagacgatgacgaggcgcgcccatccatccgggccgacgaggtcaggcccgcgccacaggcaaaaattgcgcaagcccggccgcagggatttcgcgggcgcctgggtcccaggtgcgcggccgaaatcctcagggaaaatcccgaggggccaacggtctaggccacagggctgctgggcccgggcctggctcagagcgcattcgggcggggaggccgcacgccgcacccgggcctctcctccg

SEQ ID NO: 2211 - DNA, 296 bp, Homo sapiens
  misc_feature 1..296: note = U/M: M (0.79:0.16) in Kidney Epithelium
  misc_feature 1..296: note = source = chr1:47911646-47911941; Gene: FOXD2 (Intergenic)
  source 1..296: mol_type = genomic DNA
cgacccagactgcaggagcttgggggttctgaggacagcacggctctactttccactttggagtggaacctacctggcgggggtcacacagcagatagtttgtgcagctgggaagatgagccctggacccgaacggtatgaggatatgtatcctaaggccagctttggtcccagttcactgggtgccggctgccccagccagctatggtctgcagagcccgaaggcaggcaggaggatcgcagatcgaagatctgcaaggactgaggatcgttcctagtgtctgtttggaagcccg

SEQ ID NO: 2212 - DNA, 117 bp, Homo sapiens
  misc_feature 1..117: note = U/M: M (0.74:0.12) in Kidney Epithelium
  misc_feature 1..117: note = source = chr12:54500128-54500244; Gene: FLJ12825 (intron)
  source 1..117: mol_type = genomic DNA
cggagcgggcagccggacgtcgctccatccttcccgcctgacggatgcgtctgctgcgcaggcacaagctgtcgggccaggccctgccaaggcagaacagtggcgcttctgtgcgcg

SEQ ID NO: 2213 - DNA, 71 bp, Homo sapiens
  misc_feature 1..71: note = U/M: M (0.71:0.19) in Kidney Epithelium
  misc_feature 1..71: note = source = chr6:107956154-107956224; Gene: SOBP (exon)
  source 1..71: mol_type = genomic DNA
cgccggcgacccaggcccgggcgccccggcgggccccgaggcggccgcggcctgcaacgtcatcgtgaacg

SEQ ID NO: 2214 - DNA, 468 bp, Homo sapiens
  misc_feature 1..468: note = U/M: M (0.6:0.08) in Kidney Epithelium
  misc_feature 1..468: note = source = chr7:128808991-128809458; Gene: TSPAN33 (exon)
  source 1..468: mol_type = genomic DNA
cgctggggccgggacggggaatgaggaggaagaaggccctctcttcccctacccgggccctccaggaccttctccctgagtcggctgtagggaggactccgaggaagctcggcgcggtgcgctgggcctcctggcgccgggaggagcgcgcgaggcaggcggggcgggcgcgtccggggcggggcgctggacttcgtgggtggtccccgcccccgcggcggcctaggcccgcgcctgcgtcccccaacccggaggagatggggggctgtgctagctgcttgcccagcgagtgttcccggagtctcctcgccgcaccccgctatcgggcgctcagaccaggggctcggcctggcgggaaatagcctcgaccgaactgctgcggggacaaagagccgcgagttcgctccctgcccccagtgtctcctaagcgagccttctgctcctaggaaggcgcctttccagcagccg

SEQ ID NO: 2215 - DNA, 144 bp, Homo sapiens
  misc_feature 1..144: note = U/M: M (0.73:0.22) in Kidney Epithelium
  misc_feature 1..144: note = source = chr7:95026106-95026249; Gene: PON3 (promoter-TSS)
  source 1..144: mol_type = genomic DNA
cgaaggcaatcgaagcgaagagctttaactcatcttctccaggatttggggcacgggaacctgtctcctgaccttcgtgccttacctcggagtgtgctgcccagacggacttgtgaatagctgcgtctgtccccatagttaacg

SEQ ID NO: 2216 - DNA, 408 bp, Homo sapiens
  misc_feature 1..408: note = U/M: M (0.75:0.24) in Kidney Epithelium
  misc_feature 1..408: note = source = chr6:134214794-134215201; Gene: TCF21 (exon)
  source 1..408: mol_type = genomic DNA
cgtttttacaaaacgaatgctctaaattctgaggattccaggcaggccatccatagagaaataactttttcttgctcattcccttacaaccccaatctatacatggatttttagaaagtcttcatggctatctatagttccctaccaataatttgaagcctttgctttaggcaggaggcatgtggctatgaatagggaacacgtagatttgaccctggttctgcatccaactagctgtttcttgaaagagcctggatcctcagttttcccatctctgcaagcagggataacggtaatgagaatgataataatcattatatgcagaccttcctctttcatcttacagaggcttagtgaggctcagatgagattatatctgtaaaatcccttggtaaaggaaaagctccg

SEQ ID NO: 2217 - DNA, 218 bp, Homo sapiens
  misc_feature 1..218: note = U/M: M (0.57:0.08) in Kidney Epithelium
  misc_feature 1..218: note = source = chr1:47911295-47911512; Gene: FOXD2 (Intergenic)
  source 1..218: mol_type = genomic DNA
cgagggtacaggagtggactttattgttcacattaactcaccggtgcttacagaggaccctcgattcgcgaccccctcccccagcaggtgtctgtgcagttcggactcctgggcttagatgccccatcccgttcagatgcaaatgtgctgggttcgggttgagtgtgaggaatccacctccccacccccaccccggcccacgccttccttccccgacg

SEQ ID NO: 2218 - DNA, 159 bp, Homo sapiens
  misc_feature 1..159: note = U/M: M (0.69:0.22) in Kidney Epithelium
  misc_feature 1..159: note = source = chr1:47911102-47911260; Gene: FOXD2 (Intergenic)
  source 1..159: mol_type = genomic DNA
cgcaggcagaaggatctttggaattgcagttgcatggatcttagttctggaaagggcgaatcattgggggaacaaaaaattcaaatccgtccttttgattcctaaaaatcactgcagacctgaaaagtgcatttcgagttatctgtgtagacactgccg

SEQ ID NO: 2219 - DNA, 363 bp, Homo sapiens
  misc_feature 1..363: note = U/M: M (0.59:0.15) in Kidney Epithelium
  misc_feature 1..363: note = source = chr2:237080546-237080908; Gene: GBX2 (Intergenic)
  source 1..363: mol_type = genomic DNA
cgcacttacaaaggggcgcttgtgtaaaattccccatcagacacactaatttgcaagtagcagaaagcattgaagcctcatctttttaaacattttattcagcttttttttttttttaatctgaaagcccaaaatagactccatgtggttctaagtgaagtcagcccttggctggctttgaaatagctcctgcaattatgtaaaagagccattcaccaacaggacggaattaaaagggatctcgcccgcttccctttcattgccaacctctcatgtttggcttttcaaagcacttccaacacgatgtctttctccaggacaaaaggcagaacaaaaaaagtccccaaacttgtaaattgaacg

SEQ ID NO: 2220 - DNA, 77 bp, Homo sapiens
  misc_feature 1..77: note = U/M: U (0.05:0.92) in Bladder Epithelium
  misc_feature 1..77: note = source = chr3:189704095-189704171; Gene: LEPREL1 (intron)
  source 1..77: mol_type = genomic DNA
cgggtgcggcggctcaagcctgtaatcccagcacttggggaggctgaggcgggcggatcacctgaggtcaggagtcc

SEQ ID NO: 2221 - DNA, 104 bp, Homo sapiens
  misc_feature 1..104: note = U/M: U (0.11:0.94) in Bladder Epithelium
  misc_feature 1..104: note = source = chr7:97408637-97408740; Gene: TAC1 (Intergenic)
  source 1..104: mol_type = genomic DNA
cgctgcacccactgtcctgcacccactgtctggcactccctagtgagatgaacctggtacctcagatggaaatgcagatatcacccgtcttctgcgtcgctcac

SEQ ID NO: 2222 - DNA, 123 bp, Homo sapiens
  misc_feature 1..123: note = U/M: U (0.08:0.9) in Bladder Epithelium
  misc_feature 1..123: note = source = chr1:34004606-34004728; Gene: CSMD2 (intron)
  source 1..123: mol_type = genomic DNA
cgcccaggctggagtgcaggggtgcgatcttggctcactgcaagctccgcctcctgggttcacgccattctcctgccccaacctcccgagtaggtgggactacaggcgcccgccaccacgccc

SEQ ID NO: 2223 - DNA, 200 bp, Homo sapiens
  misc_feature 1..200: note = U/M: U (0.13:0.92) in Bladder Epithelium
  misc_feature 1..200: note = source = chr10:111585736-111585935; Gene: XPNPEP1 (Intergenic)
  source 1..200: mol_type = genomic DNA
cgcacaccgtgtgcaagccgacgcagggtgaggcattgcctcactcgggaagtgcaaggggtcagggagttccctttcctagtcaaagaaaggggtgacggacggcacctggaaaatctggtcactcctacccgaatactgcgcttttctgacgggcttaaaaaatggcgcaccacgagattatatcccgcacctggctc

SEQ ID NO: 2224 - DNA, 454 bp, Homo sapiens
  misc_feature 1..454: note = U/M: U (0.14:0.93) in Bladder Epithelium
  misc_feature 1..454: note = source = chr2:152635949-152636402; Gene: NEB (Intergenic)
  source 1..454: mol_type = genomic DNA
cgaggagaagctcagctctctctctactgtttccaaggagctccagagaggaacttacattttcccggtgatctcgctcaccctcgctcctgttccttgctctaaactctgtacttgattctctgttcagcttgctctgaatgtgaccttcccgtgctaatacaagtctaggcggtgctaatacaagtctaaggaagtagtaaagcttcactgaagactagggaaaaggtaacaaaaaaccagagtgtgaaagagaaaacaacctttacttcatcatccaacaagcctgttggcaaagatcactttggccatttcctcctctctccttttcctccagttccagggtccaaactccttttcttgagtttcaaagagaaaatgtaaaagtctcccaccttcttactcagagccagttagtgttactgccctctttctcttgaccttacatccagac

SEQ ID NO: 2225 - DNA, 154 bp, Homo sapiens
  misc_feature 1..154: note = U/M: U (0.13:0.9) in Bladder Epithelium
  misc_feature 1..154: note = source = chr2:113715851-113716004; Gene: IL36G (Intergenic)
  source 1..154: mol_type = genomic DNA
cgtatcgtaccctctcacctgctcaggacgtgcctctagcaagtcctctcatgctccggcaacatcatggttcctcttcagcagaccagttatactggcacaaagcatgcagctgttcctcccatctccaccaccctctccatctctttctcac

SEQ ID NO: 2226 - DNA, 83 bp, Homo sapiens
  misc_feature 1..83: note = U/M: U (0.15:0.91) in Bladder Epithelium
  misc_feature 1..83: note = source = chr10:133993221-133993303; Gene: JAKMIP3 (intron)
  source 1..83: mol_type = genomic DNA
cggcagggtcgcaccacagcagggtcacgccacggcagggtcacaccacaacagccacaccatggcacagccacaccattatc

SEQ ID NO: 2227 - DNA, 62 bp, Homo sapiens
  misc_feature 1..62: note = U/M: U (0.16:0.91) in Bladder Epithelium
  misc_feature 1..62: note = source = chr16:32889552-32889613; Gene: SLC6A10P (intron)
  source 1..62: mol_type = genomic DNA
cgtgctcacgcacgcgtgcactcgcacccaagctcacacaattgatattggtggtgattggc

SEQ ID NO: 2228 - DNA, 133 bp, Homo sapiens
  misc_feature 1..133: note = U/M: U (0.08:0.83) in Bladder Epithelium
  misc_feature 1..133: note = source = chr8:62146817-62146949; Gene: CLVS1 (Intergenic)
  source 1..133: mol_type = genomic DNA
cgtgcgtattcatgtgagagaaacagcctggttcgaccagtgcctgacgtcacttgttctgctgtgtcagcatggcacaggaggctgtatccccttgatacatttctcatgaatcacaatagcttacatttcc

SEQ ID NO: 2229 - DNA, 411 bp, Homo sapiens
  misc_feature 1..411: note = U/M: U (0.14:0.89) in Bladder Epithelium
  misc_feature 1..411: note = source = chr2:48736358-48736768; Gene: PPP1R21 (intron)
  source 1..411: mol_type = genomic DNA
cgcataatctgtagggtaggatggtaaagcttttattgctcctataatgtggtctctaatgaaggacttaaaacacaagaaaagtaccttaggatccatagtgcgtggtcagaagctcctgataacttttgtaataatcacttttctttttatctagtataaatataaatgaattctagataaatctagaaagttcttatgtaaagaacgggtgctgtggctcacacctgtaatcccagcactttgggaggctgaggtgggcagatcacttgaggtcaggggtttgagaccagcctggacaacatagtgaaacccgtctctactaaaaatacaaaacttagctgggtgtggtggtgcatgcctgtaatcccagctactcgggaagctgaggcaggaggatcacttgaaccc

SEQ ID NO: 2230 - DNA, 369 bp, Homo sapiens
  misc_feature 1..369: note = U/M: U (0.2:0.93) in Bladder Epithelium
  misc_feature 1..369: note = source = chr14:81856494-81856862; Gene: STON2 (intron)
  source 1..369: mol_type = genomic DNA
cgccactggactccagcctgagtgacagagtgagactccatttcaaaaaaaaaaaaaaagaaaaacttaaaaacagaaagacaagtagtggttgaaagacaaccgcaagagatggtaatcacagcagcacaggttggctctggtttgctactagaggatccaggaagaagcccagtggatttctgctcaattctgagcactgcgctatgtctttgaatatccacacctagcagaactatacagaggaagtgcttagtaaatatctggtgactcaatgagtaaattataaggagctgtaaggtttagggacaaagcacactgacatgcacacatctccttaagaaataccctgcatcgtgagctgggatc

SEQ ID NO: 2231 - DNA, 237 bp, Homo sapiens
  misc_feature 1..237: note = U/M: U (0.16:0.88) in Bladder Epithelium
  misc_feature 1..237: note = source = chr3:70922903-70923139; Gene: MIR1284 (Intergenic)
  source 1..237: mol_type = genomic DNA
cgaaccccaaagattaagaacccactggccccttacaatgtagacctcatgtgaattacgtctcctagtaaactaaaaatttgattttctggctttgtcagtcttgcagacatggtcagattgtgcaatgcatagcctgcatatccacatgtaggtgtgtaacttgctaaacatgggtgcgtcctgggtgagtgggggagaaaggaagagagacagaaagagatctgtgggttcgcc

SEQ ID NO: 2232 - DNA, 186 bp, Homo sapiens
  misc_feature 1..186: note = U/M: U (0.17:0.87) in Bladder Epithelium
  misc_feature 1..186: note = source = chr19:56725662-56725847; Gene: ZSCAN5A (Intergenic)
  source 1..186: mol_type = genomic DNA
cgcgacataaaattaactgttttatctgtacagtttagtggcatttggtgcatttacactgctgtgcggcagctcctctagctggttcctgtgcctgcatgtccagagtccaagttctgacatttgtacatactcatgaagtcattgccgtcatcaagaagctgaacatccccaccatcctccaac

SEQ ID NO: 2233 - DNA, 482 bp, Homo sapiens
  misc_feature 1..482: note = U/M: U (0.31:0.92) in Bladder Epithelium
  misc_feature 1..482: note = source = chr4:2961841-2962322; Gene: NOP14 (intron)
  source 1..482: mol_type = genomic DNA
cgcacgctgccacgcccagctaatttttttgtatttttagtagagatggggtttcaccgtgttgcccaggctggtttcgaactcctgagctcaggcaatctgcctgcctcggcctcccaaagtgctaggatcacaggtgtgagccaccaaacccagcatacaccgagaagacttctgaggtctgtccctgcagagggagggagtgtcactggcttctagcaggaagggggtagatggggcaggcatcagccatctctgcctctaaaaatattagttctcattatctggaatatgattctatgggtaaatcttagtgaagaacagcccttaggctataaatacgtaatatgagttattctacattattgtgattctctttctttcttaaactatatagatgttgtgacatcatatggaatttacggcataaaatggggataacagtacttccccctcataacggtgaggattaaatgtaaacc

SEQ ID NO: 2234 - DNA, 235 bp, Homo sapiens
  misc_feature 1..235: note = U/M: U (0.11:0.91) in Bladder Epithelium
  misc_feature 1..235: note = source = chr19:49305765-49305999; Gene: BCAT2 (intron)
  source 1..235: mol_type = genomic DNA
cgcaatctcggctcactgcaacctccgcctcccgggttcaagcaattctcctgcctcagcctcccgagtacctgggattacaggcacccgccaccacacccagctaatttttgtatatttagtagagatggggtttcaccatgttggcaaagctggtcttgaactcctgacctcaggtgacccacctgcctcagcctcccaaagtgctgggattgcaggtgagccatcacagccg

SEQ ID NO: 2235 - DNA, 222 bp, Homo sapiens
  misc_feature 1..222: note = U/M: U (0.13:0.92) in Bladder Epithelium
  misc_feature 1..222: note = source = chr1:33609720-33609941; Gene: TRIM62 (Intergenic)
  source 1..222: mol_type = genomic DNA
cgctttaatgttacttcttttttttttttttttttttgagacggagtttcgctctttgcccaggctggagtgcaatggcgcgatctccagctcaccgcaacctccgcctcccgggttcaagagattctcctgcctcagcctcccgagcagctgggattacaggcatgtgccaccacacccggctaattttgtattttttagtagagacggggtttctccacg

SEQ ID NO: 2236 - DNA, 312 bp, Homo sapiens
  misc_feature 1..312: note = U/M: U (0.11:0.89) in Bladder Epithelium
  misc_feature 1..312: note = source = chr7:34214882-34215193; Gene: BMPER (Intergenic)
  source 1..312: mol_type = genomic DNA
cgccgtttttaaagccggtctgaaaagcgcaatattcgggtgggagtgacccgattttccaggtgagtccgtcacccctctctttgactcggaaagggaactccctgaccccttgcgcttcccaggtgaggcaatgcctcaccctgctttggcttgcgcacggtgcacgcacccactggcctgcgcccactgtctggcacaccctagtgagatgaaccagatacctcagacggaaatgcagaaatcacccatcttctgcgtcactcacgctgggagctgtagaccggagctgttcctatttggccatcttcg

SEQ ID NO: 2237 - DNA, 89 bp, Homo sapiens
  misc_feature 1..89: note = U/M: U (0.08:0.85) in Bladder Epithelium
  misc_feature 1..89: note = source = chr2:131085456-131085544; Gene: CCDC115 (Intergenic)
  source 1..89: mol_type = genomic DNA
cgcgggcgggagcccgggctgcgcagggcgctggagggctggcgcggttccgggttgggcgcgcctctgctgccctgcactccgcgccg

SEQ ID NO: 2238 - DNA, 63 bp, Homo sapiens
  misc_feature 1..63: note = U/M: U (0.14:0.9) in Bladder Epithelium
  misc_feature 1..63: note = source = chr16:33785709-33785771; Gene: LINC00273 (Intergenic)
  source 1..63: mol_type = genomic DNA
cgccaatcaccaccaatatcaattgtgtgagcttgggtgtgagtgcacgcgtgcgtgagcacg

SEQ ID NO: 2239 - DNA, 150 bp, Homo sapiens
  misc_feature 1..150: note = U/M: U (0.14:0.9) in Bladder Epithelium
  misc_feature 1..150: note = source = chr16:1603357-1603506; Gene: TMEM204 (intron)
  source 1..150: mol_type = genomic DNA
cgatgctggggccacacagggcagggcatgatttggtttcctggggaatgcaggggaggcggttgggagtggagagaccggcatgaacagacgcacaggtgtcaacatgcaggccaggcggagggacagcagtggggctcggcgtggccg

SEQ ID NO: 2240 - DNA, 192 bp, Homo sapiens
  misc_feature 1..192: note = U/M: U (0.18:0.94) in Bladder Epithelium
  misc_feature 1..192: note = source = chr19:53463258-53463449; Gene: ZNF816 (intron)
  source 1..192: mol_type = genomic DNA
cggtcaccaaataggacagtacctgtgccacagctgctaggagccacagttgtactggaggtgcatgaaaccacccatctaggtcaggagtcacttgaacagttgttaggctggtacttctacagctcacaattgtcagccctcgccaaaaccgtggcacagcggtgtgttacctgccgacagcacaatgcg

SEQ ID NO: 2241 - DNA, 231 bp, Homo sapiens
  misc_feature 1..231: note = U/M: U (0.09:0.85) in Bladder Epithelium
  misc_feature 1..231: note = source = chr10:124054428-124054658; Gene: BTBD16 (intron)
  source 1..231: mol_type = genomic DNA
cgacagacaaaagctggcacctaaaggctcctggacccgatgagggtggggcccgagcctcctgttcagcctcgtcacagcttgggcttcaccctctgctgaccggtgaggccatgagctccaggacgaaaaggcctccacctgtccctggtggcatttccagaaccagcagcacaggtcagcacagagctggcactcaggatggatttgtatggggagcgctgcttcccg

SEQ ID NO: 2242 - DNA, 73 bp, Homo sapiens
  misc_feature 1..73: note = U/M: U (0.18:0.93) in Bladder Epithelium
  misc_feature 1..73: note = source = chr2:189648457-189648529; Gene: DIRC1 (intron)
  source 1..73: mol_type = genomic DNA
cgatctcaggtgatacccccgccgcctcggcctcccaaagtgctgagattacaggcatgagccaccgcacccg

SEQ ID NO: 2243 - DNA, 83 bp, Homo sapiens
  misc_feature 1..83: note = U/M: U (0.05:0.8) in Bladder Epithelium
  misc_feature 1..83: note = source = chr2:131085546-131085628; Gene: CCDC115 (Intergenic)
  source 1..83: mol_type = genomic DNA
cgtcgggcgcctgctgggcttgattggaggacgggctccctctgggctgcaagagtgccccggctaggtgccgcaaagtcccg

SEQ ID NO: 2244 - DNA, 263 bp, Homo sapiens
  misc_feature 1..263: note = U/M: U (0.12:0.87) in Bladder Epithelium
  misc_feature 1..263: note = source = chr13:20969691-20969953; Gene: MIR4499 (Intergenic)
  source 1..263: mol_type = genomic DNA
cgtgcacttggagctgaggttgcaggatgtgccttagccgagggtcagactctccaaccactgctagcccctacgtgtccctggggcagcccttggcaatccacctttcacaggccggaagcccttttttgtcataagctcaagacagcagtttaaccttcacccactccaaatgctgaatcattggtggcacgcaggtctggtctgacttgcaacttggatgacgaaggtgtcatgaggcatttcactctccttccctcacg

SEQ ID NO: 2245 - DNA, 268 bp, Homo sapiens
  misc_feature 1..268: note = U/M: U (0.17:0.92) in Bladder Epithelium
  misc_feature 1..268: note = source = chr1:203273230-203273497; Gene: LOC730227 (intron)
  source 1..268: mol_type = genomic DNA
cgctgacagaaatggagatcaagagctttggagagacactgggcttcggctgacattgaggtggtggctggacatctgagggagaggacagagccggtgggaacaggagcaggatggaaagacaggaggacagactatgcagatgagaaaagccactgtaaaacagtaaacatcaagacaggctacatgcataggacctctccaaggaaaggcagcctagagaaaagggaggaggactgaggagacatagtgcggggaacggggcacg

SEQ ID NO: 2246 - DNA, 494 bp, Homo sapiens
  misc_feature 1..494: note = U/M: U (0.15:0.9) in Bladder Epithelium
  misc_feature 1..494: note = source = chr4:121662379-121662872; Gene: PRDM5 (intron)
  source 1..494: mol_type = genomic DNA
cgatgcttctggagctaggaaaattattcttgccttttgctccctttagcatacagcagccctcactcctcctgccttaacatcttaattcaaatagaatgaacctttttctttttccttcaacatcatgcttacactcactcacatggttcatcagcttgatgtattggtcaaaatttttggttatcaggggggaggagccaagatggccgaataggaacagctctggtctacagctcccagcctgaaccacgcagaagacgggtgattactgcatttccatctgaggtaccgggttcatctcactagggagtgccagacagtgagcgcaggtcagtgggtgcgcgcactgtgcacgagccgaagcagggccaggcattgcctcactcgggaagcacaaagggtcagggagttccctttcctaatcaaagaaaggggtgacggacagcacctggaaaatagggtcactcccacccgaatactgcgcttttccg

SEQ ID NO: 2247 - DNA, 500 bp, Homo sapiens
  misc_feature 1..500: note = U/M: U (0.12:0.87) in Bladder Epithelium
  misc_feature 1..500: note = source = chr10:3984706-3985205; Gene: KLF6 (Intergenic)
  source 1..500: mol_type = genomic DNA
cggcttcgagaccaagacgcagttgatgcacttcacaatgtactaatttgttgttcactccatgaacaaaaactgaggcctactaggttccccagagctgctcaagatgccagagccatggaggggggtgaggggaagggcaagaaggtgcccatagtgcttataatgtaggaaagggggacagggacgggcagacaggaaaagaagggaaaaggcaagcagagaacaaggttgtgaaaagtgctctgtagcccgggcgagagagatgtcggtgactccgagtaaggcatgatatcagcattacagggaagggctctgactcagtgtgatctcaaagttgataggattgctcaaagattaagtattcagactaaaagaaagagggagggaccaggataaattaaattatcagctggtttactgagaaaactcagagaagaagacattcagggagacaccaagccagggaggtgacaagtatgtggtaaaatccgagcacg

SEQ ID NO: 2248 - DNA, 103 bp, Homo sapiens
  misc_feature 1..103: note = U/M: U (0.18:0.92) in Bladder Epithelium
  misc_feature 1..103: note = source = chr17:77844945-77845047; Gene: CBX4 (Intergenic)
  source 1..103: mol_type = genomic DNA
cgatggcagcctgggtctggagacacgcctgcttggaggacgcgcggggtcttcgggaaggggcttggtgggtagctcactcctgaaggagtcaggcttcccg

SEQ ID NO: 2249 - DNA, 251 bp, Homo sapiens
  misc_feature 1..251: note = U/M: U (0.17:0.91) in Bladder Epithelium
  misc_feature 1..251: note = source = chr9:135812999-135813249; Gene: TSC1 (intron)
  source 1..251: mol_type = genomic DNA
cgctagatgagatcctgtagactgcccagccacaacccatcctacataaaggccctactctaggaaagcagagtggttttgttgttggtggttggtttttttgttttgttttttgagatagagccctgctctgtcgctcaggctggagttcagtggcctaatcatgactcatggttcactgcgaccttcgcctcccaggctcaagcaatcatcccacctcaacctcccaagtagctgggaatacaggcacg

SEQ ID NO: 2250 - DNA, 138 bp, Homo sapiens
  misc_feature 1..138: note = U/M: U (0.15:0.88) in Bladder Epithelium
  misc_feature 1..138: note = source = chr10:28956172-28956309; Gene: BAMBI (Intergenic)
  source 1..138: mol_type = genomic DNA
cgaagccacacactggtaagtgactaagccccaagctaatgctgggccccaggtacaggagcccacctcgccactgcttccttgtgtctggttctgcctcgggaactggcctaggaacagactccctgccacccgccg

SEQ ID NO: 2251 - DNA, 146 bp, Homo sapiens
  misc_feature 1..146: note = U/M: U (0.19:0.92) in Bladder Epithelium
  misc_feature 1..146: note = source = chr7:116048933-116049078; Gene: CAV2 (Intergenic)
  source 1..146: mol_type = genomic DNA
cgaatagaaacagctccgctctacagctcccagcgtgagcgacgcagaagacgggtgatttctgcatttccatctgaggtaccgggttcatctcactagggagtgccagacagtgggcacaggtcagtgggtgcgcgcaccgtgcg

SEQ ID NO: 2252 - DNA, 436 bp, Homo sapiens
  misc_feature 1..436: note = U/M: U (0.14:0.87) in Bladder Epithelium
  misc_feature 1..436: note = source = chr11:75405128-75405563; Gene: MOGAT2 (Intergenic)
  source 1..436: mol_type = genomic DNA
cgggtcaaatggtagttccatttttagttctttgagaaatctccaaactactttccacagtggctgaactaatttacattcccaccagcagtgtataagcattcttttttctccacagcccagccagcgtctgttattttttgtctttttaatagtagccattctgactggtctgagatggtatctcatcgtggttttgatttgtgcttctctgatgattagtgatgttgagaattttttcatatgtttgttgtatatctccttttgagacttctcgaaaggagtgtctgttcatgtcctttgcccactttttgatggggttatttgttttttgcttgtcgagttgtttaatttccttatagattctggaattagacctttgtcagatgcatagtttgcaaatattttctcccattctgtaggtagtctgtttacg

SEQ ID NO: 2253 - DNA, 130 bp, Homo sapiens
  misc_feature 1..130: note = U/M: U (0.2:0.92) in Bladder Epithelium
  misc_feature 1..130: note = source = chr3:120097307-120097436; Gene: MIR198 (Intergenic)
  source 1..130: mol_type = genomic DNA
cgccctgcttcggctcgcgcacggtgcacgcacccactgacctgcgcccactgtctggcactccctagtgagatgaacccggtacctcagatggaaatgcagaaatcacccgtcttctgcgtcgctcacg

SEQ ID NO: 2254 - DNA, 194 bp, Homo sapiens
  misc_feature 1..194: note = U/M: U (0.14:0.86) in Bladder Epithelium
  misc_feature 1..194: note = source = chr10:33311432-33311625; Gene: ITGB1 (Intergenic)
  source 1..194: mol_type = genomic DNA
cgtgctctcgttaaatatcacattcaggaaaacagctattaaagccacatgttacaaacccatcacgggcaagtgttaaaattccaaatgaggtttccttctcatccttgacttttcattcttttactactctcatttcttcacatctatctcagatgtgcctggtagaagaatttcctgtaaatcgcattccg

SEQ ID NO: 2255 - DNA, 280 bp, Homo sapiens
  misc_feature 1..280: note = U/M: U (0.17:0.89) in Bladder Epithelium
  misc_feature 1..280: note = source = chr3:128143761-128144040; Gene: DNAJB8-AS1 (Intergenic)
  source 1..280: mol_type = genomic DNA
cggcggaagtggtctttctcagggaggcagtggcggggtggtcagggcctctcaccaagcaggtaggactggtcaactccatgattctgagagtctgcgactctgtgactggtttttaaaattgttgtttgtcacatacagtaaaaatcacccctttaaacatgtagctctgtgcgttttgaaaaacacattcagttgtgtaacccctacctgagtcaaaagagagaacaggtgcacccccatgcttcatgcccctgtgaaagcacccctcgcacacccg

SEQ ID NO: 2256 - DNA, 281 bp, Homo sapiens
  misc_feature 1..281: note = U/M: U (0.1:0.82) in Bladder Epithelium
  misc_feature 1..281: note = source = chr18:7048033-7048313; Gene: LAMA1 (intron)
  source 1..281: mol_type = genomic DNA
cgtcacaaaacctctgctcatccaaagtcacaggaaggtgaataagcaaacaccaagtagaacggatatgtttgcaatatatacatatctgatgaaggattcgtatacaaaatatataaaattcttttataagtcagtaacaaggaggcttattttttgtccaatttaaaaatggacaaaaaaaatctgatcgtatactagtaagcacattgtcaacattagtcagcagagaaacacaaattaacgtcacaaaatgccaatacacgcacacaggaacagcg

SEQ ID NO: 2257 - DNA, 137 bp, Homo sapiens
  misc_feature 1..137: note = U/M: U (0.22:0.93) in Bladder Epithelium
  misc_feature 1..137: note = source = chr20:50247316-50247452; Gene: ATP9A (intron)
  source 1..137: mol_type = genomic DNA
cgattcctacttaattcaccgtccttcacataagaacatgtcaaccttgatgttatcgcacaaattacaggtgatgaaacatacagctttcttgcctctcctggaaggtgcccgtaattgtcctgctggggcacgcg

SEQ ID NO: 2258 - DNA, 205 bp, Homo sapiens
  misc_feature 1..205: note = U/M: U (0.23:0.94) in Bladder Epithelium
  misc_feature 1..205: note = source = chr2:55180750-55180954; Gene: EML6 (intron)
  source 1..205: mol_type = genomic DNA
cgggcggcagtggctcacatttgtaatcccagcactttgggaggcgggcggatcacctgaggtcaggagtttgagaccagcctggccaacatggtgaaatgctgtctctgctgaaaatacaaaaattagctgggtgtggtggtgcgtgcctgtaatcccagctactcgggaggctgaggcacgaggatcgtgtgaacccaggacg

SEQ ID NO: 2259 - DNA, 391 bp, Homo sapiens
  misc_feature 1..391: note = U/M: U (0.13:0.84) in Bladder Epithelium
  misc_feature 1..391: note = source = chr13:43835051-43835441; Gene: ENOX1 (intron)
  source 1..391: mol_type = genomic DNA
cgttaatatatccagttccaactacaaagagaaaacaaccagcaggcatgagcgtgaactgcacaagtcctcttggagaacaaggcctttgcagttgacgtcagtttctggccctaacagttttaaatctgctttcagaaaacttctcctgggcatgcattcgcagatgatcttgtgataaggggcaagggttgggctttttaagggtgtgtctgttttgagacctcaagcatgctggacaatgtgttggtcagatcctggtggtacacagtagaacgtaaaaacaacagaaaagtaatactaacagaccatgagctagatgagtcttgagactaagacaaatgaggaaatacaagactctacgtatcctttagtggattccttcaggacg

SEQ ID NO: 2260 - DNA, 428 bp, Homo sapiens
  misc_feature 1..428: note = U/M: U (0.16:0.87) in Bladder Epithelium
  misc_feature 1..428: note = source = chr11:107416771-107417198; Gene: ALKBH8 (intron)
  source 1..428: mol_type = genomic DNA
cgtgactcattctttgttctaaaaaattagtacatagttgtaatataacctaaaaattgttaaataaaatttttctttaaaaatcatcttcataaattttagtttcgttttcccagataagtcctaatcaaaagttttcttccttatttataatagaagttaggtattggttttagggagatgcacattaaatagttattttcattatcagctgaccaactcttacggtacttgatgaactgagttatctgcccaacaacattactagtttattatcataaaaggttatagcaagggcatctctcaaaacatgcctggccagcaaaggcaggctgcaatttacggcaggacaaattcatcagtgaaggattacctaaaaacaaaagcctagtagacttcacaggtatatgttattgtcatataacccg

SEQ ID NO: 2261 - DNA, 100 bp, Homo sapiens
  misc_feature 1..100: note = U/M: U (0.21:0.91) in Bladder Epithelium
  misc_feature 1..100: note = source = chr1:15232920-15233019; Gene: KAZN (intron)
  source 1..100: mol_type = genomic DNA
cgggcatggaacaggagcttgctgggtcatgagaggaagttagcctgggaatcgagctgaggtgtggctgtgacttggggacgcagcctcatgcggagcg

SEQ ID NO: 2262 - DNA, 202 bp, Homo sapiens
  misc_feature 1..202: note = U/M: U (0.19:0.89) in Bladder Epithelium
  misc_feature 1..202: note = source = chr18:8552688-8552889; Gene: RAB12 (Intergenic)
  source 1..202: mol_type = genomic DNA
cgaggcaagttttagagcaggagtgaaagtttattaaaaagttttagaggctgggagcggtggctcccagagctttgggaggccaaggtgggtggatcatgaggtcaagagatcaagaccatcctggtcaacatggtgaaaccccgtctctactaaaaaaaaaaaaaaaaaaatacaaaaattagctgggtgtggtggcgcg

SEQ ID NO: 2263 - DNA, 427 bp, Homo sapiens
  misc_feature 1..427: note = U/M: U (0.17:0.87) in Bladder Epithelium
  misc_feature 1..427: note = source = chr4:37528843-37529269; Gene: C4orf19 (intron)
  source 1..427: mol_type = genomic DNA
cgttttagtaattaaaaagtttataaagtaaaaaagttacagtcagctaaggttaatttgctatcaaagaaagaaaaatattttaaaataaatgtagtctaagtgtgcagtgtttatgaagtctccagtagtgtccagtaatagcctaggcttcatattcactcaaactcactcactgactcacccagagcaacttcagtcctgtaagctccattcatggtaagtgccctatctaggtgaaccatctcttaacttttataccgcatttttactgtaccttttctctatttatgtttagatacataaatacttttatgagccgggcattgtggctcacgcctgtaatcccagcactttgggaggccgaggtgggcagatcatgaggtcaggagattgagaccatcctggctaacacagtgaaaccccg

SEQ ID NO: 2264 - DNA, 433 bp, Homo sapiens
  misc_feature 1..433: note = U/M: U (0.2:0.9) in Bladder Epithelium
  misc_feature 1..433: note = source = chr4:129712962-129713394; Gene: PHF17 (Intergenic)
  source 1..433: mol_type = genomic DNA
cgcaccattgcactccagcctgggcaacaagagtaaaactccatctcaaaaaaaaaaaaaaaaaaaaaaaaaaagcaggaaaaccagttacactattcaatgtcaggtgaaaggtaatacagtgcccagtcaggatagcaggtgtaggaatgcgtagaaagggacaggcgggagacacaccacagatccagagttaaccagactcggccatttttaacataattgtatggtggggtgggaggaagagagtgaagaaacggaagaatttagatgcattgtgcaatatgggggtccataaacatcatcgaatggttaccagatgagagatgatatgacctgaagggctggtatgtaaagagaagggcaaggcttgaggatcacagggttgggcccccatagacattgtaagaggggtcagggagttcaaaaggcg

SEQ ID NO: 2265 - DNA, 185 bp, Homo sapiens
  misc_feature 1..185: note = U/M: U (0.1:0.79) in Bladder Epithelium
  misc_feature 1..185: note = source = chr18:8458878-8459062; Gene: LOC100192426 (Intergenic)
  source 1..185: mol_type = genomic DNA
cgttcgagtttgggacactctggtcaacaacagactcttcaagagctgattgacttcattttccggatgatcagtgggtgtcctccctctcccaaccctcgatcactgggtgaatcagcactcctcctgagccagctgagctgcttcctcggtctccctatcacggtcaccatcagggtcatgcg

SEQ ID NO: 2266 - DNA, 192 bp, Homo sapiens
  misc_feature 1..192: note = U/M: U (0.22:0.91) in Bladder Epithelium
  misc_feature 1..192: note = source = chr1:154254086-154254277; Gene: HAX1 (Intergenic)
  source 1..192: mol_type = genomic DNA
cgcagtgactcacgcctataatcccagcactttgggaggccgcggcgggcggatcatgagatcaggagatcgagaccatcctgtataacacggcgaaaccccatctctactaaatatacaaaaaattagctgggcgtgggggcgagtgcctgtagtcccagctacttgggaggctgaagcaggagaatggcg

SEQ ID NO: 2267 - DNA, 263 bp, Homo sapiens
  misc_feature 1..263: note = U/M: U (0.16:0.85) in Bladder Epithelium
  misc_feature 1..263: note = source = chr1:6377471-6377733; Gene: ACOT7 (intron)
  source 1..263: mol_type = genomic DNA
cgttccagctgtttcccaaactctgggaagccaagctacgaactttaaggcctgtgttgtttgagaagagatctgtacttactgggaaaaaataaatgcaaacattagaggaaaaacattattaacgagtcactgccggtgagtcacgatgctagtctttggggccatcggtgccctgcaaggccctgccctgaccctcagcaggcattaaacatctcacagctatcagatcccggggctgcatgtgagcctccccagggacg

SEQ ID NO: 2268 - DNA, 306 bp, Homo sapiens
  misc_feature 1..306: note = U/M: U (0.2:0.89) in Bladder Epithelium
  misc_feature 1..306: note = source = chr7:27063444-27063749; Gene: HOXA1 (Intergenic)
  source 1..306: mol_type = genomic DNA
cgcctccagtgagaagttgaggaagaaaagtgggccgggaacaaggaggctgaggtggcctccttgaatcgtaggatccagcaggtttgaagaggagctggaccatgctcaggagcgcctgaccactgccctgcaaaagctggaagaagaggagaaagctgctgatgagagtgaaagagatatgaaggttattgaaaaccaggccttgccgaggcccgggaatggcgtgacccccgggaggcggagcttgcagtgagccgagatcgtgccactgcactccagcctgggcaacaaagtgagactccg

SEQ ID NO: 2269 - DNA, 193 bp, Homo sapiens
  misc_feature 1..193: note = U/M: U (0.16:0.84) in Bladder Epithelium
  misc_feature 1..193: note = source = chr19:46005910-46006102; Gene: PPM1N (TTS)
  source 1..193: mol_type = genomic DNA
cgcagcaaacaagggaatcaataaataaagtcatctcgccaggcgcagtggtccacatctgtaatctcagcacttgggggagtctgaggtgggaggatcacttgagcccaagagttcgagaccagcctgggcaacatagcaagatgcaatctgtaatttttttttttttttttttttttgagacggagtctcg

SEQ ID NO: 2270 - DNA, 263 bp, Homo sapiens
  misc_feature 1..263: note = U/M: U (0.2:0.88) in Bladder Epithelium
  misc_feature 1..263: note = source = chr10:98602423-98602685; Gene: LCOR (intron)
  source 1..263: mol_type = genomic DNA
cgtcacccaggctggagtgcagtggtgtgatctcggctcactgcatccttttcctcccaggttcaagtgattcttctgcctcagccttccgagtagccgggattacaggcatatgccaccacagcccactagttcttgttttttttggtagagaggggttttaccatgttggccaggctggtcttgaactcctgactgtgagtgatccacccaccttggccccccaaattgctgggattacaggtgtgagccatcatggcccg

SEQ ID NO: 2271 - DNA, 265 bp, Homo sapiens
  misc_feature 1..265: note = U/M: U (0.23:0.91) in Bladder Epithelium
  misc_feature 1..265: note = source = chr17:7828771-7829035; Gene: KCNAB3 (intron)
  source 1..265: mol_type = genomic DNA
cgggaggaggaggttgcagtgagccgagatcgtgccattacactccagcctggacaacaagagtgaaactccgtctcaaaaaaaaaaaaaaaaaaaaaagaattcagaccttgcccccttgccatggccacctaaatccctattcaaagcctccagaagttcagagaatgttccctactcctctggcttccatatcccctcactttgggtttccagcccctaactctcaccctcaatgatgtgctttcggcttaaacctcgctcg

SEQ ID NO: 2272 - DNA, 441 bp, Homo sapiens
  misc_feature 1..441: note = U/M: U (0.23:0.91) in Bladder Epithelium
  misc_feature 1..441: note = source = chr7:102380675-102381115; Gene: FAM185A (Intergenic)
  source 1..441: mol_type = genomic DNA
cgctttttattactgagcagcattccattatgtggatgtactacagtttgcttttccactcacatttgagagacctttgggttgtttcaaggtttttggcgattgtaaatagtctttgataatttgggggtggtaacttttcctttgaaaattttggccagattttcctgtttctgatatgttgagtaatttgggattttaagatggacaatttgactattatgctgttcatgcctgtaatcccagccttgggaagccaaggtgggagaatcacttgaggtcaggagtttgagaccagcctggccaacatggtgaaaccccgtctctataaaaattggccaggtgtggtggcatgcaccagtactcccagctacttgggaacctgaggcaggagaatcgcttgaacctgggaggcagaggttgcagtgagccgagattgcg

SEQ ID NO: 2273 - DNA, 161 bp, Homo sapiens
  misc_feature 1..161: note = U/M: U (0.18:0.84) in Bladder Epithelium
  misc_feature 1..161: note = source = chr10:30453416-30453576; Gene: KIAA1462 (Intergenic)
  source 1..161: mol_type = genomic DNA
cgggctcgagtgattcactcacctcaccctctcaagtagctgggaccacaggcacacgccaccacacccagtagttttttaatttttatctagagatgggatctcactgtgttgccgaggctggtcttaaactcctggcctcaagaaattctcctgcctcg

SEQ ID NO: 2274 - DNA, 184 bp, Homo sapiens
  misc_feature 1..184: note = U/M: U (0.18:0.84) in Bladder Epithelium
  misc_feature 1..184: note = source = chr2:11108531-11108714; Gene: KCNF1 (Intergenic)
  source 1..184: mol_type = genomic DNA
cgtgcacttccaacacctgcccttccttggctctgagcttcctcctcaaacctcgccggtggtcaggccatgaattctccgattctgagtgatctctgctccttccgagtcagtgggagcctcccttctcctccctctctccttgcatctgcaggacctgggtttgcgtccacccatgggtgcg

SEQ ID NO: 2275 - DNA, 350 bp, Homo sapiens
  misc_feature 1..350: note = U/M: U (0.21:0.87) in Bladder Epithelium
  misc_feature 1..350: note = source = chr1:208227830-208228179; Gene: PLXNA2 (intron)
  source 1..350: mol_type = genomic DNA
cgtactggcccggaggtggttcccacgagggcatggcccatctcacagacaatcctggggagaaagcaaaccttctggtgagggactgggcaagggctggcatcgctgttcacttgctctcccagtcatggcaaatgactcatcacagtcttgcaataatgccagaccaagactcagcttggtcatccatcttgctgtgtgaccttgggtacagtgctttccctctctgggctttggtctcatctgcacagtgtgaaggttgaaccggatcatctctaaagccctgtgtgcctctgatatgctctgctgcctaattctgtggccatttctgtggttccccatgcctagcg

SEQ ID NO: 2276 - DNA, 386 bp, Homo sapiens
  misc_feature 1..386: note = U/M: U (0.25:0.9) in Bladder Epithelium
  misc_feature 1..386: note = source = chr2:1692526-1692911; Gene: PXDN (intron)
  source 1..386: mol_type = genomic DNA
cgtctcttcaaaattgattacttatgcctgggtttcacctactcgttccactaaataaccaacattttttgtcttaatgcttataatattatataattcatatccagaagggccgagtgtttgattgtaacttaattaataatgtctggtgcaggatccagtttaacaggaccagccctgctaaccttatttcttacaacccatctaagtggctctcacgtcctccctccctgcgaatttgcagagctgacctcataaagagttacaagccttaacacgaaccacccagaactccccagcgaccgagagcccagtgcccgcagcagaggcctggcaaggctgttacttctctaggccgcatacgtgggaatccttgaacttccacg

SEQ ID NO: 2277 - DNA, 404 bp, Homo sapiens
  misc_feature 1..404: note = U/M: U (0.25:0.9) in Bladder Epithelium
  misc_feature 1..404: note = source = chr15:67441115-67441518; Gene: SMAD3 (intron)
  source 1..404: mol_type = genomic DNA
cgtcttctgaaaggtactatgaagcttaccagttgctgatgcacgctatcagctaataattccattaccattactattttctgagcaaatgtgacctgcaagcccctcgctccatccaggatgcaggcaaagttaagctaggtttcctttccctcaaggagctcctggcacagttgggaagggaagtcagaaacacacagaagtcacttcatcataccaggcctttggtgctaaatgatgatgaatttgaagagtgtgggacagtggggatggtggactgtaagagttcgaggaggggaggatggagagaggtcattcttagcagagagccacagagtgggttactgtttgagctggaagataattggacctccaagggctctgtccccacctgcacctcagcg

SEQ ID NO: 2278 - DNA, 408 bp, Homo sapiens
  misc_feature 1..408: note = U/M: U (0.2:0.85) in Bladder Epithelium
  misc_feature 1..408: note = source = chr11:131515832-131516239; Gene: NTM (intron)
  source 1..408: mol_type = genomic DNA
cgtctaaccaagaatctaaagtatgaaacctaatatcaaccttagctatagacatgtcagtacggagcacaggtgtgaaagatttagaagctgcatgtatgtgcatggttagcacagagatattgataagaggataagcccacttcctgggcaggcttcaagggcaaatacgcaattgatcatctaagacggggtcagcaaactgtgcccatgggcccgatctaacccattgcttcttttcataaataaagtgtcataaaaacacagccacactcattctttctcatatggtctgtggttgctatcatgagacaacagcagagctgaatagttgaatcagagaatagagggcctgctagcctgaagatctactacctggcccttttctctatttctatttttgatgcg

SEQ ID NO: 2279 - DNA, 442 bp, Homo sapiens
  misc_feature 1..442: note = U/M: U (0.27:0.92) in Bladder Epithelium
  misc_feature 1..442: note = source = chr18:33741240-33741681; Gene: ELP2 (intron)
  source 1..442: mol_type = genomic DNA
cggctactcaggaggctgagacatgagaatcacttgaaccccagaggtggaagttgcagtgagtcaagatcgcgccactgcactccagcctgggtgacagagtgagactctgtatataaaacagcgatatctcaaaatgacacctaaaaatttgatgaattttaaataattggagtcatagagacacagggaaatgagaagaggaaacctggagtgaaatccatcagactgttttttgaggacactcttggcactgacctaaggtagatgacttttgcatttacctggaaggatggtcttgaattcatcattcagtatttatccatatcctgtggaatgatatagcaattgtggaggattatccgaagggtctgaaacccacacattcgtcttaaattttctgaaatttatttacttgttttaaatatgatgataagagccg

SEQ ID NO: 2280 - DNA, 75 bp, Homo sapiens
  misc_feature 1..75: note = U/M: U (0.15:0.79) in Bladder Epithelium
  misc_feature 1..75: note = source = chr10:124049993-124050067; Gene: BTBD16 (intron)
  source 1..75: mol_type = genomic DNA
cgtgatgtcatgtgatggcacttgtttaggaatcgctcggtgaggaaacttcagcactcgttgggccatttgtcg

SEQ ID NO: 2281 - DNA, 118 bp, Homo sapiens
  misc_feature 1..118: note = U/M: U (0.21:0.85) in Bladder Epithelium
  misc_feature 1..118: note = source = chr15:79471899-79472016; Gene: MIR184 (Intergenic)
  source 1..118: mol_type = genomic DNA
cggactctgcacatttctaaaattctgctatcaaatagcagctaccctcaagtcctcctcgacctccctccttggacgtttgattagaacgtaaaacacacaaacaaaaactgttacg

SEQ ID NO: 2282 - DNA, 284 bp, Homo sapiens
  misc_feature 1..284: note = U/M: U (0.24:0.88) in Bladder Epithelium
  misc_feature 1..284: note = source = chr5:95992213-95992496; Gene: CAST (Intergenic)
  source 1..284: mol_type = genomic DNA
cgggctgactttccgggtcctcagtttccacagtgaagcccaggtctacatgcttcacgttacggtttttagcacccagaaagttttttcctctatcttcatcttaatttcattactcagtccccacctcccaatgaggaaagaaaacctgcccgtttgggtcagttcaagtcaggtctaccattggtccagtcaactgtgggctgtggagaagagggatagagcaatggggagccatgatgggatctggaattctactccaaaggaggaacaggggtgagccg

SEQ ID NO: 2283 - DNA, 180 bp, Homo sapiens
  misc_feature 1..180: note = U/M: U (0.27:0.9) in Bladder Epithelium
  misc_feature 1..180: note = source = chr6:1252667-1252846; Gene: FOXQ1 (Intergenic)
  source 1..180: mol_type = genomic DNA
cgcctcctgggttcaagtgattctcctgcctcagcctcccaccacgtcagactcacttttgtgtttttagtagagatggggttttggtcaggttggcctccggctcctgacctcagatgatccacctgacttggcctccgaaagtgctgggattacaggcgtgagccaccgcgcccagcg

SEQ ID NO: 2284 - DNA, 297 bp, Homo sapiens
  misc_feature 1..297: note = U/M: U (0.23:0.86) in Bladder Epithelium
  misc_feature 1..297: note = source = chr8:133936781-133937077; Gene: TG (intron)
  source 1..297: mol_type = genomic DNA
cgtattgagctctaccctgtaccacgtacagttcctcagtgagatactggatgggaaagtcccaggtaaaccatcagatatgctacaatatatagtgtgatgggaaccagaggaacagaagagaagagtatgtcctgtgggatcagaagtagtttaatcccagtggtgcctttactggctgtgtagtcttaagcaagtcactcaccctcagcagtttcttcgtctgtaaaatggagacatcagtttcccccgttgtaagagtgttgagtgccttagcaatggcattacctaccagcg

SEQ ID NO: 2285 - DNA, 298 bp, Homo sapiens
  misc_feature 1..298: note = U/M: U (0.22:0.85) in Bladder Epithelium
  misc_feature 1..298: note = source = chr8:134917504-134917801; Gene: ST3GAL1 (Intergenic)
  source 1..298: mol_type = genomic DNA
cgttgctcggaagacccattgggaggcacatccaccaattctgggtgaaaaatgcttaggtaaatagaagataatccgtatatgctacaatgatgtatgaggagcatttgtggatgggaaggattgcaacatgtgttaattttcaaatgtaattgtacgtgttgtggaaaggaaacagcccaattagagcatcctaaggtgaagataattatattttggacctttcattttcctagaaacagagcacatggattatggcctctttccccgatatgaacattgtcagaaagtaaaaacg

SEQ ID NO: 2286 - DNA, 347 bp, Homo sapiens
  misc_feature 1..347: note = U/M: U (0.2:0.83) in Bladder Epithelium
  misc_feature 1..347: note = source = chr3:22157400-22157746; Gene: ZNF385D (Intergenic)
  source 1..347: mol_type = genomic DNA
cgagctgatgcctataccaaaagctgtccgaggttgcagccacgaccacttccaaactgaagctggaagctaaataatgacctactggggataaacttttacatctcagaagcagaattaactcctgtattttcctgtgttcatataaaaagttcaagctttggaaactatcaatatttacacataagtatgattttaaccatgctacggtaggataataatctttataaatcagtgaatttttataataatatgtatttaaaattagagagcttttagaaaaaagctctcaagttataaatttttctttgtattctctcctgaatctattttatatagatttcccg

SEQ ID NO: 2287 - DNA, 427 bp, Homo sapiens
  misc_feature 1..427: note = U/M: U (0.25:0.88) in Bladder Epithelium
  misc_feature 1..427: note = source = chr2:101802746-101803172; Gene: TBC1D8 (Intergenic)
  source 1..427: mol_type = genomic DNA
cgtgagagggtcatgatcaattgagcaagcagggggtacatgactgggggctgcatgcaccggtaatcagaacagaacaggacagggattttcacagtgcttttctatataatgtctgtaatctatagataacataaccgattaggtcaggggtcgatctttaactaccaggcccagggtgtggcgccgggctgtctgcttgtggatttcattcctgccttttagtttttacttctttctttggaggcagaaattgggcataagacaatatgaagggtggtctcctcccttaatatgagtgaccgatggcctgtgacacagccctcaggagatcctgaggatatgtgcccaaggtggttgggctacagcttggttttaaacattttaggaaaacatacgacatcaatcaatacatgtaggatgtacg

SEQ ID NO: 2288 - DNA, 140 bp, Homo sapiens
  misc_feature 1..140: note = U/M: U (0.16:0.78) in Bladder Epithelium
  misc_feature 1..140: note = source = chr19:46006156-46006295; Gene: PPM1N (TTS)
  source 1..140: mol_type = genomic DNA
cgcctcccgggttcatgccattctcccgcccagtctgtaattaatactaaaaaaatgaagtcatcttgcacactgacaagtgtcacgaagaaaataaaacaggaggatgtgttgagaaaatgactaggggagctacttcg

SEQ ID NO: 2289 - DNA, 209 bp, Homo sapiens
  misc_feature 1..209: note = U/M: U (0.32:0.93) in Bladder Epithelium
  misc_feature 1..209: note = source = chr2:44975430-44975638; Gene: CAMKMT (intron)
  source 1..209: mol_type = genomic DNA
cgtgtgttaagctgtgatgttaacatctttgtaatcctgaccaactttaaggggaaatagcactttataagggcatgtttgaagctcagttcttaaggtgctgttcattttttttttctaacgatcttaccggttttaggatgcacagatataaaccgagtgtggtcctttgcttaaatgccgcatgtcccaaccagccaggtttcccg

SEQ ID NO: 2290 - DNA, 329 bp, Homo sapiens
  misc_feature 1..329: note = U/M: U (0.25:0.86) in Bladder Epithelium
  misc_feature 1..329: note = source = chr18:71902900-71903228; Gene: CYB5A (Intergenic)
  source 1..329: mol_type = genomic DNA
cgatgtttgaggtgagagaatgtccaccttggatgcagctgacagctgaggctgctgtcataccccacatgaagtggggctctgagggctaacccacttccatttgctgaactcagctggattttgctcagaattatagtttattcaggctggggcagaatccccagggactgtcaggaccagttctgttggaaacctgaggccagttggtctgacccctcgggcagggccataggagccagcagtggtctcggcagcagcaaacttttacatctctgtgcatcacctgagctttgcagcaggaggagtgaggggcggcagcagctgcg

SEQ ID NO: 2291 - DNA, 451 bp, Homo sapiens
  misc_feature 1..451: note = U/M: U (0.25:0.86) in Bladder Epithelium
  misc_feature 1..451: note = source = chr8:126291702-126292152; Gene: NSMCE2 (intron)
  source 1..451: mol_type = genomic DNA
cgttttgttaaataagagtactaattagaagcaattcagtagactggggtaagtaaggtcaagtctgcttaactttgtgtcggatataatgtaagtgtttggggctaggatatttactggtcctaagtggcaaaatgcgaaagatagaaatgcattaagatagaaaggttgctactttgatttttctcttttttgaatccgagttgaatcataacttataatttattaaaataatcaagtgtgtcatcttgattattaggaaataagcatccatatttaaaatgttgactgttcatacttgcctatctccttagtggatggattgcttgttaagtgacattataaaatcataacactttttccccctttgagccttaagtttgcccttaagaaggtggcattattttcattcctttgttattagcagaggaatgacttagtaaccccagcg

SEQ ID NO: 2292 - DNA, 101 bp, Homo sapiens
  misc_feature 1..101: note = U/M: U (0.29:0.88) in Bladder Epithelium
  misc_feature 1..101: note = source = chr7:53479336-53479436; Gene: POM121L12 (Intergenic)
  source 1..101: mol_type = genomic DNA
cgaggtttcaccatgttagccaggatggtttcgatctcctgacctcgtgatctgcccgcctcggcctcccaaagtgccgggattacaggcgtgagccaacg

SEQ ID NO: 2293 - DNA, 268 bp, Homo sapiens
  misc_feature 1..268: note = U/M: U (0.31:0.9) in Bladder Epithelium
  misc_feature 1..268: note = source = chr8:128676466-128676733; Gene: MYC (Intergenic)
  source 1..268: mol_type = genomic DNA
cgccctcactctctttgaactccaggttggggcttcgctcaaaacagaaaggctggctgaagagtatcgcatcattcccagaagaccagcctctgttattgttattgtcacttcttttttttatgagacagagtctcactctgtctccccagctggagtgcagtggcacgatctcggctcactgcaacctccgcctcccgggttcatgccattctgctgcctcagccttctgagtagctgggactacaggcacctgccaccatgcccg

SEQ ID NO: 2294 - DNA, 317 bp, Homo sapiens
  misc_feature 1..317: note = U/M: U (0.34:0.93) in Bladder Epithelium
  misc_feature 1..317: note = source = chr15:58727874-58728190; Gene: LIPC (intron)
  source 1..317: mol_type = genomic DNA
cgaggtgggtggatcacctgaggttaggagttcaaaaccagcctggccaacatggtaaaatgccatctctactaaaaatacaaaacattagccaggcttggtcatgggcacctgtaatcccagctacttggtacgctgaggcaggagaattgcttgaacccgggaggcagaggttgcaatgagccgagatggcgccgtcgcactccatcctgggcaacaaagtgaaactccatcccaaaagaaagagtatcagcgataaaggcaaagctctttccagaaaaaaatggttttatggcctaagttctaaacaatctccg

SEQ ID NO: 2295 - DNA, 250 bp, Homo sapiens
  misc_feature 1..250: note = U/M: U (0.32:0.9) in Bladder Epithelium
  misc_feature 1..250: note = source = chr1:118823577-118823826; Gene: SPAG17 (Intergenic)
  source 1..250: mol_type = genomic DNA
cggtgatttctgcatttccatctgaggtaccaggttcatctcactagggagtgccaaacagtgggcgcaggtcagtgggtgcgtgcactgtgcgcgagctgaagcagggcaaggcattgcctcacttgggaagtgcaaggggtcagggagttccctttctgagtcaaagaaaggggtgacggacgcacctggaaaatcgggtcactcccacccgaatactgcgcttttccaaccggcttaaaaaacggcg

SEQ ID NO: 2296 - DNA, 225 bp, Homo sapiens
  misc_feature 1..225: note = U/M: U (0.15:0.72) in Bladder Epithelium
  misc_feature 1..225: note = source = chr7:86668921-86669145; Gene: KIAA1324L (intron)
  source 1..225: mol_type = genomic DNA
cgcaaataaatcaatgtgatacattggatcaacagaatgaaggataaaagctacaagatcatttcaattgatgctgaaaaagcatttaataaatttcaacatccctttatgataaaaaaaaatttaaaaactaggtatagaaggaacataccgagggaggagccaagatggccgaataggaacagctctggtctacagctcccagcgtgagcgacgcagaagacg

SEQ ID NO: 2297 - DNA, 387 bp, Homo sapiens
  misc_feature 1..387: note = U/M: U (0.36:0.93) in Bladder Epithelium
  misc_feature 1..387: note = source = chr14:103717739-103718125; Gene: LINC00605 (Intergenic)
  source 1..387: mol_type = genomic DNA
cgtcttatgatccccactcaagaaccaactcagcccaagaggacagcttcgactcccggcggtttcatccccgacccaagcagtcagcactcccacttcccatcctcctgcccaccaaactatctttaaaaaaatcctaaactttgaattttcagggaggctgatttgagtagcaataaaactttagtttcctgtttagccgatgacaacatgtattaaactgtttttatttatttatttatttatttatttatgagatagagtttcactcttgttgcccaggctggagtgcaatggcgtgatctcggctcatgacaacctctgtctcctgggttcaagtgattttcctgcctcagcctcccgagtagctgggattacaagcatgcg

SEQ ID NO: 2298 - DNA, 452 bp, Homo sapiens
  misc_feature 1..452: note = U/M: U (0.36:0.86) in Bladder Epithelium
  misc_feature 1..452: note = source = chr1:202026867-202027318; Gene: ELF3 (Intergenic)
  source 1..452: mol_type = genomic DNA
cgtctgtaatcccagctactcaggaggctgaggcatgagaatcacttgaacctgggaggcagaggttgcagtgagctgagatcacgccactgcactccagcctggacaacagaacgagactccatctcaaacaaacaaaacaacatcatattaaaaagaaaacccgggcctattttttttaaagacccactgcagaagtgacccttctcattggtggctggtgaaattgttcttgccaaggtttggtatgaccaggtaaaaagctttcaatgctcaaagtgaggaagcacagaagtcatgtaccctgcattgtagctgaccagaaggtaaatcaagaaccactgagcatggttgggtgctgtggctcatgtctgaaacccttgcactttgggaggctgaggcaggaggatcgcttgagcccaggaattcgagaccagcctagcaacatagcg

SEQ ID NO: 2299 - DNA, 196 bp, Homo sapiens
  misc_feature 1..196: note = U/M: U (0.09:0.89) in Bladder Epithelium
  misc_feature 1..196: note = source = chr10:9271378-9271573; Gene: GATA3 (Intergenic)
  source 1..196: mol_type = genomic DNA
cggtatggttgtgcccaaaaaataacgtgatcttaatcgtctaagtacagcagatggtgagctttactcgcgaatgaatttgttctgattaaaaagaaaccaaccctatgtgcacgcatctatccattgtttagcagcacattttctgctcacatctggaaatattgagatagtagctgctctagaacattccagc

SEQ ID NO: 2300 - DNA, 145 bp, Homo sapiens
  misc_feature 1..145: note = U/M: U (0.2:0.92) in Bladder Epithelium
  misc_feature 1..145: note = source = chr13:111691869-111692013; Gene: ARHGEF7 (Intergenic)
  source 1..145: mol_type = genomic DNA
cgataatctcctaaaggaagttacccaaaagactatgaatacaagcaaaaatttacaccaaaaaaggtgtgttctgcagttgcgtaagattctataaatatcagttagattgaggtagccgatagcgttgtccggattttccacg

SEQ ID NO: 2301 - DNA, 170 bp, Homo sapiens
  misc_feature 1..170: note = U/M: U (0.15:0.87) in Bladder Epithelium
  misc_feature 1..170: note = source = chr1:240922366-240922535; Gene: GREM2 (Intergenic)
  source 1..170: mol_type = genomic DNA
cgtgtcatgttaagacatgaaaagagcaggccgggtggattacttgaggtcaggagtttgagaccagcctgaccaacacggtgaaaccccatctccaataaaaatacaaaaattagctgggcatggtggcgcatgcctgcagtcccacctactcgggaggccgagggacg

SEQ ID NO: 2302 - DNA, 438 bp, Homo sapiens
  misc_feature 1..438: note = U/M: U (0.19:0.91) in Bladder Epithelium
  misc_feature 1..438: note = source = chr7:140510166-140510603; Gene: BRAF (intron)
  source 1..438: mol_type = genomic DNA
cgagaccagcttagccaacatggtgaaaccccatctctactaaaaaacacaaaaagtagccgggcagagcggcgggcgcctataatcccagctactcaggtggctgaggcacgataatcacttgaacccagaaggcagaggttgcggcaagccaaaatcgtaccactgcattccagcctgggtgacagagcgagatactgtcacaaacaaacaaagaaaaaccctgaacttttacctacccagcaaggtaaaagtttgtcatgagagactgggctcatcactggaagtattaaagagactggatggtacagttgatcctcattacttgtggagtccatacttgaaatctctctacttgctaaaatttatttgtaactctaaagtcaatactcttagtgctttcatagacatgcgcagagcaatgagatatttgagtcg

SEQ ID NO: 2303 - DNA, 179 bp, Homo sapiens
  misc_feature 1..179: note = U/M: U (0.11:0.8) in Bladder Epithelium
  misc_feature 1..179: note = source = chr2:124447715-124447893; Gene: CNTNAP5 (Intergenic)
  source 1..179: mol_type = genomic DNA
cgtacccaccaagagcaacacaatctgccggtcccagaagcagaaagtgtcaactttgcagcaggatttggacactccgggagccaaactggatgtggaagctccaaaggtgcagaaaaaggactccaaaatgttaacttttacctctgtcctggaaatcaccctgacgctagctgtcg

SEQ ID NO: 2304 - DNA, 286 bp, Homo sapiens
  misc_feature 1..286: note = U/M: U (0.1:0.93) in Bladder Epithelium
  misc_feature 1..286: note = source = chr1:184970698-184970983; Gene: FAM129A (Intergenic)
  source 1..286: mol_type = genomic DNA
cggtctacggctcccagcgtgagagatgcaaaagacgggtgatttctgcatttccatcagaggtaccgggttcatctcactagggagtgccagacagtgggcgtgggtcagtgggtgtgcgcaccgtgcgcgagccgaagcagggcgaggcattgcctcactcgggaagcgcaaggggtcagggagttccctttcctagtcaaagaaaggggtgacagatggcacctggaaaatcgggtcactcccacccgaatactgcgcttttccgacgggcttaaaaaatggc

SEQ ID NO: 2305 - DNA, 83 bp, Homo sapiens
  misc_feature 1..83: note = U/M: U (0.1:0.92) in Bladder Epithelium
  misc_feature 1..83: note = source = chr2:135276067-135276149; Gene: TMEM163 (intron)
  source 1..83: mol_type = genomic DNA
cgcaccacagtgctgactaaatacaaggccatcccggagtcaagacaggtagggaggatggtcctttaaccactcggggtcgc

SEQ ID NO: 2306 - DNA, 339 bp, Homo sapiens
  misc_feature 1..339: note = U/M: U (0.12:0.92) in Bladder Epithelium
  misc_feature 1..339: note = source = chr15:77448649-77448987; Gene: PEAK1 (intron)
  source 1..339: mol_type = genomic DNA
cgggatataatctcctggtgtgccgttttttaagcccgttggaaaagcacagtattagggtgggagtgacccggttttccaggtgtcgtctgtcacccctttctttgactaggaaagggaactccctgaccccttgcgcttcccgagtgaggtagtgcctcgccctgcttcagctcgcgcacggtgtgctgcacccactgtcctgcacccactgtctggcactccctagtgagatgaacccggtacctcagatggaaatgcagaaatcacccgtcttctgcgttgctcatgctgggagctgtagaccggagctgttcctattcggccatcttggctccc

SEQ ID NO: 2307 - DNA, 280 bp, Homo sapiens
  misc_feature 1..280: note = U/M: U (0.16:0.94) in Bladder Epithelium
  misc_feature 1..280: note = source = chr4:2961192-2961471; Gene: NOP14 (intron)
  source 1..280: mol_type = genomic DNA
cgcctgtagtcccagctactcaggaggctgaggcaggagaatggcgtgaacccgggaagtggagcttgcagtgagctgagattgtgccactgcactccagcctgggcgacagacaaagactctgtctcaaaaacaaaaaaaaacaaaaaacacaaacaaaccaccttgggtacaatttcctgaaccagagtctaaagacagcgagtgtccccagatagaccagagggctccatcgccattgctctgttctctccgcttctgttacgagccattccagagc

SEQ ID NO: 2308 - DNA, 65 bp, Homo sapiens
  misc_feature 1..65: note = U/M: U (0.1:0.87) in Bladder Epithelium
  misc_feature 1..65: note = source = chr12:10267729-10267793; Gene: CLEC7A (Intergenic)
  source 1..65: mol_type = genomic DNA
cgggtaagaatcattcaggccgggcgcggtggctcacgcctgtaatcccagcactttgggaggcc

SEQ ID NO: 2309 - DNA, 465 bp, Homo sapiens
  misc_feature 1..465: note = U/M: U (0.16:0.93) in Bladder Epithelium
  misc_feature 1..465: note = source = chr6:34778179-34778643; Gene: UHRF1BP1 (intron)
  source 1..465: mol_type = genomic DNA
cgtgagcttactgcagtattagatagctacaacattatcacagcagtatagcgtgtactacagttaattttatgcagttatgattatttagtagttacttgagacagggtctcgctgtgtcacccaggctggattgcattccatgatcatcgctcattgcaacctttactgatactcccacctcagcctactgagtagctgggaccacaggcgtgtgccaccatgcccagctaattattttgtttttttgtagagatgggtctcactatgttgcccaggctggtctcaaactcctgggctcaagcattcctcctgcctcgacctctcaaagtgctgtgagtacaggtgtgagccattgtgcctggccagttatcatttagtactgcatctttatatttgtttacatttctcctgactgcaaatggtgtcatgtatagtctgtaagtatttttgcacttaagtttc

SEQ ID NO: 2310 - DNA, 112 bp, Homo sapiens
  misc_feature 1..112: note = U/M: U (0.17:0.94) in Bladder Epithelium
  misc_feature 1..112: note = source = chr15:101938761-101938872; Gene: PCSK6 (exon,intron)
  source 1..112: mol_type = genomic DNA
cgccgtccagcatgcggatgcctgaaagcacagaggaggctcggtgtcggcgcccaggctccgggcacacagcgacgggaacccgggcccaggaggctcggatgaggacacc

SEQ ID NO: 2311 - DNA, 278 bp, Homo sapiens
  misc_feature 1..278: note = U/M: U (0.17:0.92) in Bladder Epithelium
  misc_feature 1..278: note = source = chr4:38568851-38569128; Gene: KLF3 (Intergenic)
  source 1..278: mol_type = genomic DNA
cgacctccctgagtttcctttgcctacttcaccaaaaaacgtgaaacaatacggcacataagtcctaaggtttctctcagttatatattatgtgaaattggcttagaaatattttttaaaacttgagagaaatataacaaacttccttatagcaacgtttgtctattactaacaagcactttgccccggtagccttttttctcagctttgctccccaatgttacggtcaatttcaccacctatctctcttccacatgcatcgacattagctgctcccc

SEQ ID NO: 2312 - DNA, 191 bp, Homo sapiens
  misc_feature 1..191: note = U/M: U (0.26:0.94) in Bladder Epithelium
  misc_feature 1..191: note = source = chr11:57500830-57501020; Gene: TMX2-CTNND1 (intron)
  source 1..191: mol_type = genomic DNA
cgattctcctgccttagcctcctagtagctggaactacaggtgcccgccatcacgcctggctgactttttgtgtgtttttagtagagacgggtttcaccatgtaggccaggctggtcttgaattcctgacctcaggtgatccacccgcctcggcctcccaaagtgctgcgattacaggcgtgagtcaccgc

SEQ ID NO: 2313 - DNA, 349 bp, Homo sapiens
  misc_feature 1..349: note = U/M: U (0.32:0.91) in Bladder Epithelium
  misc_feature 1..349: note = source = chr7:155581063-155581411; Gene: SHH (Intergenic)
  source 1..349: mol_type = genomic DNA
cgggcgcctgtggtcccagctactccggaggctgaggcaggaggatggcgtgaacccgggaggcggagcttgcagtgagccgagatcgcaccactgcactccagcctgggagacagagcgagactccatctcaaaaaaaaaaaaaaaaaaaaaaaaaaatccaaccaaaaccacacccagcgaagtaacaaagcgacaatcggccttggtcctgcgagggcagggagggcagggagggcagggagggcagggagggcagggagggcagggtccactgcccagccggggatgcaaggacggccatggggctccagcacagggaccgggccccgcgggctttgagtgacgc

SEQ ID NO: 2314 - DNA, 101 bp, Homo sapiens
  misc_feature 1..101: note = U/M: U (0.09:0.91) in Bladder Epithelium
  misc_feature 1..101: note = source = chr15:81262936-81263036; Gene: MESDC2 (Intergenic)
  source 1..101: mol_type = genomic DNA
cggccccaaatgaactccgtagctaactcagccactcctattcttcggaactttcccgctcagacctagtcaaacaaaatcagtgtctgatggtagttacg

SEQ ID NO: 2315 - DNA, 104 bp, Homo sapiens
  misc_feature 1..104: note = U/M: U (0.07:0.89) in Bladder Epithelium
  misc_feature 1..104: note = source = chr17:43208654-43208757; Gene: PLCD3 (intron)
  source 1..104: mol_type = genomic DNA
cggagttccacacctagcctctccatcactgactattctaccaatggcaggtccaacgcagcacttcagtggcgcggtcctttccacgtcagacaacattctcg

SEQ ID NO: 2316 - DNA, 118 bp, Homo sapiens
  misc_feature 1..118: note = U/M: U (0.07:0.87) in Bladder Epithelium
  misc_feature 1..118: note = source = chr6:56894215-56894332; Gene: KIAA1586 (Intergenic)
  source 1..118: mol_type = genomic DNA
cgccaaattatccttaaaaactctgatcccgcccttcggtggaaaagttcagtctgaacgtttagcgagtgctgcctctaaagagagcaatcactacacttacggctgagactttgcg

SEQ ID NO: 2317 - DNA, 179 bp, Homo sapiens
  misc_feature 1..179: note = U/M: U (0.1:0.89) in Bladder Epithelium
  misc_feature 1..179: note = source = chr18:7173233-7173411; Gene: LAMA1 (Intergenic)
  source 1..179: mol_type = genomic DNA
cgttcatagcagagggctccagaattgagcgttgtgattttgcatgcgctctccatgacagccctgtgaagcacacggaagagactgcaggcgggcagcggtgaggctggacgtgcggcaacctgcttgcccaaggatatgcccggaggtgagccagggtctctcaggccacgcctgcg

SEQ ID NO: 2318 - DNA, 161 bp, Homo sapiens
  misc_feature 1..161: note = U/M: U (0.15:0.93) in Bladder Epithelium
  misc_feature 1..161: note = source = chr10:70184305-70184465; Gene: DNA2 (intron)
  source 1..161: mol_type = genomic DNA
cggagcatcaccatgaagttcaatcccttcgtgaacttggaccgcagcaaaaaccgcaaacgtcacttccatgcccccttgcacgtgcaccggaagatcatgtcatccccgctctccaaggagctgcggcagaagtacaatgtccgctccacacccatccg

SEQ ID NO: 2319 - DNA, 154 bp, Homo sapiens
  misc_feature 1..154: note = U/M: U (0.11:0.88) in Bladder Epithelium
  misc_feature 1..154: note = source = chr18:74246866-74247019; Gene: LOC284276 (intron)
  source 1..154: mol_type = genomic DNA
cgtgaaggcaggcctgtggggtgcgggggcttggctggcaggacttgtttccctggcttggctggttgctcggcggcgggaagaggaggtgagggctgagtggagatgcaactgataatggggttctgccaggaagagcccgagaaaagccccg

SEQ ID NO: 2320 - DNA, 198 bp, Homo sapiens
  misc_feature 1..198: note = U/M: U (0.09:0.86) in Bladder Epithelium
  misc_feature 1..198: note = source = chr14:102493581-102493778; Gene: DYNC1H1 (intron)
  source 1..198: mol_type = genomic DNA
cgtttcgtcgcctggatgaacggtttgagtgtgtaccagattaaggtgcgtctggtcggtggcctcttaatcccagcaacagatgtgtgtgcagagctcagtgagtaggaatggacctaacttgcctctgcttctgtaggtccataggaagtacacaggggaagactttgatgaagatctacggacagtgttgagacg

SEQ ID NO: 2321 - DNA, 191 bp, Homo sapiens
  misc_feature 1..191: note = U/M: U (0.16:0.92) in Bladder Epithelium
  misc_feature 1..191: note = source = chr3:184566501-184566691; Gene: VPS8 (intron)
  source 1..191: mol_type = genomic DNA
cgtgggccaccatgcccagctaatttttgtatttttagtagagtcggggtttcaccatgttggccagcctggtctcgaactcctgacctcaggtgatccacccacctcggccttccaaaatgctgggattacaggcatgagccaccgcacccggccttttttttctgtatttttaagtgtctaattcaacg

SEQ ID NO: 2322 - DNA, 268 bp, Homo sapiens
  misc_feature 1..268: note = U/M: U (0.13:0.89) in Bladder Epithelium
  misc_feature 1..268: note = source = chr9:98119673-98119940; Gene: FANCC (Intergenic)
  source 1..268: mol_type = genomic DNA
cgaacgcctgatctcaggtgattcgcccacctccgcctcccagagtgttgagattacaggcgtgagccacacccttccctgcccaaaccttgtcatttctaatacatttttcttaagagcctaaaagacatttattgaactttaccttatatatttgaggttttgttttgttttgttttttagagataagatcttgttctgtctcccaggctagagtgcagtagagcaatcatacctcactgcaatcttcaattcctggactcaagcg

SEQ ID NO: 2323 - DNA, 319 bp, Homo sapiens
  misc_feature 1..319: note = U/M: U (0.13:0.89) in Bladder Epithelium
  misc_feature 1..319: note = source = chr14:50835876-50836194; Gene: CDKL1 (intron)
  source 1..319: mol_type = genomic DNA
cgcccggccgctacccttaaccaggaaatgttactttaaaatcctggttaccaagagtctcttgcaaatgctggggatcagcaggtctaggcctgtagactctgtggcacttatgagctagggctgagagcagctgttcactttagacaaggcttgtatgctttaggtcaccgcagtcacccactccctattgctccctgatcatgatgccaagtgagagttgctctttatcatcactcttgcattattgactttcttatactagagttaaaagtgaaatatttaatatgtccatgtttctatcaaaagtagaaaaacg

SEQ ID NO: 2324 - DNA, 117 bp, Homo sapiens
  misc_feature 1..117: note = U/M: U (0.13:0.88) in Bladder Epithelium
  misc_feature 1..117: note = source = chr9:85843600-85843716; Gene: RASEF (Intergenic)
  source 1..117: mol_type = genomic DNA
cgacccgattttccaggtgccgtccgtcacccctttctttgactcggaaagggaactccctgaccccttgcgcttcccaagtgaggcaatgcctcgccctgcttcggctcacgcacg

SEQ ID NO: 2325 - DNA, 131 bp, Homo sapiens
  misc_feature 1..131: note = U/M: U (0.18:0.93) in Bladder Epithelium
  misc_feature 1..131: note = source = chr16:1576680-1576810; Gene: IFT140,IFT140 (intron,exon)
  source 1..131: mol_type = genomic DNA
cgcctcacgcagcgctcgggccccgcgggcatggcccatgttccccaggcacaccttggccacgtccagccgctgggtcttcacgcacatgcgcgccatgttctcccagacggcctcactgtgggcagacg

SEQ ID NO: 2326 - DNA, 57 bp, Homo sapiens
  misc_feature 1..57: note = U/M: U (0.16:0.9) in Bladder Epithelium
  misc_feature 1..57: note = source = chr9:98919710-98919766; Gene: LOC158434 (Intergenic)
  source 1..57: mol_type = genomic DNA
cgcaaggcgaggagagtagcgctcgcttgcagactgcagcagcgcctgcacacagcg

SEQ ID NO: 2327 - DNA, 172 bp, Homo sapiens
  misc_feature 1..172: note = U/M: U (0.11:0.85) in Bladder Epithelium
  misc_feature 1..172: note = source = chr14:55206370-55206541; Gene: SAMD4A (intron)
  source 1..172: mol_type = genomic DNA
cgaagtgtcacgggccagtatttgttcaatagaaatgtccctccccagccttgctgcaagatgccattgctgaggactcttccgccaccagatgttattcaaaacgacttcctatgagtgcacccaaggagcagccctgctcctaacccaagggtttgtcatttgatctccg

SEQ ID NO: 2328 - DNA, 315 bp, Homo sapiens
  misc_feature 1..315: note = U/M: U (0.17:0.91) in Bladder Epithelium
  misc_feature 1..315: note = source = chr2:231604240-231604554; Gene: CAB39 (intron)
  source 1..315: mol_type = genomic DNA
cgccctgttgcccaggctggagtggaatggcgcgatctctgctcaccacaacctccgcctcccgggttcaagcgattctcctgcttcagcctcccaagtggctaggattacaggcatgcgccaccacgcccagctaattttgtatttttagtagagacggggtttctgcatgttggtcaggctggtcttgaactcccgacctcgggtgatccgcccacctcggcctcccaaagtgctgggattacaggtatgagccaccacctccagcctctaatttgaagtcttaaatcatgataaagtctttgtgctttgccg

SEQ ID NO: 2329 - DNA, 369 bp, Homo sapiens
  misc_feature 1..369: note = U/M: U (0.16:0.9) in Bladder Epithelium
  misc_feature 1..369: note = source = chr9:92717057-92717425; Gene: MIR4290 (Intergenic)
  source 1..369: mol_type = genomic DNA
cggtgtgagccatctttaaatacctgtgctaggaggaagagcgtgcgctcagcatctatggattcaataccagggtcactagtcacaggtggctatttacttttgacaaagtgaaataaatgtaaacactgatacctccatgctcaatagtcacatgtagcagcaagtactgtgacaggtatggtagatagagaacagtttcatccatgcagagagctctactggggagtgcggatccagacagcagccaatggatagggaggagcaggcttacctacctgcagacctgagtcaggtgggtgtgtttctggaacttgcgaggccactatagtgggagcaatgtgctcagctgcctctatcataaggacg

SEQ ID NO: 2330 - DNA, 25 bp, Homo sapiens
  misc_feature 1..25: note = U/M: U (0.16:0.89) in Bladder Epithelium
  misc_feature 1..25: note = source = chr9:15513985-15514009; Gene: PSIP1 (Intergenic)
  source 1..25: mol_type = genomic DNA
cgccggacgcggtggctcatgcccg

SEQ ID NO: 2331 - DNA, 493 bp, Homo sapiens
  misc_feature 1..493: note = U/M: U (0.17:0.89) in Bladder Epithelium
  misc_feature 1..493: note = source = chr14:102493027-102493519; Gene: DYNC1H1 (intron)
  source 1..493: mol_type = genomic DNA
cgtgctgaggattgacaggtgggcttttttgttgttacagccccacctctcgcctaagctgctcttgagtaagtgtgtgtgccgggtcacaccaggcctcatgctgtcctaccacctccacctcagccttctccaccaagcagcttcccccttctcttctttctaagtccagcttaaccatcctcagtttatcctaagcagaacttcattcttcctcccccagcactgcatacctgccataattatggccctttgaccttctgctggaattgcattagtctctcatgtcagtctagaggacaggaccgtgtcttactggtctttgcattcctcctggacttcacaaataacagttgctcagcaaatgtttaatatacaagttcaagttaaaacatgtccaaaatactgtagacactagatatgagtcaaaaggggaatgaggcattataagccttaacattgatcagttctcgtaatgtttcagaatattccg

SEQ ID NO: 2332 - DNA, 188 bp, Homo sapiens
  misc_feature 1..188: note = U/M: U (0.21:0.92) in Bladder Epithelium
  misc_feature 1..188: note = source = chr2:10162285-10162472; Gene: KLF11 (Intergenic)
  source 1..188: mol_type = genomic DNA
cgggtagagtccgagcacccatcagctcagccccaggctccatcagaggcggtggaacgggccctgaggatgcctcagtcctgggccttagtgggaggccttccaggtgaagccctggggaccaggtagccctgctcagcaagcagccctggaccctacctcagcagccccggaccccacctcggccg

SEQ ID NO: 2333 - DNA, 77 bp, Homo sapiens
  misc_feature 1..77: note = U/M: U (0.21:0.91) in Bladder Epithelium
  misc_feature 1..77: note = source = chr5:148772552-148772628; Gene: IL17B (Intergenic)
  source 1..77: mol_type = genomic DNA
cgtgtgtgtgctgcgtgtgtgcatgtctgcgtgtgtgtgggcgtgtgtgtgcgtgtgtgtgcgcatgtgtgtctgcg

SEQ ID NO: 2334 - DNA, 148 bp, Homo sapiens
  misc_feature 1..148: note = U/M: U (0.22:0.9) in Bladder Epithelium
  misc_feature 1..148: note = source = chr8:53755910-53756057; Gene: NPBWR1 (Intergenic)
  source 1..148: mol_type = genomic DNA
cgcctgcctcggcctctcagagtgctgggattacaggcgtgagccacggcgcccggccggactcagttaattttcaaacaaaccacagtcaaatggtatcatgctgtttctaattagttaaagaaacactttcccacagtggttaccg

SEQ ID NO: 2335 - DNA, 293 bp, Homo sapiens
  misc_feature 1..293: note = U/M: U (0.23:0.91) in Bladder Epithelium
  misc_feature 1..293: note = source = chr14:104047749-104048041; Gene: APOPT1 (intron)
  source 1..293: mol_type = genomic DNA
cgcgtctacactgtggaggtgctggacagagggaggagtcgcctcctgggctggtcggagtaggaccttgggaggtttcatcacgctactcagaacagcatgcagttcaaaacttatgacttgttcatttctggaattttccatttaatattttcagaccccactttacctcgggtaactgaaaccatggaaagaaaaaccatggatggaggggacagctgtgctgccgccatctcccttacacagttgagtaaaccgaggcacagaagaaaatgaagtagccccagatgacg

SEQ ID NO: 2336 - DNA, 239 bp, Homo sapiens
  misc_feature 1..239: note = U/M: U (0.27:0.94) in Bladder Epithelium
  misc_feature 1..239: note = source = chr9:36274911-36275149; Gene: GNE (intron)
  source 1..239: mol_type = genomic DNA
cggggtttcactgtgttagccaggatggtcttgatctcctgacctcgtgatccgccggactcggcctcccaaagtgctgagattacaggcgcgagccaccgcacccggccggtttcacaatcatttaaaatgattcctagatgtgaatttctatcccagtcttctcagtccaaacccaaatattcagctacttataggacatctttatttggatgtgttctacaagcacttcaaatccg

SEQ ID NO: 2337 - DNA, 201 bp, Homo sapiens
  misc_feature 1..201: note = U/M: U (0.27:0.92) in Bladder Epithelium
  misc_feature 1..201: note = source = chr3:11581015-11581215; Gene: ATG7 (intron)
  source 1..201: mol_type = genomic DNA
cgttggtgctttaggggaagtgggcctgctggcggggggtcgcccactttccacctttggtggttctgaaaaagacacggtatttctcttatgacatttttggtaattattgtaaatatgtttttatattgtgaaactccccccgtcttaagctatattcgttttctcttatgaatttaaaaaataaaatctattgatgcg

SEQ ID NO: 2338 - DNA, 152 bp, Homo sapiens
  misc_feature 1..152: note = U/M: U (0.29:0.93) in Bladder Epithelium
  misc_feature 1..152: note = source = chr12:109936018-109936169; Gene: UBE3B (exon)
  source 1..152: mol_type = genomic DNA
cggtctgctattctttgcagcgcctcactgttttagaatcccatgacatgcttcgtaaattcatcatatttttaagagaccaagatcgatgccgtgatgtatgtgaaagtttagaaggatgccatacgctttgtctaatgggtaagtatccg

SEQ ID NO: 2339 - DNA, 271 bp, Homo sapiens
  misc_feature 1..271: note = U/M: U (0.3:0.94) in Bladder Epithelium
  misc_feature 1..271: note = source = chr16:12236884-12237154; Gene: SNX29 (intron)
  source 1..271: mol_type = genomic DNA
cgctcttgttgcccaggctggagtccagtggtgcgatctcagctcattgcaacctctgcctcctgggtgcaagcgattctcctgcctcagcctcctgagtacctgggattacaggcatgcgccaccatgcccggctaatttttatatttttagtagaggtgggtttctccatgttggtcaggctggtctcgaactcccgacctcaggtgatccgtccacctcggcctcccaaagtgctgggattacaggcatgagccactgcgcctggccg

SEQ ID NO: 2340 - DNA, 140 bp, Homo sapiens
  misc_feature 1..140: note = U/M: U (0.17:0.79) in Bladder Epithelium
  misc_feature 1..140: note = source = chr16:89674297-89674436; Gene: DPEP1 (Intergenic)
  source 1..140: mol_type = genomic DNA
cgatccccatcggctctgaaggctgtcagcccccgatccccactttatactctgtccccgtgtctttgtcttaattcctctagcgccgctgggttagggtctccacagccgagctggtctcagcacagtggcccttgacg

SEQ ID NO: 2341 - DNA, 64 bp, Homo sapiens
  misc_feature 1..64: note = U/M: U (0.32:0.91) in Bladder Epithelium
  misc_feature 1..64: note = source = chr6:106582669-106582732; Gene: PRDM1 (Intergenic)
  source 1..64: mol_type = genomic DNA
cgacatgaacaagcccactcgccgtcagagtcccagcgccctctctccagtgaccaggcccccg

SEQ ID NO: 2342 - DNA, 186 bp, Homo sapiens
  misc_feature 1..186: note = U/M: U (0.3:0.89) in Bladder Epithelium
  misc_feature 1..186: note = source = chr20:43358892-43359077; Gene: WISP2 (Intergenic)
  source 1..186: mol_type = genomic DNA
cgggcagatcacttgaggtcaggagttcgagaccagcctggccaacacatcaaaaccccgtctctactaaaaatacaaaaattaactgggtgtgatagcacacacctgtaatcccagctactcaggaggctgaggcacgagaattgcttgaaccggggagacagaggttgtagtgagccgagatcg

SEQ ID NO: 2343 - DNA, 210 bp, Homo sapiens
  misc_feature 1..210: note = U/M: U (0.28:0.87) in Bladder Epithelium
  misc_feature 1..210: note = source = chr9:90892837-90893046; Gene: SPIN1 (Intergenic)
  source 1..210: mol_type = genomic DNA
cgtatagcagatctaatctagtatgacaatctatacataacatataagaatctatgtcccatgagaatatctacctgtaccgtgatgaaccagatgtaatcctagattagcctgctccctgcacgctgcccctgcccctgaatggaatcccaggaggctgcttgcctcctcacctggtctctgcctgagctcagccggcttgtggtcccg

SEQ ID NO: 2344 - DNA, 159 bp, Homo sapiens
  misc_feature 1..159: note = U/M: U (0.36:0.91) in Bladder Epithelium
  misc_feature 1..159: note = source = chr20:19204280-19204438; Gene: SLC24A3 (intron)
  source 1..159: mol_type = genomic DNA
cgtaatatactctaagaaaggttatgagaatgtggtcgctccttctctctcaaaatatcttcttgtactgtgctcacccttctggtgatgatgtgagatgatacagggcctacgtaaggagatgaagtcaggtgcatgacgtaggcctgtgacatagcg

SEQ ID NO: 2345 - DNA, 436 bp, Homo sapiens
  misc_feature 1..436: note = U/M: U (0.34:0.88) in Bladder Epithelium
  misc_feature 1..436: note = source = chr13:114762431-114762866; Gene: RASA3 (intron)
  source 1..436: mol_type = genomic DNA
cgtggggaatggaggtgagaactggtgcagctggagatgtggccaggtggccaggaacagcttggccaaggccctttatgtcctggagccttggaggtctccattcaagacaaaagaggggccctgtggcctccccacaaggccctcctgcagctgactgcaggcatcccatccacgtggtgctcgtgctgtgtcagcccaggtggcccggcctgctcagctccttccccaactgaccagcccaggattcttcctcctcctcccagctggggttagggggctgcttcctcttgaagcgtctcggggcagcaacaacctttaccatttattactcattcaacaaacatgactgagcaccagcactctcctatgtcccggagacaaagcctggcatagagtttctactgaacctgcagccaccaagaaagactaaacg

SEQ ID NO: 2346 - DNA, 264 bp, Homo sapiens
  misc_feature 1..264: note = U/M: M (0.79:0.03) in Bladder Epithelium
  misc_feature 1..264: note = source = chr12:54773440-54773703; Gene: ZNF385A (intron)
  source 1..264: mol_type = genomic DNA
cgggtacccaggtgtcaggcactgctctctcagagactcctccaaatcatggagctgagggcacccagggcaaaagcgacctcagactggggatgtcgttcctaacttcttcccacctcctacccgcgcccgccacctgccggagaaccaggctccctgaaagcccacgcttcgtgcacctgctgccctctggcggttcagtgggggcagcactgggggaccagaggctgtagggcctagcagcccactcccccagacacctcg

SEQ ID NO: 2347 - DNA, 122 bp, Homo sapiens
  misc_feature 1..122: note = U/M: M (0.81:0.14) in Bladder Epithelium
  misc_feature 1..122: note = source = chr7:3018797-3018918; Gene: CARD11 (intron)
  source 1..122: mol_type = genomic DNA
cgtgtaactgcaagacgacaaatgagatgcaaacagggaagtctttcttacgtttgtgccaaatgatacaatcaccaataatgaaataaggcacctgtgaaaactgcacccagaaacggtcg

SEQ ID NO: 2348 - DNA, 169 bp, Homo sapiens
  misc_feature 1..169: note = U/M: M (0.85:0.18) in Bladder Epithelium
  misc_feature 1..169: note = source = chr3:181437662-181437830; Gene: SOX2-OT (intron)
  source 1..169: mol_type = genomic DNA
cggttcttcccgattagaggccgaggattggcagggctgggggaagcccccggagcaatctgggatccctggaatattgggcccctctggattagagcaggtagggatgggaagatacagacccttcactttcccacttgtgagatagggataatatatagttacctcg

SEQ ID NO: 2349 - DNA, 235 bp, Homo sapiens
  misc_feature 1..235: note = U/M: M (0.82:0.21) in Bladder Epithelium
  misc_feature 1..235: note = source = chr1:2402103-2402337; Gene: PLCH2 (Intergenic)
  source 1..235: mol_type = genomic DNA
cgcgcctggctatgggctgggggcagggctggctctgaccacttggcccgaggaccctccccttggagctgcagccccctcccctcactcggcaggagctccctctctcccagctggcaggccaggctccatctggtgacttttcaggaaaggctcccccaccgtggctgccacgagcctggctccctctgcagctcctctggggtgtcctggacggtggctgggggcaaggccg

SEQ ID NO: 2350 - DNA, 239 bp, Homo sapiens
  misc_feature 1..239: note = U/M: M (0.67:0.08) in Bladder Epithelium
  misc_feature 1..239: note = source = chr17:79075542-79075780; Gene: BAIAP2 (intron)
  source 1..239: mol_type = genomic DNA
cggcctgggcctgctgggcactgtgggcaggtgcaggcaaggacagcagcagcacctttgacccctggaggcagcctcgctgctgaaggactcagcggtgacaggctgtgctgccacagctgccaggcagggagcgctgtggagcgcaggcctcccgcctgctagacccaggacagtggcgggcgtctgcgccctctggcgggggccaggccccatgacggggccagggagtgagagcg

SEQ ID NO: 2351 - DNA, 192 bp, Homo sapiens
  misc_feature 1..192: note = U/M: M (0.73:0.09) in Bladder Epithelium
  misc_feature 1..192: note = source = chr10:105420501-105420692; Gene: SH3PXD2A (intron)
  source 1..192: mol_type = genomic DNA
cgtgcaattaacacaggctggttaattaccccgagcaaggagacattcttccaccaccaggcaaactgctggcctgcagcccaaaccaacagggggaaacttcagccgcctcggccctctctctgccagatggaaataacgtatagctgcagcggtgggggaggagggaggaacaaaaaccagctcggcccg

SEQ ID NO: 2352 - DNA, 332 bp, Homo sapiens
  misc_feature 1..332: note = U/M: M (0.87:0.09) in Bladder Epithelium
  misc_feature 1..332: note = source = chr20:34188724-34189055; Gene: SPAG4 (Intergenic)
  source 1..332: mol_type = genomic DNA
cgcggaaccaaatgccttggccaacgccttcgttgagaccttgaagactatcccggagccccgcgccggggggcgagccatagaggggcacccaggccgggccgaaggtagggttaaaccccgctgtggggaacaagagaagcgtgttggaggggagcgtggggagggcgagtgctggtaaatctctgcacctcaccctgatctcctccaagtattcgggggtgagggcaggggaggggggctaagccgctctgaaacggaagaagttggccagcagctgcggacgcgccgctgtggaacacgacctggggcgcctccaaaacagctcagcg

SEQ ID NO: 2353 - DNA, 263 bp, Homo sapiens
  misc_feature 1..263: note = U/M: M (0.84:0.07) in Bladder Epithelium
  misc_feature 1..263: note = source = chr10:77155143-77155405; Gene: ZNF503 (Intergenic)
  source 1..263: mol_type = genomic DNA
cgcgaaagtggaagcgcggggcctcgggatgcccatccagccggctgcccgcgcgctggccggggttccaggactccttcctgctccgccgggctctgcagcgccgcctggtggacacgcggcgctccgcccgggctccagccgccagccggcgcgccggggatcccgcggctgttcgggaaaaagctggagagagtcggggggcgcgccttggggaggggcatttgtccctccgaggaggctcgcacctcggcctggacacg

SEQ ID NO: 2354 - DNA, 476 bp, Homo sapiens
  misc_feature 1..476: note = U/M: M (0.8:0.03) in Bladder Epithelium
  misc_feature 1..476: note = source = chr1:29586283-29586758; Gene: PTPRU (exon)
  source 1..476: mol_type = genomic DNA
cgcggtgtagtagggacggctaaatggggcccgggtcagagcgagatcgggacccctcgctccgaggcgcccctgaccccctcactctcttccctgcagcggcagagcggggcgctggtgccggcggcgggcgtgcggcacatcagccaccggcgcttcctggccactttcccgctggctgccgtgagccgcgccgagcaggacctgtaccgctgtgtgtcccaggccccgcgcggcgcgggcgtctctaacttcgcggagctcatcgtcaagggtcagctggtggacgccggggagcgccgggacctcaccctcgaggggcggggccggcgacgggggcgggctctgcccgggggcgtggccgtggggggtggggccggcagggtgtcgctggggcgctatctgaagatgggcctgtggaaatggcagtggcccagccgggatgagatctgatctaggggtcggggctggcttcg

SEQ ID NO: 2355 - DNA, 110 bp, Homo sapiens
  misc_feature 1..110: note = U/M: M (0.88:0.14) in Bladder Epithelium
  misc_feature 1..110: note = source = chr10:77155437-77155546; Gene: ZNF503 (Intergenic)
  source 1..110: mol_type = genomic DNA
cgcgcgcccggggtgactcggatccgtccaacacgtcggggaatcctttctgtcctcacccccgggcgccccagcgccggaacgctgctgcctctgtgtagctgctcccg

SEQ ID NO: 2356 - DNA, 402 bp, Homo sapiens
  misc_feature 1..402: note = U/M: M (0.85:0.11) in Bladder Epithelium
  misc_feature 1..402: note = source = chr3:181437928-181438329; Gene: SOX2-OT (intron)
  source 1..402: mol_type = genomic DNA
cgttagactacagagaacaatacagaaaccccggtcctttctggccttcctggctctggacagtgaaattagtcttgttcataccacccttcttacttttccagtgctctctctgacttaagatttgcctaggaagttatcttgcaaacttgccatccctgggcatcgtcctgaagggagggatcccggcattccgggcaggacccgcccccacccgcagaaggcagaaaaataattactgtattaaataaggagcggtgaattcttcccaagggttcttatcgctggcggccaggccagaagcgggactgcgcccccacccccacctcgtgacgtcagggcctgcagggctccggggatgaaatgattcgtttgagtgttccagaaagggcaatccgaacg

SEQ ID NO: 2357 - DNA, 192 bp, Homo sapiens
  misc_feature 1..192: note = U/M: M (0.84:0.11) in Bladder Epithelium
  misc_feature 1..192: note = source = chr3:181445573-181445764; Gene: SOX2-OT (intron)
  source 1..192: mol_type = genomic DNA
cgagctgcagcaatatcaaagtgaactgtcccaagtaactcttgtctagaagctgggaagaagcttaagcagctcgctttaatgatgatttgtagctcggcgaggggcacggacagcaaacaccccgcaggtgtgtgccgtaacaccatcatccggacttgaatgtagattactctggcgatcgtttgatcg

SEQ ID NO: 2358 - DNA, 397 bp, Homo sapiens
  misc_feature 1..397: note = U/M: M (0.78:0.06) in Bladder Epithelium
  misc_feature 1..397: note = source = chr17:46711051-46711447; Gene: MIR196A1 (Intergenic)
  source 1..397: mol_type = genomic DNA
cgggtataaatcttggggaccggaaatacaataaaacttcaccgtgttgatgaacttcaaacggtttacatcccctcctgtcctgaaaagaaagacgtccgggggcggattaaaaggaaggggaaacaaatttacgagcggcagaagcacccgcctcggcccctttctttgcccgcacactttgtccgcgtggagagaagcagccccagcccccgggacttggcctccgccgaaccggccgccaggcgcgctcttctctcggaggagtcggcgctgacccagcccgcgcccggcagagactggaagccgccgcctacacggaaaatccacagagccccgcgcagaccctatgatcggctcggcccgccgggcttgggatgaggctccctgcttctcg

SEQ ID NO: 2359 - DNA, 422 bp, Homo sapiens
  misc_feature 1..422: note = U/M: M (0.73:0.05) in Bladder Epithelium
  misc_feature 1..422: note = source = chr19:36164093-36164514; Gene: UPK1A-AS1 (promoter-TSS)
  source 1..422: mol_type = genomic DNA
cgggctctgcccgacgggccgtcctccctctgtctccccagtacctggtgctcatgctcatcgtctacatcttcgagtgcgcctcctgcatcacgtcctacacccaccgtgactacgtgagcccggcgaggcctggggaggggcctgacctgcatgggaggggcgagggtcccggcgcggcggggcggaggtcgtcctctctccccacccagccctgccggcccttgttcttccctgttctcctcagatggtgtccaacccatccctgatcaccaagcagatgctgaccttctacagcgcggacaccgaccagggccaggagctgacccgcctctgggaccgcgtcatgattgaggtgggcggggtggaccgggtgctgggagggccctgggctccgtccacagaggccgatagagctcccg

SEQ ID NO: 2360 - DNA, 107 bp, Homo sapiens
  misc_feature 1..107: note = U/M: M (0.79:0.12) in Bladder Epithelium
  misc_feature 1..107: note = source = chr17:46710934-46711040; Gene: MIR196A1,MIR196A1 (promoter-TSS,Intergenic)
  source 1..107: mol_type = genomic DNA
cggcccagtccaggctccctcccgccctcgcccagaagcgagggtccgagtggccacgtgtccggcagggaagtccgaggtagcgagggagtccacctggccgcccg

SEQ ID NO: 2361 - DNA, 101 bp, Homo sapiens
  misc_feature 1..101: note = U/M: M (0.81:0.16) in Bladder Epithelium
  misc_feature 1..101: note = source = chr5:42949328-42949428; Gene: LOC648987 (Intergenic)
  source 1..101: mol_type = genomic DNA
cgataaaattttagaaagtacatagaaccaaaacaaaccgtaattccgacggaaaaacagcgagaaaagaaaacgaaatgaaactgacactaagcagaccg

SEQ ID NO: 2362 - DNA, 349 bp, Homo sapiens
  misc_feature 1..349: note = U/M: M (0.7:0.09) in Bladder Epithelium
  misc_feature 1..349: note = source = chr5:42949452-42949800; Gene: LOC648987 (Intergenic)
  source 1..349: mol_type = genomic DNA
cgcagggattaaagagagcttcagaggccaagaaccacctgtgtccgggaaatgagcattgctgccaccaggaaactgtccgctagggctcggcactactaaggacctcgctaacaataatctggctgcgctgggactcagcaagagcagacacccagcggattgccctggtgttgccaaacaaatgtccatttaggtgccataaatggtgctgctagaaagaaactgcgggctcttagataggagtcctgtctggagaaatgaactgactgtgtttaaatgtgttgtgacagaaaaatgtgttgtggcatcttattgtgttttaagtcgtttaatgtgttttaacccg

SEQ ID NO: 2363 - DNA, 121 bp, Homo sapiens
  misc_feature 1..121: note = U/M: M (0.78:0.19) in Bladder Epithelium
  misc_feature 1..121: note = source = chr7:20832969-20833089; Gene: SP8 (Intergenic)
  source 1..121: mol_type = genomic DNA
cgttcttttcccacatgcctgctggatattgcaggcgcgcaggaagctcgcttcaaacctggcccatttcaggccataatggccacgttatttcggcccagtgaacacgaacaaaatcgcg

SEQ ID NO: 2364 - DNA, 173 bp, Homo sapiens
  misc_feature 1..173: note = U/M: M (0.75:0.16) in Bladder Epithelium
  misc_feature 1..173: note = source = chr7:20831202-20831374; Gene: SP8 (Intergenic)
  source 1..173: mol_type = genomic DNA
cgctgaacaatagcctctattagtgaggttatttggttccaaactgtccggccacatttatagccgagtccttacttttctggtagtgcttaattggatgcatttgttgaccacaacgaagcaatagtgactcttgatctactggcacaggagcttcttggtgatgaaaagcg

SEQ ID NO: 2365 - DNA, 122 bp, Homo sapiens
  misc_feature 1..122: note = U/M: M (0.66:0.08) in Bladder Epithelium
  misc_feature 1..122: note = source = chr3:181445800-181445921; Gene: SOX2-OT (intron)
  source 1..122: mol_type = genomic DNA
cggccagtctcagtttttctctgaataatccctgagggtaagtcctccgggcttttaaagagctctagtattttttttttaaagaataaaaagaaaaacgttcgattttagtttagacctcg

SEQ ID NO: 2366 - DNA, 336 bp, Homo sapiens
  misc_feature 1..336: note = U/M: M (0.59:0.03) in Bladder Epithelium
  misc_feature 1..336: note = source = chr17:46713821-46714156; Gene: MIR196A1 (Intergenic)
  source 1..336: mol_type = genomic DNA
cggggagggaggagacagtctcggagaattcagaggtgccagaagccgagttcctagaccccagctggattttttttttttttttttttttttttccaatttctggcggcgggcggctggggaagcagctctgtggtctcccggcgggtgaggccgagacagagaccaacctctaggcggcgccctggcgttgagtccgcgctgaacaagattctctcgcagctctgcgtcccgcgccgggtgaaggggcgtgttcctgcaggcgctcggggctcggcctggagctggcggccggcacgtcgcctttggcgccctctgccaaccaagagaaacacg

SEQ ID NO: 2367 - DNA, 145 bp, Homo sapiens
  misc_feature 1..145: note = U/M: M (0.61:0.07) in Bladder Epithelium
  misc_feature 1..145: note = source = chr17:46714169-46714313; Gene: MIR196A1 (Intergenic)
  source 1..145: mol_type = genomic DNA
cgctgggacagaaatccacagctaatcaaggccccatccgctcccaccccctggcccttacctcctaactccatctccgacgctagggagccttccacagcccgaatctcctttgatgtccccagcagccggctagagggcagcg

SEQ ID NO: 2368 - DNA, 146 bp, Homo sapiens
  misc_feature 1..146: note = U/M: M (0.56:0.07) in Bladder Epithelium
  misc_feature 1..146: note = source = chr16:89006582-89006727; Gene: CBFA2T3 (intron)
  source 1..146: mol_type = genomic DNA
cggcctcagcccacagggtgaatgaggggtgggcacagcccggccgcggccccagcacacacgggcggacgcaggggcgggggagcgccagccccgcagtgtgttcggagcccagcggctctgagtcgccgccaccagcctggccg

SEQ ID NO: 2369 - DNA, 147 bp, Homo sapiens
  misc_feature 1..147: note = U/M: M (0.58:0.12) in Bladder Epithelium
  misc_feature 1..147: note = source = chr5:50265721-50265867; Gene: PARP8 (Intergenic)
  source 1..147: mol_type = genomic DNA
cggacttggcggggccggtccccacctgaagctcacctcaggcagtcgctagaagttccaatccaatcgtgagctttcctctgggagggacaggatccccttcaactcctgaggctgctcctctgggcgaatcccacagtaattgcg

SEQ ID NO: 2370 - DNA, 122 bp, Homo sapiens
  misc_feature 1..122: note = U/M: M (0.59:0.17) in Bladder Epithelium
  misc_feature 1..122: note = source = chr19:863037-863158; Gene: CFD,CFD (intron,exon)
  source 1..122: mol_type = genomic DNA
cgtgaggccggggtgggcgcgggccgcccctcacggccccgtcctgttccggcagggtgactccgggggcccgctggtgtgcgggggcgtgctcgagggcgtggtcacctcgggctcgcgcg

SEQ ID NO: 2371 - DNA, 419 bp, Homo sapiens
  misc_feature 1..419: note = U/M: U (0.08:0.93) in Prostate Epithelium
  misc_feature 1..419: note = source = chr5:58395983-58396401; Gene: PDE4D (intron)
  source 1..419: mol_type = genomic DNA
cgagtgattgctccaaaatacagaacacagcaagccacatttctacatctttggcggtgcgccactgtctataaactttttaataaggtcgccctaacttgctttctcacatagtcttattccttgccatttcctctgtttgcgccctacatactgtaagttactccgaaacattcatctttttctacatgcctgtgactttgtacatgtagttccctttgtctgaaatgccctttcttctttcgtttatggagattccaaatggtctccaaggtatatgtcaattattatccatgaaaggttttgctatatatatccagtattttctgggggatggggaagcttaaacaaaaaaaacttgaacattactctacacacagtccattatgacatcttagtctatttggaaaactccactc

SEQ ID NO: 2372 - DNA, 183 bp, Homo sapiens
  misc_feature 1..183: note = U/M: U (0.03:0.88) in Prostate Epithelium
  misc_feature 1..183: note = source = chr11:82843660-82843842; Gene: PCF11 (Intergenic)
  source 1..183: mol_type = genomic DNA
cggtctccctctcctacggtctccctctccctctctttccacggtctccctctgatgccgagccgaagctggactgtactgctgccatcttggctcactgcaacctccctgcatgattctcctgcctcagcctgccgagtgcctgcgattgcaggcacgtgcctccacgcctgactggttttc

SEQ ID NO: 2373 - DNA, 146 bp, Homo sapiens
  misc_feature 1..146: note = U/M: U (0.13:0.9) in Prostate Epithelium
  misc_feature 1..146: note = source = chr17:9348790-9348935; Gene: STX8 (intron)
  source 1..146: mol_type = genomic DNA
cgaagagtggtggccggggagggggggatggtgggggagggggttggggggtgggggtgagggctcacggaatgaagagctttaaaacaccacgcaagcggggaaggcatatttacttaagaaaactggtacctaagttgtaaatc

SEQ ID NO: 2374 - DNA, 139 bp, Homo sapiens
  misc_feature 1..139: note = U/M: U (0.14:0.9) in Prostate Epithelium
  misc_feature 1..139: note = source = chr3:149001639-149001777; Gene: TM4SF18 (Intergenic)
  source 1..139: mol_type = genomic DNA
cgtgctggcagtcctcgcagccctcactcgctcttggcgcctcctctgcctgggttcccactttggcagcacttgaggagccattcagcccgccgctgcactgtggtagcccctttctgggctggccaaggccagagcc

SEQ ID NO: 2375 - DNA, 191 bp, Homo sapiens
  misc_feature 1..191: note = U/M: U (0.15:0.91) in Prostate Epithelium
  misc_feature 1..191: note = source = chr12:40171398-40171588; Gene: SLC2A13 (intron)
  source 1..191: mol_type = genomic DNA
cgcccccatcctgtgcctataaaaaccccgagaccctagcagggagacacacaggtggctggatgtcgagagaagcacatcaatggaggcacacacaggtggctggccgtcgagaggaacgcaccaacaggcatcggcatgccagcaggccactgagtggcagaatgacatggagtttggctggggcagtc

SEQ ID NO: 2376 - DNA, 41 bp, Homo sapiens
  misc_feature 1..41: note = U/M: U (0.12:0.87) in Prostate Epithelium
  misc_feature 1..41: note = source = chrX:35518524-35518564; Gene: MAGEB16 (Intergenic)
  source 1..41: mol_type = genomic DNA
cgaaaccacgaacccgccgggagcaacgaacaactccagac

SEQ ID NO: 2377 - DNA, 143 bp, Homo sapiens
  misc_feature 1..143: note = U/M: U (0.14:0.88) in Prostate Epithelium
  misc_feature 1..143: note = source = chr8:852993-853135; Gene: ERICH1-AS1 (intron)
  source 1..143: mol_type = genomic DNA
cggaaagtgtgtgggtgggcaggggtggggggtggaaagagtgcgggtggacgggggcggtggggcggtttgagaccagtgttgtggcgcagcaggcaagggatccccaagcggccgtcagagtccctatgagttatcttgtc

SEQ ID NO: 2378 - DNA, 183 bp, Homo sapiens
  misc_feature 1..183: note = U/M: U (0.14:0.88) in Prostate Epithelium
  misc_feature 1..183: note = source = chr3:193675634-193675816; Gene: LOC647323 (exon)
  source 1..183: mol_type = genomic DNA
cgtgaaatatgtagcttacatgctgaaacatgatcatttctaggatattttagtagcttctgaagacaatgaggcagaatatttagaatccgtatggtcccaggaatgccttaaagtcccctaaaatcaaataaacatcagcatcgctggcgtcctgctgcttcccacagtgaatgctgtgac

SEQ ID NO: 2379 - DNA, 199 bp, Homo sapiens
  misc_feature 1..199: note = U/M: U (0.16:0.9) in Prostate Epithelium
  misc_feature 1..199: note = source = chr6:720637-720835; Gene: EXOC2 (Intergenic)
  source 1..199: mol_type = genomic DNA
cggcaggggatggaaggctcagagtttcttttggcagttaagctgctgggatttgctattaggtggaatatgtttgtgagtgaaagaggggcattaagtgtccaggaggacggtggtgacatggactgagagaagcaggtttgggtgtgccgatttagagttacagtttagcttgggtaagtttccgatgcagtcatgc

SEQ ID NO: 2380 - DNA, 339 bp, Homo sapiens
  misc_feature 1..339: note = U/M: U (0.2:0.93) in Prostate Epithelium
  misc_feature 1..339: note = source = chr4:100342854-100343192; Gene: ADH7 (intron)
  source 1..339: mol_type = genomic DNA
cgtcagagtgaacaggcaacctacagaatgggaggagatttttgtgatctactcatctgacaaaggtctaatatgcagaatttacaaggaacttaaacaaatatacaagaaaaaaaatgaagaaccccatccaaaagtggtcacaggatatgaacagacacttctcaaaagaagacatttatgtggccaataaacatatgaaaaaagctcaacatcactgatcattagagaaatgcaaatcaaaaccaccgtgtgataccatctcatgccagtcagaatggcgattattaaaaagtcaggaaacaatcgatgctcgtgatgctatggagaaataagaac

SEQ ID NO: 2381 - DNA, 361 bp, Homo sapiens
  misc_feature 1..361: note = U/M: U (0.17:0.89) in Prostate Epithelium
  misc_feature 1..361: note = source = chr5:171223147-171223507; Gene: FBXW11 (Intergenic)
  source 1..361: mol_type = genomic DNA
cgtccctcatcgctattttagggtttggtcaagtgctgttgctttttctagattatgaggtagaaactgaggcacagagagattgcatcacggttaccatcacatgctcagtaagtggggagccaggattctaacctgtctggcctcagagccctcactttaaatcagtgtaatcaatgctcctcatagcctaccctccatcgagcccagccaagatgatgtcttttctctctggaaaagttctcactttattgttaagtaatcatatgccgattaaatttataaggccataaatattcattgcatgctactacgtgtagggtacgcatatacagagaagtagaaatcacgttccctgtcc

SEQ ID NO: 2382 - DNA, 180 bp, Homo sapiens
  misc_feature 1..180: note = U/M: U (0.17:0.87) in Prostate Epithelium
  misc_feature 1..180: note = source = chr11:61868530-61868709; Gene: INCENP (Intergenic)
  source 1..180: mol_type = genomic DNA
cgatctcagctcactgcaacctacgcctcccaggctcaagcggttctcccaccccagcagcccaagtagctgagactacaagcatgcaccaccatgcccggctaatttttgtattttttatagagatggggttttgccatgttggtaggctggtctcaaactcctggcctcaggtgatcc

SEQ ID NO: 2383 - DNA, 189 bp, Homo sapiens
  misc_feature 1..189: note = U/M: U (0.15:0.85) in Prostate Epithelium
  misc_feature 1..189: note = source = chr15:88585662-88585850; Gene: NTRK3 (intron)
  source 1..189: mol_type = genomic DNA
cggcttccagacagactctgccctctgtggtctccggggcacatggggtcctgcaggcagcacagcaaggcctgccctccgcacttctccgctcctctccctgaatcatttcccaaaagataagctttattctctggctcgaattccctcccagcctcttacaggaaccaaaggcgttgttcatgcctc

SEQ ID NO: 2384 - DNA, 72 bp, Homo sapiens
  misc_feature 1..72: note = U/M: U (0.25:0.94) in Prostate Epithelium
  misc_feature 1..72: note = source = chr11:82843881-82843952; Gene: PCF11 (Intergenic)
  source 1..72: mol_type = genomic DNA
cgggccggtctccagctcctaaccacgagtgatccgccagcctcggcctcccgaggtgccgggattgcagac

SEQ ID NO: 2385 - DNA, 34 bp, Homo sapiens
  misc_feature 1..34: note = U/M: U (0.25:0.92) in Prostate Epithelium
  misc_feature 1..34: note = source = chr9:16204126-16204159; Gene: C9orf92 (intron)
  source 1..34: mol_type = genomic DNA
cgcacccgaaggaaggcctgccgcgtggcgtgcc

SEQ ID NO: 2386 - DNA, 260 bp, Homo sapiens
  misc_feature 1..260: note = U/M: U (0.21:0.85) in Prostate Epithelium
  misc_feature 1..260: note = source = chr19:51858650-51858909; Gene: ETFB (intron,promoter-TSS)
  source 1..260: mol_type = genomic DNA
cgtctcacaccagttagaacggcgatcattaaaaagtcaggaaagaacaggtgctggagaggatgtggagaaaaaggaacacttttacactgttggtgggactgtaaactagttcaaccattgtggaagtcggtgtggtgattcctcagggatctagaactagaaataccatttgacccagccatcctattactgggtatatacccaaaggattataaatcatgctgctataaagacacatgcacacatatgtttattgc

SEQ ID NO: 2387 - DNA, 143 bp, Homo sapiens
  misc_feature 1..143: note = U/M: U (0.26:0.88) in Prostate Epithelium
  misc_feature 1..143: note = source = chr2:112285718-112285860; Gene: LOC541471 (Intergenic)
  source 1..143: mol_type = genomic DNA
cgtcaaaagcaaaactatttgctgtcctatttacagggccgcaaatcactttttattccaagcaataaatgctatcatcatccgtgatcctggtgtgtttacggtgaagcaaaaatcatgctgcctgaaggaaagtgttcggc

SEQ ID NO: 2388 - DNA, 256 bp, Homo sapiens
  misc_feature 1..256: note = U/M: U (0.29:0.88) in Prostate Epithelium
  misc_feature 1..256: note = source = chr13:43922157-43922412; Gene: ENOX1 (intron)
  source 1..256: mol_type = genomic DNA
cgtccgtccccgcttcctttgccagagccctctttgttaaacagcacggcgtgcctccctgcatctgctcatgctgtgcacttatccttgggtctctcccactcctggtccccctggtcagctgttattcttccctcaagattcagcgtaagtgccctttaataaagaaatctcttctgcaactctaggatgaattaggtgtctctttgctatgtttccacaattccccgcatatcctgctattaaagcattagtc

SEQ ID NO: 2389 - DNA, 152 bp, Homo sapiens
  misc_feature 1..152: note = U/M: U (0.24:0.81) in Prostate Epithelium
  misc_feature 1..152: note = source = chr18:13812352-13812503; Gene: MC5R (Intergenic)
  source 1..152: mol_type = genomic DNA
cgaaggaagaagaggactgtcatcatatagctctggaaggaaccatccccagaaacccctcagcaggctccttttgtattgatcagaatcagcaaaaccttgtgggtgggctggtgggggtcggaggtgcgttggctttctcggaggtgggc

SEQ ID NO: 2390 - DNA, 210 bp, Homo sapiens
  misc_feature 1..210: note = U/M: U (0.05:0.87) in Prostate Epithelium
  misc_feature 1..210: note = source = chr4:56737940-56738149; Gene: EXOC1 (exon)
  source 1..210: mol_type = genomic DNA
cgtttaatgttccattaaacatcaaggaaatctttttacccattaaactggtcacaaaatgtcgttctgtgtcaggccatgacttgcttctggcagtcaaacagcaacagcagcgattcagtgatttgcgagagctttttgcccggagactggccagtcacctcaacaatgtttttgttcaacaggtaattttattttattattaaaacg

SEQ ID NO: 2391 - DNA, 63 bp, Homo sapiens
  misc_feature 1..63: note = U/M: U (0.09:0.9) in Prostate Epithelium
  misc_feature 1..63: note = source = chr8:52894910-52894972; Gene: PCMTD1 (Intergenic)
  source 1..63: mol_type = genomic DNA
cggggtttcaccatgttggtcaggctagtctcgaactcccgaccttgtgatccgcccggctcg

SEQ ID NO: 2392 - DNA, 149 bp, Homo sapiens
  misc_feature 1..149: note = U/M: U (0.07:0.88) in Prostate Epithelium
  misc_feature 1..149: note = source = chr15:30146107-30146255; Gene: TJP1 (Intergenic)
  source 1..149: mol_type = genomic DNA
cgagagaacatatccaggagcaacgacgcacctgcagttggagcagatagtcgctatactttcaccgcatcaccactagatttccatgaattctgcatgagaaaactgtgactgatatgtcagttttttcacttagtttatagtacacg

SEQ ID NO: 2393 - DNA, 63 bp, Homo sapiens
  misc_feature 1..63: note = U/M: U (0.08:0.86) in Prostate Epithelium
  misc_feature 1..63: note = source = chr7:157423150-157423212; Gene: PTPRN2 (intron)
  source 1..63: mol_type = genomic DNA
cggcagggagtgaaccggcttcttcaccatcccgctcctctaacacaccgtgtgcccgtcacg

SEQ ID NO: 2394 - DNA, 345 bp, Homo sapiens
  misc_feature 1..345: note = U/M: U (0.08:0.86) in Prostate Epithelium
  misc_feature 1..345: note = source = chr3:24086762-24087106; Gene: LINC00691 (Intergenic)
  source 1..345: mol_type = genomic DNA
cgtaatacttgggacatagttacattaaaatgttttcattgtttatctgagttcagatttagcaaggtatcctgtatttttatttgctaagtctggcaactgcagcccgctaaactctttcttcttaagatttatttatctttatattggcaatgcctggcatatagtagaaactccataaaaattaagcctctgagataacaatggtaaatcactgaaagatcatctgaaatgtaaagccaataaaggctgagggttgtgcattctttcaatggttttaatttgccgtgattaaagatacttcgagtttctgtttttctacagatcatctcagattatctgtcg

SEQ ID NO: 2395 - DNA, 410 bp, Homo sapiens
  misc_feature 1..410: note = U/M: U (0.07:0.85) in Prostate Epithelium
  misc_feature 1..410: note = source = chr12:31624662-31625071; Gene: DENND5B (intron)
  source 1..410: mol_type = genomic DNA
cgtggaagaacatgcttgggttgacacagggcccacagctcactatggaacaatcacagatggctatatgtgatccagacacaaaggtgatgattcagtcagaaatgaattgaactgttttatccaatccttgagggaccagccagtctcaaggactggataaaagctactcgaagtctgtttaccttgagaagggagactgcccaattccccctataaattccaagtggaacaccccagatgaagaagctgatatgctctgcacaaaagccacgcaggactggctttatgataatcgggatattcacccgctgaatacatccgttacccagggcaaatgctgcggttagggaggctccttttatgtgggcactccatgtaactttactgcttcaaaatctaacattacg

SEQ ID NO: 2396 - DNA, 332 bp, Homo sapiens
  misc_feature 1..332: note = U/M: U (0.11:0.88) in Prostate Epithelium
  misc_feature 1..332: note = source = chr17:75679958-75680289; Gene: LOC100507351 (Intergenic)
  source 1..332: mol_type = genomic DNA
cgaagaaggcaagcggatgccagcattatgcttcccaaatagcctgcagaaccgtgagccaattaaaactctataaattacccagtctcaggtatttctttacagcagggagagaacagactaatacaaactcatatccaaatatacctaaaagccacagcagattttattagtgctctgcaagtcctaacaaatgtggagtctcgctctatcacccaagctggagtgcagtagcatgatctctgctcactgcaacctccaccttccgggttcaagcaattctctgcctcagcttcctgagtacctgagattacaggtgccggtccaccacg

SEQ ID NO: 2397 - DNA, 89 bp, Homo sapiens
  misc_feature 1..89: note = U/M: U (0.12:0.88) in Prostate Epithelium
  misc_feature 1..89: note = source = chr8:19622714-19622802; Gene: INTS10 (Intergenic)
  source 1..89: mol_type = genomic DNA
cgtggtggcacgtgcctgtagtcccagctactcaggaggctgaggcaggggaatcgcttgaaccctggaggcaaacgctgcagtgaccg

SEQ ID NO: 2398 - DNA, 351 bp, Homo sapiens
  misc_feature 1..351: note = U/M: U (0.12:0.88) in Prostate Epithelium
  misc_feature 1..351: note = source = chr1:116153836-116154186; Gene: VANGL1 (Intergenic)
  source 1..351: mol_type = genomic DNA
cgctatttttgcaaattaataaatcaatcttgtaatgtggtaaatcagattctcttacccatttcaaacattatgaaaacaggaaagcaaacaaagcatatacaaagcagagcaatgaaattttaacgatttcgaaacttattacaaatcccatataatgcagcccactcagaagaaatccacatccactttttcattatctctatacttatttgtgtacccatccagggttataaatcactcccctaagctagggaaaaaaatcgcaatctccgcagagtgatccaatccaagatgcaggttaaaaagatggcaattttactgcctggtgtgacagatgcagtatctgcg

SEQ ID NO: 2399 - DNA, 308 bp, Homo sapiens
  misc_feature 1..308: note = U/M: U (0.15:0.9) in Prostate Epithelium
  misc_feature 1..308: note = source = chr1:61105704-61106011; Gene: NFIA (Intergenic)
  source 1..308: mol_type = genomic DNA
cgaatagcaacagctccggtctacagctcccagcgtgagcgacgcagaagacgggtgatttctgcatttccatctgaggtactgggttcatctcactagggagtgccagacagtgggcgcaggtcagtgggtgcgcgcaccgtgcacgagccgaagcagggcgaggcattgtctcacttgggaagcgcaaggggtcagggagttccctttccgagtcaaagaaaggggtgacggacgcacctggaaaatcgggtctctcccacccgaatattgcgctttcggaccggcttaaaaaacggcgcaccgcg

SEQ ID NO: 2400 - DNA, 402 bp, Homo sapiens
  misc_feature 1..402: note = U/M: U (0.14:0.88) in Prostate Epithelium
  misc_feature 1..402: note = source = chr1:245662442-245662843; Gene: KIF26B (intron)
  source 1..402: mol_type = genomic DNA
cgcccaaagagaaagatgtatgggagcttcaaactcaggacaattctcaatgtccttagcgttgactcatattaaaaatgttaagagaacactagaataatagtgatgtgtgtgtgtgtgtgtctgtgtgtgtttgtggtttcctttcctggaaaccctttctaggattaacctaggttaatccaacataatgatagtctgaagaggttgaataaatcagcccagatacgcaggtgatttagccaaggctacatggtgagtctaggggcaaagccgaataagggtggagtccctaattcatagctaacctgcactgccatagtctatcggaagtgaggtagagattattatctgattttattattccgggacacgtaaacttggctgaggacacacagctcg

SEQ ID NO: 2401 - DNA, 231 bp, Homo sapiens
  misc_feature 1..231: note = U/M: U (0.16:0.89) in Prostate Epithelium
  misc_feature 1..231: note = source = chr15:100632520-100632750; Gene: ADAMTS17 (intron)
  source 1..231: mol_type = genomic DNA
cgcacacaacttactcccattgattctattcagaaaacactcagacgcgtgagccaggcaagagccacaccaagcatgtcactgctgggacgacacgtaacatccagcatcttacatgagaaacacttgggaacagcctctgccatcacacatgtggataccttcgtacagagatcattcttaactgagaaaaagaaatacgttgtaattggtttatgtgcacattttacg

SEQ ID NO: 2402 - DNA, 320 bp, Homo sapiens
  misc_feature 1..320: note = U/M: U (0.18:0.91) in Prostate Epithelium
  misc_feature 1..320: note = source = chr21:43966798-43967117; Gene: SLC37A1 (intron)
  source 1..320: mol_type = genomic DNA
cgggagtcactggtgggacagccaagctgtgcccttgccctcacctggcatgctatggcgatggcttttttctgaaacgaatgccaatttagtaaaggtataagatggcatcttgtgttttattaaattttattgtgtatatttaaggtatgcaacatggtgttacagatacatagagatagtaaaaaggttactagtaaagcgaagcaagttaacatagccatcgcaactcacagctgcccgcttttgtttttgtggcaagagcagctcaaatccactcatttaatgtgaatcctgcatacagtccagtttcacacccg

SEQ ID NO: 2403 - DNA, 136 bp, Homo sapiens
  misc_feature 1..136: note = U/M: U (0.18:0.89) in Prostate Epithelium
  misc_feature 1..136: note = source = chr5:61105044-61105179; Gene: C5orf64 (Intergenic)
  source 1..136: mol_type = genomic DNA
cgatgttttaaagtctgatttaaactcatgaaagcaaggagatttattgtcgaagccaaatcgccgcgctgacgcgccctgcctggtaatgcattctgattggtgcacaggggattgaatctgtacaaaaatatcg

SEQ ID NO: 2404 - DNA, 224 bp, Homo sapiens
  misc_feature 1..224: note = U/M: U (0.14:0.84) in Prostate Epithelium
  misc_feature 1..224: note = source = chr16:12436822-12437045; Gene: SNX29 (intron)
  source 1..224: mol_type = genomic DNA
cgggagtgctgttgggtgtgagaaagagactctcaaaggaaaacaacattttgatgctcataaaatttaatgttctttcatttactgtctttctcttgaaacttggacataatttattgagcccgtggttgaaatattcaggaggtctctgtgtgctacttcgaagggaatatgattaaaaacgcacaccagcctccactgatttctcaagacatgagaacacg

SEQ ID NO: 2405 - DNA, 284 bp, Homo sapiens
  misc_feature 1..284: note = U/M: U (0.18:0.88) in Prostate Epithelium
  misc_feature 1..284: note = source = chr15:43079249-43079532; Gene: TTBK2 (intron)
  source 1..284: mol_type = genomic DNA
cgaatatccttttcatatttcattccccataatctaaggcaaactagtgcttgtgggccaaatctggcctgcttacctatttttttttaatagacttattggaacacagtcagtctcgtctgtttacacgttggccatggcagcttttgcactataacagcaatgacagtagtgacagagacagcatagctcacagatatttatctgaccctttatagataaagcttgctggctcatgatttaaagcgtcctcttaccttctaaactttcattctccctctacg

SEQ ID NO: 2406 - DNA, 41 bp, Homo sapiens
  misc_feature 1..41: note = U/M: U (0.16:0.85) in Prostate Epithelium
  misc_feature 1..41: note = source = chr2:179830635-179830675; Gene: CCDC141 (intron)
  source 1..41: mol_type = genomic DNA
cgacccggtacgttccatcttggtgggggtaggggcgtccg

SEQ ID NO: 2407 - DNA, 79 bp, Homo sapiens
  misc_feature 1..79: note = U/M: U (0.22:0.91) in Prostate Epithelium
  misc_feature 1..79: note = source = chr3:41974443-41974521; Gene: ULK4 (intron)
  source 1..79: mol_type = genomic DNA
cgagaatcgcttgaacctgggaggcagaggttgcagtgagccaaggttgcgccaccgcactccagcctgcatgagagcg

SEQ ID NO: 2408 - DNA, 248 bp, Homo sapiens
  misc_feature 1..248: note = U/M: U (0.18:0.87) in Prostate Epithelium
  misc_feature 1..248: note = source = chr7:84294370-84294617; Gene: SEMA3D (Intergenic)
  source 1..248: mol_type = genomic DNA
cggttcttgtggaattacagtaaatttaaactattaaatttgcacttgtggaatttacagtccagtaaaggagatagacatttaaatataagtggtagtcattttcatagaagcataaactcaaaatgctatgagaagacaaaagaagggtgctacgtatcacgtttgtacgtgaagaaagggaaaaagttttggaggagaatatagttgagttgaaccttggaggaaggggaggatttaggtctgcg

SEQ ID NO: 2409 - DNA, 267 bp, Homo sapiens
  misc_feature 1..267: note = U/M: U (0.15:0.84) in Prostate Epithelium
  misc_feature 1..267: note = source = chr12:104894025-104894291; Gene: CHST11 (intron)
  source 1..267: mol_type = genomic DNA
cgtaacatataatattgcctctcctctggcagccttggtgcttgcgaagggtttagtggcctcttgtttttttacattgggaggtaagaatttagatttattagtcccagcttggcgatgagtggcacagagaattttaaatgatttgttttaagccacgtagctaatcaggggacaaaatgaaccaaggatactagaaatgaacgagcaaggaagaaggcaaatgaacttctgacttcttctaccctttgatgttttaccaacacg

SEQ ID NO: 2410 - DNA, 101 bp, Homo sapiens
  misc_feature 1..101: note = U/M: U (0.19:0.86) in Prostate Epithelium
  misc_feature 1..101: note = source = chr15:91888666-91888766; Gene: SV2B (Intergenic)
  source 1..101: mol_type = genomic DNA
cgactttttaatgatcgccattctaactggtgtgagatggtatctcattgtggttttgatttgcatttctctgacggacggtgatgatgagcattttttcg

SEQ ID NO: 2411 - DNA, 98 bp, Homo sapiens
  misc_feature 1..98: note = U/M: U (0.2:0.86) in Prostate Epithelium
  misc_feature 1..98: note = source = chr10:123781645-123781742; Gene: TACC2 (intron)
  source 1..98: mol_type = genomic DNA
cgtagatgtgtgcgggcatttatggatctatgcagccatttttcatttcattggaattctcttacgattaaggctagctctagttaaagccggaaacg

SEQ ID NO: 2412 - DNA, 148 bp, Homo sapiens
  misc_feature 1..148: note = U/M: U (0.22:0.88) in Prostate Epithelium
  misc_feature 1..148: note = source = chr1:180911672-180911819; Gene: KIAA1614 (intron)
  source 1..148: mol_type = genomic DNA
cgtgtggccagtgctcaacaaatatttgctggttgagtgaatggaaggcagagaaaccgccgcagatattgaagctggggggaatcggcagcggtgacttgtgctcgggaagctcactgttcttatgaagttaggtttatccaaagcg

SEQ ID NO: 2413 - DNA, 178 bp, Homo sapiens
  misc_feature 1..178: note = U/M: U (0.23:0.89) in Prostate Epithelium
  misc_feature 1..178: note = source = chr6:53824292-53824469; Gene: MLIP-IT1 (Intergenic)
  source 1..178: mol_type = genomic DNA
cgagtagctgggactacaggtgccggccaccacacccagctaatttttttcatattttaagtagggacggggtttcaccgtgttagccaggatggtctcgatctcctgacctcatgatccgcccacctcggcctcccaaagtgctaggattacaggtgtgagccactgcacccggccg

SEQ ID NO: 2414 - DNA, 186 bp, Homo sapiens
  misc_feature 1..186: note = U/M: U (0.22:0.88) in Prostate Epithelium
  misc_feature 1..186: note = source = chr4:2632299-2632484; Gene: FAM193A (intron)
  source 1..186: mol_type = genomic DNA
cgtgctcttccagctgtgtgagtttacgcaagtcacccaacctgtgtgggccaaaatgtcccctctgtaaagcaggcactgaacccacacacagcgaactgaattagtgcacgtgcacggacagtgctgtacagagaaagctcaataaatgtcacttgctgttccctagtgacactctgtgccccg

SEQ ID NO: 2415 - DNA, 207 bp, Homo sapiens
  misc_feature 1..207: note = U/M: U (0.22:0.87) in Prostate Epithelium
  misc_feature 1..207: note = source = chr8:130119953-130120159; Gene: LOC728724 (Intergenic)
  source 1..207: mol_type = genomic DNA
cggggaatgaaagattcctgaagcaggtacgttttctgtttgctgcggtaaccctgatacttagatctgtctctgagacatcatcggtgttcaggataaaagaatgattgaacaaacagatgattctatcttacttggtggccaagccaaaattagcatccagccagtcctctatcactcagctccttttcttttacaacctagccg

SEQ ID NO: 2416 - DNA, 222 bp, Homo sapiens
  misc_feature 1..222: note = U/M: U (0.17:0.82) in Prostate Epithelium
  misc_feature 1..222: note = source = chrX:106840564-106840785; Gene: PRPS1 (Intergenic)
  source 1..222: mol_type = genomic DNA
cgcccaccgccctgtcactgggggccacctggggaaaaaggagagtagttatgtgggcagcgtgggcaccagccccaggaaatcgagccgctgcacgcccccacctgccgactctgagcttgtcagcttctgctacctccatatgcgggaacaaaggaaggagcaggaaagccggacagatgtcaacgagaacctaatcttctttgaggagaccaggccccg

SEQ ID NO: 2417 - DNA, 331 bp, Homo sapiens
  misc_feature 1..331: note = U/M: U (0.23:0.88) in Prostate Epithelium
  misc_feature 1..331: note = source = chr2:153562909-153563239; Gene: PRPF40A (intron)
  source 1..331: mol_type = genomic DNA
cggatgtcgccaaaccagagagaaatgttatccaaaccccttatgagggaaatcttatcctaactgcatcaagagatccattgggggccccaagccatgtgtgacggagtcctcagtttatgggagcacagaaatttataccctggccaaacaggttacagacagttgcttagtttgtaagaaaactaataaactataaaaagattaccccttatgggaaggagtccaggcttcagtccattccaaagtatccagattgattacacagagatgcctccaacagggcgtctaaaatacatactagtgacagatcacctcagtcactgggtcg

SEQ ID NO: 2418 - DNA, 80 bp, Homo sapiens
  misc_feature 1..80: note = U/M: U (0.24:0.88) in Prostate Epithelium
  misc_feature 1..80: note = source = chr18:50966157-50966236; Gene: DCC (intron)
  source 1..80: mol_type = genomic DNA
cggagtctcgctctgtcgcccaggctggagtgcagtggcgggatctcggctcactgcaagctccgcctcccgggttcacg

SEQ ID NO: 2419 - DNA, 281 bp, Homo sapiens
  misc_feature 1..281: note = U/M: U (0.2:0.84) in Prostate Epithelium
  misc_feature 1..281: note = source = chr11:11190301-11190581; Gene: CSNK2A3 (Intergenic)
  source 1..281: mol_type = genomic DNA
cggacacagatatggtgagaaactctagatgcccgaggcatcccttaaatcattctggacatttactgagggcctaccgtgtgccagctgctgaaatatttaacctgaagcttaaataagcttctctattggtagaattcagatgaatcatgagaatcatctgaaaatagagactgcgagaggagacgggaaaggccatctcatctacctgtgtcttaaggttgggggcgggggtgggggtgggaaactgatgtccagagaagggaaaagacctgtacccg

SEQ ID NO: 2420 - DNA, 440 bp, Homo sapiens
  misc_feature 1..440: note = U/M: U (0.23:0.87) in Prostate Epithelium
  misc_feature 1..440: note = source = chr2:86273835-86274274; Gene: POLR1A (intron)
  source 1..440: mol_type = genomic DNA
cgcatgcctgtaatcccgagaggcaggagaatctctggaacctgggaggcagaggttgcagtgagccaagattgcgccactgcactccagcccggtgacagagcaagacttcatctcgaaaaaaaacgaaagaaagaaagaaacaatcatgcaaaattacgtaaaaattgtgtgagtatacataatttatctatataacgtgaatatatgtaatagtacagtttgtaaatttgtaatatatatctacgttatacatatcccatctgcatattcataactacatctgcctttaacattggcatgttaacagtggttagctcctgtagtgatttctacacgctttcctctttttacttgtcatgttttatagggaacaaactgaaaccacctcctgctatcccccacctgcctttgctgacacctgtaaagctgccaacccg

SEQ ID NO: 2421 - DNA, 464 bp, Homo sapiens
  misc_feature 1..464: note = U/M: U (0.22:0.86) in Prostate Epithelium
  misc_feature 1..464: note = source = chr6:73112707-73113170; Gene: RIMS1 (TTS)
  source 1..464: mol_type = genomic DNA
cgtcagcctgtctaagtgagcacatgactatacttctgaaaagtggcattattaaaaataataaatctcagtaagaatcaaatggaaggttgttttctgctgctgtttgaatgtgctaataaaagagacaactctattgtccaattgccaaattatttcaagttacgtgacatatcaaaaaattgattcctgcgtctctcgtcatagtatatttcctctttccatctttttcttctgaacccatgactaatttatataactttggtttagaggagaccaatttaacaaaaaataagcactacatttacactgaattatctttaatagaatcttagataataaaagtatcttcaaatatagatagatatccaaaataatatattcaaagagacattattaactttttaggttattttattattttttcttacctgaaagtgtgctcatgtatttaataatcatcg

SEQ ID NO: 2422 - DNA, 470 bp, Homo sapiens
  misc_feature 1..470: note = U/M: U (0.21:0.85) in Prostate Epithelium
  misc_feature 1..470: note = source = chr17:1338500-1338969; Gene: CRK (intron)
  source 1..470: mol_type = genomic DNA
cgtgccaccatgcccagctaattttttgtagagatggtgttttgccatgttgcctaggccggtctccaactcctgagctcaagtgatctgcccacctcggcctcccaaggtgctgggattacaggtatgagccacacgcccagcctttgttccatgttttcatacttacttcaacccagtgctaataaagtctgtaataaatgtcaagagttacatctagtgactcagtaaggccagataaaaataaaaaaaagcagagaggaaaaaaaaaaaagaaaataaaaaggagtaagatccatcatacacacagcaccatgccagatgttaccgtcatctgaactcacaggaagacctgagggtagaaatctattttcctccaaacagggaatgggaacaagaggcagtgataactctgacaacatacattccatttctcattcaagccaggactgcaggtgcatgccaccacg

SEQ ID NO: 2423 - DNA, 52 bp, Homo sapiens
  misc_feature 1..52: note = U/M: U (0.25:0.88) in Prostate Epithelium
  misc_feature 1..52: note = source = chr15:53833154-53833205; Gene: WDR72 (intron)
  source 1..52: mol_type = genomic DNA
cgagattgtatcccgcacctggctcggagggtcctacgcccacggagtctcg

SEQ ID NO: 2424 - DNA, 131 bp, Homo sapiens
  misc_feature 1..131: note = U/M: U (0.27:0.9) in Prostate Epithelium
  misc_feature 1..131: note = source = chr17:53940464-53940594; Gene: PCTP (Intergenic)
  source 1..131: mol_type = genomic DNA
cggagtgatgtctctgcaggccaaggaacgtgaagcattgccggttaccactagaaactaggagagaggtatggagcagattctccgatttcaccaatttttcagccaaaacactggaaaataactaagcg

SEQ ID NO: 2425 - DNA, 137 bp, Homo sapiens
  misc_feature 1..137: note = U/M: U (0.25:0.88) in Prostate Epithelium
  misc_feature 1..137: note = source = chr10:12316772-12316908; Gene: CAMK1D (Intergenic)
  source 1..137: mol_type = genomic DNA
cggctaatttttgtattgttagtagagatggggtttcactctgttgcccaggctggtctcaaactcctgggttcaagtgatccacccgcctcggcctcctaaagtgctgggattatagccgtgagccactgtgcccg

SEQ ID NO: 2426 - DNA, 180 bp, Homo sapiens
  misc_feature 1..180: note = U/M: U (0.22:0.85) in Prostate Epithelium
  misc_feature 1..180: note = source = chr12:45526093-45526272; Gene: RNY5 (Intergenic)
  source 1..180: mol_type = genomic DNA
cgagatcgacgcagaaggcaggtgatttctgcatttccaactgagttacctggttcatctgattgaaactggctggacagtggtgcagcccaaggagggcgagcgaaagcagggtggggaagtgcaaggggtccgggaactccctgtcccagccaagggaagccattagggactataccg

SEQ ID NO: 2427 - DNA, 193 bp, Homo sapiens
  misc_feature 1..193: note = U/M: U (0.27:0.9) in Prostate Epithelium
  misc_feature 1..193: note = source = chr2:179303422-179303614; Gene: PRKRA (intron)
  source 1..193: mol_type = genomic DNA
cgagttggggtctcactctgtcgcctaggctggagtgcagtggcgtggatctctgctcactgcaagctccgcctcccgggttcatgccattctcctgactcagcctccggagtagcggggactacaggcgcacgccaccaggcccggctaatttttttttttgtatttttagtagagacggggtttcaccgcg

SEQ ID NO: 2428 - DNA, 255 bp, Homo sapiens
  misc_feature 1..255: note = U/M: U (0.18:0.81) in Prostate Epithelium
  misc_feature 1..255: note = source = chr22:48061604-48061858; Gene: FLJ46257 (Intergenic)
  source 1..255: mol_type = genomic DNA
cgcacttactttggtcttaagactgcaatggagcacattccatttttacgtccattcttttgttgcggtttctctccctacccaccaaaattatattccttgatctttgaatgtacaaaaatagctgtcttctgctctgatatctgaatgttttcagttgagaaaaaacattttttgaagattttttaggaacggttttttgaataatttttgggagaaggctgaggctagctagaatgtttattttcctttacg

SEQ ID NO: 2429 - DNA, 336 bp, Homo sapiens
  misc_feature 1..336: note = U/M: U (0.26:0.89) in Prostate Epithelium
  misc_feature 1..336: note = source = chr7:105845720-105846055; Gene: NAMPT (Intergenic)
  source 1..336: mol_type = genomic DNA
cggcacgctctcataggtgccctgcagtgggtgagggagaggagtgagtagcaggttcaggcttggggaagtatggtgatgagaacccacactgcaggagcttaaagttctctaaaccagctcttagaattttgaagttgcatccagtataaatgaaaggcttgaatgcttacttacgtgttggatcagtgtaataaataaaatgatcaaatggcagggaatagactaacctcgcagtctcttcccatgaacagtatttgtgggaacaaagccatttttggagagcagagaaaataatttattggtagaggtttgggacattgtcacaagggaccg

SEQ ID NO: 2430 - DNA, 350 bp, Homo sapiens
  misc_feature 1..350: note = U/M: U (0.27:0.9) in Prostate Epithelium
  misc_feature 1..350: note = source = chr6:62750149-62750498; Gene: KHDRBS2 (intron)
  source 1..350: mol_type = genomic DNA
cgcatgcacgcacacgcacacacacacccgtctagaaatgatcaatctgcgcttatcgccattagaaggcagcagaaatgcaaaaagagaattttacatataaagtagtaataatgtgttccagttatttattgttgcataactaaccatgatacatttagtggtctaaaataatgattttaatattattatcatatacatggtttctgtgggtcagaaatttaggtagtgtaccatgaatacagcttgcatctctgctccaggattttttgggccatagataggaagacttgagtagctgatcactcaaatggctaaggactggaataatttggtgaattctttgctcg

SEQ ID NO: 2431 - DNA, 186 bp, Homo sapiens
  misc_feature 1..186: note = U/M: U (0.24:0.86) in Prostate Epithelium
  misc_feature 1..186: note = source = chr8:113513406-113513591; Gene: CSMD3 (intron)
  source 1..186: mol_type = genomic DNA
cgccaaatgacaaaccctgggcatttacctcagacaacatagatatatttttgtaatatagagtaataattcagtggcaatatacaccatagttaaaactcgggaccatagttaaaacaattaataataattgaatgaactcgggaggcggaggttgcagtgagctgagatcaccgctgcactccg

SEQ ID NO: 2432 - DNA, 189 bp, Homo sapiens
  misc_feature 1..189: note = U/M: U (0.27:0.89) in Prostate Epithelium
  misc_feature 1..189: note = source = chr1:6977718-6977906; Gene: CAMTA1 (intron)
  source 1..189: mol_type = genomic DNA
cgccctgagacagccaggtgcggctttgcagtaggatttatgggcttgaaattcagagccaaggatagcccaggaaatacagatttgggagtagagaggaagacccacaggagagggcagagtggggtgggggagggggccccgagaaagacgcagcaaggaggggaagggcagaagcaaaacccatcg

SEQ ID NO: 2433 - DNA, 307 bp, Homo sapiens
  misc_feature 1..307: note = U/M: U (0.24:0.86) in Prostate Epithelium
  misc_feature 1..307: note = source = chr1:244882534-244882840; Gene: DESI2 (Intergenic)
  source 1..307: mol_type = genomic DNA
cgggcagatcacttgaagtcagaagttcaagaccagcctggccaacatggtgaaaccccatctccacgagaaatacaaaaaaattagccacgtgtggttgcggggcacctaaaatcccagctacacagtaggctgaggcaggagaactgcttgaacccaagaggcgagattgcaccacttcactccagcctgtgtgacagagcaagactccatctcaaaaaaaaaaaaaattcatgtgcagattgttgtgtgaacttaagttttcatctcatttgggtaaataccaaggagcatgattgatggatcg

SEQ ID NO: 2434 - DNA, 443 bp, Homo sapiens
  misc_feature 1..443: note = U/M: U (0.22:0.84) in Prostate Epithelium
  misc_feature 1..443: note = source = chr21:31710901-31711343; Gene: KRTAP27-1,KRTAP27-1 (promoter-TSS,Intergenic)
  source 1..443: mol_type = genomic DNA
cgcattaggacaccgttcttagcatagtttcatactcatggcacagagccaaccagcacaatttctataacatattctataatatatttggctcagctaatgacaataaaatagaagtatagtcttagtgcactaactagactccctttctaaggtctgaagaagcccaagaacattcagcaattctcagtaattcttatgcaaacacttccttgaaagactgaggatattataaatttaaaagggcacatctgaatactttcagctttataggctgcacactcatcttgtatacaatacctttgtaacacacgcaagtcatttataattttgaataaccacacttgtatgtttaaagatctcagtgtgccctccacatgaaccctacagccacccatttaattcttacgcatatatgtatttattattgcacggaggcttcg

SEQ ID NO: 2435 - DNA, 351 bp, Homo sapiens
  misc_feature 1..351: note = U/M: U (0.21:0.82) in Prostate Epithelium
  misc_feature 1..351: note = source = chr7:156194279-156194629; Gene: LOC285889 (Intergenic)
  source 1..351: mol_type = genomic DNA
cgaaccctggatatccttttgggaagagggagaggagaaatcatattaagtcagtaaatgagacaatgttctggtgtgcgctgcgggttccacagtaaaaaccaatgatcacatagtatcaaagtgtatagcaaagatgagttggccaggaacatctaataattcactaaatccccaggaagttggaccagagacaaggccagcagctccccgtgtcccgccagccgctctgctgcgccacactgcctggtccctcctcatggtgacagtcacagcacatggggaaaaaaaagtgtgtacttttggagtgggtggaaggaggaccacaaattacaacagtgcaagacgtcg

SEQ ID NO: 2436 - DNA, 56 bp, Homo sapiens
  misc_feature 1..56: note = U/M: U (0.31:0.91) in Prostate Epithelium
  misc_feature 1..56: note = source = chr10:45084800-45084855; Gene: CXCL12 (Intergenic)
  source 1..56: mol_type = genomic DNA
cgtggtgctgcgcgctccatccacggccgcacccccagcactgcgcacttgcctcg

SEQ ID NO: 2437 - DNA, 176 bp, Homo sapiens
  misc_feature 1..176: note = U/M: U (0.25:0.85) in Prostate Epithelium
  misc_feature 1..176: note = source = chr7:84317157-84317332; Gene: SEMA3D (Intergenic)
  source 1..176: mol_type = genomic DNA
cgacagagctaggcatcaccatgtgtttaaaatgcatcacattttttgaggattatgaatgttgtcaatgttgtaattctataacatacttaaaataaatatgtgaaatgcatttcattaggcacacaacatatgcagccgacggaaaataaagattgtttccgtatggggcttcg

SEQ ID NO: 2438 - DNA, 294 bp, Homo sapiens
  misc_feature 1..294: note = U/M: U (0.25:0.85) in Prostate Epithelium
  misc_feature 1..294: note = source = chr14:86296858-86297151; Gene: FLRT2 (Intergenic)
  source 1..294: mol_type = genomic DNA
cgtggcactcggcagtctgaggcaggagaataaggcagggaggttgcagtgagccgagatggcagcagtacagtccagcttctgctcggcatcagagggagaccgtggaaagagagggagagggagaccgtggggagacggagagggagagggagaccgtgggaagatggagagggagagggagagggagagctctgagctgttgaagtagacagagctggttgtatgcaatgcatctgcttttatgtcctgagagtgaagagtgagcgatctataacactaattgtcccttcg

SEQ ID NO: 2439 - DNA, 342 bp, Homo sapiens
  misc_feature 1..342: note = U/M: U (0.24:0.84) in Prostate Epithelium
  misc_feature 1..342: note = source = chr16:46964865-46965206; Gene: GPT2,GPT2 (exon,TTS)
  source 1..342: mol_type = genomic DNA
cggtgcctttcctatccaggcaccacctgagaaagttgtcatttgaggtcgcacttggaagttacatctgtgaagtttctgtcattcgtccagatctgtgtgtgtagcatgtgctgaggaagcacgtgctgggctgtgcctcagacagtgcatcaccgggcacccagaggcttgcctggctattcctgttctggtgtgtgtggagtgttggggaggaacagatgcagatcaacctgtggctgttttcccgtctaggttctcacaggtatctcctgacagaggtacttaacaatggctctgctggaaatttctataaataaaatgtccaaaatggtgactgcg

SEQ ID NO: 2440 - DNA, 409 bp, Homo sapiens
  misc_feature 1..409: note = U/M: U (0.26:0.86) in Prostate Epithelium
  misc_feature 1..409: note = source = chr5:125574024-125574432; Gene: GRAMD3 (Intergenic)
  source 1..409: mol_type = genomic DNA
cgatcagattttccctgcaacaaacataatctggacttggatgaaagcttcaatggttcttaaacctttcagtgcctattccaagtcatagagagttcagcggcaggatggctaaggtaaaggtagggggaaactcagtatttgcctctagtcagctactttattcttctcagtaccaaccagggcaaggcgtccagggctagggttatccatcccacatctggatgttctccaaatctcccaaaggcactctactttcaccccttgttccctacctctcctctttcttgacttgccacaacctttcatactcccaccttccaacgctatcactgagagaatctaccccactctcctttttctcaagatcagcccctcctctttgggtaagtgttctctcccttcttcg

SEQ ID NO: 2441 - DNA, 499 bp, Homo sapiens
  misc_feature 1..499: note = U/M: U (0.26:0.86) in Prostate Epithelium
  misc_feature 1..499: note = source = chr1:65091636-65092134; Gene: CACHD1 (intron)
  source 1..499: mol_type = genomic DNA
cgagatgtttgctagagtcgagtctccattatgtttcatcagtccccacataggcataaccctgtttggctctgggcataagtttctgggagtgggcaggttgacagaggcatcaccatggggcacttttatggaatagtcacatgttgttccagtattttcttctatgtaagttattgttaacaattagcctaaaatgaggtttattgaccaatgtctttatctttgcctcatgctttgaaattgttccagtgacaggcggagccagcactaaagtcatacctgagtatgtacatgctagaaataaagacgaaactggcattttaacgccaaccacaaattttaatggctgtcacatgtgttaatttttggaaagcaatcaaaatatttgccatagatcaaaaagatagtcctcagataacatattgctactggcagaaagacctctgcaaagtaaatgaaacattaaaaatggtgatcctcactcggatggaaaacg

SEQ ID NO: 2442 - DNA, 159 bp, Homo sapiens
  misc_feature 1..159: note = U/M: U (0.25:0.84) in Prostate Epithelium
  misc_feature 1..159: note = source = chr10:118060976-118061134; Gene: CCDC172 (Intergenic)
  source 1..159: mol_type = genomic DNA
cgcttgaatacgggaggtgggggttgcagtgacctgagatcagcgccagtgcattccagcctgggtgacaaagtgaggctccatctcaaaaaaaaaaaaaaatgtacacacacacacacacacacacacacatcgaaatcaaaatcaaaatgaagagcg

SEQ ID NO: 2443 - DNA, 201 bp, Homo sapiens
  misc_feature 1..201: note = U/M: U (0.29:0.88) in Prostate Epithelium
  misc_feature 1..201: note = source = chr5:32473153-32473353; Gene: ZFR (Intergenic)
  source 1..201: mol_type = genomic DNA
cgtggtgacgcacatctgtaatcccagctgcctgggagactgaggtaggaggattgtttaaacctgggaggcagaggttgcagtgagccaagatcacaccacggcagtccagcctgggtaacagagtgacactctgtctcataaaataaaataaaaacaaaacaaaactcaaattccttacgtggcggacaggcccctacg

SEQ ID NO: 2444 - DNA, 259 bp, Homo sapiens
  misc_feature 1..259: note = U/M: U (0.24:0.83) in Prostate Epithelium
  misc_feature 1..259: note = source = chr15:98646681-98646939; Gene: ARRDC4 (Intergenic)
  source 1..259: mol_type = genomic DNA
cgtggtctagctagctcaggagcaaagctgcagaccttcacagtgagtgttatagctcttaaggcaccacatctggagttgttcgttcctcccggtggattcgtggtctcacaggcttcaggagtgaacctacacacctttgtggtaagtgttacagctcataaacgcagtcagaacccaaaagagcgagcagcaacaggttttattataaacagcaaaagaacaaagctttcttgatctcaaaagtgaccctagcgcg

SEQ ID NO: 2445 - DNA, 247 bp, Homo sapiens
  misc_feature 1..247: note = U/M: U (0.21:0.79) in Prostate Epithelium
  misc_feature 1..247: note = source = chr7:140001344-140001590; Gene: SLC37A3 (Intergenic)
  source 1..247: mol_type = genomic DNA
cgtatttttttgtgtctggctgctttcgtttgtgagattctaaaatcctcactaggaaccccagccttccactgtgtacttacacattttatactgctctctcatgtttcctgagtcttctatccccagaaaactgtaaagttaaggaaagcccattttatccaaataaatatttagcgagcacccacactgtgccaggattgtggggggctgaaccccaacatgtgttgccaaatcgagagttccg

SEQ ID NO: 2446 - DNA, 298 bp, Homo sapiens
  misc_feature 1..298: note = U/M: U (0.24:0.82) in Prostate Epithelium
  misc_feature 1..298: note = source = chr16:68439870-68440167; Gene: SMPD3 (intron)
  source 1..298: mol_type = genomic DNA
cggtttatctcacttgatcatcagccttgtcccctctgaggcacccttagccctccctgcttttgcccttggtcaacagcagggcgggcagttgaacccccaatggtctgatgctacagcctatgcccttaaccagtctgccagtctttcccgtggggctgtttgatgattcattttattctatacccagaaacaatgaggcgtaaaccagaataaaagggggctatcatgatatcactatttgccatttatctaaattagacaataaatcacgaagctacttgaaataatatacacg

SEQ ID NO: 2447 - DNA, 208 bp, Homo sapiens
  misc_feature 1..208: note = U/M: U (0.28:0.85) in Prostate Epithelium
  misc_feature 1..208: note = source = chr10:45012731-45012938; Gene: CXCL12 (Intergenic)
  source 1..208: mol_type = genomic DNA
cggagaatcagccgtcagcggcagctcactgggtactgtgattgattctgtctcccccgtccccatctgttcttaagtgctctgggcaccctattaccctgttaccccatgtccccatccccttcatactcccttcccaaggcagtggagtgaccaagtgagtccttcaggcagtggaacgactgagtgagaacacagctggcctccg

SEQ ID NO: 2448 - DNA, 380 bp, Homo sapiens
  misc_feature 1..380: note = U/M: U (0.29:0.86) in Prostate Epithelium
  misc_feature 1..380: note = source = chr1:15405269-15405648; Gene: KAZN (intron)
  source 1..380: mol_type = genomic DNA
cgtttcatgaggcatgattggaaaagccaaaactggtgccagtgttccccttgccattctcctataggtgtctaagttgcaagaattccccccaccaaggacctcatcaaagctgtcttcgttctgaaggaaattaaatcaatgctgctcgtaaatgtgtttgctgttcctaaactggcctttgtgcaatgcatagtgaaagccgctcaccactggcttaagaaactcccgggaggcagttgcaaagctttttgagggagatcggaggtgggacagtttgcatgaatcatgcaagatagtcacatagaagacagcacctccaatcacctcaccctggtctagaggcttggcatctggctcagtggtgagttcctgtcccg

SEQ ID NO: 2449 - DNA, 500 bp, Homo sapiens
  misc_feature 1..500: note = U/M: U (0.29:0.86) in Prostate Epithelium
  misc_feature 1..500: note = source = chr7:15751920-15752419; Gene: MEOX2 (Intergenic)
  source 1..500: mol_type = genomic DNA
cgatgatcttgagcagtaagatataaataactcccacatgcttagcattccaataatggaacaataggcataaattggacagaatttgcccaatcttggttatcacctctaaaaaatgatttaatagaaaataagtttgaaattagtgtgaaagcttcagataatatgtgaattgcaagatctgctttattcctttcccccaatcattgctaaaagttaagaattagtcctacatgtaatggtatgaaattcattcatgttctcatctgtaaagtaaaagttaagcattataattgactttaatagttattatggtgacgactaataaaaattcctgcaagtattgacaagccttcaaggatatagcagttacgagttgctagctaaaaagtactttgagacctgggcaggaaggtgctttatggctactttatttttttaatgtaatttgatttacttcattccttaagagaaaacattttattaaggcttttcgttcg

SEQ ID NO: 2450 - DNA, 159 bp, Homo sapiens
  misc_feature 1..159: note = U/M: U (0.32:0.88) in Prostate Epithelium
  misc_feature 1..159: note = source = chr10:96379389-96379547; Gene: CYP2C18 (Intergenic)
  source 1..159: mol_type = genomic DNA
cggtgtgtgatgttcccctccccgtgtccatgtgttctcattgttcaactcccacttacgagtgagaacatgcagtgtttggttttctattgtgttaatttgctgaaaatgatggtttccagcttcatccatgtccctgcgagggacatgaactcttcg

SEQ ID NO: 2451 - DNA, 167 bp, Homo sapiens
  misc_feature 1..167: note = U/M: U (0.34:0.9) in Prostate Epithelium
  misc_feature 1..167: note = source = chr2:123109569-123109735; Gene: TSN (Intergenic)
  source 1..167: mol_type = genomic DNA
cgccgtttttcaagccggtctgaaaagcgcaatattcgggtgggagtgacccgattttccaggtgcgtccatcatccctttctttgactcggaaagggaactccctgaccccttgtgcttcccaagtgaggcaatgcctcgccctgcttcggctggcacatggtgcg

SEQ ID NO: 2452 - DNA, 220 bp, Homo sapiens
  misc_feature 1..220: note = U/M: U (0.29:0.85) in Prostate Epithelium
  misc_feature 1..220: note = source = chr2:164456487-164456706; Gene: FIGN (Intergenic)
  source 1..220: mol_type = genomic DNA
cggaggtcaggaattgtaataagcaggtatgcaaagagactaaaaaaagtcttttaaatacgtttgaaaaaatagagtacgaacatttaattcttggataatttccaattactacaatttaatagcactcaattgaaaataatatggtcttacgatcagtaaaaatctatgttgtaaaaccatattaatagggtgagacagaaatgatgagacttttacg

SEQ ID NO: 2453 - DNA, 260 bp, Homo sapiens
  misc_feature 1..260: note = U/M: U (0.29:0.84) in Prostate Epithelium
  misc_feature 1..260: note = source = chr7:15687776-15688035; Gene: MEOX2 (intron)
  source 1..260: mol_type = genomic DNA
cgtgttttacatttttaagtttttaagatttaatgtaatgtttgcttctctgaattattatgaacagcatgaataaatatttacagataaaacacagctatttaaagaagtaaaactgaatgagcattatttaaatgaataaaaagcaattttaaccctacaatcgtaataaacgagattgctttttccttaaaattgtaaccaactatacataaaaaataattttatgccggtgcggatgaaggaataaaaagaaagcg

SEQ ID NO: 2454 - DNA, 316 bp, Homo sapiens
  misc_feature 1..316: note = U/M: U (0.32:0.87) in Prostate Epithelium
  misc_feature 1..316: note = source = chr3:128049119-128049434; Gene: EEFSEC (intron)
  source 1..316: mol_type = genomic DNA
cgccacagatggtcaggggcctttgctgggccacatggtagaaagccagatcattcccttcctctcagagtgtgccccatgtggcaggcactgtgctgaggatcggtggtgagcaaaataaacccagcctgtctacctggggctgtctgcccgatccaggaaacaacagagcgcacaggcacacactggacagatgctaacaggttacggggcttaaggagcgtcctggtctgcctggagactcagaacaggttttgtgagctggtcgggggacccctgaggtctcagtgagtgggattcagctgggtacagggcg

SEQ ID NO: 2455 - DNA, 324 bp, Homo sapiens
  misc_feature 1..324: note = U/M: U (0.34:0.89) in Prostate Epithelium
  misc_feature 1..324: note = source = chr8:2823032-2823355; Gene: CSMD1 (intron)
  source 1..324: mol_type = genomic DNA
cgtgaccgtcactgaaccccgacatctccagttcctggtttgtgatcctaagccttttcctctacctcgctatgagttagtttttccatctgtaaaactgagattaaagtattataaaaataaagtgacttaatagttgcaaattgctgttcaagaattcctagcccctagaagggctacataaatgcttgcaaaattaaacaaagcataattcaataaagacttctatacacatctgtaaaatccaaagagtcaccaaacaaacctttgcagacaggtttgctcggattccacctgccgtctttggtacagcgaatagtggcg

SEQ ID NO: 2456 - DNA, 92 bp, Homo sapiens
  misc_feature 1..92: note = U/M: U (0.32:0.86) in Prostate Epithelium
  misc_feature 1..92: note = source = chr17:46267675-46267766; Gene: SKAP1 (intron)
  source 1..92: mol_type = genomic DNA
cgtgttagccaggatggtctcgatctcctgacctcgtgatccgtccacgttggcctcccaaagtgctgggattacaggcgtgagccactgcg

SEQ ID NO: 2457 - DNA, 195 bp, Homo sapiens
  misc_feature 1..195: note = U/M: U (0.32:0.86) in Prostate Epithelium
  misc_feature 1..195: note = source = chr2:30566703-30566897; Gene: LCLAT1 (Intergenic)
  source 1..195: mol_type = genomic DNA
cggcttctttggatgtgactttgtcctttctcacggggatcagcgctcagatctcttttcagttggcttcttttttctttcaaataaaaaggagtacacagtgaagccatcaaatccaaggatgacatagctcttcgggacaatgaactgtcatacagatcaaagaaaactacaagaaactttcacgaagctgcg

SEQ ID NO: 2458 - DNA, 347 bp, Homo sapiens
  misc_feature 1..347: note = U/M: U (0.28:0.82) in Prostate Epithelium
  misc_feature 1..347: note = source = chr5:18701992-18702338; Gene: CDH18 (Intergenic)
  source 1..347: mol_type = genomic DNA
cggtaacattttaatattcatatttattctaattaacatctgtgttataaagacacatagtttgggaagtatataatgtgtttcagtacaaacatccaattttaatactaacctcacattttaaatgtgtgtgtttgttgggggtagagattacaatacattgttataaacataagtattaatgaaagccaacaagtttgagttaggatatttcagtgagaaaaaatataagtaaataaaacacacaaaaaaatgcaaaacacactgatgcccatgcctctgctttgtcagacgtggatgaaatccaaaacacatacctcgttaaacatgaaatagattccgctgcg

SEQ ID NO: 2459 - DNA, 446 bp, Homo sapiens
  misc_feature 1..446: note = U/M: U (0.35:0.89) in Prostate Epithelium
  misc_feature 1..446: note = source = chr3:160409872-160410317; Gene: ARL14 (Intergenic)
  source 1..446: mol_type = genomic DNA
cgcaagataatacttttgtgttgttttagccattaattttgtggtaatttgttaaagtagcaacagcatttttaatgagccttgaaggatacaatgagccatcattcattggataaatatttaagtccttatacaggcatgctttattttgccgtgccttgttttattataccccgcaggtattttcttttcataaaatgagggtttgtggcaacccggcatccagcaagcctatcagcaccatttttccaatagcactttctcacttcatgtctatgtgaccctttttggtaattctcacaatatttcaaatgttttcattattattatatctgttatggtgatctatgattagtgatatttgatattgctactgtaactgttttgtggcaccttgaaccctgtccatataagacggtaatcaataaatgtgtgtgttctttccg

SEQ ID NO: 2460 - DNA, 463 bp, Homo sapiens
  misc_feature 1..463: note = U/M: U (0.32:0.86) in Prostate Epithelium
  misc_feature 1..463: note = source = chr15:69270069-69270531; Gene: NOX5 (intron)
  source 1..463: mol_type = genomic DNA
cgatatttctcctatttgcttttgaaagaagagaaatatggctctgttccacctggctctcaggcagccagatctaatggttatctctcttgttccctgaacatcactattatcctgttcttttttcaaggcgcccagatttcatattgtttaaacaatttgtgcagttaatgcaatcatcacagggtgctgaggcgacatacatcctcagcttatgaagatgatgagattaagagattaaagtaaagacaggcataggaaatcacaagaatattgattggggaagtgataaatgtccattaaatcttcacaatttatgttcagagattgcagtaaagataggtgtaagaaattataaaagtattagtttggggaactaataaatgtccatgaaatcttcacaatttatgttcttctgccacggcttcagccagtccctccattcagggtccctgatgtcccg

SEQ ID NO: 2461 - DNA, 181 bp, Homo sapiens
  misc_feature 1..181: note = U/M: U (0.34:0.87) in Prostate Epithelium
  misc_feature 1..181: note = source = chr8:139409602-139409782; Gene: FAM135B (intron)
  source 1..181: mol_type = genomic DNA
cgaccgcttaaggggtatgaggtttccttttagagtgataaaaatgtcttaaaagtacacagaggtgatggttatacaacatcgtgaatgcgttaaatgccaatacattgtacactttaaatagttgatttcatattatgtaaatttcttctcagttaaatttcatctctaatagcatacg

SEQ ID NO: 2462 - DNA, 229 bp, Homo sapiens
  misc_feature 1..229: note = U/M: U (0.29:0.82) in Prostate Epithelium
  misc_feature 1..229: note = source = chr6:259430-259658; Gene: DUSP22 (Intergenic)
  source 1..229: mol_type = genomic DNA
cggttatttattgagcacttactatatgctattgtagtagctaggcatgcagcactaaacaaaatagaatttacattctggtggaaagaaactgcggtgaccaagtaattaatctttggagagaatttcacgtatgtgtgcatttgccttttatgtgcttccacataaatcaagcttgtccaacccatggcccatgggccacacgcagtccaggatggctttgaatgcg

SEQ ID NO: 2463 - DNA, 248 bp, Homo sapiens
  misc_feature 1..248: note = U/M: U (0.36:0.89) in Prostate Epithelium
  misc_feature 1..248: note = source = chr9:141028240-141028487; Gene: TUBBP5 (Intergenic)
  source 1..248: mol_type = genomic DNA
cggtgcaggtcctcacttgctgagcgccggtccccttttcttcctctatactttgtctttgtgtcttatttccttttctcagtctcttgtctccatcttgcaagaaataccgacaggtatggaggggcaggccccttcattacttgggagactgaggcaggaggatcacttgaatccgggaggcggaggttgcagtgagccaaaaccatgccactggactccagcctgggtgatagagtgagactccg

SEQ ID NO: 2464 - DNA, 273 bp, Homo sapiens
  misc_feature 1..273: note = U/M: U (0.35:0.88) in Prostate Epithelium
  misc_feature 1..273: note = source = chr2:79298718-79298990; Gene: REG1B (Intergenic)
  source 1..273: mol_type = genomic DNA
cggctactatgtattgaagtgaaaatcaaacacaagcacaagttttgctctagggtcatttagttatcacaactgtctttctgagatctctctagttttcttcacattcaatccattcagctctctgaagccttactggattcggtaaaaacataccgatgaatcatagccatagctgcgagccccacaggaagatcttaaaaagcaaataaatatgaggcactacgcacccaatccttagcacacaattaaatttgacttttatatttaccg

SEQ ID NO: 2465 - DNA, 275 bp, Homo sapiens
  misc_feature 1..275: note = U/M: U (0.3:0.83) in Prostate Epithelium
  misc_feature 1..275: note = source = chr2:121296510-121296784; Gene: LOC84931 (Intergenic)
  source 1..275: mol_type = genomic DNA
cgtttgtccactgggtcgcgttcatgggcagagcacaccgcacttctgggctggccatgcacaaaggctgagggctgcaacattggagaggcaccaagggtggtcacaggcaaagggccgtcacctctgcacaaagctgctgcaaacccacacggagccagtctcccttgaagtggtgcccaagaggtgtctgaaacatcctataaaatcaaaagccctgcaccccggcacacagtgagctcgagggcacagattctaccataatcagctcttcg

SEQ ID NO: 2466 - DNA, 428 bp, Homo sapiens
  misc_feature 1..428: note = U/M: U (0.31:0.84) in Prostate Epithelium
  misc_feature 1..428: note = source = chr14:101772273-101772700; Gene: MEG9 (Intergenic)
  source 1..428: mol_type = genomic DNA
cggaagacacaaggtccgaataagagaaggagaaaaactggtattaaaggactacgaattgggaggacacaggacatccaattagagagtgcccaaggaggttcagcatagccctgccagcaaagattattgatttactttaagagggagttaagagtggtggtttggggatagcaccaggagatatcagctgtgatggcctggagaaacagtgtaaaccggcagtgtaaacaagagcagggcatttatgagtagttgagaacagtgaataagagtatgactaggcagaagatagtacagataacaagtttttggggcacagtccaagttgggctgctgtctggaataagactggggcctaataaaaaggagtgtctatataggagctcaaatgggctgtaccctgtagcattccaaggacacgcccg

SEQ ID NO: 2467 - DNA, 96 bp, Homo sapiens
  misc_feature 1..96: note = U/M: U (0.35:0.87) in Prostate Epithelium
  misc_feature 1..96: note = source = chr5:147100992-147101087; Gene: JAKMIP2 (intron)
  source 1..96: mol_type = genomic DNA
cgggcgcccctcccccagcctcgctgccaccttgcagtttgatctcagactgctgtgctagcaatcagcgagactccgtgggcgtaggaccctccg

SEQ ID NO: 2468 - DNA, 359 bp, Homo sapiens
  misc_feature 1..359: note = U/M: U (0.34:0.86) in Prostate Epithelium
  misc_feature 1..359: note = source = chr8:40488928-40489286; Gene: ZMAT4 (intron)
  source 1..359: mol_type = genomic DNA
cggcctcccaaggtgctgggattacaaacgtgagccaccgcaccaggccagaattatctactttgatgccattattttacagagtagacactaaggcttagaaaagctgagcaacttgttaaattctactcagttctaatgcgagatatatgcagttccctgttctggcctgttcctgcctattgttccatgttttaatagagggatcaggagatgggggagatagaagttaaatcacattctttaatactttttgacacagaagcaacataatggtaccatgtgatatccactctcattttgcaaaacaggaaattgagaaagagaaatggagttaggcatttagagagagttttacg

SEQ ID NO: 2469 - DNA, 61 bp, Homo sapiens
  misc_feature 1..61: note = U/M: U (0.25:0.76) in Prostate Epithelium
  misc_feature 1..61: note = source = chr16:2879393-2879453; Gene: ZG16B,ZG16B (Intergenic,promoter-TSS)
  source 1..61: mol_type = genomic DNA
cgaacacgagcttttctcagctggcgtctgagggtgatggcgttctgcccacaggcatccg

SEQ ID NO: 2470 - DNA, 326 bp, Homo sapiens
  misc_feature 1..326: note = U/M: U (0.32:0.82) in Prostate Epithelium
  misc_feature 1..326: note = source = chr17:27313786-27314111; Gene: SEZ6 (intron)
  source 1..326: mol_type = genomic DNA
cgggggctgcccactcaagcctctgtctgctcatctgtggagtgaagacatactgggtttggggagagctcatctatggacagacatatactgtcacccaccgcagcctctggaagggcaggtggcactgtctgtcactctggcagcccctgaagaggtgccaggcatttcccaagcctctggcccctctgaggtgggcagtcacgggaaccaaagttctgggacgagttcaggcctgatccccgcctcatggcagcaccaactgtcagcttcgggggagggcatgacagcgtgtgggtacaagggggagcctgagggacagggcg

SEQ ID NO: 2471 - DNA, 486 bp, Homo sapiens
  misc_feature 1..486: note = U/M: U (0.33:0.83) in Prostate Epithelium
  misc_feature 1..486: note = source = chr5:107758914-107759399; Gene: FBXL17 (Intergenic)
  source 1..486: mol_type = genomic DNA
cgtgatgtatatgtgccacattttctttatccagtctatcattagtgggcatttgggttggttccaagtctttactattgtaaatagtgctgcaataaacatatgtgtgcatgtgtctttacagtacaatgatttatattcctttgtatatttatatattactgggtatatacccagtaatgagattgctgggtcaaatggtatttctggttctagatctttgaggaattgccatactgtcttccacaatgtttgaactaatttacactcccaatagcagtgtaaaagcattgctgtttctccacagcctcgcaagcatctattgtttcttgactttttaataatcgccattctgactggtgtgagatggtatcttattgtggttttgatttgcatttctctgatgatcagtgatatggagcttttcttcatgtttgttggccacgtaaatgtcttcttttgagatgtgtctgttcatatccttcg

SEQ ID NO: 2472 - DNA, 238 bp, Homo sapiens
  misc_feature 1..238: note = U/M: U (0.35:0.83) in Prostate Epithelium
  misc_feature 1..238: note = source = chr2:177287863-177288100; Gene: MTX2 (Intergenic)
  source 1..238: mol_type = genomic DNA
cgtggacttaacatggctcttggatttttttgtttttggtctgggaggagtctgaaatgcgacagttgcctggtaatgagtatgagggcactaggttgaggaaggaagaggacattttctctttctttccccccgcttttttttttttttttgagacagagtctcgctctgtcacccaggctggagtgcagtggagtgatctcggctcactgcaagctctgcctcgtggggtcaagcg

SEQ ID NO: 2473 - DNA, 195 bp, Homo sapiens
  misc_feature 1..195: note = U/M: U (0.33:0.8) in Prostate Epithelium
  misc_feature 1..195: note = source = chrX:32439826-32440020; Gene: DMD (intron)
  source 1..195: mol_type = genomic DNA
cgtctatagatgaaacccatcgtgctggaattatttggcatgggagaagaataaacaggtttccggtgtgacgctttaacttgtaggattgttaaacttgtcatacctcagatatagctgaagattaagatgtggacaatgcctacagccatgcaggactgcttagcatcttccccacaggaagtatctgttccg

SEQ ID NO: 2474 - DNA, 122 bp, Homo sapiens
  misc_feature 1..122: note = U/M: U (0.38:0.81) in Prostate Epithelium
  misc_feature 1..122: note = source = chr4:8994124-8994245; Gene: LOC650293 (Intergenic)
  source 1..122: mol_type = genomic DNA
cggtgagtgttacagctcataaaggcagtgcggacccaaacagtgagcagcaacaagatttattgcaaagagcgaaagaacaaagcttccacagtgtggaaggggaccccagcgggttgccg

SEQ ID NO: 2475 - DNA, 192 bp, Homo sapiens
  misc_feature 1..192: note = U/M: U (0.33:0.76) in Prostate Epithelium
  misc_feature 1..192: note = source = chr19:53802404-53802595; Gene: BIRC8 (Intergenic)
  source 1..192: mol_type = genomic DNA
cgagggctctgagcagaagcagagttttcaggaggacgggatgtgggaggcgttctgaacctggggctcttctgtcccttgtcccctctcatgaaggtgacactgccgggcctccctggaacatgaatgggtggtccaggctggaggacggggcagccctgggctgggcccaggaaaggtgagctgggtgcg

SEQ ID NO: 2476 - DNA, 229 bp, Homo sapiens
  misc_feature 1..229: note = U/M: U (0.35:0.77) in Prostate Epithelium
  misc_feature 1..229: note = source = chr8:78853164-78853392; Gene: PKIA (Intergenic)
  source 1..229: mol_type = genomic DNA
cggcagcgaggctgggggaggggcgcccgccattgcccaggcttgattaggtaaacaaagcagccaggaagctccaactgggtggagcccaccacagctcaagaaggcctgcctgcctctgtaggctccacctctgggggcagggtacagacaaacaaaaagacaacagtaacttctgcagacttaaatgtccctgtctgacagctttgaagagagcagtggttctccg

SEQ ID NO: 2477 - DNA, 76 bp, Homo sapiens
  misc_feature 1..76: note = U/M: U (0.28:0.88) in Prostate Epithelium
  misc_feature 1..76: note = source = chr2:125165678-125165753; Gene: CNTNAP5 (intron)
  source 1..76: mol_type = genomic DNA
cgagtcaaagaaaggggtgacggaaggcacctggaaaatcgggtcactcccacccgaatactgcgcttttccgacg

SEQ ID NO: 2478 - DNA, 278 bp, Homo sapiens
  misc_feature 1..278: note = U/M: U (0.3:0.89) in Prostate Epithelium
  misc_feature 1..278: note = source = chr2:70456017-70456294; Gene: TIA1 (intron)
  source 1..278: mol_type = genomic DNA
cggacaagttatacttggtcaacactgagaagggagaaaagtattgctagagagacaaatagaaataatatctcctcccgcccccctcccccaaatatcaaacaaaaaaacttcaggtggttagtgaataccctttcaagagatttcattttatgtttaagaagatacaattaccttgtgaacgctgtgtgctgacaacggtactacctgatgacaaagattagatttgttcttaaatttattaacacaaacacattcaatcatatcttaggataacg

SEQ ID NO: 2479 - DNA, 364 bp, Homo sapiens
  misc_feature 1..364: note = U/M: U (0.26:0.84) in Prostate Epithelium
  misc_feature 1..364: note = source = chr5:134909476-134909839; Gene: CXCL14 (intron)
  source 1..364: mol_type = genomic DNA
cgtatctgaggagtgagacaggacaggctaccttcgcatggtacaggggagctaggaactggattctccctccgaggacagacataagaccccaggaaaccagagatgggaagccaccttctgattttaaggaaacagtgcccagtaagtacagggctggttcagggtgctggtggtcttaacactgctgcccgccttggttaacagtggctctgattttaaagagccaaacctgtggtgccttccagcacctgcgaaggaaggagtttatcaggtttctgggcagcagagggagtggggcaccttggagaagaaaacatgtttctggcaaggatcatcctcagcacctcatggttttatagcg

SEQ ID NO: 2480 - DNA, 232 bp, Homo sapiens
  misc_feature 1..232: note = U/M: U (0.31:0.87) in Prostate Epithelium
  misc_feature 1..232: note = source = chr8:49703308-49703539; Gene: EFCAB1 (Intergenic)
  source 1..232: mol_type = genomic DNA
cgtctttggacactctgttgcactgaacgcagtggctaggttggagttgttggttcaggatccagtttaacaagaaactgagcctataaaaaaaagacaggttttaattgttgaacgagccgctcagatgcaaaatgaacttcagggtactagcaggttcagaagtggtgtgtggctgcacagcacctgcctgcttgatgagggtctggtgtcaaggaaatagaaggattcg

SEQ ID NO: 2481 - DNA, 495 bp, Homo sapiens
  misc_feature 1..495: note = U/M: U (0.06:0.88) in Prostate Epithelium
  misc_feature 1..495: note = source = chr7:293859-294353; Gene: FAM20C (intron)
  source 1..495: mol_type = genomic DNA
cgctcagatgaagattttcctcctgaaatggagctcctgccccggtgggggctgcctcgtccgactgtgggctgccgactaatctgtatcagcacgagacaggattgcagctggtctttccttgatcgttcgttcttacaataatgacccagcgttggcagtggggtgagggggcgcgggaaggagggggcaggcaggtgatcggggcgttggaaccagaccagccgggacctgccgggtgcgtggggtgtggtgggggccaggtcggcctggcacccaccccgtttcctctccgaacctcagcttgttcagctaagaaagggcagccgggaccggccaccctcctgttcactccgctgggaagcgccctgccgaacctgccttctgatcccacggggagcctgccctgcagccaggagagacccctggaatcactcagcctggctgcataggaatgctgggactgggggagctgtgagtgaggttcggggctcc

SEQ ID NO: 2482 - DNA, 444 bp, Homo sapiens
  misc_feature 1..444: note = U/M: U (0.09:0.89) in Prostate Epithelium
  misc_feature 1..444: note = source = chr5:174920572-174921015; Gene: SFXN1 (intron)
  source 1..444: mol_type = genomic DNA
cgagaaaatagtgaagacaggcaaaagccgtagaaagcagagaagttgagatgaaaagacaactgcatggttgaaaagaagatggcataaggaagattgccaagaacgtacaaatgtaattgaaattgaaatgtttactggaggcagtggtaaaggaccaacatcagaaattacacgtaagaaaaagtacaattaccgatagagagaatgaacctgagaagcttgccggggtgaagaacagaggtcggcaaactttttccgtaaagggccagacgacaagtattttaggctttacaggccatgcattctttgtcacatattcttgtttgtttttacaaccctctaaaaccataaaagctattctgagctcacaggcatagagaaacaggccaggccgtggactggtgtttgccaatccctgatatagatggaaaagaagggtac

SEQ ID NO: 2483 - DNA, 435 bp, Homo sapiens
  misc_feature 1..435: note = U/M: U (0.08:0.86) in Prostate Epithelium
  misc_feature 1..435: note = source = chr22:32563087-32563521; Gene: C22orf42 (Intergenic)
  source 1..435: mol_type = genomic DNA
cgtgtggcccaggtgtgtagtaggccgtcccatctaggtttgtgtaagtgcactctgagatgttcccacaatgatgaagctaacagtgcatttctcataatgcatccccattgttaagtgacacaccactgtacttagaacaatgttcactaacacagcaagtaccagcatgcgtcgtgtccgtttaaaaacagctattggcttcctattactttcatggtgaggtctgttcacaaacaaaatttcaaccaatgtaaagattaaattggcttttattagtgattcataaatcaggtagcatttcatctagagatttggaaaaggcactccactgggcgtggcagcagagtcaatttttataaggtaggttgaacaggaacaagggaacgacataatagaaaaagcggggctggttggctgggtgcagtggctcac

SEQ ID NO: 2484 - DNA, 397 bp, Homo sapiens
  misc_feature 1..397: note = U/M: U (0.19:0.94) in Prostate Epithelium
  misc_feature 1..397: note = source = chr4:3403136-3403532; Gene: RGS12 (intron)
  source 1..397: mol_type = genomic DNA
cgatgttattggatgcctaggatgtgcctcgcactgtttgtcacagtgttcctttcatgtcagcatagacgcatagttattatcccagctttataggaaagttaagtaactcgtaagttacttggtgaggaggggagttctcacgctgtccctgtgaagtccgagcacggtttttactgcggttttacagcggggggagtgtcttgcccagtgaggaaggagcggagctctgagtcagatccaaacagtgtgactctggaaccacgccgtgaaccggcacactgtggactaggtaacaccaggctgaggatccacctcctagaatacagcttgccatagagcagacatcccgtcagcacctgtgaatcgtgagaaggaggcggtggcctcatttacc

SEQ ID NO: 2485 - DNA, 261 bp, Homo sapiens
  misc_feature 1..261: note = U/M: U (0.16:0.87) in Prostate Epithelium
  misc_feature 1..261: note = source = chr19:33355362-33355622; Gene: SLC7A9 (exon,intron)
  source 1..261: mol_type = genomic DNA
cgctggacggccctgagctccagcgttggacattcagtccagcctgatttacacctgtttgccatacatgtgccaagagggatactggcagggtgagggctggcacaggtagcagctgcctggcgtgcccctgcatgcttccggggctgcaacaggctcccaagtctctttacccagcgtcgcgaggaccccgcaagccgcccatatgatgaggcagggccccacagcttccgtgttgctgagcacagacttgggggaaac

SEQ ID NO: 2486 - DNA, 279 bp, Homo sapiens
  misc_feature 1..279: note = U/M: U (0.18:0.88) in Prostate Epithelium
  misc_feature 1..279: note = source = chr16:56951467-56951745; Gene: HERPUD1 (Intergenic)
  source 1..279: mol_type = genomic DNA
cgagtttgtctagatcattatttggcctaataggttccagagattggtgggattcaatagaaagagagaaatgagatctggggtgggaagaaggatttctgggcagcagcggtagcttgagcaaaagacagagtgaggattgccccgggcatgtctggagaacaagaaacaagccagttttcctggagtgtgagggaagtgtgtataggaaaataagactcggccgggcgcggtggctcacgcctgtaatcccaacactttgggaggccaaggcagggc

SEQ ID NO: 2487 - DNA, 195 bp, Homo sapiens
  misc_feature 1..195: note = U/M: U (0.09:0.88) in Prostate Epithelium
  misc_feature 1..195: note = source = chr16:49766911-49767105; Gene: ZNF423 (intron)
  source 1..195: mol_type = genomic DNA
cgccaactcctggcaatacagaaatcccattaaaagtcaggcagcatatttatctcagggaatctgatctgccgctgcagtgagggtaagaaatagaaagcaaagaaatgagaaatatcatttggagccttcgatattgtaagtcatcatacaaccatggttacacagtcaagtgcccgtctccgaaattcctcg

SEQ ID NO: 2488 - DNA, 124 bp, Homo sapiens
  misc_feature 1..124: note = U/M: U (0.09:0.86) in Prostate Epithelium
  misc_feature 1..124: note = source = chr21:45401010-45401133; Gene: AGPAT3,AGPAT3 (exon,intron)
  source 1..124: mol_type = genomic DNA
cgtctttgccagcggatcacctctcctgatcctgactttcttggggtttgtgggagcaggtaatggacactgtcgctaacagctcacactctgacgggcctcacagtatcagccacagggtccg

SEQ ID NO: 2489 - DNA, 64 bp, Homo sapiens
  misc_feature 1..64: note = U/M: U (0.16:0.91) in Prostate Epithelium
  misc_feature 1..64: note = source = chr22:30443171-30443234; Gene: HORMAD2 (Intergenic)
  source 1..64: mol_type = genomic DNA
cgtggagctcatggctggcagacacggcggcgggatgggaccggacaggacgggacagtacccg

SEQ ID NO: 2490 - DNA, 383 bp, Homo sapiens
  misc_feature 1..383: note = U/M: U (0.13:0.88) in Prostate Epithelium
  misc_feature 1..383: note = source = chr20:38807276-38807658; Gene: MAFB (Intergenic)
  source 1..383: mol_type = genomic DNA
cgtaacaagatcgcacatgtaccccataaatttgtagaactaaaaaggaaaacaaaacgaaaacacataaagctcattctagtaactgctacctgtttggcactgttctaggaatttcacatactttcagaaaaactagtagttttgtcttccttatatatatcaggaaccagatagatctatgtttcctttttccttgagtccaaaaaaaccatttattccagctgccttatacattaaagaacttctttcgaaaacattggcaggatacatcagaaggggccagtcctcagcccatacaagagtgaaagatgatacatgcctacagcagtgcaccataggaaaatataattactacatgcagggcacagaaaataatagcg

SEQ ID NO: 2491 - DNA, 221 bp, Homo sapiens
  misc_feature 1..221: note = U/M: U (0.23:0.86) in Prostate Epithelium
  misc_feature 1..221: note = source = chr7:293593-293813; Gene: FAM20C (intron)
  source 1..221: mol_type = genomic DNA
cgtgatgccggcgttgctgggacccccgcttcccgggcgaggggctgggcacagagcagggaggcacttgcctgaggtcacacagctccaagccctcctaaccccgcccgggaggcccctttaatacccgatttggatctgcaaagagaaatggctgtgggcccgagaaatgcctttctcttttaacacgataccatctgaaaccggcttaggcgaggacg

SEQ ID NO: 2492 - DNA, 156 bp, Homo sapiens
  misc_feature 1..156: note = U/M: U (0.3:0.91) in Prostate Epithelium
  misc_feature 1..156: note = source = chr3:182656877-182657032; Gene: DCUN1D1 (Intergenic)
  source 1..156: mol_type = genomic DNA
cgctgaggccacttgaaactcactcaaactgcacatccaatcgatacacgagttgggatgcctaggtataactcacacacataaagtaaatacccgccaggatggctgcaataaaaaagacaagtattggcaaggatgtgcagacacggcagtccg

SEQ ID NO: 2493 - DNA, 373 bp, Homo sapiens
  misc_feature 1..373: note = U/M: U (0.3:0.91) in Prostate Epithelium
  misc_feature 1..373: note = source = chr22:39407845-39408217; Gene: APOBEC3C (Intergenic)
  source 1..373: mol_type = genomic DNA
cgtaggccagatttatgtttgactttatacaaacatctcagtgcagtaaagagcagtattgccgccagcatgtctcacctccagccataaggcggtcttctcctatgtcagtaaatagaatgtatgatcgggttatacaccaagacattccattcccagggatgagcaggagacagatgccttcctcctatctcaactgcaaagaggctttcctccttcaccaatcctcctcagcacagaccctttacgggtgtcgggctgggggacggtcaggtctttcccttcccatgaggccatatctcaggctgtctcagtggggggaaacctggacaatacccaggctttcttgggcagaggtccctgcggccttccg

SEQ ID NO: 2494 - DNA, 398 bp, Homo sapiens
  misc_feature 1..398: note = U/M: U (0.3:0.87) in Prostate Epithelium
  misc_feature 1..398: note = source = chr10:16955540-16955937; Gene: CUBN (intron)
  source 1..398: mol_type = genomic DNA
cggttttgccatttgtcgtgatcattcactcttaaaatttattctatgaccctgatgcacagagtgatagctgatagtctcttcaaacaacttttacaattattttgacaggttactgtgattttgttctttcaacaatacttagaatttgtctgagttatagttgcatagatggcaattttcctgacctagttttctgactatgatttatgggtcggtaaactctttaaatgatggaatataacatctcaggcggcagggaacacttactatcacatgctcattgttgcaggacggatgcgtggccagcctcaggttgttaaacattagggtgatccgccttccctccggggcagtgattctccactcgcagatccggccatgaggatttgggttcg

SEQ ID NO: 2495 - DNA, 293 bp, Homo sapiens
  misc_feature 1..293: note = U/M: U (0.33:0.85) in Prostate Epithelium
  misc_feature 1..293: note = source = chr4:3417482-3417774; Gene: RGS12 (intron)
  source 1..293: mol_type = genomic DNA
cgggtctttgggacactttaagtatccgtttaaacaatcgtagaggagcccgcgcagtgctgctgcattctggccacacttttatttatttattcaagcaagaggtatttactggggcccgtgagaacacatctgtagagcccgggggtgtcgggccttggcaggcagcaggagtgcggggagaggaagccttgccgggctgctcaggtgcctttcctgtcagctttcctacagggcccgggagattttcagtaagtttctctgcagcaaagccaccaccccggtcaacatcg

SEQ ID NO: 2496 - DNA, 414 bp, Homo sapiens
  misc_feature 1..414: note = U/M: M (0.79:0.12) in Prostate Epithelium
  misc_feature 1..414: note = source = chr5:42757274-42757687; Gene: CCDC152 (intron)
  source 1..414: mol_type = genomic DNA
cgcgggtcctcggcccccatcctttatttctgctaggtccctaaggacactaggatgacggagagggagccaggggacccaggcttcaggactgagagtgaattcttgaggggaggtgaggaggaaagaggagggaccagagcgtggggcaggcgagcggcgaaggaccaactgtgtggggtaggggagaggacgagccccgggactcaagccagcagacaggaggacccaaaaggaaacggaactgtcacgctcctgtggggatggttgaagccagcaggcaagaagacaaagaaggaaatgggactttcacttgcctgtggggacggttgaagctgagccttgaaggtcacaaatcagtctctgcggctcactaaggaatttgacaagcactgaatcaccagcttgacaccg

SEQ ID NO: 2497 - DNA, 237 bp, Homo sapiens
  misc_feature 1..237: note = U/M: M (0.74:0.19) in Prostate Epithelium
  misc_feature 1..237: note = source = chr2:176995916-176996152; Gene: HOXD8,HOXD8 (intron,exon)
  source 1..237: mol_type = genomic DNA
cggagctaaagagctctgtgtatatttcaccccgtagacccccgttccacaaacctccagcaacatgcagaggtaccataacatttttaaaacttttattccccccccctttttttttgttttaatcagcagctcctggtagacgaagaggaagacaaacctacagtcgcttccaaactctagagttggaaaaggaatttctttttaacccctatctgaccaggaaaagaagaatcg

SEQ ID NO: 2498 - DNA, 291 bp, Homo sapiens
  misc_feature 1..291: note = U/M: M (0.72:0.19) in Prostate Epithelium
  misc_feature 1..291: note = source = chr12:54380589-54380879; Gene: HOXC10 (intron)
  source 1..291: mol_type = genomic DNA
cgtggcaagaggttttctcctgaaagggaatgtggctttggttggatttcactgtaattttggttgagagaaagcccagccagagttcaagctcagggttcaagattcatttctgctgtaggagctgggggccttcgggatctttctctgatacttggggaaagaatgtggaggaaacgggagcaggggaggaaaagctgaggggaacgacttttcctgaaaagttgtagcaagagcctcagaaaaaggcccaaccaacggggaagaataaacctgctccccacaacaccg

SEQ ID NO: 2499 - DNA, 216 bp, Homo sapiens
  misc_feature 1..216: note = U/M: M (0.63:0.16) in Prostate Epithelium
  misc_feature 1..216: note = source = chr13:67568304-67568519; Gene: PCDH9 (intron)
  source 1..216: mol_type = genomic DNA
cggagaggaaactgactggcgactcttggtaactccaagagagagtgatgaaactgattccaggaatgcaaaaaagaaaccaagaaactggcactgcaaccagcaaatggctgctgccaggatgaagtgccattgctgcggcaaccctgaaaggaacggcctgcaaagccggacgcagtagctcccctcaccccgccattcggtctccctctagcg

SEQ ID NO: 2500 - DNA, 165 bp, Homo sapiens
  misc_feature 1..165: note = U/M: M (0.68:0.25) in Prostate Epithelium
  misc_feature 1..165: note = source = chr20:50416258-50416422; Gene: SALL4 (intron)
  source 1..165: mol_type = genomic DNA
cgttgatgtttgtaatccagtttagcacaaagggcatttgaaactcttttgagaaaatgctaatttttcctgtatgtagtgttagccctgcgaccacctgcagattttttgatctgctaattgatcgccagacgtcattttcctccctcaaaaactgcattctcg

SEQ ID NO: 2501 - DNA, 305 bp, Homo sapiens
  misc_feature 1..305: note = U/M: M (0.57:0.1) in Prostate Epithelium
  misc_feature 1..305: note = source = chr5:134913743-134914047; Gene: CXCL14 (intron)
  source 1..305: mol_type = genomic DNA
cgcctcacagtttgggtgtgagtgtgttttaagtgatttcagtctaggttttctgagttggcacaagggaaccctttaacccttgatggccctagcagagtgggtggcccatggtacaaatagggagactgctcatttgaatcctagcaagggtgaacttggaggcgctgttccggagcgggacagtgaccccccttcccgactgtcttccagagtgtctcgccagcgtcctaaggactctctgggcaattacaaaggcttttccagggccttgacaaagtcggagagaaatgtttgttagcccg

SEQ ID NO: 2502 - DNA, 451 bp, Homo sapiens
  misc_feature 1..451: note = U/M: M (0.85:0.07) in Prostate Epithelium
  misc_feature 1..451: note = source = chr2:176987679-176988129; Gene: HOXD9 (exon)
  source 1..451: mol_type = genomic DNA
cgagttcgcctcgtgtagttttgcccccagatcggccgtgttctctgcctcgtggtccgcggtgccctcccagcccccggcagcggcggcgatgagcggcctctaccacccgtacgttcccccgccgcccctggccgcctctgcctccgagcccggccgctacgtgcgctcctggatggagccgctgcccggcttcccgggcggtgcgggcggtggcggtggtggtggaggcggcggtccgggccgcggtcccagccctggccccagcggcccagccaacgggcgccactacgggattaagcctgaaacccgagcggccccggcccccgccacggccgcctccaccacctcctcctcctccacttccttatcctcctcctccaaacggactgagtgctccgtggcccgggagtcccaggggagcagcggccccgagttctcgtgcaactcg

SEQ ID NO: 2503 - DNA, 231 bp, Homo sapiens
  misc_feature 1..231: note = U/M: M (0.85:0.16) in Prostate Epithelium
  misc_feature 1..231: note = source = chr7:27264717-27264947; Gene: EVX1 (Intergenic)
  source 1..231: mol_type = genomic DNA
cgttttgttttttgtttgttttaacgttccaccaatggttttcgggtgacggtgtccttgcacgatgtagtccgtcttcaaagttcttttacacaacgtgaattatattgaaattgggctacttcatagagcttcgcctcagtggaggacagcctggaataggtgagggggtctcgaaaggaataccaggccggggagtactggcaagtgtcggaggggaagggcaggtcg

SEQ ID NO: 2504 - DNA, 130 bp, Homo sapiens
  misc_feature 1..130: note = U/M: M (0.81:0.13) in Prostate Epithelium
  misc_feature 1..130: note = source = chr2:200327108-200327237; Gene: SATB2 (intron)
  source 1..130: mol_type = genomic DNA
cgaggggcttagactggaaatcagatgcgccaagaggacaagagccaggggccagaataccccagtgggggacgcgccttggaggacggttcgcccagggtgggcttcagccctttcccagagtgctccg

SEQ ID NO: 2505 - DNA, 366 bp, Homo sapiens
  misc_feature 1..366: note = U/M: M (0.81:0.14) in Prostate Epithelium
  misc_feature 1..366: note = source = chr14:37130146-37130511; Gene: PAX9 (intron)
  source 1..366: mol_type = genomic DNA
cgtcggtgtccactgtcttgggactaagtctctttcatatttaaacaaaactctttcgagagggctcgctggtttggagaaccctcacaaacgctgccaccgagggccaggggcccaggacagtggctgaatgtggcagagccttgggctccgtagtgagtgccccacgcactggcaattggtcgacttggggctgtgcgctagcgttagccgcctgtggttcagttccccgcacacggcgtggcccgtgcctcgagcctgtgtggctagtggttggccggtccacctggactggggggtcgccgcaggaagctggcggtaggaggaacctccctggccttaacagtggcccccacctgtggctcg

SEQ ID NO: 2506 - DNA, 161 bp, Homo sapiens
  misc_feature 1..161: note = U/M: M (0.75:0.09) in Prostate Epithelium
  misc_feature 1..161: note = source = chr3:190529745-190529905; Gene: GMNC (Intergenic)
  source 1..161: mol_type = genomic DNA
cgtccgctattgattcctaattatcaccaggagatggcgctgtgcattagtaaacatccggcttacaaaagtacagggtttcagggaaagaatcactggggagatggtaaatgagacaaatgtttgtgagggaaaaaatattgaacagctgatgcaggacg

SEQ ID NO: 2507 - DNA, 67 bp, Homo sapiens
  misc_feature 1..67: note = U/M: M (0.83:0.19) in Prostate Epithelium
  misc_feature 1..67: note = source = chr9:98981790-98981856; Gene: HSD17B3 (Intergenic)
  source 1..67: mol_type = genomic DNA
cgagcccaactgccaggcgatcggccgagacccagaagggtgagagggggaagccgcaccctcttcg

SEQ ID NO: 2508 - DNA, 276 bp, Homo sapiens
  misc_feature 1..276: note = U/M: M (0.66:0.05) in Prostate Epithelium
  misc_feature 1..276: note = source = chr2:176937949-176938224; Gene: EVX2 (Intergenic)
  source 1..276: mol_type = genomic DNA
cggaaagccgaagccccggagccgatgtctgggctgacagggttccctcctcagcctcggggcagtcagacgattcctaacaacttctcccaaggaggtagatccctgtttatcaaccagcacaccccgtcggcccttttctttggtaaacactctttaaacaaacagcccatccgccctgttattgccaaagctgctcagagctttaataaaagcccagggaagatcagaacccgcgtccaaggctgctgcttaatccaatgaaggcaatttccg

SEQ ID NO: 2509 - DNA, 56 bp, Homo sapiens
  misc_feature 1..56: note = U/M: M (0.81:0.21) in Prostate Epithelium
  misc_feature 1..56: note = source = chr2:200327240-200327295; Gene: SATB2 (intron)
  source 1..56: mol_type = genomic DNA
cgtctggggactgaccggagcgcagggcgggggacacttacttcgttatccgcacg

SEQ ID NO: 2510 - DNA, 243 bp, Homo sapiens
  misc_feature 1..243: note = U/M: M (0.7:0.1) in Prostate Epithelium
  misc_feature 1..243: note = source = chr2:176964570-176964812; Gene: HOXD12 (exon)
  source 1..243: mol_type = genomic DNA
cgcttctgaatctgcagtcgccagactctttctacttctccaacctgaggccgaatggcggccagttggccgcgcttccccctatctcctacccgcgcggcgcgctgccctgggccgccacgcccgcctcctgcgcccccgcgcagcctgcgggcgccactgccttcggcggcttctcgcagccctacctggctggctccgggcctctcggcctgcagcccccaacagccaaagacggacccg

SEQ ID NO: 2511 - DNA, 245 bp, Homo sapiens
  misc_feature 1..245: note = U/M: M (0.67:0.09) in Prostate Epithelium
  misc_feature 1..245: note = source = chr2:176931775-176932019; Gene: EVX2 (Intergenic)
  source 1..245: mol_type = genomic DNA
cgtctgggaagccgacactttaaaggcgcactccttttcaggaaatctccgggtgcttcctggtggcccccgggggaagctttgctagccgcctgcccctgttcccggaaacgaggcctgctgggcggactggcagtgcgtccaccgcgaggacaacactgaaggcgctgctggcctcgttcgcggtggggcccgccccgaccccgcgctccactccggccacgcctaggtggctgcggaggccg

SEQ ID NO: 2512 - DNA, 246 bp, Homo sapiens
  misc_feature 1..246: note = U/M: M (0.68:0.1) in Prostate Epithelium
  misc_feature 1..246: note = source = chr2:176986712-176986957; Gene: HOXD9 (promoter-TSS)
  source 1..246: mol_type = genomic DNA
cgcgccccggctcgcccctcgggccgcggcgtgtgcccagcctcacgtcggggtgtgtgtggccgcgcgggcgtgtgtgagtgtggcagggggagggggccctccgatctgctccatccgtccgttttattagggacacattaatctataatcaaatacacctcataaaatttttattgaaaggcataatatcattacagaggtcttccacctgttttaaacaacacgacaagctgtgagcaagcg

SEQ ID NO: 2513 - DNA, 276 bp, Homo sapiens
  misc_feature 1..276: note = U/M: M (0.67:0.1) in Prostate Epithelium
  misc_feature 1..276: note = source = chr14:37126308-37126583; Gene: PAX9 (promoter-TSS)
  source 1..276: mol_type = genomic DNA
cgcagcccggagttttgccccgtgcattaaaacatgttctctttcatttgcagatttaataaacaaacgtaaccatatcacatggagctccacactgtccttctgaaagcaattccgctgttgaaaactgaaaaatgggtgtaatttgctttcagaaagtaatgttagggtcacggcaatttctcgggccgttatttatttttactttaaagtctttaggaaagatttgcttatatgctcggaaaacttccaaatgcgcgaataccagcaatcccg

SEQ ID NO: 2514 - DNA, 326 bp, Homo sapiens
  misc_feature 1..326: note = U/M: M (0.67:0.1) in Prostate Epithelium
  misc_feature 1..326: note = source = chr2:176963442-176963767; Gene: HOXD12,HOXD12 (Intergenic,promoter-TSS)
  source 1..326: mol_type = genomic DNA
cggggtctgagcacaccgctcccggctaagaactgctgcctttcccacttccctgtttgtcagacccgtgaactccctatccccggcacccctgggggcgctgaggcaaggaactctgctagccagctgcctccgaacgcccgctgttccccggccaggtggttctggctcttctgcctttccacacccagtcgggggagttcgtcctgctttgccctccacttggtggatggggacacctcggagttctggtttgcagtgtgtagtcctggagaggactcctgaagataaaaggaatgtagcctttggccacgattggtggatcg

SEQ ID NO: 2515 - DNA, 173 bp, Homo sapiens
  misc_feature 1..173: note = U/M: M (0.7:0.15) in Prostate Epithelium
  misc_feature 1..173: note = source = chr7:27196825-27196997; Gene: HOXA7 (promoter-TSS)
  source 1..173: mol_type = genomic DNA
cgcaaactggagccatgtggttcgaataaagtcaacgtctcccagcttcctttccttaatcggaggcacactgtttatccgccctaaaggaagcagtgaaatatttatctattaatgagactcatttgccaacagatttattaacgtggggttcccctccctcctcccggacg

SEQ ID NO: 2516 - DNA, 286 bp, Homo sapiens
  misc_feature 1..286: note = U/M: M (0.64:0.11) in Prostate Epithelium
  misc_feature 1..286: note = source = chr9:98981863-98982148; Gene: HSD17B3 (Intergenic)
  source 1..286: mol_type = genomic DNA
cgatgctgtgaacgtcttccttcaaggaaagagctgcttctggattttccttgaactccaggaggtgctaagaaagcttcgtgactgtggcagatgcggctcagcggcccctcccaacccgcccgcgccagttgggaaagtgactcccccgctccccgccagttgggaaagtgactccttcctgtgggcagaaggcagcggacctggagggagccctcgggctctgagagtcacgcggggggcggcctgctctcccgcgccccctagcggagcatcggctcacacg

SEQ ID NO: 2517 - DNA, 349 bp, Homo sapiens
  misc_feature 1..349: note = U/M: M (0.69:0.16) in Prostate Epithelium
  misc_feature 1..349: note = source = chr7:8477434-8477782; Gene: NXPH1 (intron)
  source 1..349: mol_type = genomic DNA
cgtttagttacagacttcattacctgaatgccttttggcaatacagagaaaggagacaatttttccaatttcactcaaaacaatacgaaatgtgaacaataaaatagagaaggctatttagaagtccgttcttttttctccaatctaaagtacttttgtgtgtcggggactagaaaccacatgcaccacaaaaactacagctgatggctgtgacccaaggcagtatttccagggattgtaatcccatggatatttgccagcagaattccgagctgttttcctgaaggagcaaaaagctgacttctaccatggaaatgaatttaaaagggtgaattgggcagtcatttcg

SEQ ID NO: 2518 - DNA, 87 bp, Homo sapiens
  misc_feature 1..87: note = U/M: M (0.68:0.17) in Prostate Epithelium
  misc_feature 1..87: note = source = chr5:1888022-1888108; Gene: IRX4 (Intergenic)
  source 1..87: mol_type = genomic DNA
cggtgataagccgcccgaggaccaatgagtctgtgacctgcccgggctaaggggggcatgccctggtggggagcctggtcccagccg

SEQ ID NO: 2519 - DNA, 227 bp, Homo sapiens
  misc_feature 1..227: note = U/M: M (0.68:0.2) in Prostate Epithelium
  misc_feature 1..227: note = source = chr17:80273966-80274192; Gene: CD7 (intron)
  source 1..227: mol_type = genomic DNA
cggcgggtaccagggttttcctctggggctttggcgccccccacgctgctctcaggagagggaacaatctttggggtgcaggtggcagctggggctcacactgacctgtgtcctcgccagcacacacgccacccccaggcccagcccgaggaggaaggagatcaccgccagggccgcagggagggcagaggctgctggcgggtcagggagggcagaggctgtctgcg

SEQ ID NO: 2520 - DNA, 231 bp, Homo sapiens
  misc_feature 1..231: note = U/M: M (0.65:0.19) in Prostate Epithelium
  misc_feature 1..231: note = source = chr4:111540786-111541016; Gene: PITX2 (intron)
  source 1..231: mol_type = genomic DNA
cgggcccagccgtgtaatccgctttttctctttttcctttcattcttgatttcctttttatcccccttcctctttgcacccgactgctataaaaagcacgcctcactcccacttggctcgacaagcagccgccctggaaggagaggcagctgcaaggagagcccagcgccgcggctacaaagcactagggtggagctgcggaatagcgggcggggtgggagggcgttttcg

SEQ ID NO: 2521 - DNA, 114 bp, Homo sapiens
  misc_feature 1..114: note = U/M: U (0.08:0.95) in Breast Basal Epithelium
  misc_feature 1..114: note = source = chr6:35058103-35058216; Gene: ANKS1A (exon)
  source 1..114: mol_type = genomic DNA
cgctgccactgcgcacatgctggtgcccgtcttcctcctaaggggccaggccacatccaagtgggcctctgtcgggggcggggcggtaggtccgaaagaaaccgcagacactac

SEQ ID NO: 2522 - DNA, 472 bp, Homo sapiens
  misc_feature 1..472: note = U/M: U (0.09:0.94) in Breast Basal Epithelium
  misc_feature 1..472: note = source = chr11:66639005-66639476; Gene: PC (exon,intron)
  source 1..472: mol_type = genomic DNA
cggccagcctcttcccctgcctaacctgctgagctgcatccgtttacccacccacgcacagaggcgctgagcacgccagcctcaagagacccccgcggcaactaagactccctggtccctgctgtccaggcccagccaggccactgggctcaccttggccaccttgatgatgtctgggatgtgcaggtaggcctgcacgggggccaggccgcggccgatgagataggcttcatctgctttctgccggtgcatctggcccgtgtcctgctcagagtagatggctacggtgcggatgcccagctccgtgcaggcccggaacacacggatggcaatctcacctagagggcaaagaaacaagaagttagattcctaggtcctaggagaagcagaaaggggagtgggaagccagggcctggggcagtgagtgggagaagaatgccaaggctggggcggccatgaggctcctctcacc

SEQ ID NO: 2523 - DNA, 220 bp, Homo sapiens
  misc_feature 1..220: note = U/M: U (0.1:0.94) in Breast Basal Epithelium
  misc_feature 1..220: note = source = chr16:81390362-81390581; Gene: GAN (intron)
  source 1..220: mol_type = genomic DNA
cgccccatctttcttccctcttctgcaggtccacatgaaggatgttatgtcagctctgtgggtttcagggttggactccagttatttacgggaacagatgctgaatgaaccattagtacgagaaattgtcaaagagtgtagcaatataccgctcagccagccgcagcaaggggaggcgatgctggccaacttcaaaccccggggctactctgagtgcatc

SEQ ID NO: 2524 - DNA, 176 bp, Homo sapiens
  misc_feature 1..176: note = U/M: U (0.12:0.94) in Breast Basal Epithelium
  misc_feature 1..176: note = source = chr12:120656820-120656995; Gene: PXN (intron)
  source 1..176: mol_type = genomic DNA
cgctatgagaaatgctgggtccacagagcccactgccaagtgctgactgtcaggtccggccacagtgtctcagcattttctgcccaagcagacatgcgcagagtgggaggctgcatgcagttagcgaggagcggcccacactcagacccgccaatggccatgcccagcagccatgc

SEQ ID NO: 2525 - DNA, 113 bp, Homo sapiens
  misc_feature 1..113: note = U/M: U (0.12:0.93) in Breast Basal Epithelium
  misc_feature 1..113: note = source = chr19:16618102-16618214; Gene: C19orf44 (intron)
  source 1..113: mol_type = genomic DNA
cgtaaagccgcccatgacaacatctgcacggaggcaacacttcaccagccgtatccagtcacactccctgttgtgatttttgtcctggtggccaccggcactgtcagatacac

SEQ ID NO: 2526 - DNA, 183 bp, Homo sapiens
  misc_feature 1..183: note = U/M: U (0.14:0.94) in Breast Basal Epithelium
  misc_feature 1..183: note = source = chr15:58833989-58834171; Gene: LIPC (exon,intron)
  source 1..183: mol_type = genomic DNA
cggcgtgctagaaaactggatctggcagatggtggccgcgctgaagtctcagccggcccagccagtgaacgtggggctggtggactggatcaccctggcccacgaccactacaccatcgccgtccgcaacacccgccttgtgggcaaggaggtcgcggctcttctccggtggctggaggtacc

SEQ ID NO: 2527 - DNA, 337 bp, Homo sapiens
  misc_feature 1..337: note = U/M: U (0.14:0.93) in Breast Basal Epithelium
  misc_feature 1..337: note = source = chr6:35057138-35057474; Gene: ANKS1A (exon)
  source 1..337: mol_type = genomic DNA
cgccaggcctctccctggcctcttacctgtcagtgatcggagcactgccctgggctggccggcgccgtactgcctgcgttgtgtcagagaataggaaaagcagctttgtttggggcattaatgcttggagtggggtcagctaaggttgctacttgccaatttgtgatttgtctaatcagcctgtgtgattggggctcattttgattctctgaattatcggtttgacggttacacttggctgctgggcccatccctggcccccggtgtggaaaaggctaaataaggtgacagtgcatcgatgctcccccgcgtggcctttggggcaggctggcatccc

SEQ ID NO: 2528 - DNA, 200 bp, Homo sapiens
  misc_feature 1..200: note = U/M: U (0.14:0.92) in Breast Basal Epithelium
  misc_feature 1..200: note = source = chr20:3171367-3171566; Gene: DDRGK1 (exon,intron)
  source 1..200: mol_type = genomic DNA
cggcgatggacacccggccccgctgtcggatgaagttggccacggcggccagttcctctggggttatgtagatgaacttgccccggtcgtcaatcacacctgtggggacatgcaggttgtggggctgaggcctcctgggcgttccccatctggcctgagaatgcccacctactccttcacagctggctcagggcccttcc

SEQ ID NO: 2529 - DNA, 391 bp, Homo sapiens
  misc_feature 1..391: note = U/M: U (0.16:0.94) in Breast Basal Epithelium
  misc_feature 1..391: note = source = chr14:99936328-99936718; Gene: SETD3 (intron)
  source 1..391: mol_type = genomic DNA
cgtctttccacagctcacgggataatgcgtaacctccctagcaaggtcttcgaggactgaactgcctcactctattttacatgtccagcttcatcctacctttacacaacacagctccaggggactgctcatgttcctccctttttctggaatgcagctatcccactgcctgtccccttgtcttctcctggcaagatttttcacatactttgaggctctaccgaaatgtgccctgtggcattaagggaaactctagactcttccatgcaaccctcacgcccaacaaagtcagtaagaaagggtcaaactcaaggttattacagatgctaaagagttggcttatattgggattctgtcttttggcaacctctttgggctgtttctctcccac

SEQ ID NO: 2530 - DNA, 348 bp, Homo sapiens
  misc_feature 1..348: note = U/M: U (0.18:0.95) in Breast Basal Epithelium
  misc_feature 1..348: note = source = chr16:22336742-22337089; Gene: POLR3E (intron)
  source 1..348: mol_type = genomic DNA
cgcagctggtcgcttgcccagcagcagagcctcagggacggaggcttgcggattccagggctgagtctgggttccaggtctctgaggctcactcaccctcttgggtcaacaagcgggcccggaagagctgctggggggaggaactcagcagcacccttccccgcatgactctcggcacgctgggacggttctctcttccactgatggggtggctgattttcgagaaaggttggggatgagaccaggacgggaccacttgctgcagccccgcggtcccctgctgggcttttggcttcagatccctgtgccctcctgagcagtgctgcctccctccccgcagggcctgcc

SEQ ID NO: 2531 - DNA, 407 bp, Homo sapiens
  misc_feature 1..407: note = U/M: U (0.17:0.94) in Breast Basal Epithelium
  misc_feature 1..407: note = source = chr18:20551897-20552303; Gene: RBBP8 (intron)
  source 1..407: mol_type = genomic DNA
cgtgcctggccccagtgtttaatttctaaaacagacaggcttgatatgttaatgttttaattggggaacatacatttaaatcatcattttgttcattcagtttttctgccagcaaggttctgttacgatccaaagaattagggcaggcgcgttggctcacgcctgtaatcccagcactttgggaagctgaggtgggtggatcacaaggtcaggagttcaagaccagcctggccaagatggtgaaaacccgtctctactaaaaaaaatacaaaaattagccgggcatggtggcaggcatctgtaatcccagctactcggaaggctgaaacagaattgcttgaacccaggaggcagagattgcagtgagccaagattgcgccactgcattccagcctcggcgacagagc

SEQ ID NO: 2532 - DNA, 304 bp, Homo sapiens
  misc_feature 1..304: note = U/M: U (0.17:0.93) in Breast Basal Epithelium
  misc_feature 1..304: note = source = chr1:28289721-28290024; Gene: XKR8 (intron)
  source 1..304: mol_type = genomic DNA
cgaggcttcaccatgttagccaggatggtctcaatctcctgaactcgtgatcagcccgcctcagactcccaaagtgctgggattacaggcatgagccaccacacccggcctcgatcctcattttacagatgaaacaagttcagtgaggttaggacattgccgaaggccccatagcatggatgtgaggagacaggttggagcctgtgtccactcattagatgggtgggaggctgaggaattcacaggacactaacctggccctctgggcatttgtgtgtggtgcctaggtgcgtgcaggagctgc

SEQ ID NO: 2533 - DNA, 299 bp, Homo sapiens
  misc_feature 1..299: note = U/M: U (0.2:0.94) in Breast Basal Epithelium
  misc_feature 1..299: note = source = chr13:24873567-24873865; Gene: SPATA13 (intron)
  source 1..299: mol_type = genomic DNA
cgtacttgatgcatgtgtgtgggtagaagcttcaggtagcagatcagagagaatggacacggagggccttggaggcagggacagcccggtggccagcgtacagagcctgagcctgacgtcaggacagtctgggacagatgttgggcatgtgaaggaatcagggccaggggagcagagtgggcagaggtagagagggagcctcgggagcgagccaggcagtgcaagctagcagacacagggcctgggtcagctctgccaagctggagcgagtacctgcctacaggaggaaggcttcccgc

SEQ ID NO: 2534 - DNA, 379 bp, Homo sapiens
  misc_feature 1..379: note = U/M: U (0.21:0.94) in Breast Basal Epithelium
  misc_feature 1..379: note = source = chr9:134350774-134351152; Gene: PRRC2B (exon)
  source 1..379: mol_type = genomic DNA
cggcctctgtggtgggggggtcctgggggcccgcagcatctactgcagcagtcagcgcagcggccgtggccggggcctgcgagagtttgcgcggccagaggactgccccagagccaagccccgacggagagttgccagtgagacccatagcgagggctcagagtatgaagaacttcccaagcgccgccggcagaggggctccgagaacgggaatgaaggctcgctcctggagagggaggagagcaccttgaagaagggcgactgcagagattcttggcggtccaacaaggggtgctctgaggaccacagcggtctagatgccaagagccgaggccctcgggcctttgggcgagccctccctccccggctgagcaattgc

SEQ ID NO: 2535 - DNA, 238 bp, Homo sapiens
  misc_feature 1..238: note = U/M: U (0.23:0.94) in Breast Basal Epithelium
  misc_feature 1..238: note = source = chr7:99048114-99048351; Gene: CPSF4 (intron)
  source 1..238: mol_type = genomic DNA
cggctttctcacactcctcatctcccttgcctctcccaagaatgctgggtgggtggtggtccacccgcttttttgataaggaggccagtgttgggaggtgaggtccctgccccgtctcccatgaatgggggacagccagcatttgaaaccatgctccagctctctaactggtagaggggacatctaagtgaccggacacttggctctgcaggtcccctctgcaggcaccggcacacac

SEQ ID NO: 2536 - DNA, 255 bp, Homo sapiens
  misc_feature 1..255: note = U/M: U (0.31:0.93) in Breast Basal Epithelium
  misc_feature 1..255: note = source = chr9:139102868-139103122; Gene: QSOX2 (intron)
  source 1..255: mol_type = genomic DNA
cggggtcgaagagcccccggagtgagagaagcatctagaaagccggggacagaagcagcctgggaaaggctgcagctctggcagctctcagccacccaagtcctgatcccgtcagcacagtgggtggcacgaggccgcaaagctcagggacaagccccacggcagccgtgccgtccttgctgtcccaggaccagggcctccctccgcccgtgctgagccccccatgcccaggggcttctcacctgccaggcggcc

SEQ ID NO: 2537 - DNA, 105 bp, Homo sapiens
  misc_feature 1..105: note = U/M: U (0.09:0.94) in Breast Basal Epithelium
  misc_feature 1..105: note = source = chr1:234529405-234529509; Gene: TARBP1 (exon)
  source 1..105: mol_type = genomic DNA
cggtttgtcgatgagcgaggccacaacgatgagtctactaattgactttccaagtctggcagcacgatcctgaaacaggagctccaggtctaagtcggaaacacg

SEQ ID NO: 2538 - DNA, 182 bp, Homo sapiens
  misc_feature 1..182: note = U/M: U (0.08:0.93) in Breast Basal Epithelium
  misc_feature 1..182: note = source = chr1:154557601-154557782; Gene: ADAR (intron)
  source 1..182: mol_type = genomic DNA
cggctctcaagccctgagactgcagaggtatgatgcacccttgcaagtcagggcagaggcttggtcctcactgcgctctcctgtctccttacccatccacagtgcctctggtaccgtccaggatctccaggtcatagccatcagccagacaccagttgacgcttgtctccttagtcttcccg

SEQ ID NO: 2539 - DNA, 99 bp, Homo sapiens
  misc_feature 1..99: note = U/M: U (0.06:0.9) in Breast Basal Epithelium
  misc_feature 1..99: note = source = chr4:10083001-10083099; Gene: WDR1 (intron)
  source 1..99: mol_type = genomic DNA
cggcgtatcccccggggccgacggctacgcactttggctgaacgtccagtttcacaactccttgtccgctgttagagagaaaggaagcacattacttcg

SEQ ID NO: 2540 - DNA, 224 bp, Homo sapiens
  misc_feature 1..224: note = U/M: U (0.1:0.93) in Breast Basal Epithelium
  misc_feature 1..224: note = source = chr17:78339277-78339500; Gene: RNF213 (intron)
  source 1..224: mol_type = genomic DNA
cgtggcctggcgtcacagcctgtgggacagaaagcaggggaggtagaggacaggccgttttccttaagagcccaatcccggacacgcacacgccacaccagctcgtgtctcgtggtcctaaacttaggcactcggccttatctggttgcaagaaactgaggagtttttcgtggcatggtcatgttccaggtggaacttgagttcttctgctgaaggaaaaggcg

SEQ ID NO: 2541 - DNA, 267 bp, Homo sapiens
  misc_feature 1..267: note = U/M: U (0.08:0.91) in Breast Basal Epithelium
  misc_feature 1..267: note = source = chr2:10712116-10712382; Gene: NOL10 (exon)
  source 1..267: mol_type = genomic DNA
cgtctgtgtttaacaccctaacgatgatcagtttgggggagacgtacccctccctaatcacaggtaggaccacttcccaaatcaatgaaacgaccgtcctcttttgtgtcttgacttcaggtgtccggccgaacgacggagtcttttcctttcttgtcgatgcagtttctcagcctcctgttgcttcttctgctgttcagactaaaagagaaaatgaaatgagtagagggaaagagagaaaattctatacctcttttctggtaaccg

SEQ ID NO: 2542 - DNA, 294 bp, Homo sapiens
  misc_feature 1..294: note = U/M: U (0.1:0.93) in Breast Basal Epithelium
  misc_feature 1..294: note = source = chr19:4090757-4091050; Gene: MAP2K2 (intron)
  source 1..294: mol_type = genomic DNA
cggggagggccagcgtctgcccagccctggcagatggtacgggacagaaagcaaaaaacagaggagaccctcccttccccacaggaagacgcactcggggtaggagagggaaagaaacccagaaaggggcagcggcgtgtgccaggcctgggaggggtctcaggatgctgcactccacctggggcggggacaccaccagcacggcagcctgcgctcccaggggagggtctacgctcgcgcaagcccagggtcctccggccgctgtggacaccggggccggatcattctctggcg

SEQ ID NO: 2543 - DNA, 305 bp, Homo sapiens
  misc_feature 1..305: note = U/M: U (0.05:0.88) in Breast Basal Epithelium
  misc_feature 1..305: note = source = chr1:115768600-115768904; Gene: NGF (Intergenic)
  source 1..305: mol_type = genomic DNA
cggtcgtgagagtagtgatggcacctgaggcagggctacaggaatagatgaggtagggagccctgtcagggtgcagtaagcatcccatggagaaggcacgcactgtgggcctggagcttactggggaggtggaacaagcagggaagcagtccttggtgcaagcaaggatgcacattccacatcaggctgcccgcccacgaggagggcctacacttgtggctctgaatccatgtggaggcggaaacggtctggttaagatagtgacaatgtgctttgtgtttgtgcctgaagggccagggaccacg

SEQ ID NO: 2544 - DNA, 307 bp, Homo sapiens
  misc_feature 1..307: note = U/M: U (0.09:0.92) in Breast Basal Epithelium
  misc_feature 1..307: note = source = chr8:103755444-103755750; Gene: KLF10 (Intergenic)
  source 1..307: mol_type = genomic DNA
cggagaagcagttcattcctggatggctttgaagcccaagatggtgggatgttagatgtgaaagaatggagtaaggatggctcagagattcctggcctaagcagctggaacgatgggaatgcctacgggaggaggagctcctgggagcgagatcaggattttgagtttggatatgttaagcttgagatgtttcttgtagtcaaacatgcaactggatacattaggctggacttcaggagagaggcccaggctagagaaataaaatgggaactcattcacataggaattcgaggcctgagactgaacg

SEQ ID NO: 2545 - DNA, 423 bp, Homo sapiens
  misc_feature 1..423: note = U/M: U (0.08:0.91) in Breast Basal Epithelium
  misc_feature 1..423: note = source = chr5:150649233-150649655; Gene: GM2A (exon)
  source 1..423: mol_type = genomic DNA
cgaaaaaaaccttagaagtaactaaaatttctgtacatctccggaatgccatgctgaaactcactgcaaccccacggtcccgctttaaggtccataaatatccctaaggaaaaatccaccgtggtacattcagtcctctcaccgaggtgccccatggcagtcttctgcagcattcttctaatacctttcctttttcaaacctatactgttgttggtgaattctttttaccaacccacgagttgaccacttcccaatgccggggatctgacacctcacctggcaatgacctccacagccgtttccctctgttggatcttccagccttattctcaacagttcatttttagttcacattcttgaccgaatctcagtagctcagttaatctttttatgtctgctctgctcttgggtcatatgttccg

SEQ ID NO: 2546 - DNA, 172 bp, Homo sapiens
  misc_feature 1..172: note = U/M: U (0.07:0.89) in Breast Basal Epithelium
  misc_feature 1..172: note = source = chr14:100138645-100138816; Gene: HHIPL1 (exon)
  source 1..172: mol_type = genomic DNA
cgttggcaggcgggcaccacctggcaaatgtcagatccagcctgctcaggtgaagatcagaagccgtctcatcccctttgtgcccaaagaaagtaagtgcctgccagtgggacactgagggttgggggagagatcccgcagcccacaacggctgcctttccagccagactcg

SEQ ID NO: 2547 - DNA, 367 bp, Homo sapiens
  misc_feature 1..367: note = U/M: U (0.05:0.87) in Breast Basal Epithelium
  misc_feature 1..367: note = source = chr19:14040781-14041147; Gene: CC2D1A,PODNL1 (intron,TTS)
  source 1..367: mol_type = genomic DNA
cggggatgggcacctggcgggggacgggcttggggatgggcacagtccaggagggttgtgggcagtgaggccccaccctaagcctccattcccccgccatccattctcagaatacgcagcccagctggagcggcagctgcagttctacacggaggctgcccggcgcctgggcaacgatggcagcagggtgagctggtcgcgggccgggtgggcactgggcagcgggcagggtggggcctgcagggactacctgctgaatgcccatcccccacaggatgctgcaaaggaggcgctctataggcggaatctggtagagagtgaggtaagcagcttaggagatggggtggttgggggatcactgtggtcg

SEQ ID NO: 2548 - DNA, 88 bp, Homo sapiens
  misc_feature 1..88: note = U/M: U (0.12:0.93) in Breast Basal Epithelium
  misc_feature 1..88: note = source = chr6:35056412-35056499; Gene: ANKS1A (exon)
  source 1..88: mol_type = genomic DNA
cggaaacatagacgtgggggcataggctcccactgccaccaccgccatcgcctcacctgcagctctgaagacccaggcctcacctccg

SEQ ID NO: 2549 - DNA, 119 bp, Homo sapiens
  misc_feature 1..119: note = U/M: U (0.08:0.89) in Breast Basal Epithelium
  misc_feature 1..119: note = source = chr2:65299908-65300026; Gene: CEP68 (exon)
  source 1..119: mol_type = genomic DNA
cgctccttcgtccgtgcccacgactccgcaggggaaggcagtctggggagcagccaggccctcggggtctcctctggactgctgaaaacacgcccctccttgccagctaggttggaccg

SEQ ID NO: 2550 - DNA, 183 bp, Homo sapiens
  misc_feature 1..183: note = U/M: U (0.1:0.91) in Breast Basal Epithelium
  misc_feature 1..183: note = source = chr16:58292241-58292423; Gene: CCDC113,CCDC113 (intron,exon)
  source 1..183: mol_type = genomic DNA
cgttcttctctctttgtgctgactcccccaggcgatcattgaggaggctgaaattcgatggagtgaagtttcgagagaagtgcatgagtttgaaaaagatattctaaaagccatatccaagaagaaagggagtattttggccactcagaaagtgatgaaatacattgaggacatgaaccgccg

SEQ ID NO: 2551 - DNA, 190 bp, Homo sapiens
  misc_feature 1..190: note = U/M: U (0.1:0.91) in Breast Basal Epithelium
  misc_feature 1..190: note = source = chr10:134239245-134239434; Gene: C10orf91 (Intergenic)
  source 1..190: mol_type = genomic DNA
cgtgtggatgctgaattgcactttcaacgacgtgaccgttccttccttgcaggccacctccggaggtgttcactgccggtggctgtacctggccatagatctgggggctgtgctgccccaggcatcccaccctgttccaggacacagaggccaatgctgttcccctgttccggcaggcgtgggctgcacg

SEQ ID NO: 2552 - DNA, 193 bp, Homo sapiens
  misc_feature 1..193: note = U/M: U (0.13:0.94) in Breast Basal Epithelium
  misc_feature 1..193: note = source = chr2:25355689-25355881; Gene: EFR3B (exon)
  source 1..193: mol_type = genomic DNA
cgctctctgcagctgaaaggctgaaccaggaggggccctggagcctgtgcctcactgggcaccctctccgccacctcctgcaggctcctttgccagcacgctgcccacctaccagcgctccgaggtgatcctcttcatcatgagcaaggtcccgcggccatccctgcaccaggcggtggacacaggcaggacg

SEQ ID NO: 2553 - DNA, 282 bp, Homo sapiens
  misc_feature 1..282: note = U/M: U (0.06:0.87) in Breast Basal Epithelium
  misc_feature 1..282: note = source = chr17:64439761-64440042; Gene: PRKCA (intron)
  source 1..282: mol_type = genomic DNA
cgggacaggcccttggtaaatgacttgctactgaatggtagtcctcacgatgacatgtgtggcccatttaatgagagaagtaaagaccgcagaggatggaggaaagggcagggggagaagttagctaatattaaattcctgaccacccacacctaatgaaaaagaatgttctctgcttgcagaggcagtgaattaggctggcaaggtaccaagggaggaggaaaagtgtgtgaatggatacccgctacatctgagcacagacttaacccagaaacgcaggcg

SEQ ID NO: 2554 - DNA, 333 bp, Homo sapiens
  misc_feature 1..333: note = U/M: U (0.07:0.88) in Breast Basal Epithelium
  misc_feature 1..333: note = source = chr3:8817175-8817507; Gene: OXTR (Intergenic)
  source 1..333: mol_type = genomic DNA
cgtgtgtaggcactgttggcccaggttaaggcataacatggcataactggagagaaacagcttcctataaggaatctcagagcttggaataaaagcaggctgttcttttgcagaagaaagggtttgttgagacgcaggatccttggaatatgtaacgtcttttggagaagtagagcctgaaagagttgagagtcatttaaaagtggttgttagcttcataacaaacagaatgattgggattattacaatgcctgttttacagatgaggaaaccgaggttcagagaggggaaggcatttgcccaaggccacacagctggtaaaggaggtcagcg

SEQ ID NO: 2555 - DNA, 395 bp, Homo sapiens
  misc_feature 1..395: note = U/M: U (0.1:0.91) in Breast Basal Epithelium
  misc_feature 1..395: note = source = chr2:11303769-11304163; Gene: PQLC3 (intron)
  source 1..395: mol_type = genomic DNA
cgctgtctcctgggtgcttgttcagctccctagctggcctctattcccgtggcgtcaccgagctcggtgcacatgcctgacttccagcattgcccaccccagctgtatcatttttacagtggagtttgtggggaaaggtggaagtcagtaaacagaaattcacatcacagcaattttgcagaacattcctgctttataatgttggacttctcctttaagtgcttagcttttgaccataaatcagagaagtctgcatggtctagaattcagtgggcagtgaaaccactaggaatgttcccaatcctagggagcagtccatgagcgtgggtgtctttgtatttctcttctgtaacctgttttcgttcttttgaattctgagcaggtgttcacttgcg

SEQ ID NO: 2556 - DNA, 50 bp, Homo sapiens
  misc_feature 1..50: note = U/M: U (0.11:0.91) in Breast Basal Epithelium
  misc_feature 1..50: note = source = chr18:34966967-34967016; Gene: CELF4 (intron)
  source 1..50: mol_type = genomic DNA
cgatagagagacggcacgcacggggctgagcctgctgcgctgtggaggcg

SEQ ID NO: 2557 - DNA, 66 bp, Homo sapiens
  misc_feature 1..66: note = U/M: U (0.09:0.89) in Breast Basal Epithelium
  misc_feature 1..66: note = source = chr9:139959096-139959161; Gene: SAPCD2 (exon)
  source 1..66: mol_type = genomic DNA
cgcggcccacaaggactagatgaaggtggaatccagaggtcccccgtcctgctggctcagggcgcg

SEQ ID NO: 2558 - DNA, 128 bp, Homo sapiens
  misc_feature 1..128: note = U/M: U (0.09:0.89) in Breast Basal Epithelium
  misc_feature 1..128: note = source = chr17:78262251-78262378; Gene: RNF213 (intron)
  source 1..128: mol_type = genomic DNA
cggggggaggggcgtcctctgggccctgctccctgggtgggagtcggagggctgcccctccactggggatgccagcccaccctgtccctcggcttgtggcagatgctgccccttaaaccattgagtcg

SEQ ID NO: 2559 - DNA, 171 bp, Homo sapiens
  misc_feature 1..171: note = U/M: U (0.07:0.87) in Breast Basal Epithelium
  misc_feature 1..171: note = source = chr6:168769209-168769379; Gene: DACT2 (Intergenic)
  source 1..171: mol_type = genomic DNA
cgacatcctttggaaaaagttctcttattcacggtgtttcgcaaacctggcaatgtgttcaagtcagccgggggcttcaggagggagaatttcccaagaagaaggtcacttctggactcgctttctgggacatcaacggactcacagagaatccgaaaatcagagaatccg

SEQ ID NO: 2560 - DNA, 297 bp, Homo sapiens
  misc_feature 1..297: note = U/M: U (0.08:0.88) in Breast Basal Epithelium
  misc_feature 1..297: note = source = chr11:12031670-12031966; Gene: DKK3 (promoter-TSS)
  source 1..297: mol_type = genomic DNA
cgccaaaacagccgctttcccttctacttctgggcctggggcagggccctcctgaactgcaaggaaagccccattccccggcatctcctgctctgtcccctgggcatctggaagccctggttgagcattcattagctttctgggggtggctgagcccgtccaggaacctggagctgagtctccacatgcccccgcttgtcacttcgggcagagtggacattaggaagaaactaatgccgaactggagggtgctgtgggggcatattgtggggccgagctaggaaatgcagtgctgcg

SEQ ID NO: 2561 - DNA, 390 bp, Homo sapiens
  misc_feature 1..390: note = U/M: U (0.06:0.86) in Breast Basal Epithelium
  misc_feature 1..390: note = source = chr1:24945158-24945547; Gene: SRRM1 (Intergenic)
  source 1..390: mol_type = genomic DNA
cgccattgcactccagcctgggcaataagagtgaaactccgtcttaaaaaaaaaaacagatggagtaggagtgagtgaagggaagtgggaaaagaagagaaataaagaagagagctctgggtcaggtgtggtcgctcacgcctgtaatctcagcactttgggaggccgaggtgggtggatcacctgaggtcaggagttcaagaccagcctggccaacatggtgaaaccccatctctactaaaaatacagaaagtagccaggcgtggtggcaggcacctgtaatcccagctactcaggaggctgaggcaggagaatcgcttgaaactgggaggtggaggttgcagtgagccaagatcgtgccactgcactccagcctgggcaacaggagcg

SEQ ID NO: 2562 - DNA, 405 bp, Homo sapiens
  misc_feature 1..405: note = U/M: U (0.11:0.91) in Breast Basal Epithelium
  misc_feature 1..405: note = source = chr2:10543898-10544302; Gene: HPCAL1 (intron)
  source 1..405: mol_type = genomic DNA
cgagtccggccaacaaagagttcttatccgttcattacaaacgcccactctttccagtccttacctgatcaagaattcagaggcaatttttcaggtatttttttgactcggactttacaaatttgaactaccattcaagtaattggtctgaattcctaagtttcgatggtatttttctcttccttcttctggctgcctctcctccccataccctgcatttgttaatgtacccatttgttccatattctgtttgttctttattgctctatacactgctccataatgttctctatcatttgtccattcattacccatgaaggtacatgcagaggtcaccagcccagaggtttgtagcagggacaagttacttgctggtggtggtctccccaaaagtttgggcctgcg

SEQ ID NO: 2563 - DNA, 74 bp, Homo sapiens
  misc_feature 1..74: note = U/M: U (0.11:0.9) in Breast Basal Epithelium
  misc_feature 1..74: note = source = chr6:106580209-106580282; Gene: PRDM1 (Intergenic)
  source 1..74: mol_type = genomic DNA
cggctggcttgaacaacgtatggaatgatgagataaaagaaagagaaggaaccgggccagcctgacgagggccg

SEQ ID NO: 2564 - DNA, 180 bp, Homo sapiens
  misc_feature 1..180: note = U/M: U (0.06:0.85) in Breast Basal Epithelium
  misc_feature 1..180: note = source = chr15:68636277-68636456; Gene: ITGA11 (intron)
  source 1..180: mol_type = genomic DNA
cggtgctggaatccggcagctggggtgagcagaaggggccgcggggacctgggcgtgctacactgactgctcattccccatcagagttggttgcctcctgtcagaggccctgggaaagagacccaggagtgggcactagggcacagcctgaggatatggggccaggcttaggaggacccg

SEQ ID NO: 2565 - DNA, 239 bp, Homo sapiens
  misc_feature 1..239: note = U/M: U (0.11:0.9) in Breast Basal Epithelium
  misc_feature 1..239: note = source = chr8:71396054-71396292; Gene: NCOA2 (Intergenic)
  source 1..239: mol_type = genomic DNA
cgaatgtggaccttgttaaggccgtatgcccataagcaaaggaaatgtgaaattgagaaaactttccaaggcctcacaactttccaggcctcccctgacctatttgtattttccagacacacaacaccttcctctgaattatcctcattattcccaagtagccctggattccacctcctgccctttgtcgatggccaaactagagacctggcttggatagtgctagcaataagctcgcg

SEQ ID NO: 2566 - DNA, 245 bp, Homo sapiens
  misc_feature 1..245: note = U/M: U (0.14:0.93) in Breast Basal Epithelium
  misc_feature 1..245: note = source = chr2:23645918-23646162; Gene: KLHL29 (intron)
  source 1..245: mol_type = genomic DNA
cggggcctcagggcctggctgtcatggagccgtggcggggagccgcaggcctcagcgtggacagtggggttggcgggccccgcaggtggtccctgggaagttcctggtcacaggaagtgtttttcactcatccgcttactgttcttttttccctgcgaacagaaaagcctggatggttctcccggctgctgtccagggccgggctctgcagggcaattctggggccaccagaggcgtctgctgcg

SEQ ID NO: 2567 - DNA, 280 bp, Homo sapiens
  misc_feature 1..280: note = U/M: U (0.1:0.89) in Breast Basal Epithelium
  misc_feature 1..280: note = source = chr1:19583402-19583681; Gene: MRTO4 (intron)
  source 1..280: mol_type = genomic DNA
cgtggggacagtgtggccaggcagcatggagaagtgggtgccactggctcagcctgggcctgagctcactggggaccggagctactttgcatgttgctgagggatggggagggcagggctcttccttcacagaatgctctttctcttgcttggtaggatgttctttggcaaaaacaaggtgatgatggtggccttgggtcggagcccatctgatgaatacaaagacaacctgcaccaggtaagtctctggccctcacggggtggagctaaggcaaagccg

SEQ ID NO: 2568 - DNA, 387 bp, Homo sapiens
  misc_feature 1..387: note = U/M: U (0.12:0.91) in Breast Basal Epithelium
  misc_feature 1..387: note = source = chr2:235347621-235348007; Gene: ARL4C (Intergenic)
  source 1..387: mol_type = genomic DNA
cgtggtggctcatgcctgtaatcccagcactttgggaggtcaaggcgggtggatcacctgaggtcaggagttcaagaccagcttgaccaaaatggtgaaaccccgcctctactaaaaatgcaaaaattagctgggtggggtggcgggcgcctgtagtcccagctgctcaggaggctgagacaggagaatcgcctgaatccgggaggtggaggttgcggtgagccaagatcgtgccattgtactctagcctgggcaacaagagcaaaactccgtctcggtgaggggtggagagaaaagatactggtctggagtgatttattttagaaatatcagattctgttaagttttttataaattgtctttgggagtgattgaagaaatagtgcg

SEQ ID NO: 2569 - DNA, 96 bp, Homo sapiens
  misc_feature 1..96: note = U/M: U (0.12:0.9) in Breast Basal Epithelium
  misc_feature 1..96: note = source = chr21:18266959-18267054; Gene: MIR125B2 (Intergenic)
  source 1..96: mol_type = genomic DNA
cggctgaagactaacactgcctgattacctcggaagccctgtagaccatcacggacaccgagctttaagtaactctcacagtggagggtaagtccg

SEQ ID NO: 2570 - DNA, 129 bp, Homo sapiens
  misc_feature 1..129: note = U/M: U (0.13:0.91) in Breast Basal Epithelium
  misc_feature 1..129: note = source = chr16:81701854-81701982; Gene: LOC100129617,CMIP (TTS,intron)
  source 1..129: mol_type = genomic DNA
cgggggcaggacggtgccgctcctgggtggccagacacagcccgaggggctggcagtcccagcacctccgcagccctggccacgaccctgggaatgaatgcggcggccagattcacaggcccctgtccg

SEQ ID NO: 2571 - DNA, 150 bp, Homo sapiens
  misc_feature 1..150: note = U/M: U (0.11:0.89) in Breast Basal Epithelium
  misc_feature 1..150: note = source = chr15:75430416-75430565; Gene: C15orf39 (Intergenic)
  source 1..150: mol_type = genomic DNA
cgcgcttggatggatatggcggattaggctatgcctttggagaactaactcctctcggagaagggggctctctctcacagccaggaccttctggggtgcctatgcggagacgccctccttccttgacccacttcttctccccactccccg

SEQ ID NO: 2572 - DNA, 219 bp, Homo sapiens
  misc_feature 1..219: note = U/M: U (0.14:0.92) in Breast Basal Epithelium
  misc_feature 1..219: note = source = chr14:102713035-102713253; Gene: MOK (intron)
  source 1..219: mol_type = genomic DNA
cgagttcggtccaggtgttacaaccttacatgcctacttacgcaacctggccctaccacagctgtgatgaatgcctattagtaggaaccgtaacaacccacacaatcttatcctatccagcaccactgtgcgccagcgacatccaccctcaagcattcccctcagccacctaaattccaaactgtgcaacttacaccgcacaactcaaaccctccaccg

SEQ ID NO: 2573 - DNA, 308 bp, Homo sapiens
  misc_feature 1..308: note = U/M: U (0.12:0.9) in Breast Basal Epithelium
  misc_feature 1..308: note = source = chr19:41282372-41282679; Gene: MIA-RAB4B (intron)
  source 1..308: mol_type = genomic DNA
cgggcacagtagctcacacctgtaatcccaagtaaggccaagttgggaggatagcttgagcccaggagttcgagaccagcctgggcaacatagcaagacccccatctctataaaaaaaaatttaaaattaactgggcttcatggcatgtgtctgtggtcccggctactcgggaggctgaggtgggaggattgcttgatcccagaagttgaggctgcagtgagccgtgatcatgctactgcacctcaacctgggcgacacaatgagaccctgtttccaaaataataataataataaaagcaaatatgcg

SEQ ID NO: 2574 - DNA, 360 bp, Homo sapiens
  misc_feature 1..360: note = U/M: U (0.16:0.94) in Breast Basal Epithelium
  misc_feature 1..360: note = source = chr3:101372548-101372907; Gene: ZBTB11 (intron)
  source 1..360: mol_type = genomic DNA
cgaaagtagaggacaaactggcaaactgttagaatcaaccttaccaggaactctaaaaactaatgaaaagcttatagtgactaggcaaatgtttaacaaagaaaaaaaattgtcgaatccctgtaagagagctttctgatgtacccctgaacctaaaagttaaaagaaaagcaaaagagagagcttcctggcttttgtttcctaagagacagggtcttgctatgctgcctgcccagactagttttgaactcctggccttaagcgatcctcccacctgtctccaaaagtgctggaattacaggcatgagccactgcgcccacactaccaccctaaaatgacttttttttttttttgaggcg

SEQ ID NO: 2575 - DNA, 389 bp, Homo sapiens
  misc_feature 1..389: note = U/M: U (0.12:0.9) in Breast Basal Epithelium
  misc_feature 1..389: note = source = chr7:501558-501946; Gene: PDGFA (Intergenic)
  source 1..389: mol_type = genomic DNA
cgcctaacctcagtgggcacatatgcagcgccttccatgtgccagcccctctcagacatgagacacggcccaggggaggacatggcacacggggtctccctgctgatacttggggcgcaggcattccctgcggggagctggacccacacatgggaaagggactccaggaaggggagcgtgtgagcaaaggcctggagccgggaccagcccagacgggaggcactggcccattccaggtccccgcacccggaggccggctccccagcagctgactgacctgagcagatcctgggagaggctggcagtgggcagaaactcagcagaggacaactttgtttctttgcaggacaccctccctaggtttggggatgtcctgcctaatgacagcg

SEQ ID NO: 2576 - DNA, 104 bp, Homo sapiens
  misc_feature 1..104: note = U/M: U (0.11:0.88) in Breast Basal Epithelium
  misc_feature 1..104: note = source = chr1:112354156-112354259; Gene: KCND3 (intron)
  source 1..104: mol_type = genomic DNA
cgatgaaaggacagggtgagtcgatctttaaggtttgggtatttctgagtccctgggtgaatcccacttactgaattcccaaggcaaatgcgctcttcggatcg

SEQ ID NO: 2577 - DNA, 154 bp, Homo sapiens
  misc_feature 1..154: note = U/M: U (0.13:0.9) in Breast Basal Epithelium
  misc_feature 1..154: note = source = chr16:68876141-68876294; Gene: TANGO6 (Intergenic)
  source 1..154: mol_type = genomic DNA
cgcagcttattctcgcccaaggaccggaccattaagaagtttgtcctttgggccgggcgcagtggctcacgcctgtaatcccagcactttgggaggcccaggtgggcaggtcacttgaggtgaggagctcaagaccagcctagccaagagggcg

SEQ ID NO: 2578 - DNA, 331 bp, Homo sapiens
  misc_feature 1..331: note = U/M: U (0.1:0.87) in Breast Basal Epithelium
  misc_feature 1..331: note = source = chr10:127680637-127680967; Gene: FANK1 (intron)
  source 1..331: mol_type = genomic DNA
cgcagagcaatggccggccttttaaaaatattcagttgcacttattgatggcattcccttgggccaggcccacaaagtcttgaaggattcaggggtgggaggaatgaaacattctgttcaccctggaatttcctctctgttcctcaggactcctgcctatagtgggagtagaaagaattgctgtgcactgcaaacaagggccttttcatttcttttctgtttctttgtcaaattcaggtaaatggagacgttttcgtacctctgttgcttcacacaggtttcagtgtaatcctcagtccctcctttccctcttggtagtagcgtgaggacg

SEQ ID NO: 2579 - DNA, 338 bp, Homo sapiens
  misc_feature 1..338: note = U/M: U (0.08:0.85) in Breast Basal Epithelium
  misc_feature 1..338: note = source = chr20:58148658-58148995; Gene: LOC100506384 (Intergenic)
  source 1..338: mol_type = genomic DNA
cgggtcataaggatgctgaagaaactcccagcatagacagatacagtgaacctggcaagtcactgctgttgggttggtgtgtgtccagggaggtcactcacagccatgacctgctacggaatttgccaggggtctaatgcaaatgaaagtacagttcccttattcaaaaattatgaagagctgcaaggtggtggtggtagggcgggaagccaagtctgggcccttttgagcctggggccctgtgcctgtccaggcagctctcatcgcagtcattctggccatttacccccactcgggctctgcatgaggagctggcctggcctggaagcgcagtgtcg

SEQ ID NO: 2580 - DNA, 377 bp, Homo sapiens
  misc_feature 1..377: note = U/M: U (0.08:0.85) in Breast Basal Epithelium
  misc_feature 1..377: note = source = chr17:62016913-62017289; Gene: SCN4A (exon)
  source 1..377: mol_type = genomic DNA
cgacgcctgagcaggtctctcacccctcctcctgagccagcagaggcctggccctgccatgcccagaacagcgatgcagcagaagtgcttcttcaggccacaggaagttggaaggttgagcctgaaccagttgggccttccctgctgcacgccccagggtcgaaatatctaacctgagctcaactgtacattcttaggatcactttggggagagaggtgggaaaggtgagaaagagacgggcgtggggagatgagaagggagatctctgaggctggatgaggctcctggagccctggtggtgctcacggaggagtgaggcagggagagagggaaggggcgagaatcttcttactgagcagcaggtccctgactcccg

SEQ ID NO: 2581 - DNA, 411 bp, Homo sapiens
  misc_feature 1..411: note = U/M: U (0.16:0.93) in Breast Basal Epithelium
  misc_feature 1..411: note = source = chr3:188679687-188680097; Gene: TPRG1 (Intergenic)
  source 1..411: mol_type = genomic DNA
cgtcagacatttaagtgcctgctatttgctggccatcgtgtaagatactgaggctatagaaggcatgattttggtctaatgtagtgaaggagaaagacctgtaaaaaattgcaatgcaacatgcttaatgcaaccctagaggccagtacaaagtggtaagggaacacagaggaaggaacagctatctgtactggtagtcagggaagatttctcagagagattaacctctgtgcttgccagagaataggaggtaggagtttgccagggggaaaaagttagagaggggcattcaaggtagagggaatagtgtgtacaacagcctagagacagagaacatgaagcattcatgagtgagatggaaagggatgaattttaagctgctgaatgtcaagatcggagccgtgcttttcg

SEQ ID NO: 2582 - DNA, 168 bp, Homo sapiens
  misc_feature 1..168: note = U/M: U (0.12:0.88) in Breast Basal Epithelium
  misc_feature 1..168: note = source = chr2:37002030-37002197; Gene: VIT (intron)
  source 1..168: mol_type = genomic DNA
cggccgacttccaaggaaaatctgaactaaggtaattttcaccgggggcaaaataaggaaagaaagcagcctgctggttgtgtgtaaatcggctgaccctgtgtaatcccctcaggtatccaaaggcaagatccttcaggagctgccttccagaaacctgttggagcg

SEQ ID NO: 2583 - DNA, 214 bp, Homo sapiens
  misc_feature 1..214: note = U/M: U (0.15:0.91) in Breast Basal Epithelium
  misc_feature 1..214: note = source = chr2:85212332-85212545; Gene: KCMF1 (intron)
  source 1..214: mol_type = genomic DNA
cgtagttcgagccagatcttggacaccctcgcattgtaggctgtgttgaggactgttgaactgtgaatgctttgagaaacacatttcggaagccctgcttctatagaaaggtctttttgactaactaaatggcagggggtggaaagtacatactcagtttgtgtcccaaacatctctaagaacatttctttacaaactttccctacatttaccg

SEQ ID NO: 2584 - DNA, 216 bp, Homo sapiens
  misc_feature 1..216: note = U/M: U (0.17:0.93) in Breast Basal Epithelium
  misc_feature 1..216: note = source = chr1:214549650-214549865; Gene: PTPN14 (exon)
  source 1..216: mol_type = genomic DNA
cggattcggctgcgctcggcgttttctggcagagctgctgtgctgaaaatgccattcgcctttttctttggaatttgctcatattctgtgaacaccattccctcttctagtttcttcttcagggttctgaactgcaacagaaattgatcttcagctctctaaattatctgatccaaaaactcaatgaaacaaccaaatttctttaaatatttagcg

SEQ ID NO: 2585 - DNA, 270 bp, Homo sapiens
  misc_feature 1..270: note = U/M: U (0.14:0.9) in Breast Basal Epithelium
  misc_feature 1..270: note = source = chr1:249109855-249110124; Gene: SH3BP5L (intron)
  source 1..270: mol_type = genomic DNA
cgaccaagccgatatttcctctgccctaagtcatcccagggccaggtactagacaattagaggccgcccctatagcccagggcctagcaaagttattccaactatccactcctaaacttatccaaacttgcctaccctgcctcacctactcctttccacgaaaaccacactaaggcgctgcgctttgctttctccttcacttctgcctcctgaaggaccctggctgcttccccgtgtggccctgcatggcatggatgtcccctcctctcg

SEQ ID NO: 2586 - DNA, 346 bp, Homo sapiens
  misc_feature 1..346: note = U/M: U (0.07:0.83) in Breast Basal Epithelium
  misc_feature 1..346: note = source = chr12:19794155-19794500; Gene: AEBP2 (Intergenic)
  source 1..346: mol_type = genomic DNA
cgttcttggtattcatttacctgaatgcttacaagcttctgacaaaattgatcacttcctccctattgaaatgctcacttctgggacccctaactgccatggtttcctctttaccttgcttggccttccttctcggtttctttagctggctgctctaaacgcaggagcgccccaggcctctgtccctggattgttctctacccacacttgctctctgcatgaccttattcagctatttggttacatgtactatctccatacacaggacttccaagttttctccagttctgacctttccattgagttttagatttctgtatccatcacctatttgacatctgtaacg

SEQ ID NO: 2587 - DNA, 361 bp, Homo sapiens
  misc_feature 1..361: note = U/M: U (0.11:0.87) in Breast Basal Epithelium
  misc_feature 1..361: note = source = chr17:63075041-63075401; Gene: GNA13 (Intergenic)
  source 1..361: mol_type = genomic DNA
cgggggggctcaggtttacaaattactgcatgtcacagacttatggggtcaccagaggcagttggaagcgtaatttaaaatcagtgactacagccaggcacggtggcccaggcctgtaatcccagcactttgggaggccgagccaggcagatcacctgaggtcaggagtttaagactggcttggccaacatggtgaaaccctctctctaataaacatacaaaaattagacgagcgtggtggtgcaagcctgtaatcccagctactccggaggctgaggcaggagaattgcttgaacccaggaggcagaggttgcagtgagctgagatcgcaccactgcactccagcctgggtgacggagcg

SEQ ID NO: 2588 - DNA, 200 bp, Homo sapiens
  misc_feature 1..200: note = U/M: U (0.12:0.87) in Breast Basal Epithelium
  misc_feature 1..200: note = source = chr13:110986666-110986865; Gene: COL4A2 (intron)
  source 1..200: mol_type = genomic DNA
cgcatctaacctgttgtgagcaccaccaccatctgcatgttggaagtgcctgcacgatgccctaaggattctgttccagaggcttcccttagatgagaccacagagcagccgtctgcctggggagcagacccatggccgcattccagaaagagtgttcatgctcatttctactaaaatccaggtttcgcacttggaagcg

SEQ ID NO: 2589 - DNA, 201 bp, Homo sapiens
  misc_feature 1..201: note = U/M: U (0.11:0.86) in Breast Basal Epithelium
  misc_feature 1..201: note = source = chr18:10350798-10350998; Gene: APCDD1 (Intergenic)
  source 1..201: mol_type = genomic DNA
cggtatggacagtctccctgggtagctgacgtgtggatctggtatgtttttatcggaaaggggagcaaatactgccagaacagcaaccaaccagtttttgaagctggctactgtcttagggaggatggagaacgctggggagagagaggatcccacagtaggaaatgaaggagaggtgaggctagcaggcccagtcctccg

SEQ ID NO: 2590 - DNA, 204 bp, Homo sapiens
  misc_feature 1..204: note = U/M: U (0.18:0.93) in Breast Basal Epithelium
  misc_feature 1..204: note = source = chr16:1715962-1716165; Gene: CRAMP1L,CRAMP1L (intron,exon)
  source 1..204: mol_type = genomic DNA
cggctcccacactcccaacagtggctgtaaaggaagccccctgcggccacatcctgctgtgagggcatggcgggcgggctcgacatgtctgcttttgccctcgccctcgcagggagaggttcgttccggcccatccagtcttctctgaccaaagcagctctgtctcggccgatcgtgcccaaggtccttccaccccaggccacg

SEQ ID NO: 2591 - DNA, 224 bp, Homo sapiens
  misc_feature 1..224: note = U/M: U (0.14:0.89) in Breast Basal Epithelium
  misc_feature 1..224: note = source = chr1:229259042-229259265; Gene: RAB4A (Intergenic)
  source 1..224: mol_type = genomic DNA
cggaccttctcatcctctcagccagtgatttgagtctgatcctcaagcccggccatcactgcatccgttcaggtcacaggtattactgcacacctgctctgtgccaggcagctcctcgcccactgagccccagaggatgttccctttgtgcttttgttggcacttgtggtgacagaggtggctggtcacttgtcaggtcctggcagagtctctatgcccactcg

SEQ ID NO: 2592 - DNA, 239 bp, Homo sapiens
  misc_feature 1..239: note = U/M: U (0.16:0.9) in Breast Basal Epithelium
  misc_feature 1..239: note = source = chr16:25087469-25087707; Gene: LCMT1 (Intergenic)
  source 1..239: mol_type = genomic DNA
cgccagtcaaagcctcatcttcagacctgggagaaggtgacaatcgaaatgaaatgctttcatgagacgcagggccagtaattacaagtattcaatccccctaggcccagggactatcgcggaagaggtgggcgtgtgagattgtaagggccaactttgagggataaaattagagtttttttgtaaacattaatatcaaaggcacactgaggccaggcaagcgtctggcccctgtgtcg

SEQ ID NO: 2593 - DNA, 147 bp, Homo sapiens
  misc_feature 1..147: note = U/M: U (0.18:0.91) in Breast Basal Epithelium
  misc_feature 1..147: note = source = chr1:117278031-117278177; Gene: CD2 (Intergenic)
  source 1..147: mol_type = genomic DNA
cgcatcgctccagaaacagtagagcagtgaagagccgggcccacaggttctgtgaatgtaacaagacagccgtttcatgcccctgagtgtgtgtgggatggttgcagcaggaggaatcacagcacacagccaggtgaatgctgagcg

SEQ ID NO: 2594 - DNA, 199 bp, Homo sapiens
  misc_feature 1..199: note = U/M: U (0.16:0.89) in Breast Basal Epithelium
  misc_feature 1..199: note = source = chr19:2556720-2556918; Gene: GNG7 (intron)
  source 1..199: mol_type = genomic DNA
cggtgactgaggtcaccttctcctaagccagggtctctcctcccacccagcaatacggacaccagcgccggattgttctccggggcgggagcatcctgggctctgcagggtggtgagctgcgtccctggcatccacctgctccgtgccaggagcaccccccagatgtgttggccacaaatgtccccagacactgccccg

SEQ ID NO: 2595 - DNA, 274 bp, Homo sapiens
  misc_feature 1..274: note = U/M: U (0.19:0.92) in Breast Basal Epithelium
  misc_feature 1..274: note = source = chr17:21111328-21111601; Gene: TMEM11 (intron)
  source 1..274: mol_type = genomic DNA
cggagtctcgctctgtcgcccaggctcaagtgcagtggcgtgatcttggctcactgcaagctccgcctcctgggttcacgccattctcctgcctcagcctccagagtagctgggactacaggcaatcgccaccacgcccggctaattttttgtatttttagtagagacggggtttcactgtgttagcgaggatggtctcaatctcctgacctcgtgatccgcccacctcggcctcccaaagtgttgggattacaggcatgagccactgcgcccg

SEQ ID NO: 2596 - DNA, 288 bp, Homo sapiens
  misc_feature 1..288: note = U/M: U (0.19:0.92) in Breast Basal Epithelium
  misc_feature 1..288: note = source = chr1:17897130-17897417; Gene: ARHGEF10L (intron)
  source 1..288: mol_type = genomic DNA
cggaggatgaacttggccgctgtgctgagaacaacatgtcagggcaggggtagaggtgagagcagagggactggtcaggaggcgttttgaatagcccaggtgagagatgatggtggtttgggccatggtggtactgtggagggggtgagatgcgctcggattctgggcgtatgttgaaggtagagccagcaggtttgctgaagggtgggccctgggtgtgagacagaggtgtcaaggatgactccaaggttttggccttagcagctggtgggatggtgctagcaagcg

SEQ ID NO: 2597 - DNA, 307 bp, Homo sapiens
  misc_feature 1..307: note = U/M: U (0.18:0.91) in Breast Basal Epithelium
  misc_feature 1..307: note = source = chr17:55365004-55365310; Gene: MSI2 (intron)
  source 1..307: mol_type = genomic DNA
cggctcctacgtggggcattggaaagccctttccctgcctggttgaaaccttcgcaaactgcacacctggccggcctggcagtcaaatggattccatggcagcccctgcctagagcggagcaggatgtctgtttcggccggttatgaatgaaatcagagtcctgtgctggcaatgccattgtgcgtaaggagtgcaaggaatgcactgggccatcttcccagagagaccctatagacgaaacagatgtggtcagatgagcccctggagacagcagtagtggggagtgtgggagagcaggccagggcg

SEQ ID NO: 2598 - DNA, 356 bp, Homo sapiens
  misc_feature 1..356: note = U/M: U (0.2:0.93) in Breast Basal Epithelium
  misc_feature 1..356: note = source = chr2:219041675-219042030; Gene: CXCR1 (Intergenic)
  source 1..356: mol_type = genomic DNA
cggctgtagtccaggaatagtcagggaagcagataatttggttaaaatatcttggcctaataagggaactgggcaggtggggataactaaaaaagagtgtgtaaaagagtattgtctaagttggcaccagagttggggagttttaagaggtttagaagcctggctgtcaatacctacaacagttatggaggcaagggaaacaggcctttgaaaagaaggtaatgtggagtgggtagcctgagtattgattaagaaggggacagacttaccctccactgtgagagttacctaaagctcggcatccgtgatggtctacggggcttccgaggcaatagggcagcatcagtcttcaaccg

SEQ ID NO: 2599 - DNA, 215 bp, Homo sapiens
  misc_feature 1..215: note = U/M: U (0.19:0.91) in Breast Basal Epithelium
  misc_feature 1..215: note = source = chr15:63920307-63920521; Gene: HERC1 (intron)
  source 1..215: mol_type = genomic DNA
cggccaggcgctgtggctcatgcctgtaatcctaacactttgggaggctgaggcgggcggatcactggaggtcaggaatttgagaccagcctggccaacatggcgaaaccccgtttctactaaaaacagaaaaaattagccaggaatggtagtgcatgcctgtagtcccagctacttgggaggctgaggcagcagtcatttgaacctgggaggcg

SEQ ID NO: 2600 - DNA, 224 bp, Homo sapiens
  misc_feature 1..224: note = U/M: U (0.17:0.89) in Breast Basal Epithelium
  misc_feature 1..224: note = source = chr19:56596817-56597040; Gene: ZNF787 (Intergenic)
  source 1..224: mol_type = genomic DNA
cggcaagtgccacaagaacccatgttcctttctttacctgggacccacgccgtgcctactgggcacggagctgctgcccaaaacacatttgtagaatgagtgagtgaggggtgggcaatgactacctgagtgcatgaatcagtaacggacagcgtgtgacaccaaagcacaggtcaggtgttgggtccggtgcaggctgatgtcaaggtggtcatgtgagctcg

SEQ ID NO: 2601 - DNA, 317 bp, Homo sapiens
  misc_feature 1..317: note = U/M: U (0.2:0.92) in Breast Basal Epithelium
  misc_feature 1..317: note = source = chr12:114275299-114275615; Gene: RBM19 (intron)
  source 1..317: mol_type = genomic DNA
cgccatctcctttacaggcatccttcccttggagccccaccgtttccctaacgaggtgggcgctgtggccccatcgtaccaatgacggagctgaggcagagcgacttgcctgaggtcacagaacgggtatgaggacacattcaggtaaaatgcaaggggcagccgctcagatcagctgatacaaatactcggtacagcaggatggtggaaaacacaggtttgaatcctggctctgtggtcagtagctgggtgcccttgggcaagttacttgccctctctgtgccttagttttctcatatttaaaacagaggattgcg

SEQ ID NO: 2602 - DNA, 364 bp, Homo sapiens
  misc_feature 1..364: note = U/M: U (0.17:0.89) in Breast Basal Epithelium
  misc_feature 1..364: note = source = chr16:4947620-4947983; Gene: PPL (intron)
  source 1..364: mol_type = genomic DNA
cgctctcagagagtagcacccccggtgctggggggactcccaggaaaggtaagtacctggtggtagtcctccatgtacttgaggtggctctcctcgcagatgagcaggttcaggtactccttccagtctgcgtgcacagcctccatgtgcgcctgccaggaagagaaggggccggtcaccactgggcaggtactgcagacaccaagggagggactgctgggatattgggctggggcatggcgggggagggaggcatctggcatctgtctgggtgtggctaccacaggggtagccagcttctgctcaggagtgggaggaggagagaggggtcacgtcaaggagccaaacagggatgccacatacg

SEQ ID NO: 2603 - DNA, 409 bp, Homo sapiens
  misc_feature 1..409: note = U/M: U (0.2:0.92) in Breast Basal Epithelium
  misc_feature 1..409: note = source = chr17:45992349-45992757; Gene: SP2 (intron)
  source 1..409: mol_type = genomic DNA
cgggtggatcacctgaagacaggaattcgagatcagtctggacaacattgtgaaacctctgtctctactaaaaatacaaaaattagctgggcatggtggcagcgcctgtaatcccagctactcagaaggctgaggcaggagaattgcttgaacttggaagggggaggttgccgtgagcctagatcatgccactacactccagcctgggcaacaagagcaaaaattccgtctcaaaaaaaaaaaaatagaaaaaaagaaaatctgaggcaagtgggcttgcgttctttttgggcattttatacattactccatctcttttcttccaacagatccacagaccagcatggctgccactgctgctgtgagtcccagtgactacctgcagcctgccgcctccaccacccaggcg

SEQ ID NO: 2604 - DNA, 430 bp, Homo sapiens
  misc_feature 1..430: note = U/M: U (0.21:0.92) in Breast Basal Epithelium
  misc_feature 1..430: note = source = chr16:23573777-23574206; Gene: UBFD1,UBFD1 (intron,exon)
  source 1..430: mol_type = genomic DNA
cggggttttaccatgttgcccaggctagtctccaactcctgacctcaggtgatctgaccgctttggcctcccagtgtgctgggattacaggcgtgagccaccgcgcttggcccccttctctttttttctgactgtccctccatctcttaccattctctcgtgccttcaggagcgcctgccaacggtaccgctgtccggcatgtacaataaatctggaggaaaagtgagactcacctttaaactagaacaagaccagctgtggattggcactaaaggtatgttcttcctcgcctccttgctggcccactgcctgcctctggcacccagcagcactcacattttagagtgcgatttcacccctccttctgaaacctctctctccactgtgctttgcttgcttctggcttttaaatttgcttttagatgctcg

SEQ ID NO: 2605 - DNA, 164 bp, Homo sapiens
  misc_feature 1..164: note = U/M: U (0.21:0.91) in Breast Basal Epithelium
  misc_feature 1..164: note = source = chr17:78157897-78158060; Gene: CARD14 (exon)
  source 1..164: mol_type = genomic DNA
cgcatgaagcgtgaggttagcgcacacttccatgaggtgctgaggctgaaggacgagatgctcagcctctcgctgcactatagcaatgcgctgcaggagaaggagctggccgcctcacgctgccgcagcctgcaggaggaggtagggggacaccctgcaccccg

SEQ ID NO: 2606 - DNA, 178 bp, Homo sapiens
  misc_feature 1..178: note = U/M: U (0.24:0.94) in Breast Basal Epithelium
  misc_feature 1..178: note = source = chr12:113822938-113823115; Gene: PLBD2 (exon)
  source 1..178: mol_type = genomic DNA
cggggctccccgagcagggcagtgcccacaggagccccttttctgatcacctccaccccatctctcttctcggtctcagcggcatggtggtggtggctgacaagacctcggagctctaccagaagacctactgggccagctacaacataccgtgcgtgccttctcactccgctccccg

SEQ ID NO: 2607 - DNA, 158 bp, Homo sapiens
  misc_feature 1..158: note = U/M: U (0.22:0.9) in Breast Basal Epithelium
  misc_feature 1..158: note = source = chr1:229370733-229370890; Gene: RAB4A (Intergenic)
  source 1..158: mol_type = genomic DNA
cggccttcccgtacagaaccaatgacggagtgggaagatgatcttcccctggaatttggacatccagtggccaaactcctcttcgactgccccgcagccgaatacctctcagtgctcagacattctcctctttctctgccgtgcctttctgccattcg

SEQ ID NO: 2608 - DNA, 286 bp, Homo sapiens
  misc_feature 1..286: note = U/M: U (0.2:0.88) in Breast Basal Epithelium
  misc_feature 1..286: note = source = chr17:21106166-21106451; Gene: TMEM11 (intron)
  source 1..286: mol_type = genomic DNA
cgccagcacacatcctgagatggtggcgtgggtctgcccccacctgcctgtcaaaccatggccccggcctcctgcagcctcggcgtcttcatatgggctgggcactgttgctgcccactgtctaagacacctatccacagcagaaacacaaaggacataagccacactgccttcaaacaaaggcagggtcctgcacaacggcgctgaggccagaggctcaccaattctgcttttaaagccagttaggcaaagggaatctcggtttccactgggaaaggacaacacg

SEQ ID NO: 2609 - DNA, 295 bp, Homo sapiens
  misc_feature 1..295: note = U/M: U (0.21:0.89) in Breast Basal Epithelium
  misc_feature 1..295: note = source = chr5:169576283-169576577; Gene: FOXI1 (Intergenic)
  source 1..295: mol_type = genomic DNA
cgctgacgctccctgcatattccacttccagccctgggccctgaaatgggatctccttcttgcctctattttacaggtgagccaactgaataccagagaagtttgacaacctgccctaggtgacgcggtagcatctcacttccaagggcattaggtgatcccccacatcattcgccaaaatagtagtcaagatgtctgcagatctcccggacaccaggcttcatgttcactctctcgttaagtgtcacgatgctatgaagtcggtactgttctctccactttatagatgaggacg

SEQ ID NO: 2610 - DNA, 267 bp, Homo sapiens
  misc_feature 1..267: note = U/M: U (0.29:0.95) in Breast Basal Epithelium
  misc_feature 1..267: note = source = chr12:12387113-12387379; Gene: LRP6 (intron)
  source 1..267: mol_type = genomic DNA
cgggaggctgaggaaggagaattgctttaacccaggaggcggaggttgccgtgagccaagatcgcaccattacactttagcgtgggcaacaagagcgaaactccatctcaaaaaaaaaaaaattagcaaggcatgatggcacatgcctgtagtcccagctacttgagaggctgaggccaaagaatcacttggacccggaaggcggaggttgcagtgagcccagatcgtgccactacactccagcctgggcgacagagtgagactccg

SEQ ID NO: 2611 - DNA, 371 bp, Homo sapiens
  misc_feature 1..371: note = U/M: U (0.29:0.95) in Breast Basal Epithelium
  misc_feature 1..371: note = source = chr21:46397434-46397804; Gene: FAM207A (TTS)
  source 1..371: mol_type = genomic DNA
cggagagcagagggtccttctgcagggaggagacgcggagtgggcccagccctgaagctcttgctgacccggaagtgagagaggtcctcctttgttgctggaagccctgggatttgggggttggtttttggactgtgaatcagtgactgatcagtccttgttttcaggttgtggaaagcaagggggtggtgcgtccccaggcccctgaggcccagcttggctccccctgcccgagctccccccgtcccagggccctgcagggcctcgctggcccatgtcctgcagcggggctgggcaggctggatgtggtggtgtaccccactcagagtgtctgggaagtgcagagcaggaccactctcagctcccaggcg

SEQ ID NO: 2612 - DNA, 373 bp, Homo sapiens
  misc_feature 1..373: note = U/M: U (0.16:0.8) in Breast Basal Epithelium
  misc_feature 1..373: note = source = chr19:47491676-47492048; Gene: ARHGAP35 (intron)
  source 1..373: mol_type = genomic DNA
cgggttgagatgtgatcctgttttgccagggcctcagatctaccctcctcacaaagtcccagcaccagagaaagtgagggaccatcgtgtgaggagctgagcccttgggacagagacccaagttacatagctcttggcagggactcccttctcctaagctgagccagcttcaagaggcctaaagtcaggcagccaaactacctcttggaattgcccacactgtgggatgagaagccacgtcccccagtgccagaagcaaaagcaccagagcagggcacattcccatctatcagcagccagggcaggaggcaccacccagagtggacaccacacccacttcccaggtgggcggcccttgcgccttgcagcaccg

SEQ ID NO: 2613 - DNA, 404 bp, Homo sapiens
  misc_feature 1..404: note = U/M: U (0.29:0.92) in Breast Basal Epithelium
  misc_feature 1..404: note = source = chr1:6008175-6008578; Gene: NPHP4 (intron)
  source 1..404: mol_type = genomic DNA
cgcgtcaaggccacatccatctcaggcaccagtacaacgacctgcggcctctgcacgaagcccagaccattgtgcacgcccacacgcaggcgccgctccaggatctccagggcaccaccgtccagtgggccacatccctggaagaggcacagaaggaatgagccccggcacagacggaaagagggagctcgccagaagtccctgggggaggcgagcagagagaagaaactggagcagaagttgcagataactgcagatcagatgatgcttagtcaagatgagtgcaagcaaatgacagatacagcacccaatcccagccactggccttggggcactgcccgggcagttttggcatttccaacacagcatgatcctctcagcaacgcacaccctcagatgcctcg

SEQ ID NO: 2614 - DNA, 415 bp, Homo sapiens
  misc_feature 1..415: note = U/M: U (0.3:0.93) in Breast Basal Epithelium
  misc_feature 1..415: note = source = chr2:109076333-109076747; Gene: GCC2 (intron)
  source 1..415: mol_type = genomic DNA
cggagatcacgccgctgccaggctggagtgcagtggcgcaatcttggctcactgcagtctccgcctcctgggttcaagtgatcctgcctcagcctcccaagtagctgggattatagccatctgctaccatgcccagctaattttttgcatttttggtagagacagggtttcaccatgttggccaggctggtcttgagctcctgacctcaggtgatccacccatctcagctttccaaagtgctgggattacaagcatgagccaccgtgcctggccactaaatagattttctaatccttttgttctctctgctcatttggtttctatttgcatggaatatctttttccatgctttaactttcagtctgtatgtctctttacagggaaagtgcattttttgtgggcagcacgtagtcg

SEQ ID NO: 2615 - DNA, 423 bp, Homo sapiens
  misc_feature 1..423: note = U/M: U (0.28:0.9) in Breast Basal Epithelium
  misc_feature 1..423: note = source = chr15:64434782-64435204; Gene: SNX1 (exon)
  source 1..423: mol_type = genomic DNA
cgaagaggggaagtttcatgcttgataattaaaattttctgagataggaatgtcatatttacctatttaagccaagtttttttagataaaaggtatggaacctgctttccccttggctagttcagcgtttgggctccggagtgctgaagatgaggactggacttcgagctggtgtgatcccagtattcagtgtcagtactcagtgacaaaataaatgagagaaacgggaataagaattgtcgcctacacaaaaataccagcaactgttaactcttcccagaagattttcattctgaatgctcctgtagctaggaaccctaaaaagtctttgaagcaactcaagttttaaaaaaggggaggaactcctggaaatctcaggatggggccaagatgtggctggagagtgtgtggtgatggagggcg

SEQ ID NO: 2616 - DNA, 180 bp, Homo sapiens
  misc_feature 1..180: note = U/M: U (0.32:0.93) in Breast Basal Epithelium
  misc_feature 1..180: note = source = chr16:798881-799060; Gene: NARFL (Intergenic)
  source 1..180: mol_type = genomic DNA
cgcttgaacccgggaggcggaggttgcagtgagccgagattgcgccactgcactccagcctaggcaacagagcgggactccatctcaaaacataaaaataaagtagtggaaaaaaactataggaaaaagaaaagaaaaagctaaaaagaaaatttaacatgtgaaaaagcgtactggccg

SEQ ID NO: 2617 - DNA, 447 bp, Homo sapiens
  misc_feature 1..447: note = U/M: U (0.04:0.92) in Breast Basal Epithelium
  misc_feature 1..447: note = source = chr9:139103335-139103781; Gene: QSOX2 (intron)
  source 1..447: mol_type = genomic DNA
cgtgggcatcacctgaccccacgcttgtccagagagcctggggggaaaccgctcctgacatgtcgggaagccacctcatgtctccccaggggcctcaggctgtgggcacagaccagaagccagcacctgccaagatgtccaacacgcccacgggtgctgcaggctctggagacacaatgactgtggacagcccagagggcggacatgctccccagatgccctggtgccaggaggatgagccacggactcggccgccagggcccaaaggagcccttccaggggcgcctcccacctcccaccagtcttccagccgtctgtgccagaacgcccggagtgccgctcttccccgggatttgccagctgggtgcagtctctcttgccttacaagcaactctcaggggctggtaccagggcaatgactctgctcattctaaacctgcagctgtc

SEQ ID NO: 2618 - DNA, 307 bp, Homo sapiens
  misc_feature 1..307: note = U/M: U (0.1:0.93) in Breast Basal Epithelium
  misc_feature 1..307: note = source = chr22:18277229-18277535; Gene: MICAL3 (intron)
  source 1..307: mol_type = genomic DNA
cgccatccggtgacgggcctccaggacgctcacacctgcgctccttcaaattctgagccaggacaattttggggaaatgtacaaacacagaggtgacttccacccgtccgtgtcactgtcccctctctcccccaggaacagggagagccaaccaccccctttccttctggcccttctatggctgtgcagggaccccatgctgcagctgggggctgtcacactctggattgtgagaccaaaggggtgagctgacaggacacgccaaaacttacaggaacgatgctgggaggagtgctgacggggcatc

SEQ ID NO: 2619 - DNA, 383 bp, Homo sapiens
  misc_feature 1..383: note = U/M: U (0.1:0.93) in Breast Basal Epithelium
  misc_feature 1..383: note = source = chr22:36692812-36693194; Gene: MYH9 (intron)
  source 1..383: mol_type = genomic DNA
cgagaactagggccagcagcaagcaggaagggctggcccaggccacctggcctcaggcgggcaggcggggtcctcacctggccagggcggcctggagctcctcctctttcttggccagctgcatcttgagctccgcgatctgggcctggagctcggcgatctggtcgctgaggtctgtggagtctccctccagcttccggcgggtcttctccagctcctgtcgctgcttctcctccctgcggaggcgctctgcaatgcagggggagcccacatagccctcagtgccatgggttctgtctccgtgtcaattacttatacaaaatactgagcactcgttatgaaacgtgtgtcaggcttaaagcatcacaaacacacagacactc

SEQ ID NO: 2620 - DNA, 490 bp, Homo sapiens
  misc_feature 1..490: note = U/M: U (0.1:0.93) in Breast Basal Epithelium
  misc_feature 1..490: note = source = chr20:39803942-39804431; Gene: PLCG1 (TTS,exon)
  source 1..490: mol_type = genomic DNA
cgggccagggtgggaagagaagaaatagcagagcctattttggtgaggttttttgtttttaagtcaaagaagactcagtatgctttccctgaggaatgaaaaagggattgaggagttgcctgactcctgggtgggtggggtacaggcagttaggtgctgaatgaagctgccatccttgctgcagcttctaactggtaaaaagatccagggatggagatgggaaggttagaaaggcagccctcacctctgaggacagaggccggggtccaggcccgtgggcgcaaaggtgcctcatagcatagccagcattcagcacacacaaacctactgcccacatttgggctcagggttggccatttgctagttctgctgccctcttaagatctgactgccaaataaatcatcctcatgtcctttttcctttgacttgtatgctctttcgggggctcaggaaagcctgttgcatgggacatgctcactagaaacagtc

SEQ ID NO: 2621 - DNA, 235 bp, Homo sapiens
  misc_feature 1..235: note = U/M: U (0.12:0.94) in Breast Basal Epithelium
  misc_feature 1..235: note = source = chr19:14041071-14041305; Gene: PODNL1 (TTS)
  source 1..235: mol_type = genomic DNA
cgctctataggcggaatctggtagagagtgaggtaagcagcttaggagatggggtggttgggggatcactgtggtcgtagcccacctccatgaccccagtggcctcctctcccccagctgcagcggctccgcaggtgaggagcccatggggcgggcagcccccagaaagcgggcagcaggccccgataccgggaagagccgacacagccacgaaccagacaagcagacaatcagc

SEQ ID NO: 2622 - DNA, 385 bp, Homo sapiens
  misc_feature 1..385: note = U/M: U (0.19:0.93) in Breast Basal Epithelium
  misc_feature 1..385: note = source = chr22:39822758-39823142; Gene: TAB1 (intron)
  source 1..385: mol_type = genomic DNA
cgcagtggcccaggccgtcgtggaccgggtgaagcgcatccacagcgacaccttcgccagtggtggggagcgtgccaggttctgcccccggcacgaggacatgaccctgctagtgaggaactttggctacccgctgggcgaaatgagccagcccacaccgagcccagccccaggtacgtgtgctgtgcagacaggcagtgcctggggatgccatctgggggccagaggtgggtgcagagcccccgaggctgcttgaaacggagatggagtcaggaggcctggctctgagtggctctaattcaggttctctgatttttagcctctctgagctgagtgttgatttttgctcttttgtctgtaaaatgaggttaataccacctgcccc

SEQ ID NO: 2623 - DNA, 362 bp, Homo sapiens
  misc_feature 1..362: note = U/M: U (0.22:0.95) in Breast Basal Epithelium
  misc_feature 1..362: note = source = chr5:176919342-176919703; Gene: PDLIM7 (intron)
  source 1..362: mol_type = genomic DNA
cgagcaggcctggccgtccaagcccacaccgcccaccgcccggatgtcccggccagcctcgtaccttctgcggtttgctctgaaccggctgggccctggaggagaaggaaagcgtgacagcgggccgggcccgcagggatccccactgccagcgcgggcgcacccatccatgtccacccgcatacctgctgaggcccaggctgaggcgctccccgcaggcccggatcttgttctgagcttcgatgtgtgtgaggctacccgcattctcgccatcgatgctcagcacccagtcacccacggccactccggcctgcgccgctttgcccccaggagtgagctgtggagagagaagcaaagtgacc

SEQ ID NO: 2624 - DNA, 279 bp, Homo sapiens
  misc_feature 1..279: note = U/M: U (0.24:0.96) in Breast Basal Epithelium
  misc_feature 1..279: note = source = chr19:4944306-4944584; Gene: UHRF1 (intron)
  source 1..279: mol_type = genomic DNA
cgcctgccagggctcacgctgttgttctttgtgtctgtgcctgggacagggcatggcctgtgtgggccgcaccaaggaatgtaccatcgtcccgtccaaccactacggacccatcccggggatccccgtgggcaccatgtggcggttccgagtccaggtacctgcagcgtcccggggctccaggggccacgcgggctcatcctgcttttctgggggcagtttctcctggctttggccagccaggggtcagggtggttaccagtggtgcctcggctagcc

SEQ ID NO: 2625 - DNA, 344 bp, Homo sapiens
  misc_feature 1..344: note = U/M: U (0.28:0.94) in Breast Basal Epithelium
  misc_feature 1..344: note = source = chr5:1808108-1808451; Gene: NDUFS6 (intron)
  source 1..344: mol_type = genomic DNA
cggggatgggtgctagggtgaggcccccagccagacagtggtggctgagaaggtcctccgtgagaggaagattgaattgaggggcctcggaattccaccctccgcctttgcaggtcatctggttggtggcagaggtggagctctgtgcttgcttccaggttcatccttagagggtttaagaggggaggtttgcctgagtctctcttgtcttgaagcaacctgggcgtcctttagggggtgtttgagacgcgggcggtgcgatgtgcgccatggctgctctccagagcttttgtgtggcttcccgcttctgcatgctcctcctcctgagcttccctcccaaatac

SEQ ID NO: 2626 - DNA, 487 bp, Homo sapiens
  misc_feature 1..487: note = U/M: U (0.07:0.94) in Breast Basal Epithelium
  misc_feature 1..487: note = source = chr13:113887317-113887803; Gene: CUL4A (exon)
  source 1..487: mol_type = genomic DNA
cgcgctagactggctgagaaacagaagtttttaaaaggaattcttggcacctagatgtagagaattagcaacttcacatttttgggatgatattgaatagcatagctggagattcacccataacttctaaaaagcgaaactaaaatgtagtcctgtttcttactgtctatacagggatatgggattagaactgtttagaacccatattattagtgataaaatggttcagagtaaaaccattgatggaatcctactgctgatcgagcgcgagaggagcggcgaggccgtggaccggagcctgttgcggagcctcctgggcatgctgtctgacctgcaggtgagtgctgcctgtgcggaagatacctgggtacctgcccagctacttgcaccagaataaatggttgtaccaaagatgttaaacaatgaaatcataaaggcatttgttgaagataggagagtctttaaaatccctagaaggggaatagcg

SEQ ID NO: 2627 - DNA, 129 bp, Homo sapiens
  misc_feature 1..129: note = U/M: U (0.04:0.9) in Breast Basal Epithelium
  misc_feature 1..129: note = source = chr20:33925690-33925818; Gene: UQCC (intron)
  source 1..129: mol_type = genomic DNA
cgtcacggtctcctctagaaacacatctaggtgtctcctgaattcatttattggctttgccgcacacagtataataccgcctttgttagtctcctggcccggccccttcaagcacggtgttcagtctcg

SEQ ID NO: 2628 - DNA, 479 bp, Homo sapiens
  misc_feature 1..479: note = U/M: U (0.07:0.93) in Breast Basal Epithelium
  misc_feature 1..479: note = source = chr20:31015007-31015485; Gene: ASXL1 (intron)
  source 1..479: mol_type = genomic DNA
cgtgagtctattggaagaagcttttcttaggaggtgaaatttgggatggagttctcctctacactctagccctgtagccacaatctttggtttagatctttggcattttttgttggacatctttcatagtgtctacctcttcttcctgcctctaggcttcccgcggttgccagatgaaattccgaaaactcaaatcattcctgtagttaatattcttcagtgactccggaacaatcaaattcttgatccctccacatgggtcttaccatctgccctcgtgccctctctagcttcctgcatattgagttccccacagccctagtttccctgagtttggaatattctttcacatttgctcatcccactatctagaaacttcctacaatctctctactgccaacctgtctgtctagttgctaatttattttaaaacccagcttaagcaacacatccttttggatgtgttacttccctgatcg

SEQ ID NO: 2629 - DNA, 289 bp, Homo sapiens
  misc_feature 1..289: note = U/M: U (0.1:0.93) in Breast Basal Epithelium
  misc_feature 1..289: note = source = chr20:62314803-62315091; Gene: RTEL1-TNFRSF6B (intron)
  source 1..289: mol_type = genomic DNA
cggaaggaaatttctctctccttctgtgcgtacccaggcacgtgcacatgcatgcagagtacgcacacacgcacgcacgcctgcacaaatccacgcatgttgccaagtctctgtgttccagccgtggtgtctgccccccggtgttctctagttcggcttctccgcatttctgtgaatgattccggcttcttggtgttcccagcagaactccctcaagtctgcggcggggctctgacggcggtggcttggctgacatggccacattgctgagcctgttgggggctttgcg

SEQ ID NO: 2630 - DNA, 497 bp, Homo sapiens
  misc_feature 1..497: note = U/M: U (0.08:0.9) in Breast Basal Epithelium
  misc_feature 1..497: note = source = chr3:41287899-41288395; Gene: ULK4 (TTS)
  source 1..497: mol_type = genomic DNA
cgtggaatcagtttgctcccgaaatgaacaaaagccaggcaggtaaaaggggagaagacaagaggctcagagattagcttccaaaggcttgctctggagctgcggttgggagagcattcctgcctcgtcccgcccttccgctcttccctgaggagaggagagatgctcacagatgctggcaggctgaggactgtgctttgcatccactgctttattaccacaggcagtgctaaccttagcccacctggcccacacagagagggaaagaacatttctgagaacagctaacaaacctgggcttcccagatgcattccacaggaaccaaggaagtccattctgagtcagttttctaggccctggggttagtgagcacttgggccaccaggttctgggttaagctgactttattaggtccaaagacagctgtgaggggatgtggcaaaggtgtctgggagctgaccttgcttatgcatccgagggctggggccacagggcg

SEQ ID NO: 2631 - DNA, 113 bp, Homo sapiens
  misc_feature 1..113: note = U/M: U (0.14:0.94) in Breast Basal Epithelium
  misc_feature 1..113: note = source = chr19:14041194-14041306; Gene: PODNL1 (TTS)
  source 1..113: mol_type = genomic DNA
cggctccgcaggtgaggagcccatggggcgggcagcccccagaaagcgggcagcaggccccgataccgggaagagccgacacagccacgaaccagacaagcagacaatcagcg

SEQ ID NO: 2632 - DNA, 145 bp, Homo sapiens
  misc_feature 1..145: note = U/M: U (0.08:0.88) in Breast Basal Epithelium
  misc_feature 1..145: note = source = chr9:72024669-72024813; Gene: FAM189A2 (Intergenic)
  source 1..145: mol_type = genomic DNA
cgcttttcggatttgaaattggtgagatgtttcttggtctggttggtctgaggacctgagggcataggtggatctttctcacggagcaaagagcaggaggacaggggattgatcccccaagggaggtcccccgatcggagtcacg

SEQ ID NO: 2633 - DNA, 143 bp, Homo sapiens
  misc_feature 1..143: note = U/M: U (0.11:0.9) in Breast Basal Epithelium
  misc_feature 1..143: note = source = chr11:3164799-3164941; Gene: OSBPL5 (intron)
  source 1..143: mol_type = genomic DNA
cgcagagatgcaccaagtcaaagaagccagataccaaaggccacatcttgtccgcttccacgcccacgcagtgtccaggacgggcaggtctggacacggaacgcagactggtgcttgccagggcccggcccggttctgtcccg

SEQ ID NO: 2634 - DNA, 184 bp, Homo sapiens
  misc_feature 1..184: note = U/M: U (0.17:0.96) in Breast Basal Epithelium
  misc_feature 1..184: note = source = chr21:46398140-46398323; Gene: LINC00163 (Intergenic)
  source 1..184: mol_type = genomic DNA
cgtacaggagccataggcagcagatcccacgctccctcggccggggccagcttggctgcccagccccagctccttagagaacgggcttctcgcttcagaggagctggtcacaaaccagtggtcgcgacaaaaccattcctgtggtggagcgcgtgtggggcgcgtgtggggcgcgtgtggggcg

SEQ ID NO: 2635 - DNA, 117 bp, Homo sapiens
  misc_feature 1..117: note = U/M: U (0.13:0.91) in Breast Basal Epithelium
  misc_feature 1..117: note = source = chr21:46424553-46424669; Gene: LINC00162,LINC00162 (exon,promoter-TSS)
  source 1..117: mol_type = genomic DNA
cgcgtggccttccgtgcctgcctcttccgggcagcagcatggtgggtgtttctgaggctcctccgtgtcgctccacccgtcagcacttcatgcctctcggggctgggccacatttcg

SEQ ID NO: 2636 - DNA, 298 bp, Homo sapiens
  misc_feature 1..298: note = U/M: U (0.12:0.9) in Breast Basal Epithelium
  misc_feature 1..298: note = source = chr7:531331-531628; Gene: PDGFA (Intergenic)
  source 1..298: mol_type = genomic DNA
cgctgggtcccggctcccaccccagggagaacgggagcagcctcaaatgctgacggcgaagacccagggcccccagaagtgcgagggcctccttcagtgcccgctcggggccagggactctgccaagtgacctggtgtgcccagaaaggactcagcccccagcgctgggcagggcaaggtggcctgggaagtccttcagggagggcaggcagggacgcttcaagagcctggggtctagaggtctcatggtgccggccctcaccacagctcctgcagctctgtgcctctacaagggccg

SEQ ID NO: 2637 - DNA, 390 bp, Homo sapiens
  misc_feature 1..390: note = U/M: U (0.18:0.95) in Breast Basal Epithelium
  misc_feature 1..390: note = source = chr19:4944196-4944585; Gene: UHRF1 (intron)
  source 1..390: mol_type = genomic DNA
cggctgagagagagcaagaagaaggcgaagatggcctcggccacatcgtcctcacagcgggactggggcaaggtgaggcgggtccttcccacgtgcccgtggcccctccccgcctgccagggctcacgctgttgttctttgtgtctgtgcctgggacagggcatggcctgtgtgggccgcaccaaggaatgtaccatcgtcccgtccaaccactacggacccatcccggggatccccgtgggcaccatgtggcggttccgagtccaggtacctgcagcgtcccggggctccaggggccacgcgggctcatcctgcttttctgggggcagtttctcctggctttggccagccaggggtcagggtggttaccagtggtgcctcggctagccg

SEQ ID NO: 2638 - DNA, 412 bp, Homo sapiens
  misc_feature 1..412: note = U/M: U (0.12:0.88) in Breast Basal Epithelium
  misc_feature 1..412: note = source = chr21:46424069-46424480; Gene: LINC00162 (intron)
  source 1..412: mol_type = genomic DNA
cggaccggagccaggagttgccacgggaggtgggtgcctgggagccccagcacagaggtggcccctctcaggccaggctgggccgcagcatctgtgggcccctccacgccccctcccatccgtgctggccccattggcctgggctcgcagctggactgcttcctgggtggaggcaccagggcccacagtggtacggcctggcattggtgcaggcttttaagcatagatggcatctttaacaaaaatgggctctcacagaatgtttttaaattaaaatgtaattcacatacctcggaatttacctcttgaaagtccaggcagttcagcggcatccggtccacccccactgcggtgcagtgccagggtgagccagccacccccggcgggagaaacaccatccccacagccggcg

SEQ ID NO: 2639 - DNA, 172 bp, Homo sapiens
  misc_feature 1..172: note = U/M: U (0.16:0.91) in Breast Basal Epithelium
  misc_feature 1..172: note = source = chr19:39914132-39914303; Gene: PLEKHG2,PLEKHG2 (exon,intron)
  source 1..172: mol_type = genomic DNA
cggcgtcccgagtgcgagagctggcccggctttacagcgagcggatccagcagatgcagcgggcggagactcgggcatcagccaatgccccgcgccgccggcctcgggttctggcccaaccccagccatccccctgtctgccccaggagcaggcagagccaggtgaggtccg

SEQ ID NO: 2640 - DNA, 189 bp, Homo sapiens
  misc_feature 1..189: note = U/M: U (0.18:0.93) in Breast Basal Epithelium
  misc_feature 1..189: note = source = chr19:11537720-11537908; Gene: CCDC151,CCDC151 (exon,intron)
  source 1..189: mol_type = genomic DNA
cgcctccgccatctccagaaggcgcaggctgtgctgcagctggagctcctccagccgcctctgccgcaacaccacctggtgccgcagggcgttctgctgcttcaccttctccctcagccggtggtctaggtgctccagggcctgccgcaaggaggggagcgaaagcaggagcctcaacaccctaccccg

SEQ ID NO: 2641 - DNA, 190 bp, Homo sapiens
  misc_feature 1..190: note = U/M: U (0.14:0.89) in Breast Basal Epithelium
  misc_feature 1..190: note = source = chr2:241067850-241068039; Gene: MYEOV2 (intron)
  source 1..190: mol_type = genomic DNA
cgtcttctccaggaccccagaaggctccctcgccctcggcccattctgctccaagacgcaggcaggcattccccgcagagctgtgctgccttgctgaggttcattatctggccggcagctgagcctgcggtcccccagcagctttctaaatgtggcagggatcggtatagaggtctctgtgatgaaggcg

SEQ ID NO: 2642 - DNA, 213 bp, Homo sapiens
  misc_feature 1..213: note = U/M: U (0.13:0.86) in Breast Basal Epithelium
  misc_feature 1..213: note = source = chr5:139725-139937; Gene: PLEKHG4B (promoter-TSS)
  source 1..213: mol_type = genomic DNA
cgtcggcggggaagcagtcagctagactggtcttgaaatgcctgtcccggctgggaagaggcacagaggaagtcaccgtccctgaggccatgtatggctgtgtcttcacgggggcgttcctggagtgggtgaaccgggagcggcgccatgtccccctgcaaacctgcttgctgacctcaggcttggccgtccaccgagccccgtggagcgacg

SEQ ID NO: 2643 - DNA, 267 bp, Homo sapiens
  misc_feature 1..267: note = U/M: U (0.19:0.92) in Breast Basal Epithelium
  misc_feature 1..267: note = source = chr7:100403023-100403289; Gene: EPHB4 (exon)
  source 1..267: mol_type = genomic DNA
cggacagaggccctcccacccaacaccaatgaacggacacttctgggcaaggagtgggggcagagagcgggaaggagggcccattctctgcagtcctcacccgccattctcccgggccacgattttgaggctggcggggttccggatcatcttgtccagggcgctgaccacctgggggaagcggggccgggcattccggtctttctgccaacagtccagcatgagctggtggagggaggtgggacagtctgggggcgggggcagccg

SEQ ID NO: 2644 - DNA, 333 bp, Homo sapiens
  misc_feature 1..333: note = U/M: U (0.16:0.89) in Breast Basal Epithelium
  misc_feature 1..333: note = source = chr9:98206494-98206826; Gene: PTCH1 (exon)
  source 1..333: mol_type = genomic DNA
cgcccaccccagttctccctttgccaatgtgactattggagaaagttctacaccatgcagaaatcaggggccgcgcagcctccggcgcaacacgagctgggctcaggaagggagcgagggcacgccaggagccagagggaagtcgacttcagaattctgcatcatccctcctccacgcaggacgttttctgagcagagctgggtgttaggatggcagaccatgtgggtgacaggcaccaagacagcagcaggggggtggccagggtccccagcagagacacacacacacgcacgcacgcacacacacacacacacacccagcagccacaagcg

SEQ ID NO: 2645 - DNA, 171 bp, Homo sapiens
  misc_feature 1..171: note = U/M: U (0.13:0.83) in Breast Basal Epithelium
  misc_feature 1..171: note = source = chr19:14041313-14041483; Gene: PODNL1 (TTS)
  source 1..171: mol_type = genomic DNA
cggttctggactcacccctcatccgggcccccagccccgccagagcctccgtggctgcgggtgttgggaaccatgcctgccagccagtatgtgcccctcacccaggcctggctgggccctggagagtcctgtttgcacagcccaggggtgtccggcctctggcccgccccg

SEQ ID NO: 2646 - DNA, 217 bp, Homo sapiens
  misc_feature 1..217: note = U/M: U (0.21:0.91) in Breast Basal Epithelium
  misc_feature 1..217: note = source = chr10:135085004-135085220; Gene: ADAM8 (exon)
  source 1..217: mol_type = genomic DNA
cgggagcaggtatggggcatggacgcacctcgggggggccgcagtcgcactgctccccacgctccacaaacaggttcccacacacggggccgcccaccaggtggctgaggtcaggggcgttggcgaggcacaccgactgcggccgctccaaaaagctctccaggtaggcctggctgcagtcactgaacatcctggggaaactggagctggggaggcg

SEQ ID NO: 2647 - DNA, 219 bp, Homo sapiens
  misc_feature 1..219: note = U/M: U (0.25:0.94) in Breast Basal Epithelium
  misc_feature 1..219: note = source = chr22:31483907-31484125; Gene: SMTN (intron)
  source 1..219: mol_type = genomic DNA
cgcccctggcagccaaaatgacctgcctctcgcacccactgcagctggaggtcacagcagatctggcagagcggcggcgcatccgctcagccatccgggaactgcagcggcaggagctggagcgcgaggaggaggccctggcatccaagcgtttccgtgccgagcggcaggacaacaaggagaactggctgcagtgagtagcggggggtggaacatgcg

SEQ ID NO: 2648 - DNA, 168 bp, Homo sapiens
  misc_feature 1..168: note = U/M: U (0.22:0.88) in Breast Basal Epithelium
  misc_feature 1..168: note = source = chr8:128867488-128867655; Gene: PVT1 (Intergenic)
  source 1..168: mol_type = genomic DNA
cggtgaagccctgagggatttcatcgctgaggtggatggagaagcagctgggggccttggctgtaaggacccctaagggttagtgtctggagcttgggggatgggaatgggtcccggtgtgcggaaattggatggctcgctgaccccaaggggaaacccttgttgacg

SEQ ID NO: 2649 - DNA, 416 bp, Homo sapiens
  misc_feature 1..416: note = U/M: U (0.28:0.91) in Breast Basal Epithelium
  misc_feature 1..416: note = source = chr16:3170204-3170619; Gene: ZNF205,ZNF205 (exon,TTS)
  source 1..416: mol_type = genomic DNA
cggcgctccaacctgcaccggcacgagaagatccacaccaccgggcccaaggccctggccatgctgatgctgggggcggcggcggcgggggctctggccacacccccacccgctcccacctaggaggccaggaaagggggagcggggcgcccagggccactggaacagccccactggagtcaaggctccgagggaggagagaggggctcgggaagggagctggggcggtgagggcatggggtgaggcatggcgatgggggagggcgagggcgagaaagggcaggcactctgcgaattaaaggccttggacttgaagcgcccgcctacacagctttgtctcctggtgccctggcgctgattccccgagcgtgggggagctcctgggctaatcccctgtcctcattgaggcatccccg

SEQ ID NO: 2650 - DNA, 427 bp, Homo sapiens
  misc_feature 1..427: note = U/M: U (0.32:0.95) in Breast Basal Epithelium
  misc_feature 1..427: note = source = chr11:57069591-57070017; Gene: TNKS1BP1 (intron)
  source 1..427: mol_type = genomic DNA
cgacaggcccaaggtacccccaggccgaatgaccggggcccggtgcccacgcttgcgccccaagttggcacggctccgatacatggcactgtcgaggatctcggtgtcctgcttggggcaatggtgacaccactgccattgctgcctcatcccacgggagcccctcaacagtagctgaccaggagctggacccctcctgcagccggagcttcacgttcacgtgacgcacctacaacccgctttctgcctcctggactgggactgctcagggaagctccaggaatggggctctcgctgcatcgccctcacccacccactgtcatgggctcaccctccactgacctcaatgaaggagaagtcctgactgggggatctggcaggagggccttgggagggtcgccgagaagtctgtgctggcccctgatcg

SEQ ID NO: 2651 - DNA, 294 bp, Homo sapiens
  misc_feature 1..294: note = U/M: U (0.31:0.88) in Breast Basal Epithelium
  misc_feature 1..294: note = source = chr22:40804348-40804641; Gene: SGSM3 (intron)
  source 1..294: mol_type = genomic DNA
cggcccttaaggccctgttcgaacatggactgaagaagccatccctgcttgggggcgcctgccacccctggctgtttatcgaggaggtaagtcagtggctgggcccatgacccccaccctgcaccagccctgctgtgccccctagtacccatcttaggtccttcctgccccacagagaggatgggaagagctggcagcgtggtgacaggtgcccagtcggccccaagggctttgaaccagcatcttcctgtccctgcactcacaccgtgtgctgtccccacaggctgcaggccg

SEQ ID NO: 2652 - DNA, 307 bp, Homo sapiens
  misc_feature 1..307: note = U/M: M (0.87:0.07) in Breast Basal Epithelium
  misc_feature 1..307: note = source = chr1:22668568-22668874; Gene: ZBTB40 (Intergenic)
  source 1..307: mol_type = genomic DNA
cgtgtgtaagtgttttattgtttgcccgcagaggtgtgaatgaagtaatgggccttctccagcactccatccgtctcaggctgacagccgcgctccgagcccaggctgctctgtgtaaacgctgtcaccctgccatccccgagcaggcagcttcctccgggaaactgtaatcagggcctcccgcacccgcagctggccctgtccgcagctcataaatcacgctgccttcccggaaagcagagggagagacagacagggtgacgggagacagacgaggccgggcgaggaagagacgatggggaggccg

SEQ ID NO: 2653 - DNA, 110 bp, Homo sapiens
  misc_feature 1..110: note = U/M: M (0.89:0.14) in Breast Basal Epithelium
  misc_feature 1..110: note = source = chr10:123804329-123804438; Gene: TACC2 (intron)
  source 1..110: mol_type = genomic DNA
cgaaagactgtttgtttactcaagcaatggcagcgagggaaagatttgaagaagcaactgggcgagtccacgtgtcctgtaaggcttgccaattgtttttccagcctgcg

SEQ ID NO: 2654 - DNA, 472 bp, Homo sapiens
  misc_feature 1..472: note = U/M: M (0.85:0.12) in Breast Basal Epithelium
  misc_feature 1..472: note = source = chr6:169652865-169653336; Gene: THBS2 (intron)
  source 1..472: mol_type = genomic DNA
cgtttatgcttgtgtttttccaaaagaaagatttcggtgcctgtctgcagcagaatgtagtttgaatttgcaaaggtcttttaaaactcttttcgtatgaacaatcaaagtaaaagatagctttgcagagagctaattgtttaccggccgtccaccaccaacagcagtctgattaaacaccagactcctgggtgctcagctcccagtcctgggcagccaaacccaccttccttaagtggtagccaggcaacctgccagctcgcttttcatatgcaaactgccccaagactgttaaaagtcgctgtgtgtcccggcagtcacaggattttccatagacttaccacaaatactctctagttatgttcaaaaccacttttcagctgctaataatgttaacaatcagagtctctctttaatctactaataatgttaacaatcagagtctctctttaatctactaataatgttaacg

SEQ ID NO: 2655 - DNA, 344 bp, Homo sapiens
  misc_feature 1..344: note = U/M: M (0.91:0.2) in Breast Basal Epithelium
  misc_feature 1..344: note = source = chr17:70515212-70515555; Gene: LINC00673 (intron)
  source 1..344: mol_type = genomic DNA
cgggggtggggaagctttgcaggagaaggagggcaggcgaggaaaggaaccagagaggaggcagaaaactccaggggaaattccgtcggggggaagataaaagggggctgtaaagcaattttgacaggttaacagacaggtaatattccaacggtgtttacttaaccaggctagcactccatgcagcgccgattaagctgcagcacgagagcctcagcagctaagggtttcacagaaacaaagatctagtcagagaaaaccaaataacagccagtcagatgctggcagcccggcctgcagctcccccagctcggaagccacacggagatgcttcctggagaccg

SEQ ID NO: 2656 - DNA, 286 bp, Homo sapiens
  misc_feature 1..286: note = U/M: M (0.78:0.13) in Breast Basal Epithelium
  misc_feature 1..286: note = source = chr12:54372756-54373041; Gene: HOXC11 (Intergenic)
  source 1..286: mol_type = genomic DNA
cgagtgggctgagagcagaaagggctcttctcttaagagtaaagaagaactttgaacttcaagggagtcaagggcaccaccccttcgctttccccgcctctctcaggaatccgtagggcaattgtttctgggccagtattccctgaaggggggagctactggggttttctggtgccccagggttggataatgctgtttgctaacccctccctactgagagcccgccagaaccagtgcacgcgactgcactctttattattcatataaacctttggaaaaggcaacg

SEQ ID NO: 2657 - DNA, 415 bp, Homo sapiens
  misc_feature 1..415: note = U/M: M (0.7:0.06) in Breast Basal Epithelium
  misc_feature 1..415: note = source = chr20:55646391-55646805; Gene: BMP7 (Intergenic)
  source 1..415: mol_type = genomic DNA
cgatactggctgcccagcgggacctgatgagacatcagagagctcacgtgacctccattatcactgtcaccgccgtgcgtgctgttcacacaaacatcggagatgtaagtgacactttacaacaattcctgagccttccatcatgtggctcagaatgtcatggcccagatgatgtcggggggtattaaaacaaataaatgaaccatcgaacaagtaaataaataaatacacaaaggaaagcggggagagagagggaaggaaccggttagggcactcacacagtgcagaggagtctgaaaaggaatgctgcctgctggcgccctggctctctgtctctctccctgtctttctgtctctgtgtgtgtttttcctcactctctgtctctctcgccatctagctgtctctcctctctcg

SEQ ID NO: 2658 - DNA, 110 bp, Homo sapiens
  misc_feature 1..110: note = U/M: M (0.69:0.07) in Breast Basal Epithelium
  misc_feature 1..110: note = source = chr5:134824947-134825056; Gene: TIFAB (Intergenic)
  source 1..110: mol_type = genomic DNA
cgttccgtcttccccagacttgccccgcgcccctcggacttggggagggtaggacgcagcagcagggccaggatcgcggggcctgcaggtggaggaggtagaggagcccg

SEQ ID NO: 2659 - DNA, 80 bp, Homo sapiens
  misc_feature 1..80: note = U/M: M (0.77:0.23) in Breast Basal Epithelium
  misc_feature 1..80: note = source = chr17:40933276-40933355; Gene: WNK4,WNK4 (exon,intron)
  source 1..80: mol_type = genomic DNA
cggtgtatcgagggctagacaccgacaccacagtggaggtggcctggtgtgagctgcaggtgcggctgggagccccctcg

SEQ ID NO: 2660 - DNA, 169 bp, Homo sapiens
  misc_feature 1..169: note = U/M: M (0.91:0.04) in Breast Basal Epithelium
  misc_feature 1..169: note = source = chr12:112205077-112205245; Gene: ALDH2 (intron)
  source 1..169: mol_type = genomic DNA
cgccgcctctgacagtccccgtcccatttccccgtgacttgggccccctctccgtcttcgcccagcctcggtctgttttccagggccaactctcggggttccgttctccccatggtccttgctttcgggtctccgcagggtccccaccctcacccactcagaagacgcg

SEQ ID NO: 2661 - DNA, 195 bp, Homo sapiens
  misc_feature 1..195: note = U/M: M (0.85:0.05) in Breast Basal Epithelium
  misc_feature 1..195: note = source = chr1:9600250-9600444; Gene: SLC25A33 (intron)
  source 1..195: mol_type = genomic DNA
cgcgggaggtcatccggacgggcaaaaaggtctgcggacgttggacgtcagcaaggcctgggtggtgctggtgaacggtgatgcttgcggccacacgcggggtggctaagccagggacccgaactcatatgaggtctggaaggtgtgttgagacacttctcgccggctggtagacgcttccaacgccagagaccg

SEQ ID NO: 2662 - DNA, 238 bp, Homo sapiens
  misc_feature 1..238: note = U/M: M (0.85:0.05) in Breast Basal Epithelium
  misc_feature 1..238: note = source = chr12:54090151-54090388; Gene: ATP5G2 (Intergenic)
  source 1..238: mol_type = genomic DNA
cgcatcaatctccaggacccgatttctgcctagcaacatcacaaccaatcaagatgcaattaaacctgtcagttcggctcatccttaactgggattggctactcgcagtatgcttatcccaagttttcattggctgacggccacctgtatggaaataagaattacccgggactctcaggcccttctcagccgtaccgacctgtggcttagtgcgctgaaacctgcaaggtcggagccg

SEQ ID NO: 2663 - DNA, 382 bp, Homo sapiens
  misc_feature 1..382: note = U/M: M (0.85:0.06) in Breast Basal Epithelium
  misc_feature 1..382: note = source = chr5:3590802-3591183; Gene: IRX1 (Intergenic)
  source 1..382: mol_type = genomic DNA
cgcgtttgccggtgtacccgcgcaggcagctacacctgtactgagagaatttacatcgccttgcttcgggatggcattgatttgggacgggtgaaatacaaacacaaactaattaaaaaccgcataatggagccctacaggaacaaggcagaaaaacaaataaatacaagtgcagctggcacggcgatggtgcctctgcccccgagcaaccgtctggtgacatcaaataagaagccctgagaactctcacaccgctgctgttgttcatattggaggcataatggaaatgatctggttaattaaggggaggtttataaaatatttacgtgtgtgcacacgcatgtaattcacttccttcgacactggggacggcgtcgtagcg

SEQ ID NO: 2664 - DNA, 213 bp, Homo sapiens
  misc_feature 1..213: note = U/M: M (0.9:0.14) in Breast Basal Epithelium
  misc_feature 1..213: note = source = chr13:37004536-37004748; Gene: CCNA1 (Intergenic)
  source 1..213: mol_type = genomic DNA
cgccccgactccaacactggcttcagcttcaatcccagaaaagtggatcaaaacgacaggttccacgaacaaacactgcgccggcgcctctactttggagaaaaggaaaagggcgtgaggtttcggtcatttttgtcaaaggaaatcagatgaaaaggggtgtacaaaggaccaggtctcgtgagcgcagccaatcttgtccgctcccaagcg

SEQ ID NO: 2665 - DNA, 265 bp, Homo sapiens
  misc_feature 1..265: note = U/M: M (0.87:0.12) in Breast Basal Epithelium
  misc_feature 1..265: note = source = chr4:113442655-113442919; Gene: NEUROG2 (Intergenic)
  source 1..265: mol_type = genomic DNA
cgcgtgaatggagagctgagggcccactagggagagaacctcttccccacccttcggtgcctgcaaaaagggacattggctatccaggggaaagtgcaagaaagagagcactaatcgctgaaccaggagacaaacacgattaccagctccgagccttgagtcagaaagtctcatagactttaagatgttaatccccagcataatccttcctttggcgtgtaggaatagtgcagccacaagagttgttttgttatttatattggcg

SEQ ID NO: 2666 - DNA, 410 bp, Homo sapiens
  misc_feature 1..410: note = U/M: M (0.78:0.03) in Breast Basal Epithelium
  misc_feature 1..410: note = source = chr5:139525387-139525796; Gene: IGIP (Intergenic)
  source 1..410: mol_type = genomic DNA
cgtctctccccatgccttcaaaggcggcctgccttcccagttcccagcctcccgccagattcttgcgtgacctcgggcggcacccagtgctgctgtggacagctcattccgccgcggcggcggctgcggctgcggcggctacaacggctcccggcgtgtccccggcgccgccagggggcgaatggggtgcccgccggctcctcggactccgggcgcgccggcactgcgctccggagaggcccggccagggaagaagcaacttccctccgccgccgcagaccagccgggcagagacttccagccccaccctcaagccctctcggtggctctgtgcgcccaggcctaggggtggggggccgtaggtgctgcgcgcccgcacaggtggtcaggccgtcagcatgcctggctcg

SEQ ID NO: 2667 - DNA, 195 bp, Homo sapiens
  misc_feature 1..195: note = U/M: M (0.84:0.1) in Breast Basal Epithelium
  misc_feature 1..195: note = source = chr5:3590590-3590784; Gene: IRX1 (Intergenic)
  source 1..195: mol_type = genomic DNA
cgctggcccaaagaccagaggacctgagcaaaatgaaaagtcactttgttcctcacgccgtgcgcagcccggcctcctctaatgacattaggagccgcagccacgacggcgctcacgggggcgcagaagtcccgctggctttgatccgcgcctctccgctgccgagagctgacagtcggctgcgcagcggccccg

SEQ ID NO: 2668 - DNA, 232 bp, Homo sapiens
  misc_feature 1..232: note = U/M: M (0.81:0.09) in Breast Basal Epithelium
  misc_feature 1..232: note = source = chr22:41810435-41810666; Gene: TEF,TOB2 (Intergenic,Intergenic)
  source 1..232: mol_type = genomic DNA
cgaacctcagtgtccccacctgtctaaaatggccccttccttctagtgtggtggggaagaacagcagcatgtcgacacccggtgagtacttagccaggtagctgtgaactctccttatctaaccctccctgccaggggcctgccacagcgccagacctgggcctggttaggtggtgcccagctgggccagtcagctccctgtggaccttggcctttgccctgggagcatgcg

SEQ ID NO: 2669 - DNA, 322 bp, Homo sapiens
  misc_feature 1..322: note = U/M: M (0.8:0.08) in Breast Basal Epithelium
  misc_feature 1..322: note = source = chr13:37004787-37005108; Gene: CCNA1 (Intergenic)
  source 1..322: mol_type = genomic DNA
cggagttagccactgagtccttcagcgacccaggaaataacaacactgttggcaggtgggggagggcgcccgggaagatatccaatagtggcgtcaggcaagaggacagaaatgctcctttcattcacctttcgaagcagagcatttggtccccgttggcctctgactctctgttgcggcaatctagatgttaccagaattcccgtgtttccttcatattcaaaggcacaggaaatctggggtgcaagcggactgctgtctctcaaggaatagaagtctgtgacaaacgtatagaaatgagtttcatgttgaacaagatccg

SEQ ID NO: 2670 - DNA, 402 bp, Homo sapiens
  misc_feature 1..402: note = U/M: M (0.77:0.09) in Breast Basal Epithelium
  misc_feature 1..402: note = source = chr14:91883165-91883566; Gene: CCDC88C (intron)
  source 1..402: mol_type = genomic DNA
cgggccaaaagttttcacctgcggggagggggacgaggagagaaagacaggaagtcaccccgtgcgcacaaacggtccaaagctctcccaggcagagactggacgggtcagtgtgagcagaagggggtcacccacgcccacaccacccttcagcaggcaccaagcccggccttctcctagggcctgtctcccctccccgcgcggggcaacagacacgagacaggaggaaaaacttcctcgccacttttctcccgcgttccagagcggaagaaataaaaataaaaaggacttttcaataaatgtctcacgtctcaaatccattgtaaatcagtgcgcccaccccagtctgttcgctttcccattcggcgccccccattccccacccgtcaccgccatccaccg

SEQ ID NO: 2671 - DNA, 281 bp, Homo sapiens
  misc_feature 1..281: note = U/M: M (0.81:0.14) in Breast Basal Epithelium
  misc_feature 1..281: note = source = chr5:174120383-174120663; Gene: MSX2 (Intergenic)
  source 1..281: mol_type = genomic DNA
cgtgattgacgctctttcttccagctctgacttaaaggggggtgtcgggggctggggcagggaatggggaggggttcggtttatttactcaagcacctactgtgtgctgctgatggggaacttcctaggcaagtcattgtcgcatttcatccctacaaacagtcccaggaggtaaatattatttatccctgtgatgtgcgtgaggaaatggcaggaaagttatgtgattttttttttcaataacctacgggaaggcagcagcaggcaacagcgtttggccg

SEQ ID NO: 2672 - DNA, 184 bp, Homo sapiens
  misc_feature 1..184: note = U/M: M (0.72:0.09) in Breast Basal Epithelium
  misc_feature 1..184: note = source = chr5:134370245-134370428; Gene: PITX1 (promoter-TSS)
  source 1..184: mol_type = genomic DNA
cggctcgtgcacacctcaggcctcaaatgacttgtttcgcctagaatcaactcccgtctcggccgcctcgaagtccccagccctggcgagaacagcccaggatgagtgaatgtttgccgaacaggatcgcaccgagcgggcgccttcgagccagcgccggggcgggggcagagcccggggcccg

SEQ ID NO: 2673 - DNA, 263 bp, Homo sapiens
  misc_feature 1..263: note = U/M: M (0.73:0.1) in Breast Basal Epithelium
  misc_feature 1..263: note = source = chr2:241760778-241761040; Gene: KIF1A (Intergenic)
  source 1..263: mol_type = genomic DNA
cgagcgccttgcaggtggctgggggagattcacatccacttctgcaagacacgggccccccactcccagccccagccccgccgaaaccagctagacagctcctcctccttcactatttcctggaaccgccggcatgaaagagaaatcaattgttcttcctaaccctggcagaaacaataaaaccatctgggcttctggggctggggtctttatcacctccgttttcctcatgctttttaatctggcaagttctctatttctcg

SEQ ID NO: 2674 - DNA, 322 bp, Homo sapiens
  misc_feature 1..322: note = U/M: M (0.61:0.05) in Breast Basal Epithelium
  misc_feature 1..322: note = source = chr17:1131684-1132005; Gene: BHLHA9 (Intergenic)
  source 1..322: mol_type = genomic DNA
cgggagatgggaagcccctggggtgtgtgcagagaggggtgacagacagaagggtgacagcacccggtggcgccaagggatctggcgggggccaggccggagggaggggctgggggatgtcagggccacggagcgcaaagcgcaaaggcccgggcgccggccctgccgccgccgccagttcattttcatagagtcgcccgagcttaacgtcgccttgcacgtgttttctaagctccacaggtggctttggggtacacgggcgcagctcaccctccttcccgcccgctccccggccccgagctcgaggttaaacagggccgcg

SEQ ID NO: 2675 - DNA, 304 bp, Homo sapiens
  misc_feature 1..304: note = U/M: M (0.64:0.1) in Breast Basal Epithelium
  misc_feature 1..304: note = source = chr2:119602770-119603073; Gene: EN1 (intron)
  source 1..304: mol_type = genomic DNA
cgatccgcgcccggccggcagctgtggggcggcgagagaccagccagaggaaagcggcgcgtggctacgttgttcccggccccctgccggaccgggtgtctggagtgctgatcttgggccaaagcttctgccgctctcccagacactgcgggccggggcgtcaggcaggccttggccttctctcccggagcccagctcaggtctcctcctcgggttcgccaagcgcgaggggcacacggaaaagtggtggaaggaaagccgagaaaaacaggcctacggatgccagaagtctgctggatgtgcg

SEQ ID NO: 2676 - DNA, 174 bp, Homo sapiens
  misc_feature 1..174: note = U/M: M (0.58:0.09) in Breast Basal Epithelium
  misc_feature 1..174: note = source = chr16:84402414-84402587; Gene: ATP2C2,ATP2C2 (promoter-TSS,intron)
  source 1..174: mol_type = genomic DNA
cgatccgcgaactcgccctcctcccctggctctggaaagaagctgtcctcacagcaaccgcgctctcatctgcgctctggcgcggggagctcagcatggaaccctcacgtgaacccattttgtggttgagaaactgaggccgagagtggttaagtatattccctaaggggcacg

SEQ ID NO: 2677 - DNA, 386 bp, Homo sapiens
  misc_feature 1..386: note = U/M: U (0.02:0.91) in Breast Luminal Epithelium
  misc_feature 1..386: note = source = chr6:83921378-83921763; Gene: ME1 (exon)
  source 1..386: mol_type = genomic DNA
cgtagtacgtacaacagcttttaaagagaacgtaggcagaataattcagacagaaaccataaataaccagaaggcaaagtgaagcaaaattgtctcatgtgatgtttatcccaatttatatcgatattcttctatcaatttttagactgttaaagtaaaatcttaatctaagtgtcttatgaatcattataaaagattccaacctttaaaaattatgaaaggtttaaagacctcattaatagagttagaaatgtttgctattatcctactggtcaactttggtctgtattttctgcacctcttcaggccaagaataacaatcaggtagaatctggtcataatcagtactatacatctgggagcggacaaatgcttctttgttttgc

SEQ ID NO: 2678 - DNA, 411 bp, Homo sapiens
  misc_feature 1..411: note = U/M: U (0.05:0.92) in Breast Luminal Epithelium
  misc_feature 1..411: note = source = chr10:61931723-61932133; Gene: ANK3 (intron)
  source 1..411: mol_type = genomic DNA
cgctgccaaggaaggatgttaaaaaatttctgccttcaccatcatttcattaagaacttgttatatcaaagcaaacaaataaataaatacatttagctgtatatggaagtaaaaactctatagctacagatgcatcttttaaataggtattcttagtgttttaaacttttattcatattagcaataagagttttgctatcctgactaccaacaatgaggtgactgtattttaaaacatggtgcttagtttatgaatgggaaaaaatattcatctcagaaaaacccaagaaaactggctgaaagctggctcctagggtaacaaggttctgcattccttacttacagttgtggtcatggtctcttcggtcactatcttcagggtgtccactactgagatgtagccgaggcgcc

SEQ ID NO: 2679 - DNA, 179 bp, Homo sapiens
  misc_feature 1..179: note = U/M: U (0.03:0.87) in Breast Luminal Epithelium
  misc_feature 1..179: note = source = chr8:8572296-8572474; Gene: CLDN23 (Intergenic)
  source 1..179: mol_type = genomic DNA
cggtggcagacctggcctgtggcaggactgggaggatcactctttatctgagccatcctgacaggtgcatgtgccatcatggaggtgctcccaagaaacacgttcctccccgttcccacagggaacagaggatggatgcaaagcacatgtgacggaggaggagcgggaggagcaggagc

SEQ ID NO: 2680 - DNA, 246 bp, Homo sapiens
  misc_feature 1..246: note = U/M: U (0.04:0.88) in Breast Luminal Epithelium
  misc_feature 1..246: note = source = chr2:236424117-236424362; Gene: AGAP1 (intron)
  source 1..246: mol_type = genomic DNA
cgtagatactgagctggcaataacagcgctgatccactggaatggggaagggcctcgagctgttctgtcaacacggagttgtttgtcaggcgtcatgggtatcattttgtgcatctgcccttgttcagtgtttccttgtaattttgcggaaaaaagtctgcttagtgttgaaccagacattctgcagcctttaaaagagaatggaaatggagagattgtaatgtgttcattggtgacttttgacac

SEQ ID NO: 2681 - DNA, 68 bp, Homo sapiens
  misc_feature 1..68: note = U/M: U (0.06:0.89) in Breast Luminal Epithelium
  misc_feature 1..68: note = source = chr1:15281037-15281104; Gene: KAZN (intron)
  source 1..68: mol_type = genomic DNA
cgtgcagtcatggcagcggtctggatctgcactgtccggtaccctagctcctagccacgtgggtgcac

SEQ ID NO: 2682 - DNA, 93 bp, Homo sapiens
  misc_feature 1..93: note = U/M: U (0.09:0.88) in Breast Luminal Epithelium
  misc_feature 1..93: note = source = chr21:44850180-44850272; Gene: SIK1 (Intergenic)
  source 1..93: mol_type = genomic DNA
cgcgaacaggtcaaaccagagactgcccagtcccagcgtccgcccccagggcattgcttccttcacctcctacacttggctccctgtggttcc

SEQ ID NO: 2683 - DNA, 330 bp, Homo sapiens
  misc_feature 1..330: note = U/M: U (0.15:0.93) in Breast Luminal Epithelium
  misc_feature 1..330: note = source = chr17:1848936-1849265; Gene: RTN4RL1 (intron)
  source 1..330: mol_type = genomic DNA
cgcccggccgccctgcttcactttaccccacagcattccccctcttctaatacactacgtgatttccttatttttcttattgactttccatctctccgcactgagtgtatgttgactccgtgaggacggtggttttgcctgctgtgttctccgcagtaccctcagggcccagaacactggcatccagcaggtgacctgtcacaatggctggatgaaggaagaatctttctgagtcagcagggggactgagagatgctgctcaggaagccctaggcccagggcctggctcctagcaggcgctccataaacagaggggcgcttacccaaagc

SEQ ID NO: 2684 - DNA, 140 bp, Homo sapiens
  misc_feature 1..140: note = U/M: U (0.12:0.89) in Breast Luminal Epithelium
  misc_feature 1..140: note = source = chr18:73395621-73395760; Gene: C18orf62 (Intergenic)
  source 1..140: mol_type = genomic DNA
cgatcatttcccaaccacgactggcccacgctggagcttctggatggcacggagctccccattcgggaagcttgcagaggaatcggtgggcatcttccaagactcctggaaaagccgtcaccacatgaaatgacaggctc

SEQ ID NO: 2685 - DNA, 477 bp, Homo sapiens
  misc_feature 1..477: note = U/M: U (0.14:0.89) in Breast Luminal Epithelium
  misc_feature 1..477: note = source = chr8:117231799-117232275; Gene: LINC00536 (intron)
  source 1..477: mol_type = genomic DNA
cgaagtgctgggattacaggcgtgagccaccgtacccggccagtaattgttttttaaggatggtattgtagcaattgatatgatctcagcagattttgtttatctaaatgtagtcataacctccttccctcagttaaagtgatcttcttgacaacctcctatagtctctgcatttgtataaagagattttagtactttcatgtttttttttccagctttcatcatatgctatggaaaattatatcctctgctttcatcatatgctacagaaaatcatgtcctctgcctaatttttttttttttttttttgaaaagctgctagcctgccagttttggcagagcaaactaggaaattagaatctggcaacaaataggcaccacacagcagacaaaacttaaggtttgcaaagtagtgatgctcttcgatctgttgtattgggtgcaaaattagatcctatcaatgtcacactcaccccc

SEQ ID NO: 2686 - DNA, 165 bp, Homo sapiens
  misc_feature 1..165: note = U/M: U (0.18:0.91) in Breast Luminal Epithelium
  misc_feature 1..165: note = source = chr12:5747733-5747897; Gene: ANO2 (intron)
  source 1..165: mol_type = genomic DNA
cgtattttctggccgcttattgtgcgacccactgcactgggtatattccatgtttgtggtcaatctcttccaactaggtcaaaaggaggtttgtcttttaccacattctgtgccttaagccacttcacagcagcgcctcccgtagaactggtttggtaaagattc

SEQ ID NO: 2687 - DNA, 388 bp, Homo sapiens
  misc_feature 1..388: note = U/M: U (0.3:0.9) in Breast Luminal Epithelium
  misc_feature 1..388: note = source = chr9:139984622-139985009; Gene: MAN1B1 (intron)
  source 1..388: mol_type = genomic DNA
cgacaccgttgagaacaccagggtggtgctgactctggtgtggctgctcggaacccttagaaggcccttagggtgttagttactgttgttggtacatctgtgattgtgtctagcaggtgtgggagtgccttgggagcttcacctgtggccagagtcctcagcgccaggtggacttccctgcagggctgtgacagggacagacagcgctttctaacagtggccttgggagtggtaacctgccgaggaacagctcctgggctggggagctggaggcaggctgctgcccactggctaaggatctcagcaagaggggcattggggcattggcccccatgagcttgggccaccctcagactgccgtgggggtgttttgatttttttttttttc

SEQ ID NO: 2688 - DNA, 245 bp, Homo sapiens
  misc_feature 1..245: note = U/M: U (0.35:0.9) in Breast Luminal Epithelium
  misc_feature 1..245: note = source = chr3:193996432-193996676; Gene: LOC100131551 (Intergenic)
  source 1..245: mol_type = genomic DNA
cgccaacagggaagcggaatgcctggggctacactacttcttgagtagctactgtgcattcaggcagtctgcaaacattacctccttttcttttttttttttttttaagacagagtctgattctgtcacccaggctgaagtgcagtggcacgatctctgctcactgccacctctgtctcccaggttcaagcgactctcctgcctcagcctccagaatagctgggaatacaggtgtgcactaccac

SEQ ID NO: 2689 - DNA, 281 bp, Homo sapiens
  misc_feature 1..281: note = U/M: U (0.01:0.89) in Breast Luminal Epithelium
  misc_feature 1..281: note = source = chr1:168067805-168068085; Gene: GPR161 (intron)
  source 1..281: mol_type = genomic DNA
cgccctgagtcacccttgggccccagcagctgaactgccacatgctaactggaggtgctgcctccttggtcttcctaagcaggggtgagcctggggctgctctgagctgagccttgagcccaggccaggatctatcctggaaagagagcatttccggctatgcggcctgaggagaagattgcgcagtgattagggtgtctattacagaatcactgcacagtggctgggtaaggtgattactgtctttcgctgctatctgggcttgcatcttgcaaaggccg

SEQ ID NO: 2690 - DNA, 134 bp, Homo sapiens
  misc_feature 1..134: note = U/M: U (0.04:0.87) in Breast Luminal Epithelium
  misc_feature 1..134: note = source = chr2:240691480-240691613; Gene: LOC150935 (intron)
  source 1..134: mol_type = genomic DNA
cgccagagtgaggcacagaggcaggggcagagtgcagggtctcggttgacacctgccatcatcagggtttggacagacagcatgccgggtcatcgccaggccggccagaagatgcatttgattactggtcaccg

SEQ ID NO: 2691 - DNA, 156 bp, Homo sapiens
  misc_feature 1..156: note = U/M: U (0.05:0.87) in Breast Luminal Epithelium
  misc_feature 1..156: note = source = chr9:139121710-139121865; Gene: QSOX2 (intron)
  source 1..156: mol_type = genomic DNA
cgtagatcttggtacaaggtggcaacacagagccctgcacagcgaccgtggaactctcccggcacctcaggtgaaggccgcttggacagtctgggcccaggccaggtggtgctgctctttttaaataaccctcctggccgggcgtggtggctcacg

SEQ ID NO: 2692 - DNA, 360 bp, Homo sapiens
  misc_feature 1..360: note = U/M: U (0.05:0.87) in Breast Luminal Epithelium
  misc_feature 1..360: note = source = chr9:9559677-9560036; Gene: PTPRD (intron)
  source 1..360: mol_type = genomic DNA
cgaaagtccactgttgccctcccatgaaggtaaactgttcctggctctctggacaagaagttccagttctgttgtcaagtggtccagcaagtctgtgacagaccgtacagctgccaacccatgaaaaacatccaccctcagaatatcctcaggcatgggagagacataagcggtgcataagtggagagccaagctgccaatgccaaggtgcagacagaggtttcacttccactgaccagcttccacagctgccaataaatgcagttctgcctggaaacttatctgggttcagagaccagtggattgccaagtccacatgtggctccggttgtccggtgccccctcaagtcgggcttctcg

SEQ ID NO: 2693 - DNA, 203 bp, Homo sapiens
  misc_feature 1..203: note = U/M: U (0.06:0.86) in Breast Luminal Epithelium
  misc_feature 1..203: note = source = chr16:88017646-88017848; Gene: BANP,BANP (intron,exon)
  source 1..203: mol_type = genomic DNA
cggtcttttttcacttccagtcattcctgtattccatcaaccagacaatctgcttgcggttggatagcattgaagccaaattgcaagccctggaggctacttgtaaatccttagaagaaaagctggatctggtcacgaacaagcagcacagccccatccaggtccccatggtggccggctcccctctcggggcaacccagacg

SEQ ID NO: 2694 - DNA, 360 bp, Homo sapiens
  misc_feature 1..360: note = U/M: U (0.02:0.82) in Breast Luminal Epithelium
  misc_feature 1..360: note = source = chr19:283342-283701; Gene: PPAP2C (intron)
  source 1..360: mol_type = genomic DNA
cgcattttaactcatcctggtccctctcccactgcctagactggtggtggcctgaggattccaagaacagactttatttgcaactgtggacgggagtatggctcaagggctggccttgatctcacctgactggacattctcccagtgctgaggtgctacctgggggatatttgtaggaaacattcacaacaaatttattattctctgctgcctggggccacagacagcagatgaggcaaacaacagactaaccaaacaggccagggaataaaatgctctgggcgatgggggcctggaacgcagacagagctgtgcaggagctcaggagaggcctgcgagggccgaagctaagctctcacg

SEQ ID NO: 2695 - DNA, 212 bp, Homo sapiens
  misc_feature 1..212: note = U/M: U (0.06:0.85) in Breast Luminal Epithelium
  misc_feature 1..212: note = source = chr18:14798182-14798393; Gene: ANKRD30B (intron)
  source 1..212: mol_type = genomic DNA
cgccttgtcgtcccgtggtgccaacaattcactggatatacccgcatttgttattaagtttagtgagggtgggggtgggttaatgagggatttagggtcatttgattatgaggtgagatggtcacatggggatgaagtaattctttaactaacatctgtatgcagaaatacagtacacagggataagaatttacaatatagtgtgtgcatcg

SEQ ID NO: 2696 - DNA, 92 bp, Homo sapiens
  misc_feature 1..92: note = U/M: U (0.13:0.91) in Breast Luminal Epithelium
  misc_feature 1..92: note = source = chr1:56392964-56393055; Gene: PPAP2B (Intergenic)
  source 1..92: mol_type = genomic DNA
cgacacacctgatctgaccacaggcgctgcaggaagcttgttcctgtatcggcactcagagcggctggctgggttcctcactcactcgctcg

SEQ ID NO: 2697 - DNA, 356 bp, Homo sapiens
  misc_feature 1..356: note = U/M: U (0.07:0.85) in Breast Luminal Epithelium
  misc_feature 1..356: note = source = chr11:6499359-6499714; Gene: ARFIP2 (intron)
  source 1..356: mol_type = genomic DNA
cggctcctagcagcgtttccccattcttgcatagtagtttctgtgtctctgcattgtagccaaattcctcctgagggcagaagggaggaacagaccttgaataacactccctacctgactgaagctgtagagcccttcattcccctcctccccggggaggacacagccagcaaaactggaacaaccaaggactgcctccagcaaggctctcttagccggaaagttagtgggatcaccctggggatacctggggtaggaatgtgggtggtgggcattcttgggtaagttcacaagactggaacagtctgagagctagtgtggcaagcaggggaggggctctgattaggctgagcacg

SEQ ID NO: 2698 - DNA, 183 bp, Homo sapiens
  misc_feature 1..183: note = U/M: U (0.12:0.88) in Breast Luminal Epithelium
  misc_feature 1..183: note = source = chr5:149880893-149881075; Gene: NDST1 (Intergenic)
  source 1..183: mol_type = genomic DNA
cggcggtccagtccacattccctctggcagcccaactgtcaggactcagaagttctccctcatggccaaaaggagaggaaaaggcaccggacagggacaaacgtaaagtcttgtcatccattggtccaagcagtcaattggactagaacaggactgggaatttggctgggaactggccaggcg

SEQ ID NO: 2699 - DNA, 285 bp, Homo sapiens
  misc_feature 1..285: note = U/M: U (0.16:0.92) in Breast Luminal Epithelium
  misc_feature 1..285: note = source = chr17:64658256-64658540; Gene: PRKCA (intron)
  source 1..285: mol_type = genomic DNA
cgccacaaggccctctcaggtcaggaaactgatgtgtctcctgcttggtttgtaaaccatgtggatgatacccagaatatcaggtcctctctctctcttccgtccaaacgaaagcacttagatgtcacatgcccaccttgtaagtcctcatgggatttgggatcctcatcctgtgcacagaccttgactcatgggctctacaacattggctgtcttcctgtttaatttccctttctactgacagttttgccaattcagtgatggctttagcgccatggctcagcg

SEQ ID NO: 2700 - DNA, 266 bp, Homo sapiens
  misc_feature 1..266: note = U/M: U (0.12:0.87) in Breast Luminal Epithelium
  misc_feature 1..266: note = source = chr13:100738533-100738798; Gene: PCCA (Intergenic)
  source 1..266: mol_type = genomic DNA
cgaactggaaaggaggccaggatatgctgcccaataggatgctccgagcagtgcactcagaagaatgaacaggtttggagacagtccaagtctgctgtgtcctcaacttccttgggggtattttccttacaatctataacttttttttttttttttttgagatggagtcttggtctgtcgcccaggctggagtgcaatggtgcagtctcagctcactgaaacctctgcctcccgggttcaagtgattctcctgcctcagcctaccg

SEQ ID NO: 2701 - DNA, 336 bp, Homo sapiens
  misc_feature 1..336: note = U/M: U (0.14:0.89) in Breast Luminal Epithelium
  misc_feature 1..336: note = source = chr6:42397428-42397763; Gene: TRERF1 (intron)
  source 1..336: mol_type = genomic DNA
cggagcgcctactgtgtgctgggcactcttccgagggcttcggatgcagcagtgaacaaacccattctaggagagggaggactggcaacaaagataatgaacaagcaaactacagaggacgggaacaggctgaagtgttttggaagaaaaggaacaacagagcaagtaaaggggatgggtcattcgggcgaaggtgtggcgcacctaactggagaggtgaggaaagccctgttgagaaagagacagacttctgagccaagacttgaaagagggccgggagggagcaatgcagatgagtatctaggttctggaagagcaaccccagcagagaggacg

SEQ ID NO: 2702 - DNA, 302 bp, Homo sapiens
  misc_feature 1..302: note = U/M: U (0.07:0.8) in Breast Luminal Epithelium
  misc_feature 1..302: note = source = chr19:36607845-36608146; Gene: TBCB (intron)
  source 1..302: mol_type = genomic DNA
cgacctcactcagtctgtagcagccacattgctccttgcacagtccaggtgagctcggcctctggatcctgggcctgaatggttcttttgtcatatgcctgcgtgcctcacccttccttcctgtcttaatttaaagtgtcagtattctagtgaagtcttcaccggcctcagtgttaacgtttacctcattcctttccccttctttgctttattttagatttttgtgtttacaagtaattctcctctgacacactctggatttctctcatctggtttatttactctctgtctccctggattcg

SEQ ID NO: 2703 - DNA, 62 bp, Homo sapiens
  misc_feature 1..62: note = U/M: U (0.18:0.89) in Breast Luminal Epithelium
  misc_feature 1..62: note = source = chr1:41888473-41888534; Gene: EDN2 (Intergenic)
  source 1..62: mol_type = genomic DNA
cggggctgggctatgttgtcatttacctctgccgccaccgagcaggcgagaaaaccgcatcg

SEQ ID NO: 2704 - DNA, 164 bp, Homo sapiens
  misc_feature 1..164: note = U/M: U (0.13:0.84) in Breast Luminal Epithelium
  misc_feature 1..164: note = source = chr21:31587857-31588020; Gene: CLDN8 (exon)
  source 1..164: mol_type = genomic DNA
cgtgatgatgaagatgattccagccgtcagcagaatgtgagccttcaccttctcattgtcccccgtgcacctggtgcatttcatgccaaggatggccatcatgaaagccaagaaggacatcacggaagcagcacacatcagtcctctggctgcctgtaggtccg

SEQ ID NO: 2705 - DNA, 218 bp, Homo sapiens
  misc_feature 1..218: note = U/M: U (0.18:0.89) in Breast Luminal Epithelium
  misc_feature 1..218: note = source = chr6:143144273-143144490; Gene: HIVEP2 (intron)
  source 1..218: mol_type = genomic DNA
cgcctctgcagatggcgccctcagtaagaatcctaatgcccagttgcccccacagacagcagagtccatacttccaggaaagaggggtccttgtcatgggtcccacactttagaaagcctgcatatcacaaacaagcacaaataaattcactgaaaaatccacagcacctttatcataggcatccagatgtcctgtaaccctaaaccccgcgacaacg

SEQ ID NO: 2706 - DNA, 387 bp, Homo sapiens
  misc_feature 1..387: note = U/M: U (0.2:0.91) in Breast Luminal Epithelium
  misc_feature 1..387: note = source = chr11:110318096-110318482; Gene: FDX1 (intron)
  source 1..387: mol_type = genomic DNA
cgaaccagggagtcggaggttgcagtgagccgagattgcaccactgtactccagtctggcagcaaagtgagactccttcaaacaaacaaacaaaaaaccatgagtgtcttcctttgcacataggataaaatctgtattcccagccgtaaaaggctctgcattatctggccccatctgccactcttcctcttttttgtttttttctcattgttctttgtctcactttggtgatactggccttttctcaagagcttgaactcacccaaaattcctacctttgagactttgtatatactttaccctctccctgagacacatccctctctctcccatccccaaaatttagcttttcatctatcaaatctcaatttatgtacttccttagcg

SEQ ID NO: 2707 - DNA, 84 bp, Homo sapiens
  misc_feature 1..84: note = U/M: U (0.14:0.84) in Breast Luminal Epithelium
  misc_feature 1..84: note = source = chr20:60278024-60278107; Gene: CDH4 (intron)
  source 1..84: mol_type = genomic DNA
cgtgcggccctgagggtgtgaagacttcctcaacaagcctttcttcatctcactctgcgtgccgtggtcagtgccatgttttcg

SEQ ID NO: 2708 - DNA, 201 bp, Homo sapiens
  misc_feature 1..201: note = U/M: U (0.16:0.86) in Breast Luminal Epithelium
  misc_feature 1..201: note = source = chr4:186165406-186165606; Gene: SNX25 (intron)
  source 1..201: mol_type = genomic DNA
cgaagtgctgggattataggcgtgagccaccgcacccggccaggaacttcttcaataagttttttggctttggttttatcatttgatcagtattgttcatttaactatttgccaaagcattgagaagttgtgattaaaattatttagcagtgtagacctctgaaagcatttaactccattaaatattacccccaaaattcg

SEQ ID NO: 2709 - DNA, 328 bp, Homo sapiens
  misc_feature 1..328: note = U/M: U (0.22:0.92) in Breast Luminal Epithelium
  misc_feature 1..328: note = source = chr2:75824876-75825203; Gene: EVA1A (Intergenic)
  source 1..328: mol_type = genomic DNA
cgcagtatggcatttgggttccgagagtccagattcccagagcaggaagtggaagccgctggtcccgtaaggcctgaggccataaactggcacagtgtcacttaggcaggccaagcaattacagaacctgtccagaatcggggtggggtggggcgaagtggtgcgggagggatgtagttcccaccactaaatgggagaaatgtcaaggcattttcggtcaccttgtttgttttccagtcacctttcccagcctcctcgcccctccccccagttattatattttacttttccccttcccacccctgccctttgcatccaacagggggcg

SEQ ID NO: 2710 - DNA, 329 bp, Homo sapiens
  misc_feature 1..329: note = U/M: U (0.19:0.89) in Breast Luminal Epithelium
  misc_feature 1..329: note = source = chr2:237494458-237494786; Gene: CXCR7 (Intergenic)
  source 1..329: mol_type = genomic DNA
cgctcacacagacctgtgcatacacctagacttgctaccatctgtgtgaccaacacacactcctggacacagtttccatgtgcatgtttaggaccatcctagcgagagcctgggccacagggttgagatccgccttctcaaagtctcaggcctctgccaagtgtgtagcccaaagaaccatcactgtttactatcctggggaatgtgggccaggttttagctttgctaaacttagcttccttgtttataatgttggacgatgatagtacttgattcatagggtaatcgtaatgatcagatcgcacagtctctgcaaaatgcatgtcacg

SEQ ID NO: 2711 - DNA, 160 bp, Homo sapiens
  misc_feature 1..160: note = U/M: U (0.18:0.87) in Breast Luminal Epithelium
  misc_feature 1..160: note = source = chr1:42593479-42593638; Gene: GUCA2B (Intergenic)
  source 1..160: mol_type = genomic DNA
cgcataacttgaggtctcagatgatcgtatcttccactagagaagatttatatttgcttttgccagttgcctgaggggcactagcaatacaggactatcatcatccagtggcaggaactgagatttttccgggccaccgagatgactggaagctgagccg

SEQ ID NO: 2712 - DNA, 184 bp, Homo sapiens
  misc_feature 1..184: note = U/M: U (0.17:0.86) in Breast Luminal Epithelium
  misc_feature 1..184: note = source = chr15:48518739-48518922; Gene: SLC12A1 (intron)
  source 1..184: mol_type = genomic DNA
cgatagcaactaacgggtttgttcgtggaggtaaaatctctaagatatctaatgccctcatcacttgctacgggtaggcgaacaattttttatacttctttttgatgggaacaaggaagtagcccgatgttcttgaagcctggctatttggaggagctggatgccaaagaaaacctaaggtacg

SEQ ID NO: 2713 - DNA, 387 bp, Homo sapiens
  misc_feature 1..387: note = U/M: U (0.18:0.87) in Breast Luminal Epithelium
  misc_feature 1..387: note = source = chr9:132518514-132518900; Gene: PTGES (Intergenic)
  source 1..387: mol_type = genomic DNA
cgatcacctcccgctaccctgagccgaaaataggggagagactgtgtaggggaattcgtataactgatggacatgatctcaagataggaatcttttcgtcactgtctactgaaatgaacctgctaagccaaggcctgccaaggaggacaaaatctctgatctttggccaagaatttccctgaagctgcccttggccaatggaagctgccattgtggctgttgggggtgacggtgatggtggtgtcacttctctctgagcttccatttctttgcctgtaagatgggcttggtgtcccctgccttgcagagggtgggggacaggagatggtgtgtgcacagtgttgggggctgggggacactcactgtggcctggtcctgaggcccacg

SEQ ID NO: 2714 - DNA, 230 bp, Homo sapiens
  misc_feature 1..230: note = U/M: U (0.16:0.84) in Breast Luminal Epithelium
  misc_feature 1..230: note = source = chr21:40307327-40307556; Gene: ETS2 (Intergenic)
  source 1..230: mol_type = genomic DNA
cgagacagccacagtcctgattcccatcaccacccatcagtcctacctgttcttgaatatcatataaataaaacagtacattgctccttttctcctgttctcctacccgtggtttcaatattccacagattgctatcatttgcctgtgggctaactcttgggttccagtttttggctacgatgcatcaacctgctgtaaacactcttgggcaggtccttcggtgcacacg

SEQ ID NO: 2715 - DNA, 118 bp, Homo sapiens
  misc_feature 1..118: note = U/M: U (0.1:0.77) in Breast Luminal Epithelium
  misc_feature 1..118: note = source = chr16:4690375-4690492; Gene: MGRN1 (intron)
  source 1..118: mol_type = genomic DNA
cggggaatgcctcgaggcctcccacggaagggattttgcagttttcatttctgtggctgttgtctccctgtgcaggttgcccggacacctgcaagccacccagagtccgaatccctcg

SEQ ID NO: 2716 - DNA, 164 bp, Homo sapiens
  misc_feature 1..164: note = U/M: U (0.17:0.84) in Breast Luminal Epithelium
  misc_feature 1..164: note = source = chr11:71324397-71324560; Gene: KRTAP5-11 (Intergenic)
  source 1..164: mol_type = genomic DNA
cgtccacattgttggggttgctgccagctgaggacggctggttcacctgcttggacctgagagacgctttctttcctatcagattagccctgagatccagaagctgtttgcctttcagtgggaagatccggagtcaggtgtcactactcagtacacttggaccg

SEQ ID NO: 2717 - DNA, 299 bp, Homo sapiens
  misc_feature 1..299: note = U/M: U (0.24:0.91) in Breast Luminal Epithelium
  misc_feature 1..299: note = source = chr13:30492545-30492843; Gene: LINC00544 (Intergenic)
  source 1..299: mol_type = genomic DNA
cggtcagacgtctacccacccaacacttgggtctttgggtagctgttctccttccagttcacctgtggtgagagttgacttcttatcttctccccataccctgagggcctctcactggagaccagtgttttccctcctgcttccaggtcctctctgcaatcatttgcccatctccaaacctgacttcaggtaacagattcgactttgctccaactatccccaaagcagacccatgaaagtgttccattcaggacagtttattatggccaggccatccgaatgaaacgcaactctcttcg

SEQ ID NO: 2718 - DNA, 339 bp, Homo sapiens
  misc_feature 1..339: note = U/M: U (0.19:0.86) in Breast Luminal Epithelium
  misc_feature 1..339: note = source = chr10:29566189-29566527; Gene: LYZL1 (Intergenic)
  source 1..339: mol_type = genomic DNA
cgaagaaggtgaacaaaagatttatatgcaaatcacctttcttgcagatgattccgtgcatttattttaggcatttaaaaataaagtcaccacttggactttgtctccaaggcaaggaatattccctcagggcgatgactttcaaagctctacgcatgcatattttcctaagggacaggggtgaagccagcattaggtttttccatttcacattctgtggcatattcagaggccctgctctcttcctcaccttgtcctgaggttatggaaacagagcctggtgccagcctcattctccagcagatccacatgcatggccttgttcctctccagggggcg

SEQ ID NO: 2719 - DNA, 141 bp, Homo sapiens
  misc_feature 1..141: note = U/M: U (0.23:0.89) in Breast Luminal Epithelium
  misc_feature 1..141: note = source = chr22:43273432-43273572; Gene: PACSIN2 (intron)
  source 1..141: mol_type = genomic DNA
cggctcccatggatgagtgggagagggctctgagctcttcagcccacacggcctcctcctgactactaaggggttcagggctcgctcttctgctctgtggagctgaagcctccaaaatcagggccagggcctgcggcaccg

SEQ ID NO: 2720 - DNA, 488 bp, Homo sapiens
  misc_feature 1..488: note = U/M: U (0.18:0.84) in Breast Luminal Epithelium
  misc_feature 1..488: note = source = chr3:41835526-41836013; Gene: ULK4 (intron)
  source 1..488: mol_type = genomic DNA
cgtgcagtaagtctgggtttgggcccaaaaaactacacttctatcaagttcccaagaaatgttaatgttgctggtgtggagaacacactagtgtagaacaatctatggagccaagagatcattaggagaaacaggtcagaaaatcactgacaggcaggaaatacagacagttacaagtggaacaacatgtagagcttgctccctcagcactaagccttgctatcctccacctgctcattcattcatctgattagcagatatctactgagcatctaccatgtgcccagaaaaggaacaacaggacttttgtcttcctggaacttacactaatgagaaaaaactgtgcataaggccggacgctgtggctcacgcctgtaatcctggcactttgggaggcagacgtgggtggatcacatggtcaggagttcaagaccagcctgaccaacatggtgaaaccctatctctactaaaaatagaaaaattggccg

SEQ ID NO: 2721 - DNA, 112 bp, Homo sapiens
  misc_feature 1..112: note = U/M: U (0.25:0.9) in Breast Luminal Epithelium
  misc_feature 1..112: note = source = chr3:53837301-53837412; Gene: CACNA1D (intron)
  source 1..112: mol_type = genomic DNA
cggaacagtccagtgctgcctgaggcaggtgcgcgctgggagaagccaggagcacccgggcagggttgccggccacaggcagaggtgcagctgcagcaggaattatctgccg

SEQ ID NO: 2722 - DNA, 177 bp, Homo sapiens
  misc_feature 1..177: note = U/M: U (0.2:0.85) in Breast Luminal Epithelium
  misc_feature 1..177: note = source = chr1:110659458-110659634; Gene: UBL4B (Intergenic)
  source 1..177: mol_type = genomic DNA
cggacggctgattttagaagcaaatccagtcctctcccctccttccactccgacttgctcccctccatcagcctttgttcaggattaagtgagattttagttatcatataaagcttccggccattttaaactggggaagagaggcatgggtagaaggaagtggagggcagtgctgcg

SEQ ID NO: 2723 - DNA, 246 bp, Homo sapiens
  misc_feature 1..246: note = U/M: U (0.22:0.87) in Breast Luminal Epithelium
  misc_feature 1..246: note = source = chr15:79483422-79483667; Gene: LOC729911 (TTS)
  source 1..246: mol_type = genomic DNA
cggtggctgtgtggaccgctgtgatgggaagaagcccaaggcctcgggcaggtttggtgggaagggtggctgggtttagtgatgtttgccactggccaggtagggaggacggcagcttcgtgccctgtgtttgtagccctgcctggcagctctgagtgggagagagtgagctggattacaatgcacacaggcagcaggtcagtggaaagggagtttttggaatgggggcggcactgtgcaagggcg

SEQ ID NO: 2724 - DNA, 283 bp, Homo sapiens
  misc_feature 1..283: note = U/M: U (0.26:0.91) in Breast Luminal Epithelium
  misc_feature 1..283: note = source = chr14:100513754-100514036; Gene: EVL (Intergenic)
  source 1..283: mol_type = genomic DNA
cgtctccctagggatcacacagaaggatccgttctttccactgagctccgttgcacaggtccagagccagagctcacactctctttccattgctccgggacagacagccctgctttcctcagccagttgtcagatgttatgatttctatttgccttattatcttagttgccgtcaaggaatgcttccaggttggcagtgccttgcttatattgtaatatcaaaaactgatctaaatatttcatttgtgtagcctgggttacacattctgcaacctatatcacg

SEQ ID NO: 2725 - DNA, 151 bp, Homo sapiens
  misc_feature 1..151: note = U/M: U (0.24:0.87) in Breast Luminal Epithelium
  misc_feature 1..151: note = source = chr8:37127074-37127224; Gene: ZNF703 (Intergenic)
  source 1..151: mol_type = genomic DNA
cgtgtgatctcagacagttatttagtctctgcggtccttagggttggtaaggacacgccgtctggtcaggtaggttttcagatgagtattacagaccctgagggctcccaggagatactttagggactctgcagatattggcatgaatccg

SEQ ID NO: 2726 - DNA, 251 bp, Homo sapiens
  misc_feature 1..251: note = U/M: U (0.19:0.82) in Breast Luminal Epithelium
  misc_feature 1..251: note = source = chr7:149372167-149372417; Gene: KRBA1 (Intergenic)
  source 1..251: mol_type = genomic DNA
cgccccctcgtccatgccccttatgtcaagggaatcactggaaggtccactgccccaggggacaaaggtcctctgagtcagaagccactaaccagaagatccagcagcaggactgagggtgcccggggcaatggcgccagcccatgccatcaccctcacagagccccgggtatgcttgaccattgagggccaggaggttaactgtctcctggacactggtgtgaccttcttagtcttactctcctgtcccg

SEQ ID NO: 2727 - DNA, 268 bp, Homo sapiens
  misc_feature 1..268: note = U/M: U (0.22:0.85) in Breast Luminal Epithelium
  misc_feature 1..268: note = source = chr14:105495862-105496129; Gene: CDCA4 (Intergenic)
  source 1..268: mol_type = genomic DNA
cgggagagaagccaaactcaggagtaatggctgcttccacagatggaaagctcagatgaggcagagggcaccgtgccagagaatggccctcaggcagcacggcagtctcccaggacctggagaccatcactgtcttgatctgaatggtggtgttgaatctgttttgtgtgctccctttcagggcattctgtgttttgacttcaataaataagtacattaagccaggcggggtggctcacacctgtaatcccagcacttcaggaggtcg

SEQ ID NO: 2728 - DNA, 492 bp, Homo sapiens
  misc_feature 1..492: note = U/M: U (0.26:0.89) in Breast Luminal Epithelium
  misc_feature 1..492: note = source = chr12:92685704-92686195; Gene: CLLU1 (Intergenic)
  source 1..492: mol_type = genomic DNA
cgcagccaagagcggtgtgcttggcctccctgctaattagcaaaaaccctcaccaattccttccaatgcttgaaaatcaatgctagcctaaaaaaaaaaaaaaaaaaaatcagaactgggccaaagaagcactgggaatgagtagacatctctgtgtctgcctctcctgatagtcccgtttttgcttgtttttcatgggaacatgtgtatatggtgacaactcagggtatgtagttgccgcaggcagcttcctccgttttcttagctctgtgttgtgggaaggaatgaaagttgctgtttacaaggaacactgccaatgggctaatgggaatttttcatgacttatggatgtttgcagaactgaaggcttttgaaatctgatttcaaagctgacctaaagtcttggtgacacagataatgacctgtggaaagaggtaatcatgaacacagaaaatcctcacttactccgtcttttaggaattttggttgacg

SEQ ID NO: 2729 - DNA, 76 bp, Homo sapiens
  misc_feature 1..76: note = U/M: U (0.24:0.86) in Breast Luminal Epithelium
  misc_feature 1..76: note = source = chr6:37727275-37727350; Gene: ZFAND3 (Intergenic)
  source 1..76: mol_type = genomic DNA
cgtccttcacggtctcacagtccatggacagaactggattcgccacgtagctgatgcagcttctgcttcagggccg

SEQ ID NO: 2730 - DNA, 164 bp, Homo sapiens
  misc_feature 1..164: note = U/M: U (0.23:0.85) in Breast Luminal Epithelium
  misc_feature 1..164: note = source = chr11:65096709-65096872; Gene: DPF2 (Intergenic)
  source 1..164: mol_type = genomic DNA
cgtctctactaaaaatataaaaaattagctgggcatggttgctcgtgcctgtagtcccagctactcaggaggctgaggcaggagaattgcttgaacctgggaggcagaggcttcagtgagccgagatcgtgccactgcactcagcctgtgcgacagagactccg

SEQ ID NO: 2731 - DNA, 176 bp, Homo sapiens
  misc_feature 1..176: note = U/M: U (0.2:0.8) in Breast Luminal Epithelium
  misc_feature 1..176: note = source = chr16:514377-514552; Gene: RAB11FIP3 (intron)
  source 1..176: mol_type = genomic DNA
cggctttgtgagaattttggcgtctcacatactgtgccttgaggcttgctgcatggcgtgctgcaggtcctccctccaggccttctggaaagtctggttctcctcaggttactcctgggacatggcagctgtgcccatgaccctcgggatgagtttgttctctaactgattcaccg

SEQ ID NO: 2732 - DNA, 182 bp, Homo sapiens
  misc_feature 1..182: note = U/M: U (0.26:0.86) in Breast Luminal Epithelium
  misc_feature 1..182: note = source = chr1:36993817-36993998; Gene: CSF3R (Intergenic)
  source 1..182: mol_type = genomic DNA
cgatgatcacccaaaggtgaacacagcgagtgctctccacctgccaggcaaggtttccaaatctttacatacgttatgttgtttaccccggcaaacaaccttatgaggaaggtactattgccattctcaatttacaggtaaggaaacactctcagagaggtgaagtaacttgcccgaggccg

SEQ ID NO: 2733 - DNA, 367 bp, Homo sapiens
  misc_feature 1..367: note = U/M: U (0.27:0.87) in Breast Luminal Epithelium
  misc_feature 1..367: note = source = chr18:55787062-55787428; Gene: NEDD4L (intron)
  source 1..367: mol_type = genomic DNA
cgggggctggcaggcctggacattggcggtttgcttagaagctgcccgggtggttctcatagcagccagggtcaagcaccacggcctgttcttacctggctccccaggccccctttaatctccctctgcagcagattggcacacatcgcattgtggagcaagccatctgataattttccttaatcgtctttgaagatcttccctctgcctgttgatcctttaaggaagaagtctccttgccaggatcggcctctccagtctctggatcccttcttgcttgctctcttcagaacccatgaaacctctctggctgccttgacgtcagccagattggactgcccaaatagaaaggcagaaatccctgtcg

SEQ ID NO: 2734 - DNA, 371 bp, Homo sapiens
  misc_feature 1..371: note = U/M: U (0.18:0.78) in Breast Luminal Epithelium
  misc_feature 1..371: note = source = chr14:105650640-105651010; Gene: NUDT14 (Intergenic)
  source 1..371: mol_type = genomic DNA
cgagatggaaagggagaaaaggcagaagcagcccaggcactttaccagttcctgctgtgcactggggtggctcgaacaggtgattcggggcaggcctgatgtcacaagaagttaggacaggcatgccaagaggcagaggacagcctccccgaggacacgacactccccagaaacccgaagatccaaggcaggagaaaggaagctgtcctggcaggaggagaccgaggccagaagaggcgttgtggccctgggggcagctcccttggcctgtgcttggcacatcccctggggccactggaagtctcggaggggttgggcagggcaggtggtcagatgcccctctgggaggtcaccgtggctgcctggggccg

SEQ ID NO: 2735 - DNA, 340 bp, Homo sapiens
  misc_feature 1..340: note = U/M: U (0.22:0.8) in Breast Luminal Epithelium
  misc_feature 1..340: note = source = chr6:33700074-33700413; Gene: IP6K3 (intron)
  source 1..340: mol_type = genomic DNA
cgcagggtggcgagaagggagaacatgcactctgtggcatgtggtggccacttcagaaatggcccctctcagtgggggctgttcctataggggagaaaaaggagacccttgtggcagccttgtggggattcaagtgcccctgacctgaggtcctagctgaatgaccctgggcaagtcacgccccctccctccttgggctagatgacccctgaacactgacacccgagtccacccctttagtaacagtgtagctgagtggagctggcccatgtggccaagagcccacagtcaggagccagacctcagggcttggaatcctggctctgcctctcagtgtccg

SEQ ID NO: 2736 - DNA, 342 bp, Homo sapiens
  misc_feature 1..342: note = U/M: U (0.29:0.87) in Breast Luminal Epithelium
  misc_feature 1..342: note = source = chr7:48827791-48828132; Gene: CDC14C (Intergenic)
  source 1..342: mol_type = genomic DNA
cgtaggaaatattgccaagggcccgagtggatgcctgaaaccacagatagtatcaaagtcaataaatactattttttcctataaatatttatcagtggtaaagtttaatttataaattagttacagtaagagattaccaataattaataataaaatacggcaattataacaatatgccagcatcactactcttgcattttggggccattattaagtacaataaaggtgactcggacacaagcagctctcattaccatgacactccatttgatgactagataactggtaggtgactaacagacaagagcgtaaacagcatggatcctctgggcagaggtgccg

SEQ ID NO: 2737 - DNA, 347 bp, Homo sapiens
  misc_feature 1..347: note = U/M: U (0.18:0.76) in Breast Luminal Epithelium
  misc_feature 1..347: note = source = chr15:73962832-73963178; Gene: CD276 (Intergenic)
  source 1..347: mol_type = genomic DNA
cgtgggaaggagtgaggttaaagacggggctccagctttggctcctctaggcaaaggtatgaggggagtgcctcagggtgcagagcctctggcagctattcgccatttgccacctgtccacagacaagccagagtgaagtgcctcaccttccagagaccctctgccctagtcgctgctcttttccaagagctgcctcactctgctttgtcttttatcccaaccaagggtagaagaggaaggagaggctgctccatggctcctggccagccttcatctattgaatctgttttccaccagccagttcagctggccccagaattgccttgaggttaccttgctattttcg

SEQ ID NO: 2738 - DNA, 418 bp, Homo sapiens
  misc_feature 1..418: note = U/M: U (0.31:0.89) in Breast Luminal Epithelium
  misc_feature 1..418: note = source = chr2:47532143-47532560; Gene: EPCAM (Intergenic)
  source 1..418: mol_type = genomic DNA
cgtcaaaggaattcctgagctcagccaatcaagacttctacctttcaaccgcttttcttaaaatacaggaataatgttcaatagaacagtgaggaaaaattttggacggcaaaggtgtgtagttgttcgacaaatatatactgggagccttaaatgctgtggaggatacaaatatatccaagtccagttcctgccctcaaggccaacctaccaggaattgcaagtgaggaaggtcagagaggttagagtgactagggtgtcacaggagaggagatgcttgaaatttgaagaataggcatggttcagatgggtgcataggagaacattccaggcagagggaatcacatgaacaaaggcacagggtaagaactaagaagaacaggtttaggaatagggacaggacctgcctgagtgtgcg

SEQ ID NO: 2739 - DNA, 501 bp, Homo sapiens
  misc_feature 1..501: note = U/M: U (0.29:0.87) in Breast Luminal Epithelium
  misc_feature 1..501: note = source = chr16:85753082-85753582; Gene: C16orf74 (intron)
  source 1..501: mol_type = genomic DNA
cgtttgatcctcccagtgaggcagcccccatcttccagacgggcacactgaggcacagagaagtcagggcacagcctgtttgcgcacagcctgtgatctgggggctggaagcacaaagatatttccaagatcctgggtcagttcaagcagggactaggggcagatgataagcccactcacagtaccaagaagcagggtttaggggagactgggaattggaaaaggcttttcagaaggggtcaatcagaaagcggcaggagagattcccgaggcacccacagcacacacaaaggccctgaggcaggaacagaggggccacaggccacagcacacacaaaggccctgaggcaggaacataggggccacaggccacagcacacacaaaggccctgaggcaggaacagaggggccacaggccacagcacacgcaaaggccctgaggcaggaacagaggggccacaggggctgagcggggtgacactaatccctcagagatgaccg

SEQ ID NO: 2740 - DNA, 234 bp, Homo sapiens
  misc_feature 1..234: note = U/M: U (0.27:0.83) in Breast Luminal Epithelium
  misc_feature 1..234: note = source = chr6:33698746-33698979; Gene: IP6K3 (intron)
  source 1..234: mol_type = genomic DNA
cgctgagggctgggagcccaggctgcaaggagatggtgtttacatttccaggcctgtgtcttggggaaggaggattggagtgctttgttctagggaggagaactgacctttcagaaaccaatgactgtcccaagcccatctttccaggtgcgagaaggggagagagccagcagcctcgtgcagttcctggggaaccccgaggcctcctagctgcctggggagcctggtgtgccg

SEQ ID NO: 2741 - DNA, 24 bp, Homo sapiens
  misc_feature 1..24: note = U/M: U (0.34:0.89) in Breast Luminal Epithelium
  misc_feature 1..24: note = source = chr1:17958862-17958885; Gene: ARHGEF10L (exon)
  source 1..24: mol_type = genomic DNA
cggagaccgtgtacggtgaccgcg

SEQ ID NO: 2742 - DNA, 230 bp, Homo sapiens
  misc_feature 1..230: note = U/M: U (0.27:0.82) in Breast Luminal Epithelium
  misc_feature 1..230: note = source = chr11:67043333-67043562; Gene: ADRBK1 (intron)
  source 1..230: mol_type = genomic DNA
cgctgtctggtatcacaggctcagaaccatgccctgggcagggctgtttggagcagggggtggctttggcatgaggtacacagtgcctcaggggtagatgtgcagcgggtcctcgtgaccacagcctgggtggccagtccgaccagccctgggctgggctcctaggggcaggcagggccggggtgcagaaaggcaggggccatggcaagcacagagaacctggacttgcg

SEQ ID NO: 2743 - DNA, 237 bp, Homo sapiens
  misc_feature 1..237: note = U/M: U (0.37:0.91) in Breast Luminal Epithelium
  misc_feature 1..237: note = source = chr6:34506082-34506318; Gene: SPDEF (exon)
  source 1..237: mol_type = genomic DNA
cgctgggagatgtctggcttccggatgatgcccttcttgtaatactggcggatggagcggctcagcttgtcgtagttcatggcgggacggttcttgcggatgccccacagccgggccacctgggctgagtcctcaattttgaagatgcctagagcaggagggccccgagagagccagtggtatgagtgaggtggcaagaaggagaaagacgcagaccaccaggtcagcctcgtggcg

SEQ ID NO: 2744 - DNA, 482 bp, Homo sapiens
  misc_feature 1..482: note = U/M: U (0.27:0.8) in Breast Luminal Epithelium
  misc_feature 1..482: note = source = chr1:231685353-231685834; Gene: TSNAX-DISC1 (intron)
  source 1..482: mol_type = genomic DNA
cgtgctcattatttggcagtaggatgacagtgggagaagtaggaaaagataagcagcctgctgcattattgtggccatgtttgttgttaaaatagaaatacatccttctttgtttgttggtaagtagtatattgtcaactgtgatgagtagtaaaattaataatacaaatttcagcacatgtggtttatctcagaagccaaaggtgcaccgattccaagatactatattagtttactaggcctgtcataataaaataccacagactgggtggcttaaacagaaatttattgtcttgcagttctggaggcctcaagtctgagatcgaggtgttggcaaatttgatgtcccctgaggcctctttccatgacatgcagatggctatcttttccctgggtcttcacatggccttgtgcacacgtgcacacacatctctgttgtccctgtgtgtcctaatatttccttatgtcaccagtcatattcg

SEQ ID NO: 2745 - DNA, 213 bp, Homo sapiens
  misc_feature 1..213: note = U/M: U (0.31:0.83) in Breast Luminal Epithelium
  misc_feature 1..213: note = source = chr8:11775427-11775639; Gene: CTSB (Intergenic)
  source 1..213: mol_type = genomic DNA
cgtgtagaccctgtcataaaattcataacatgctagctggtgttcactactcatttcacgatgcgtgtacatcctttgatattattcgtattatcctgaagagatgttactactgatgtccctatgcaggtacattctctgatattattcgttatatcctcgggggatgttccttctaatgtcacacgcttgtactccctgtgttctatttcg

SEQ ID NO: 2746 - DNA, 170 bp, Homo sapiens
  misc_feature 1..170: note = U/M: U (0.31:0.81) in Breast Luminal Epithelium
  misc_feature 1..170: note = source = chr7:45753641-45753810; Gene: ADCY1 (exon)
  source 1..170: mol_type = genomic DNA
cgggggtgacacaggccacggtggctccagccaggaccagccagaccagcagagcagggagccacttgccagggtggaggaggagcattgtccaggcatggcctgtggcccgagggccaaccaccgagcaggcacagcacagcagtgactcggtgaggggaggacacccg

SEQ ID NO: 2747 - DNA, 172 bp, Homo sapiens
  misc_feature 1..172: note = U/M: U (0.31:0.81) in Breast Luminal Epithelium
  misc_feature 1..172: note = source = chr2:236787014-236787185; Gene: AGAP1 (intron)
  source 1..172: mol_type = genomic DNA
cgtgggaccctccagccctgcagggtcgctgtgttgcacaaccccaggggcttgttggtggcagcatgttggcccagtcacgttctgggctaaagtactcctccctgccaagcaggtctgatctctagtttccagcagccctgggcaccccgttcctggaatttgctagtcg

SEQ ID NO: 2748 - DNA, 205 bp, Homo sapiens
  misc_feature 1..205: note = U/M: U (0.31:0.81) in Breast Luminal Epithelium
  misc_feature 1..205: note = source = chr15:29335159-29335363; Gene: APBA2 (intron)
  source 1..205: mol_type = genomic DNA
cgcttttcccctaaaggcatccaggagcaaacatgacatgcagaggtagactttgccaaggcaccgctatttccagaagttcttgtgggagagagttgacttcttactgttagacgtaacccaggaagaacagcaaataccggccaggccagaagtgcacacagttactctgttcctgttacggcattaatgctgctttcaggcg

SEQ ID NO: 2749 - DNA, 221 bp, Homo sapiens
  misc_feature 1..221: note = U/M: U (0.28:0.91) in Breast Luminal Epithelium
  misc_feature 1..221: note = source = chr12:15368653-15368873; Gene: RERG (intron)
  source 1..221: mol_type = genomic DNA
cgtgaggaaaaatggtcaggtgagaatgagaggaataattgaaacaatgtggggaaaggcaacgaaaacaggcatcccagctcaggctgatgcatgagccttgacaggaggagacacccagcttgctccgagatcatgaagatgggaaacggatggacgcacgtacagctacgtggttctctcagctgagttttcatttttatgtttgacttcttaaatcg

SEQ ID NO: 2750 - DNA, 171 bp, Homo sapiens
  misc_feature 1..171: note = U/M: U (0.01:0.87) in Breast Luminal Epithelium
  misc_feature 1..171: note = source = chr19:10295669-10295839; Gene: DNMT1 (intron)
  source 1..171: mol_type = genomic DNA
cgggccctgattccccaccagcgccgctcacatatgagcacctgctgaatgccaggccctgctccaggcaaagagctaagtgattagatgtaggtgtcactaggcagggacttcctgacttgctgtgtggttaggaaagaccattctgtagggccgggcacggtggctcac

SEQ ID NO: 2751 - DNA, 265 bp, Homo sapiens
  misc_feature 1..265: note = U/M: U (0.09:0.92) in Breast Luminal Epithelium
  misc_feature 1..265: note = source = chr2:27433191-27433455; Gene: SLC5A6 (intron)
  source 1..265: mol_type = genomic DNA
cgctatggtctcgcatctctccagaaagagggcggccaaaagcaagagctagctgttgtttcactacaactataacatgccaaggcacaaacagcagattgtgggacccccccccctttttttttggagacggagtctcgctctgtcgcccaggctggagtgcagtgacacgatctcggctcactgcaacctccacctcctgggttcaagtgattcttctgcctcagcctcctgagtagctgggactacaggcatgtgctaccgc

SEQ ID NO: 2752 - DNA, 118 bp, Homo sapiens
  misc_feature 1..118: note = U/M: U (0.1:0.89) in Breast Luminal Epithelium
  misc_feature 1..118: note = source = chr17:1523792-1523909; Gene: SLC43A2 (intron)
  source 1..118: mol_type = genomic DNA
cgactacacacaggggcagggaccttgcacgtaggccaacagccttctcgtcttaaacaaatccctgccgatggggccaccaggccctctgcccggccgcctgcctccaggccgtccc

SEQ ID NO: 2753 - DNA, 175 bp, Homo sapiens
  misc_feature 1..175: note = U/M: U (0.11:0.9) in Breast Luminal Epithelium
  misc_feature 1..175: note = source = chr6:43748428-43748602; Gene: VEGFA (exon)
  source 1..175: mol_type = genomic DNA
cgcccccgctctctctctgtctctgtttttttattttccagaaaatcagttcgaggaaagggaaaggggcaaaaacgaaagcgcaagaaatcccggtataagtcctggagcgtgtacgttggtgcccgctgctgtctaatgccctggagcctccctggcccccagtacaacctcc

SEQ ID NO: 2754 - DNA, 259 bp, Homo sapiens
  misc_feature 1..259: note = U/M: U (0.04:0.81) in Breast Luminal Epithelium
  misc_feature 1..259: note = source = chr2:233986730-233986988; Gene: INPP5D (exon,intron)
  source 1..259: mol_type = genomic DNA
cgctggtctctgctgcagttggcctttgtggttggctgacattctagttggttaacatgtgcgtttgtttggatgttctgtcctcaggcatccgaaggcgtctccatgaggttcttcaccaagctggaccagctcatcgagttttacaagaaggaaaacatggggctggtgacccatctgcaataccctgtgccgctggaggaagaggacacaggcgacgaccctgaggaggacacaggtagggagggagggacaggac

SEQ ID NO: 2755 - DNA, 313 bp, Homo sapiens
  misc_feature 1..313: note = U/M: U (0.14:0.89) in Breast Luminal Epithelium
  misc_feature 1..313: note = source = chr1:204535920-204536232; Gene: MDM4 (Intergenic)
  source 1..313: mol_type = genomic DNA
cgagacaagaaaagccaacaagaatattgactagaaaaagggtattggccaggcacagtggctcacgcctgtaattccagcactttgggaggctgaggcaggcggatcacctgaggtcaggagtctgagatcagaccggccaacatggatttgtactaaaaatacaaaaaactagccaagtgtggtggtgtgtgcctatagtcccagctactcgagaggctgaggcaggagagtcgcttgaaaccaggagacagaggttgcagtgagccaagatcacagcactgaactccagcctgggtgacagagtgagacc

SEQ ID NO: 2756 - DNA, 139 bp, Homo sapiens
  misc_feature 1..139: note = U/M: U (0.19:0.93) in Breast Luminal Epithelium
  misc_feature 1..139: note = source = chr10:22047483-22047621; Gene: DNAJC1 (intron)
  source 1..139: mol_type = genomic DNA
cggccgtggaaagtaagccgaaccctagctgtcgcctggcactgaccacatacggagatggcctcagggcctctggacagccaccaggtgtacctgctgagtccaaagttattcacatggcagaatcgaagatgatcac

SEQ ID NO: 2757 - DNA, 236 bp, Homo sapiens
  misc_feature 1..236: note = U/M: U (0.2:0.94) in Breast Luminal Epithelium
  misc_feature 1..236: note = source = chr2:61471508-61471743; Gene: USP34 (intron)
  source 1..236: mol_type = genomic DNA
cggaggctgcagtaggtggattacttgggttcaggggtttgagaccagcctggccaacatggtgaaactccacctctactaaaaatacaaaaattggctggggatggtggcaggtacctgtaatcccagctactcccgaggctgagactcgagaatagctggaacccaggaggtggaggttgcagtgagccgagatcgcgccactgactccagtctgggcgacacagcaagaatcc

SEQ ID NO: 2758 - DNA, 311 bp, Homo sapiens
  misc_feature 1..311: note = U/M: U (0.19:0.92) in Breast Luminal Epithelium
  misc_feature 1..311: note = source = chr19:40828736-40829046; Gene: C19orf47 (intron)
  source 1..311: mol_type = genomic DNA
cgcatggggctcacagtccagtggggaagacaggcttggcatcagaaatgacacaaataattctgcaagaatgacagtaacgcattctagacggagaaggacagctggagggcagaagacaggggtggctcctcatcagtccagaggaactttccctgaggcaccaactttgaagccaggccctccaagatgaattagcaaagaaaagagtatgtgctatgccctgaaggcaggaagtataatcctatgtattgagcactcgctatgcgcccagctcttcatagggctggaacttccagccacatgatccc

SEQ ID NO: 2759 - DNA, 138 bp, Homo sapiens
  misc_feature 1..138: note = U/M: U (0.16:0.88) in Breast Luminal Epithelium
  misc_feature 1..138: note = source = chr8:140755399-140755536; Gene: TRAPPC9 (intron)
  source 1..138: mol_type = genomic DNA
cggaatgatctgtggatttcttgtccaactggctcgtccaacaatctgttcacttgtccttcagggcatgtcccctcaaggctggctgctgaaggtttatttttcctccagagctcaaactcccagcgacgcctcccc

SEQ ID NO: 2760 - DNA, 475 bp, Homo sapiens
  misc_feature 1..475: note = U/M: U (0.29:0.93) in Breast Luminal Epithelium
  misc_feature 1..475: note = source = chr21:46935507-46935981; Gene: SLC19A1 (exon)
  source 1..475: mol_type = genomic DNA
cgaggcaggggtcgtggggatgcactgagggccgcctgcaaagttaccacaggggcgcccgagagtcactggttcacattctgaacaccgtcgcttggaagacactgcaaacccagcttgctgacaccaggaggatggacagccagctggggacaagtctcatctgcagcctcagggcctgaggcttgggcggagcacagagtgcagggggaaggggttgtcactgggctcaggaattcagctgcctgcggggccggggcctgggccaggtatgggtcgctctgtctctgctccagggaggctggccccacagcccccaggctgtcttctggggaaagcggcgggctctgggctggctgcaggcctccgaggcccttgtcctgcacgctcagtgcctgtgctgccttctcctccgcggcactcctcaggccctgggccgggggctgccgcgggtggtggccccgctggcagtgcc

SEQ ID NO: 2761 - DNA, 493 bp, Homo sapiens
  misc_feature 1..493: note = U/M: U (0.27:0.9) in Breast Luminal Epithelium
  misc_feature 1..493: note = source = chr14:105181998-105182490; Gene: INF2 (intron)
  source 1..493: mol_type = genomic DNA
cgtgggcgggacctcctggctggcaggacaggctgaggttgctcctgtctggtgtcctggcgctaactgcagttccagtaaccctgtggctttcctgctctgtctgttggtggagggctatcttcactctaagtgtgtcaatggcgtggggccttctggggcatgtccccaggaagtctgtgaggagaccgggacagtcgcaagggcagatgctgccagggacaagtacactgcaacccccctcctgttggacagtgtcctcccaccccgaggccatgggtgggtctatggagaagcagattaccccccgcacaccgagtcttctggggggcgaccagccaaaggtcaatcagccaggtccgtccacagggctggagaggccaatgcatccagctagacaggaccagcctgcactgggtggaggaggggctagagcagagaaccagaaggtccagcccggccgatcatgagctctgtgagcccaggtcgtggc

SEQ ID NO: 2762 - DNA, 460 bp, Homo sapiens
  misc_feature 1..460: note = U/M: U (0.31:0.94) in Breast Luminal Epithelium
  misc_feature 1..460: note = source = chr22:30190746-30191205; Gene: ASCC2 (intron)
  source 1..460: mol_type = genomic DNA
cggaaagaattctcacttattcccaaggaaaacaagcaagctacagaaaaatgcgtacagtatgatcccaaaagcaaactacgctaactctgtttctatggccacacgcctatgcatgacaatgcagacagaaggctaggaagccccacgccaaatgacagtggttactgcttggaagcacctggagttgtctaaatcttttttttttttttttgttacaggctagagtgcagtgatatgatcttgcaacctccgcctcctgggctcaagcgattctcgtgcctcaggctcctgagtagctgggagtacaggtgcgtgccactatgcctggctaatttttgtattttgttatagagatggggtatctgccatgttggtcaggctggtctggaactcctggtctcaagtgatctgcttgcctcaacctcccaaagtgctaggattacaggaatgagccacc

SEQ ID NO: 2763 - DNA, 56 bp, Homo sapiens
  misc_feature 1..56: note = U/M: U (0.04:0.92) in Breast Luminal Epithelium
  misc_feature 1..56: note = source = chr7:6188781-6188836; Gene: USP42 (intron)
  source 1..56: mol_type = genomic DNA
cggctgaagcagcccctactctccgcccacgtgaccgtctcctttgctccgaggcg

SEQ ID NO: 2764 - DNA, 110 bp, Homo sapiens
  misc_feature 1..110: note = U/M: U (0.02:0.89) in Breast Luminal Epithelium
  misc_feature 1..110: note = source = chr19:10295203-10295312; Gene: DNMT1 (intron)
  source 1..110: mol_type = genomic DNA
cggtgcagtgccgcggtgctgcgtgcctgtaaccccagctactcaggaggctgtggtgggaggatggcttgtgggcaggagttcgagtccagcctggacaacatagggcg

SEQ ID NO: 2765 - DNA, 146 bp, Homo sapiens
  misc_feature 1..146: note = U/M: U (0.04:0.9) in Breast Luminal Epithelium
  misc_feature 1..146: note = source = chr19:1167117-1167262; Gene: SBNO2 (intron)
  source 1..146: mol_type = genomic DNA
cgcttagagcgagacttcagcgctgactgctggagctacgcaccctgtcctgacaatggccgcacagttaggcgctgctccacgcctggaggagggaactgagggcccgaaatcacagaagcaggaactccaggttcgccagtgcg

SEQ ID NO: 2766 - DNA, 335 bp, Homo sapiens
  misc_feature 1..335: note = U/M: U (0.04:0.88) in Breast Luminal Epithelium
  misc_feature 1..335: note = source = chr2:9776070-9776404; Gene: YWHAQ (Intergenic)
  source 1..335: mol_type = genomic DNA
cggtgaacgctcaacagctgggtaaacttaggtattatagttcccactggctgactaaactgatgctcagagaggttcaattacctatcccaattggtaaactttagagtaaagacttaaaaacaggtctgtctgatttttatcttctactacaacaaacaagaatctgtgctacctgcaatggaagacagaagctccagtgtttgctggcctgggaacaatgtttagttatttgaggttggtgggtggatgaatatgtatctacccctgagtcagcaactgattttattttcatacggaaggctctgtttttacgctcgacacatccagcagcg

SEQ ID NO: 2767 - DNA, 220 bp, Homo sapiens
  misc_feature 1..220: note = U/M: U (0.06:0.89) in Breast Luminal Epithelium
  misc_feature 1..220: note = source = chr1:21573375-21573594; Gene: ECE1 (intron)
  source 1..220: mol_type = genomic DNA
cgcagggactcaagggatcctcctgcctctgtctcccaaaagtcccgcaattacgggcgttcatgcccggccacaggtgatatttgtatcaccattttatgaaggaggagaatgaacttaagaaaggttacgaaatttgcccaaggctacaaagctggtagtttgaaagaggctgggatttaaacctgtgcctgtaaccaggatgtcctgctgcctctcg

SEQ ID NO: 2768 - DNA, 470 bp, Homo sapiens
  misc_feature 1..470: note = U/M: U (0.07:0.9) in Breast Luminal Epithelium
  misc_feature 1..470: note = source = chr7:6188255-6188724; Gene: USP42 (intron)
  source 1..470: mol_type = genomic DNA
cggggcgaacagtagtgagctagtgtcacaaggaacacaggattctagagtgggggcctcatctgagctgtggcatcttcacagcttttcgacttgagtttgttttggatgatcacacacacggtctagctgcatgctttattttatggacatcaggcagtatatttgaggtataacagagtcacacatcaaatgcccagcgggctccccttttgggctctgctccagagtgacatcaggactctggcaaacaggagggcatgtgccctgtaggaaggggtggttggcattgcttttccaaagcctgtttttgtttttaccatgaagctttccagtgttaggatggcagctaattcaggtatgtgaggagacgctgggaaggccacacgtgatctgttaactgactttcacgcctgcgcctccacgggggtgcagcagccatgggggaacctgcagcgagtctcactgcg

SEQ ID NO: 2769 - DNA, 225 bp, Homo sapiens
  misc_feature 1..225: note = U/M: U (0.05:0.87) in Breast Luminal Epithelium
  misc_feature 1..225: note = source = chr17:30348093-30348317; Gene: LRRC37B,LRRC37B (promoter-TSS,exon)
  source 1..225: mol_type = genomic DNA
cgcttataaggggcatgagcatctcagggctgccagaatggcttttgctgagtgcatagcaccagcgtgtgtcatgtcttggctgcgtttctggggcccatggcccctccttacgtggcaactattgtctttactagtcaaggaggctcagcctctggtgtgggtcaaggacccgctccagctgacctctaaccccctggggccacctgagccctggtcttcccg

SEQ ID NO: 2770 - DNA, 238 bp, Homo sapiens
  misc_feature 1..238: note = U/M: U (0.04:0.86) in Breast Luminal Epithelium
  misc_feature 1..238: note = source = chr4:57177980-57178217; Gene: KIAA1211 (intron)
  source 1..238: mol_type = genomic DNA
cgcaccccctgccacactctagcaggagccctttgcttgctgccagcctgtgaattctctgtaggtacaggcgtggtgtcctaccttctaattcagtgtggcctgtgggttcgggctgtgtcacgatctctctgatctttccaaatctacccttcatctgaggttgtgtttttttttagtgattgcatctgtattctagagctgcaggccattccacaattcatcctttgaaggaccg

SEQ ID NO: 2771 - DNA, 396 bp, Homo sapiens
  misc_feature 1..396: note = U/M: U (0.04:0.86) in Breast Luminal Epithelium
  misc_feature 1..396: note = source = chr10:104383917-104384312; Gene: SUFU (intron)
  source 1..396: mol_type = genomic DNA
cgtgacagagccaagcagctctgtagggacccagtgagcctcaggagtgccaagccccagaactgcacaggcttttcccacagttgcatcacaagggcaagtctgttactcgggagagctcccaggagctgccccatcttagctgtctatctccagtgtcctgttgataagatctgttaacattctcagctccaggtctgaaatatacaaagaacagggcctgtttgttcaatccaaccttctaaggtttaactcccaaaggaaattaaattaggtgcctggagctatgacagtctgtcgtgtttctttgcagagaatgtcacctttaatatcatgtagatctcatgtataatttttcccctttaattcttttaaaataacgtgaagtttccagcg

SEQ ID NO: 2772 - DNA, 285 bp, Homo sapiens
  misc_feature 1..285: note = U/M: U (0.08:0.87) in Breast Luminal Epithelium
  misc_feature 1..285: note = source = chr4:3217013-3217297; Gene: HTT (intron)
  source 1..285: mol_type = genomic DNA
cgcggtgagtgtggactcctggaagcgcaccgtagctccgctgtgtcctgctgctcctccctagctgtcagggaggctgtagtccattgctttgccagctcttttgtttccgagtgaacaccttatccgtacacatgcggctgtctctgaccctacagaccagctgggatgccactgggggagcgctcccttccccccgcacttcccacactctgcagttattctgagatccttgagggcagggaacaggtttgtcttctttgtgttctcagaaattaatgctcg

SEQ ID NO: 2773 - DNA, 288 bp, Homo sapiens
  misc_feature 1..288: note = U/M: U (0.08:0.87) in Breast Luminal Epithelium
  misc_feature 1..288: note = source = chr6:169641078-169641365; Gene: THBS2 (intron)
  source 1..288: mol_type = genomic DNA
cgccaccctccctgccccggtctcctgccatcgaccccctccctgccccaggctcctgccctcgccgccctccctgccccggactcctgcccctgccgccctccctgccctgggctccatctcctggcatcatttacttcatgccctctgggtacgagtgacagtcagcatcactgcaccctggttagccatgtgtatgttgtggggcaccgtggcccggagcacctcattatgttcagtccctttctctaaactgcgagctgcccgtcctgagccccgcaggcatcg

SEQ ID NO: 2774 - DNA, 54 bp, Homo sapiens
  misc_feature 1..54: note = U/M: U (0.09:0.87) in Breast Luminal Epithelium
  misc_feature 1..54: note = source = chr5:177525862-177525915; Gene: N4BP3 (Intergenic)
  source 1..54: mol_type = genomic DNA
cggcggagtaaaacttgccgcaggcaagatccaccaactgacgcaagagagtcg

SEQ ID NO: 2775 - DNA, 75 bp, Homo sapiens
  misc_feature 1..75: note = U/M: U (0.08:0.84) in Breast Luminal Epithelium
  misc_feature 1..75: note = source = chr2:10600695-10600769; Gene: ODC1 (Intergenic)
  source 1..75: mol_type = genomic DNA
cgccccaggcactggagctaacgtgggaggctggggatggaaaccagtcgttggagtcagccacgatgaacggcg

SEQ ID NO: 2776 - DNA, 276 bp, Homo sapiens
  misc_feature 1..276: note = U/M: U (0.14:0.89) in Breast Luminal Epithelium
  misc_feature 1..276: note = source = chr11:75167903-75168178; Gene: GDPD5 (intron)
  source 1..276: mol_type = genomic DNA
cgggaaggctttgccagtttctcagacaccctgctccccactgcggctctgggcctgaccctgggcagaggcagcgaacctccctccaggcgatgggaatgcgctgccctccccagcccagcccagactagccagcctgagcctggcctcctcccagatgattccaggcctctaggctcttcctctgtgtgattccccgtcaagaggtcactgggtgctgctgtacttggactactcaacttcattcatcaaacattttgggagttccagtccccg

SEQ ID NO: 2777 - DNA, 191 bp, Homo sapiens
  misc_feature 1..191: note = U/M: U (0.09:0.83) in Breast Luminal Epithelium
  misc_feature 1..191: note = source = chr22:27859205-27859395; Gene: MN1 (Intergenic)
  source 1..191: mol_type = genomic DNA
cgcgaccagggctgtgaacccagccctttttctgggccaagtggcctcaaatccgtcttcttgtttcattctttcaacatcgcttcaggggttggcaaactcatgctgtaaagggccagatagtaaatatgttcagctttacatgccacacggcctctgtcacaactgcccaactctctcactgtaacacg

SEQ ID NO: 2778 - DNA, 349 bp, Homo sapiens
  misc_feature 1..349: note = U/M: U (0.15:0.86) in Breast Luminal Epithelium
  misc_feature 1..349: note = source = chr22:20014184-20014532; Gene: TANGO2 (intron)
  source 1..349: mol_type = genomic DNA
cgggtcagtgagacaaaggcctagcagtcagtacccatgttggtgaattgttggcaagaacatacaggaggtcacaagttgcccagccagtgggggatgcccataaaaccctggcgggaacatttcccacactgcatacaccctggaggcaggtgagtggcaacaggttctggtgctagacgttagcggggacttggccaagtctgtttatctgaaagcgtcacccatggatggagcaattccacctcttgcgtctatcctaggaatgtcctcagctgctctcccactgttgtaaagaaatacctgggactgggtcatttattaaaaaaagaggtttaattggctctcg

SEQ ID NO: 2779 - DNA, 133 bp, Homo sapiens
  misc_feature 1..133: note = U/M: U (0.19:0.89) in Breast Luminal Epithelium
  misc_feature 1..133: note = source = chr11:3145253-3145385; Gene: OSBPL5 (intron)
  source 1..133: mol_type = genomic DNA
cgcagaggcgggaggagccaggggtcaggtgagcgctgcggttctgcgttctgtgcatggatgtaagcacgttagatcccacagctcaggtcatcgttgttattctcagcattgtacagaggaagagcctacg

SEQ ID NO: 2780 - DNA, 296 bp, Homo sapiens
  misc_feature 1..296: note = U/M: U (0.2:0.89) in Breast Luminal Epithelium
  misc_feature 1..296: note = source = chr22:46888626-46888921; Gene: CELSR1 (intron)
  source 1..296: mol_type = genomic DNA
cgctcgaggcaagatccaccgtgctcggccgaaacccaggaggacagtagaggttgccaacagtgagccaagatagccaagatcatgccactgcactccagtttgggcgacagtgactctctgtctcagaaaaaaaccaggttcttggtaacaggacaaaatattagaaggtagacaaaaagagcatggaaaacatttaatatttctctgggagagaaaaagtatgtaagagaacagactaaacaaagcacgtgtctataatcccagtgctttgggaaaccgagatgggaggatcg

SEQ ID NO: 2781 - DNA, 349 bp, Homo sapiens
  misc_feature 1..349: note = U/M: U (0.17:0.86) in Breast Luminal Epithelium
  misc_feature 1..349: note = source = chr5:3630908-3631256; Gene: IRX1 (Intergenic)
  source 1..349: mol_type = genomic DNA
cgagaacttgattttcatccagggtgagaacttgatttctatccatggcgagaacttgatttttatccatggcgagaacttgattttcatccatggcgagaacttgatttttatccatggcaagaacttgattttcatccagggcaagaacttgattttcatccagggcgagaacttgatttttatccatggcgagaacttgattttcatccagggcgagaacttgatttttatccatggcgagaacttgatttttatccatggcgagaacttgattttcatccagggcgagaacttgattttcatccagggcgagaacttgattttcatttgggatattttggggacg

SEQ ID NO: 2782 - DNA, 157 bp, Homo sapiens
  misc_feature 1..157: note = U/M: U (0.19:0.87) in Breast Luminal Epithelium
  misc_feature 1..157: note = source = chr8:140770367-140770523; Gene: TRAPPC9 (intron)
  source 1..157: mol_type = genomic DNA
cgtgacagcggggaggccaagcgctcgggcctgggaagccagtgtcacccctcagggccgggatggctggaggtgcccatcgctggacttgctggctggggctggagcaaatgccaggcttatgtggggtggggacatgtgcctgtggaggagaccg

SEQ ID NO: 2783 - DNA, 172 bp, Homo sapiens
  misc_feature 1..172: note = U/M: U (0.22:0.9) in Breast Luminal Epithelium
  misc_feature 1..172: note = source = chr14:35544037-35544208; Gene: FAM177A1 (intron)
  source 1..172: mol_type = genomic DNA
cggaatttgagaccagcctggccaacatggcgaaaccttatctatactaaacatacaaaaatttgtgcaattggtgcacgtctgtaatcccagctactcgtgaggctgaggcacaagagtcacttgaacccaggaggcagaggttgcattgagctgagattgtgccactgcg

SEQ ID NO: 2784 - DNA, 362 bp, Homo sapiens
  misc_feature 1..362: note = U/M: U (0.19:0.87) in Breast Luminal Epithelium
  misc_feature 1..362: note = source = chr11:70016959-70017320; Gene: ANO1 (exon)
  source 1..362: mol_type = genomic DNA
cggggtgctgactagcactgggctctctctgcagtcatccagtttggcttcgtcaccctgtttgtcgcctccttccccctggccccactgtttgcgctgctgaacaacatcatcgagatccgcctggacgccaaaaagtttgtcactgagctccgaaggccggtagctgtcagagccaaagacatcggtgagtgaccccacgggccggcagaaccggttccgagtgcgtgctgggtttggggagggggttgctcctctccagaagctagagccagagctggccaggtgtccctcctggggctcttcactcagcctttgccgggtggagcctgggggcaggtgacacaagatgtggaggctcg

SEQ ID NO: 2785 - DNA, 120 bp, Homo sapiens
  misc_feature 1..120: note = U/M: U (0.25:0.92) in Breast Luminal Epithelium
  misc_feature 1..120: note = source = chr16:15129301-15129420; Gene: PDXDC1,PDXDC1 (intron,exon)
  source 1..120: mol_type = genomic DNA
cgcaggctctctggagtccacagaacccatatatgtctacaaagcacaaggtgcaggagtcacgctgcctccaacgccctcgggcagtcgcaccaagcagaggcttccaggtaagtgacg

SEQ ID NO: 2786 - DNA, 124 bp, Homo sapiens
  misc_feature 1..124: note = U/M: U (0.18:0.85) in Breast Luminal Epithelium
  misc_feature 1..124: note = source = chr10:12707807-12707930; Gene: CAMK1D (intron)
  source 1..124: mol_type = genomic DNA
cgatatctcctgggagctggttggaaatgcagccttcgaggccccaagcaaacctgctgacgcagggcctgcagtggggccagacccccaggcgattcatctgcacgttgaagtttgagcagcg

SEQ ID NO: 2787 - DNA, 212 bp, Homo sapiens
  misc_feature 1..212: note = U/M: U (0.23:0.88) in Breast Luminal Epithelium
  misc_feature 1..212: note = source = chr10:22047181-22047392; Gene: DNAJC1 (intron)
  source 1..212: mol_type = genomic DNA
cgactgagggaggcacagacagcggaagagatcggggcttttgattctcactgttcctggttcctcgactaacaatctagctacagggaaagaagcctcaagagacactgtgttaggatcacaccctggggctctctgcagcgcctcatggccagatcacaggaaagaggccgcccaagcccggtgggtgggctctccacagggcactcccg

SEQ ID NO: 2788 - DNA, 298 bp, Homo sapiens
  misc_feature 1..298: note = U/M: U (0.25:0.9) in Breast Luminal Epithelium
  misc_feature 1..298: note = source = chr16:80641327-80641624; Gene: CDYL2 (intron)
  source 1..298: mol_type = genomic DNA
cgagtcctagagcctcaatctcccaaaatgcctctctcagctctggaaccagccctggggccgcaggagtggccttgtctccaccttcccacaggatattcccctgccgcgctctgagtgactgttatgagataaaatcaacacttaattaaaaaccactgcctctgcagaggtgttatttgtttatgtatttttcagtgcatcttcaaacagtgacatttaaatgtgacgagcagtcggtggagaaaacaaatgaaatagaggcatggtgtgtacagctttctctagtcatcttccg

SEQ ID NO: 2789 - DNA, 183 bp, Homo sapiens
  misc_feature 1..183: note = U/M: U (0.26:0.88) in Breast Luminal Epithelium
  misc_feature 1..183: note = source = chr19:4990593-4990775; Gene: KDM4B (intron)
  source 1..183: mol_type = genomic DNA
cgtgttttaatactgtcattatggaagttggcctgggggtaatccagtgtctcttttagatctgtgttgtacaaacactgaactagttctggtcgcctctccggcctttgttttggggagaatattcgatgagatggcccgtaattctaacactgtgcattttgaaggatatttataaacccg

SEQ ID NO: 2790 - DNA, 383 bp, Homo sapiens
  misc_feature 1..383: note = U/M: U (0.28:0.9) in Breast Luminal Epithelium
  misc_feature 1..383: note = source = chr14:56607984-56608366; Gene: PELI2 (intron)
  source 1..383: mol_type = genomic DNA
cgggaaaattaaatgtaggaagagacgacatcagaccagaatgttgtatgtgcgcccctgtgccctcagggcttttgtcaggacggacgttaggactggcaaggcaagattggctggcacgagaatggccagttgggcaactaaacatcttttcgtctttggtctgttaggttttttctgaggtggaatttgcctcacagtttttaggagataacttatttcatagaccaggtgttagcccattctcatgtggctatgaagaaatacctgagactgtgtaatttataaagaaaagaggtttaattgactcacagttcggcatggctggggaggcctcaggatacttacaatcatggcagaaggcacctcttcacaggtcagcg

SEQ ID NO: 2791 - DNA, 228 bp, Homo sapiens
  misc_feature 1..228: note = U/M: U (0.24:0.85) in Breast Luminal Epithelium
  misc_feature 1..228: note = source = chr9:133967816-133968043; Gene: LAMC3 (exon)
  source 1..228: mol_type = genomic DNA
cgggagggttcttagcagcagaatctgaggcccagagaccctgaggccgtggccaggcctgctagtctggctagagcaaggcccattcctggcgggggtgtcattgccttcaccggacgcttccctctcagggtcctgggactgcaccagatgccctgagggaatggcccaccctggcctgtacccacttcagcctgtgatctatccaaagagccaggcccaaaagcg

SEQ ID NO: 2792 - DNA, 382 bp, Homo sapiens
  misc_feature 1..382: note = U/M: U (0.29:0.9) in Breast Luminal Epithelium
  misc_feature 1..382: note = source = chr6:20106040-20106421; Gene: MBOAT1 (intron)
  source 1..382: mol_type = genomic DNA
cgttattacccactgaatttaagaaagagttatccaattcaagacaaaatgatgtatgtgaatttgctttgcaaaatgatttcatagaaaggttctttcataatatatttaagtattcacttgggctcatttacaacttaaagaagttagactgagcactctaaggctgagatctgaagccactctagactgaacactgactacacctaacaacgaagtacaagtgaaatttcaatgttaagcaatgaggatctactgagaaaagggtttgcatacaactgtggtttactgctagctactgaatttagcccaaggggaggaacagatctggaacgcaaccaggcctgccttcactaaaaagctacgcaattttatttcttcg

SEQ ID NO: 2793 - DNA, 193 bp, Homo sapiens
  misc_feature 1..193: note = U/M: U (0.31:0.9) in Breast Luminal Epithelium
  misc_feature 1..193: note = source = chr4:184343198-184343390; Gene: CDKN2AIP (Intergenic)
  source 1..193: mol_type = genomic DNA
cggagactgccctcaggcccagctgagctctgaggagtctgagctagtcgtctccaaaggactcatagccaatctcggaaaccagttactccacaggaaagcccgtctacctcccagcacctcaggggcccacagcgcaagcaggtgagctggctggacgatcgagttcctgctcagtacatgggattattcg

SEQ ID NO: 2794 - DNA, 212 bp, Homo sapiens
  misc_feature 1..212: note = U/M: U (0.3:0.89) in Breast Luminal Epithelium
  misc_feature 1..212: note = source = chr6:34506937-34507148; Gene: SPDEF (exon)
  source 1..212: mol_type = genomic DNA
cgcccctgcccccatgcaccgtgcctggcagaagcccccacaacctccatgctcactggccctgcagcgccccttgggcaccctgctcacccttctccttgttgagccacctaatgaagcggccatagctgtggggcttgagtagcaactccttgaggaactgccacaggtggatgggctgcccggagcatgatgagtccacctcgctgtcg

SEQ ID NO: 2795 - DNA, 284 bp, Homo sapiens
  misc_feature 1..284: note = U/M: U (0.28:0.87) in Breast Luminal Epithelium
  misc_feature 1..284: note = source = chr10:29414135-29414418; Gene: LYZL1 (Intergenic)
  source 1..284: mol_type = genomic DNA
cgtaaacctccatcatccagcagtcgttactggcacggggcagattgtctagtaagacaagtcctttctattttccacagatcttttttttttttttttttttagacgagtcttctctgtcgcccaggctggagtgcagtggcgggatcttggctcactgcaagctccacctcccgggttcacgccattctcctggctcagcctcccgagtagcttggactacagtcgcctgccaccacgcccggctaattttttgtatttttagtagagacggagtttcaccg

SEQ ID NO: 2796 - DNA, 122 bp, Homo sapiens
  misc_feature 1..122: note = U/M: U (0.34:0.91) in Breast Luminal Epithelium
  misc_feature 1..122: note = source = chr22:44564263-44564384; Gene: PARVB (intron)
  source 1..122: mol_type = genomic DNA
cgcagggtgtcagcccgcgccaggagctctcacaaaacctgtgtgtctggggaggcactgcccagagcgtcctggacatggtggtggccagtctttaaggggaagcgctgtgtgtggatgcg

SEQ ID NO: 2797 - DNA, 403 bp, Homo sapiens
  misc_feature 1..403: note = U/M: U (0.31:0.87) in Breast Luminal Epithelium
  misc_feature 1..403: note = source = chr8:141054097-141054499; Gene: TRAPPC9 (intron)
  source 1..403: mol_type = genomic DNA
cgccccattcctgccgtacctggcagttgttctaaactcagatcattgtgccagcagggtgtcagccaggcgccttcaaaccttggtagtcgccctgaagacgtgccaaggtagacggtcaagccaaggctgaccccagtgccatcccctctttcttctgcttcacagcagtccaacaaaaagccacacccctcaactactggacaaacattcactgggtgcccccctgttccagacactgtgctggtccagaagcaacagaacaacaacgaccaaaaaaaaaaaaaaagaaaaatcacagtgggctaggatatgacatcctacttaggcactcaatcccaagatatcaatcacctctggccactgttcccctacaaccactcatgggccggtaaagaaaccg

SEQ ID NO: 2798 - DNA, 299 bp, Homo sapiens
  misc_feature 1..299: note = U/M: U (0.31:0.86) in Breast Luminal Epithelium
  misc_feature 1..299: note = source = chr9:96105123-96105421; Gene: C9orf129 (intron)
  source 1..299: mol_type = genomic DNA
cgtgagaagtaagattatgaactcagtgaacaggcacatcctgcgtggcatgtgaaagaattcggaacagcgggaaaaattaaaccacggaagcaaatttcaagtcaacagaaacaagaactttctaagaacgagagcagttcaacaatgaaaagggttgctttactgactgctggactgctcatacaagaacattctacagcagggagctgggctgaacttctataaacattcctcactccccaaatccttcccatccctgaatgtggatagtgagagggtagacatcacgagatacg

SEQ ID NO: 2799 - DNA, 313 bp, Homo sapiens
  misc_feature 1..313: note = U/M: U (0.26:0.8) in Breast Luminal Epithelium
  misc_feature 1..313: note = source = chr12:111402971-111403283; Gene: LOC100131138 (Intergenic)
  source 1..313: mol_type = genomic DNA
cggccctgtggtgatgccaggcgattatgtccagggcaccacgtctggactagttgaccgagagatctcgagatcccttctctctcaccacaaacctcagccaagaaacagcccttggggaagcaggagaatttagacacagggacaggggtatggcccgtgctcaggaaagagggagactaacgagagggcattggcaaagagatggtgatccctttccttccccactcccctccacacccccccccctttttttttgagatagggtcttgctctgtcagccaggttgatctcaagttatcctcccgtctcg

SEQ ID NO: 2800 - DNA, 378 bp, Homo sapiens
  misc_feature 1..378: note = U/M: U (0.32:0.86) in Breast Luminal Epithelium
  misc_feature 1..378: note = source = chr3:46949042-46949419; Gene: PTH1R (Intergenic)
  source 1..378: mol_type = genomic DNA
cgcgtgctgcttgtgtatttctttgtgtttgtgtacacgagtgtccatgtgcctatctatgtgtgtctgtgcttgtgtacctgtgtgtgtgtgtgtgtgtgtgtggccatgtgtgtttctatgtgtgtgtgtctggatatgcctgtatgtccatttgtatgtgtctgtgtcttctggcatgtctatgcgtgtgtggttgtaggtttgtgtaccagtgtgtctatgtgtgtatttgtgtgtgtgtgtgcatttgtatgtctatttgtgtatttctgtatgtgtgtctatttgtgtgtgtgtatctgtgtctatttgtatatctgtctgttatgtgtatgtgtgtgtgtgtatgtgtctatgtttctgtgctggtgtacg

SEQ ID NO: 2801 - DNA, 422 bp, Homo sapiens
  misc_feature 1..422: note = U/M: U (0.35:0.87) in Breast Luminal Epithelium
  misc_feature 1..422: note = source = chr20:30530332-30530753; Gene: TTLL9,TTLL9 (intron,TTS)
  source 1..422: mol_type = genomic DNA
cgtggggtagtggttaagagtgtggctctggcaccaggtagtctgggttcaaatgatttaacctctctgagcctgttttcccttctacacatcattcctgcgagggccaaacaaatccatccacattcagcatctggagcagttcctggcttgaggtaagcccccagtcctcatgttcactccataaggtgggcagtagtatcctggtttacagatgagaagaccgatgctgaaaagggtaactgacctgcttgagggccatggcagtttaggaatggagccaggatataaaccacaggctgtgtgtggttgtctgactcccgctgtcccctcttcccagcagggagttggggcacaggcccctccactcctcccaagcataggtcatcccagccaacaccccacttcctttccaggctgcg

SEQ ID NO: 2802 - DNA, 226 bp, Homo sapiens
  misc_feature 1..226: note = U/M: U (0.31:0.78) in Breast Luminal Epithelium
  misc_feature 1..226: note = source = chr17:45946181-45946406; Gene: SP6 (Intergenic)
  source 1..226: mol_type = genomic DNA
cgggatgggggaagaaggagggggctggctccagtgccctcttctccgctctgcaggtgtaattagccctggcagatgaaagggcgtctttgaaagcaggtgagatccttgtctgtcagcagggcgctctgggtggcatcggcagcttatcctgaaaccacacacggcaccagagccgggctgtctgagtgctgcccaggaggcggggaggcagaccccaggggcg

SEQ ID NO: 2803 - DNA, 138 bp, Homo sapiens
  misc_feature 1..138: note = U/M: M (0.87:0.12) in Breast Luminal Epithelium
  misc_feature 1..138: note = source = chr12:54433551-54433688; Gene: HOXC4 (intron)
  source 1..138: mol_type = genomic DNA
cgagtgcagtggtctttaaccgggaatttagccagggccgaagtcccacacccaggcaagactccaccctgacacccgccctgactctcggccaaatctcagtcccattcccttcctctctgtgtagacgggcattcg

SEQ ID NO: 2804 - DNA, 187 bp, Homo sapiens
  misc_feature 1..187: note = U/M: M (0.88:0.2) in Breast Luminal Epithelium
  misc_feature 1..187: note = source = chr3:180462104-180462290; Gene: CCDC39 (Intergenic)
  source 1..187: mol_type = genomic DNA
cgtgcctgacactttagacctggctctaacaagccagtggttactgggggttgagctacagaaagtgattcggctgtaatgctgcgtttcccctgctttgttgctaattgtagcctctttttctccattgaattgggagttgagtaaaagagcttgtttgctctgtgcggtgaggctgccagggccg

SEQ ID NO: 2805 - DNA, 169 bp, Homo sapiens
  misc_feature 1..169: note = U/M: M (0.75:0.13) in Breast Luminal Epithelium
  misc_feature 1..169: note = source = chr1:89663866-89664034; Gene: GBP4 (intron)
  source 1..169: mol_type = genomic DNA
cgcggggggctctgggtgctgttaaccgggcgaattcctgggaactgcgggtatggcttgccacagtaccttatcagttaattgcattcttggatgtgctgggagtcagcttgcacaagttaagtccctgaggaagcgggtgggtaaggggctgcaagtgaaggagccg

SEQ ID NO: 2806 - DNA, 211 bp, Homo sapiens
  misc_feature 1..211: note = U/M: M (0.81:0.19) in Breast Luminal Epithelium
  misc_feature 1..211: note = source = chr16:629196-629406; Gene: PIGQ,PIGQ (exon,intron)
  source 1..211: mol_type = genomic DNA
cgtggctggaggggctgactgcctccggcctgtgcccgctgggccagcgcggtgcttgggcaccacaagggggcagcctgctcccgtcctgcagctgaggccgcgcacaggccctgggaatagataagtctgcggtgtgggctgcacgtggggctctgaagcagcgcagagcttccctgggccacagagaagagacagacacacagccccg

SEQ ID NO: 2807 - DNA, 132 bp, Homo sapiens
  misc_feature 1..132: note = U/M: M (0.76:0.2) in Breast Luminal Epithelium
  misc_feature 1..132: note = source = chr9:129400487-129400618; Gene: LMX1B (intron)
  source 1..132: mol_type = genomic DNA
cgacaggaatgctccggtgggggtgccctgctgctgtgccctcccaggtgcacctgcccatctctcccaacaggtgtgccctgacaggtgtgcccggatggagtttccctgggaggagcaaggtgaacgacg

SEQ ID NO: 2808 - DNA, 243 bp, Homo sapiens
  misc_feature 1..243: note = U/M: M (0.72:0.17) in Breast Luminal Epithelium
  misc_feature 1..243: note = source = chr1:27961103-27961345; Gene: FGR (intron)
  source 1..243: mol_type = genomic DNA
cgccagctccctctcctgttccctccagcacccccacccatttcccctctcctggacccatcagacccgtcggcttctccccaaagtcccactctcacgatcccttcagtttctcccccagaccgtcctggggattccccttaatccttctcccccacctcagcccccttcctaaactcttatcagtcccctccattttacccactagacctttttgggggtccctttggtcggcttcccccg

SEQ ID NO: 2809 - DNA, 136 bp, Homo sapiens
  misc_feature 1..136: note = U/M: M (0.69:0.2) in Breast Luminal Epithelium
  misc_feature 1..136: note = source = chr12:99287010-99287145; Gene: ANKS1B (intron)
  source 1..136: mol_type = genomic DNA
cgacagaatgaaacacttctgaggaagcctttccggtggcataatgccagcactactcattatagcctattttatcacagagccgtcaacattacggactcgaataacccagataccagcggcatccccttgcacg

SEQ ID NO: 2810 - DNA, 245 bp, Homo sapiens
  misc_feature 1..245: note = U/M: M (0.6:0.12) in Breast Luminal Epithelium
  misc_feature 1..245: note = source = chr19:47920660-47920904; Gene: MEIS3 (intron)
  source 1..245: mol_type = genomic DNA
cgagactcggctgaggagcttctctatcctggaacccaggagatgcccttctgtgtcccagaaacctgcctgtggtccccaggtgtctgagcccccaagcttgaagccctccaggtcccctggagctgcctcggtggggagtgaggaccccgtccaggcagagattcctgacatgtgggcaggaggacccagagggagagacggcagggtctggctgggagggaaaagagatggagaaagtggcg

SEQ ID NO: 2811 - DNA, 158 bp, Homo sapiens
  misc_feature 1..158: note = U/M: M (0.65:0.19) in Breast Luminal Epithelium
  misc_feature 1..158: note = source = chr5:16600590-16600747; Gene: FAM134B (intron)
  source 1..158: mol_type = genomic DNA
cgctgagaacagggagctgatgccaggcacattctgatggggacccccacgtgttcatcatctccctggcacagctcccagaacactcggagtcaggcttcccctccctgccccgcccccacaggagaggtcagcatgctgatgacccacagtgaacg

SEQ ID NO: 2812 - DNA, 333 bp, Homo sapiens
  misc_feature 1..333: note = U/M: M (0.57:0.11) in Breast Luminal Epithelium
  misc_feature 1..333: note = source = chr5:43040044-43040376; Gene: ANXA2R (exon)
  source 1..333: mol_type = genomic DNA
cggcccacgatcttctgaactcacaataggtggaggctggggctctggcgccacctctgcggaatcccaagcccgcttcacacagccaagaaaatgttgctccatccctcaagcctcagaccaacgtttgcgctgatcaaggagggagagtctctgcactaccatcagcctgagtatttatgctctgcagagcccgtgggcggaggccagtcagatattaagaaactcagtagtaacaaatgcacgaaaattagtagacaaatgaaaaacgataacattttagagagtacatagaaccaaaacgaaccgtaattccgacagaaaaacatggcg

SEQ ID NO: 2813 - DNA, 167 bp, Homo sapiens
  misc_feature 1..167: note = U/M: M (0.68:0.28) in Breast Luminal Epithelium
  misc_feature 1..167: note = source = chr1:18526236-18526402; Gene: IGSF21 (intron)
  source 1..167: mol_type = genomic DNA
cgcttccattgtctgctccacgcctggtaatctcagctgggaacacatgttaacaaatgggcaaagttttatcgggagctcagagcccctccccgcttcgtcagataaggtgctcttgcttgggggctcacactagggaagctgctcccggcccccccctacccccg

SEQ ID NO: 2814 - DNA, 211 bp, Homo sapiens
  misc_feature 1..211: note = U/M: M (0.67:0.29) in Breast Luminal Epithelium
  misc_feature 1..211: note = source = chrX:105065291-105065501; Gene: NRK (Intergenic)
  source 1..211: mol_type = genomic DNA
cgtataaatcttcttagaagaggtaggtaattattaatcaaaaaataaagaaagaaacaggaaacaagtccccccacatcgctttccgaccccggagttagggtgcgcagaatgccgtctgggagctccagagaaagtaagcagtgtcgggacatttactaaagtgctctctgcagagcatgagtttagaatgcggttagtttatgcaccg

SEQ ID NO: 2815 - DNA, 52 bp, Homo sapiens
  misc_feature 1..52: note = U/M: M (0.63:0.28) in Breast Luminal Epithelium
  misc_feature 1..52: note = source = chrX:21676769-21676820; Gene: KLHL34 (promoter-TSS)
  source 1..52: mol_type = genomic DNA
cgggagccggagttcactggagaggcacgagtcgccggagcccctcgacccg

SEQ ID NO: 2816 - DNA, 443 bp, Homo sapiens
  misc_feature 1..443: note = U/M: M (0.64:0.1) in Breast Luminal Epithelium
  misc_feature 1..443: note = source = chr6:103246276-103246718; Gene: GRIK2 (Intergenic)
  source 1..443: mol_type = genomic DNA
cgtttctaaggtgataaatgtgcaatgaaatacatgaacataatgttagttgctgcctgtgtttcaatcatttgaatcattgaaactatgtttaaatcattgtgataagaaaaatacaaatcaaacaagtgcttattatccttaggacttttaaaatgtaatataaaacaattatctcattttctttttgcttagtgttgttacctatctcagactgaatttgtttctttcttctgaatgatccagtttgttcagactataccatgtaattgacaccggagggggcagggaagtgctccgtagagaagagaagggctgggtccctggagagggctccaccctcgggcctgtgcccagggacttaagtgagaacaggcactcccgttttcactcccgaatgttgcattttccaaggccactctagcctgacacgtcccccatcg

SEQ ID NO: 2817 - DNA, 83 bp, Homo sapiens
  misc_feature 1..83: note = U/M: M (0.9:0.12) in Breast Luminal Epithelium
  misc_feature 1..83: note = source = chr11:61062962-61063044; Gene: VWCE (promoter-TSS)
  source 1..83: mol_type = genomic DNA
cgcgccccgggcatggcccctgtcggtgggacccgagacgccttgttgtgacgaggtgggaaccgtggaaattcgaacccacg

SEQ ID NO: 2818 - DNA, 430 bp, Homo sapiens
  misc_feature 1..430: note = U/M: M (0.87:0.1) in Breast Luminal Epithelium
  misc_feature 1..430: note = source = chr6:50818692-50819121; Gene: TFAP2B (Intergenic)
  source 1..430: mol_type = genomic DNA
cgtccagagcccaaataggggtcacacctgctgtcgagagagtcctctgcataaaaatgctctttaaaatttttaaaatcagcataatggccaatggacttaacaaagcgtgacttgcccaggctgcacggagggcaactctggcagtcatctgtaactcgaccagttaacgtcccgaacgtgcctgttcgcggagatattagcaaacgtttcaaggatgtggctgtcagatgtcattagccaacgcttgctcacccaaccatttgcctaactgggaggagggcatggccacggcgtataggcgtagaatttggggggagggaggggtgccacagtttgttccctgtaatagccacatgtcccgaattgtgcagacatttatcaaatgactagagaaaagctggcacatgaatgctggggtacagagacg

SEQ ID NO: 2819 - DNA, 52 bp, Homo sapiens
  misc_feature 1..52: note = U/M: M (0.84:0.11) in Breast Luminal Epithelium
  misc_feature 1..52: note = source = chr12:54408233-54408284; Gene: HOXC6 (Intergenic)
  source 1..52: mol_type = genomic DNA
cgtgtcctccatactccgagggatggctgaggtcccgtttcgtttttaaacg

SEQ ID NO: 2820 - DNA, 252 bp, Homo sapiens
  misc_feature 1..252: note = U/M: M (0.81:0.11) in Breast Luminal Epithelium
  misc_feature 1..252: note = source = chr3:127794984-127795235; Gene: SEC61A1 (Intergenic)
  source 1..252: mol_type = genomic DNA
cggaccagcgctattctggaggggcagtgcctcagaggcaggtcgcttcgagtggggatttgtgcgctctggcgcggaggaggggggtgggaagccggctcttgccctcctcacccggtggggagcgagcagggccaacggtgcgctgagagcgctcagggcgtccccaacagcatgacccgacccagggacgaagctctgggggacgggaccacttgcgatgacagctaaaggagcacaggggggcggccg

SEQ ID NO: 2821 - DNA, 462 bp, Homo sapiens
  misc_feature 1..462: note = U/M: M (0.66:0.03) in Breast Luminal Epithelium
  misc_feature 1..462: note = source = chr9:129445271-129445732; Gene: LMX1B (intron)
  source 1..462: mol_type = genomic DNA
cgggctcccggctgtgcccgtccctccctgtccctggcccgtgacctccagccccggctgggggctcccgacagcgcccctggcgcggatcaaagggccgaggggccggcggccccgcacagctgcgggccgcaggaagcgcaggggcagccctcgctgcaggcccggccccgacgcggcgaggaggccgggggaggccgggaggctgggagaggccccgcgaggcccgcagagcgcgcccgtctcgccgcgcattccagccgcgtgattgacgcgcgtaccggggcccccgcccgcggctcccgccgccgcccgcccggcccgcggccgccgcatcaaagcagatgtttgcagctggtttgagttggatccccatcaacaggcccttttttgtctcaaaataaaaaacagctacgcccggaatgataaggacgcggcaggcacgtgggggagatgtcagcg

SEQ ID NO: 2822 - DNA, 126 bp, Homo sapiens
  misc_feature 1..126: note = U/M: M (0.73:0.18) in Breast Luminal Epithelium
  misc_feature 1..126: note = source = chr15:73659687-73659812; Gene: HCN4,HCN4 (exon,intron)
  source 1..126: mol_type = genomic DNA
cggagcctagaggcgccctgcctctcttggagctcccagcgcaaggcaggaaagttaactccggctgggaggcagggtcaggaggaggcatgcctgccaccgcgcagggcacccacaggatcatcg

SEQ ID NO: 2823 - DNA, 119 bp, Homo sapiens
  misc_feature 1..119: note = U/M: M (0.74:0.2) in Breast Luminal Epithelium
  misc_feature 1..119: note = source = chr17:60885306-60885424; Gene: MARCH10 (intron)
  source 1..119: mol_type = genomic DNA
cgaggggaggggacggccaggccaccggatgtcaggcccggtttccctccagaatcttgtaagtcgaaagggaaggttgtcccccatcctgggagaactggagcggagcggcgggggcg

SEQ ID NO: 2824 - DNA, 129 bp, Homo sapiens
  misc_feature 1..129: note = U/M: M (0.6:0.07) in Breast Luminal Epithelium
  misc_feature 1..129: note = source = chr9:129445737-129445865; Gene: LMX1B (intron)
  source 1..129: mol_type = genomic DNA
cggcagggaggaggccgggcggctccctctctaagtgacaggctgactctagcagcagcagccgtgacccccagagtgtctagggtcctgtcgcctagctcctgtgaactgcagctcatccttcagccg

SEQ ID NO: 2825 - DNA, 126 bp, Homo sapiens
  misc_feature 1..126: note = U/M: M (0.61:0.12) in Breast Luminal Epithelium
  misc_feature 1..126: note = source = chr5:174147444-174147569; Gene: MSX2 (Intergenic)
  source 1..126: mol_type = genomic DNA
cgacttcatctgtggaatggggagaaagctcaggctttagggggccttcagtaatctgcatcgtgcttttggcaaaagctccttctctccagccccggctcaaacccgggctcggtcctgactccg

SEQ ID NO: 2826 - DNA, 98 bp, Homo sapiens
  misc_feature 1..98: note = U/M: M (0.55:0.15) in Breast Luminal Epithelium
  misc_feature 1..98: note = source = chr9:109622286-109622383; Gene: ZNF462 (Intergenic)
  source 1..98: mol_type = genomic DNA
cgtcggtctctggatctcctcgctgcctttgtcccttctagacgtggaggcttggagaggaggtttggtttccaaggattggagcgctgtgaagggcg

SEQ ID NO: 2827 - DNA, 267 bp, Homo sapiens
  misc_feature 1..267: note = U/M: M (0.53:0.13) in Breast Luminal Epithelium
  misc_feature 1..267: note = source = chr19:49466763-49467029; Gene: FTL (Intergenic)
  source 1..267: mol_type = genomic DNA
cggccgactaaaggtctctgggctgaggtatgacatttggtaaatgagtaactcgggccccacagtcaacggggtgctttggacggctgcccctcctccatggactcttcccagagaccccaagtcaggggagagagaggggcagaggatcaatgagtgtacactgagccaccacccagagtgaggggacaatatggccacaggcaggatcccagaaaaaaaaaaattatgggaaccaaaaagacacggagacaaagcacacagccg

SEQ ID NO: 2828 - DNA, 405 bp, Homo sapiens
  misc_feature 1..405: note = U/M: U (0.05:0.95) in Lung Alveolar Epithelium
  misc_feature 1..405: note = source = chr16:22363430-22363834; Gene: CDR2 (intron)
  source 1..405: mol_type = genomic DNA
cggcgtggtggcacgcgcctgtaatcccacgtactcaggaggctgaggcatgagaatcttttgaacgtgggaggtgaacgttgcagtgaaccgagatcgtgccactgcactacagcctgggtgacagagactgtctcaaacacaacacaacacactcttcttgaggctttttctacaactctagaaggatttgcaaggctaacaaacaatgggctaaatgacactcaacgggcccttaaagtgttgaaaaaagcatatatggctttttttttttcaaatccatttacataactcagcagcaaagagttgaacaaacacttaacctaacttcaactttctcatctgaaactcttgaagtcaaaagtgttttggaaaattctttaaattttagaaagacaacatggc

SEQ ID NO: 2829 - DNA, 264 bp, Homo sapiens
  misc_feature 1..264: note = U/M: U (0.07:0.93) in Lung Alveolar Epithelium
  misc_feature 1..264: note = source = chr19:33202756-33203019; Gene: NUDT19 (exon)
  source 1..264: mol_type = genomic DNA
cggatagtgacataccatcgccacctttatgatatccacgtgactgttcagccaaagtataaacacgtttatcctaagaactctgtagtaagaaaaagccatttgtagggtgcttaagcttgtttgtaaaatggcctacttgaagtcctcatgaataatgagggttgactttcatttgcttgaaacttaaggaagtttgtgcctataaaagttactgcaattcagtatttctttatttttttcgagacagagtctcaatctgtc

SEQ ID NO: 2830 - DNA, 443 bp, Homo sapiens
  misc_feature 1..443: note = U/M: U (0.06:0.91) in Lung Alveolar Epithelium
  misc_feature 1..443: note = source = chr15:57626002-57626444; Gene: LOC283663 (Intergenic)
  source 1..443: mol_type = genomic DNA
cgcatttgttctgtttttggaatactatttgtgtatacataagtgagatatcttggggatgggacctaagtttaaacatgaaattcatatatgttttttatacaccgtatatacatagcctgaaggtaacttcatataaaattttaaataattttgttcatgaaacagaagttttggctgcatgttgactgtgacctggaacatgaggtcaggggtggaactctccttttgcggtgtcatgtcagcactcaaacgctttcggattctggagaatttcaaagctcagattttttaattcgggatgctcaacctgtcttgatcacatgttgaaattatacattttttggatatattgggttaaagataaagtatgtaaaagataattttccatgcttcttttaaaaaaatgtggtggctacttacctgtttgagcttgcaggagc

SEQ ID NO: 2831 - DNA, 463 bp, Homo sapiens
  misc_feature 1..463: note = U/M: U (0.08:0.93) in Lung Alveolar Epithelium
  misc_feature 1..463: note = source = chr22:46109795-46110257; Gene: ATXN10 (intron)
  source 1..463: mol_type = genomic DNA
cgttttttcacgactagaagctactgccatgaatagccttggttgcacatgtcatatcgcatgtggacaagtaatgattgtagaataaattcataagtgcaattctgggtcaaaaggaatgtactgttataattttgacaaacacttcaggttgtccttcatcgctattgtgccagtgtcaactcccctgtcccacatcattgctaacagtgttagcaagatttggatttgccagttctgccaaggtgtaaaccggccttcttgcacagttttatttcgtatttttcttatgagttggagaaccttttttttcttttatgtgtattctaattttctttacctatttttctattggggtattgatctttatcagtgtataggagtattttctagattagggatatcacccatcatataaaataaaatacatgtatttttctgtttttgtattttgactttgttc

SEQ ID NO: 2832 - DNA, 211 bp, Homo sapiens
  misc_feature 1..211: note = U/M: U (0.04:0.89) in Lung Alveolar Epithelium
  misc_feature 1..211: note = source = chr3:182870189-182870399; Gene: LAMP3 (intron)
  source 1..211: mol_type = genomic DNA
cgccctgaaaattcaacagaaggttggattttcgggtgccacagttcccagaggcttgcgttgcgttggggtcgatgttgaagtatctccgaggtgaaaaaacctaaatcaagttagatagatcagctaaatgagatgtagaggaaaactctagctagggaaccagatgcacaggctagtttgtgagcctgaaacttaaggctgaggattc

SEQ ID NO: 2833 - DNA, 136 bp, Homo sapiens
  misc_feature 1..136: note = U/M: U (0.08:0.9) in Lung Alveolar Epithelium
  misc_feature 1..136: note = source = chr2:100131233-100131368; Gene: REV1 (Intergenic)
  source 1..136: mol_type = genomic DNA
cgggcatggtggttcacgcctgtaatcccagcactttgggaggccgaggcaggtggatcatgaggtcaggagatctagaccatcctggctaacaggatgaaaccccgtctctactaaaaatacaaaaaaattagcc

SEQ ID NO: 2834 - DNA, 480 bp, Homo sapiens
  misc_feature 1..480: note = U/M: U (0.1:0.92) in Lung Alveolar Epithelium
  misc_feature 1..480: note = source = chr1:54554193-54554672; Gene: TCEANC2 (exon)
  source 1..480: mol_type = genomic DNA
cgtcagtccatctagtcctgcgcttctcagaagaagatgtaacaacctttcctttggtttttctcttcctgttccaggtcacactgtgaacaagatgcgtaaacactcagattcagaagtggcttctcttgccagagaagtttacactgagtggaaaactttcactgaaaaacattcaaatagaccttctattgaagttagaagtgatcccaaaaccgagtcgttgaggaaaaatgctcagaaattactctcagaagccttggaattaaaggtaatgccctaaatatatacaactgttatgtacccataataattaatttttaaaagaagaaaaataaaggtaatgtcctggtcggatgtgattagtaggtgctcttggttaaacgcctcataatttcataattaagatttcataatcttaatgctgtggctttattttaaccagttattctttaaggattctggatttataagcattcc

SEQ ID NO: 2835 - DNA, 167 bp, Homo sapiens
  misc_feature 1..167: note = U/M: U (0.13:0.95) in Lung Alveolar Epithelium
  misc_feature 1..167: note = source = chr14:96790748-96790914; Gene: ATG2B (intron)
  source 1..167: mol_type = genomic DNA
cgcggtgactcacacctgtaatcccagcatttgggaggctgaggcaggcggatcacctgaggtcaggagttaagagaccagcctctccaacatggaaaaaacccgtctctactaaaaaatacaaaaattagctgggtgtggtgacatccaactgaggcacgagaatc

SEQ ID NO: 2836 - DNA, 250 bp, Homo sapiens
  misc_feature 1..250: note = U/M: U (0.13:0.95) in Lung Alveolar Epithelium
  misc_feature 1..250: note = source = chr17:37700769-37701018; Gene: NEUROD2 (Intergenic)
  source 1..250: mol_type = genomic DNA
cgcccaagctggagtgcagtggcgcaatctcagctcacttcaacctgcgcctccggggttcaagtgattctcgtgcctcagcctcttgagtagctgggtaacaggcgatcttttttttttttttttttttttttatggagttttgctcttgttgcccaggccggagtgcagtggcatgatctcggctcaccgcaacctccgcctcccggggttcaagcgattctcctgccttagcctcctgagtagctgc

SEQ ID NO: 2837 - DNA, 139 bp, Homo sapiens
  misc_feature 1..139: note = U/M: U (0.11:0.92) in Lung Alveolar Epithelium
  misc_feature 1..139: note = source = chr7:66074950-66075088; Gene: KCTD7 (Intergenic)
  source 1..139: mol_type = genomic DNA
cggagtgtcactctgttgcccaggctggagtgcagtggcgcgatctccactcactgcaagctccgcctcccgggctcatgccattctcctgcctcagcctctggagtagctgggactacagacgcccgccaccacgccc

SEQ ID NO: 2838 - DNA, 484 bp, Homo sapiens
  misc_feature 1..484: note = U/M: U (0.15:0.93) in Lung Alveolar Epithelium
  misc_feature 1..484: note = source = chr17:55071173-55071656; Gene: SCPEP1 (intron)
  source 1..484: mol_type = genomic DNA
cgagataggctggcctaccaggccaaaattatttactatctgtccctttacagaaagtttaccagtctctggcccagatcaaacaggaagtgggatgcattggagaactgcagccaatcctgtgttttaagaaactaagaaacaagtttgaaggttaagcccgggaggtgattaacagctaggccacggaagtcctggtgtgcttgcatttctcagagagtactctaaaagaataccagtccaggccaggtgtagtggctcacatctgtaatcctagcactttgggagaccaaagcgagcagattgcttgagcccaaaagttcgagaccagactgggcaacatggacttagttcctgcagaactaagactacttgaaacctactttgagacactttgccttaaggagccattgaatacttttaagctaaggagagacatactcaaatgtgctttataagttgaggtccttgattctttgttggc

SEQ ID NO: 2839 - DNA, 357 bp, Homo sapiens
  misc_feature 1..357: note = U/M: U (0.03:0.92) in Lung Alveolar Epithelium
  misc_feature 1..357: note = source = chr4:129396222-129396578; Gene: PGRMC2 (Intergenic)
  source 1..357: mol_type = genomic DNA
cgaggagggcggatcacgaggtcagaagatcgagacaatcctggctaacatggtgaaaccccgtctctactaaaaatacaaaaaattagccgggcgtggtggcatgtgtctgtagtcctagctactcaggaggctgaggcaggagaatggcgtgaacctgggaggcggagcatgcagtgagctgagatcgcgccactgcactccagcctgggtgagagcaagactccatttcaaaaaaaaagaacctggagtgtgtttatattgctggcaaaaagagtttgctttcaattgccttgttagcacacctgtgatctgactaagttacatcagtgggaggcacaggatgaaaggatgccg

SEQ ID NO: 2840 - DNA, 244 bp, Homo sapiens
  misc_feature 1..244: note = U/M: U (0.06:0.93) in Lung Alveolar Epithelium
  misc_feature 1..244: note = source = chr4:103637380-103637623; Gene: MANBA (intron)
  source 1..244: mol_type = genomic DNA
cgcttgaacccgggaggcggaggttatagtgagttgagatcgcaccactgcactccagcctgggcaacaagagtgaaactcagtctcaaaaaaaaaaaaaaaaaaaaaaaaaagaatgaggaaacatattgaaagacaaacacttataaataggttttaaaaagctctggctaaacttgccaacctcaggtatgaattcagaagtccttgtttctgaacgtgaagcccaaaagcaatcagttcg

SEQ ID NO: 2841 - DNA, 293 bp, Homo sapiens
  misc_feature 1..293: note = U/M: U (0.04:0.91) in Lung Alveolar Epithelium
  misc_feature 1..293: note = source = chr11:68510996-68511288; Gene: MTL5 (intron)
  source 1..293: mol_type = genomic DNA
cgtgagccacggcagccagcactactttcgatttatgtgtatttttttttcaagtggttactaagttgtttggatataaatacttactaagctatttagactaaactacttagtactggaactgataggtacttatttggtctacaagtgccatgaaaaacattcttgagacactaagggtgtgtaagcctctgtgctcatgagttcaagtagaagcacctgaacactttttctcctccaggcctaggcatcctttgagtgaggaatctcagacgcaggcagcaggatgcacg

SEQ ID NO: 2842 - DNA, 406 bp, Homo sapiens
  misc_feature 1..406: note = U/M: U (0.03:0.9) in Lung Alveolar Epithelium
  misc_feature 1..406: note = source = chr17:53293250-53293655; Gene: HLF (Intergenic)
  source 1..406: mol_type = genomic DNA
cgctaggaacactcgactggtaagggaaaaacacctcaagtgattatgcatacaatgtcagtaaacacactgcagcctctcataagtgctggcaggccactgtgcatgcggacagtctgatccaggggaaaaatgaagagaggagaaacagaaaccccagaaccatgccaatgtataaaacccaaagttaagggccaaatagcacacttggatctctcaagtcaaccacttggccctcttccatgagtactttacttcctttcattcctgctctaaaacttttaaataaactcccactcccgctcttaaactttcctcggtctctcactctggcatatgcccctcagccaaattccttcctccgaggaggcaagaatcaagtttgctgcagacccccccagatccg

SEQ ID NO: 2843 - DNA, 114 bp, Homo sapiens
  misc_feature 1..114: note = U/M: U (0.05:0.91) in Lung Alveolar Epithelium
  misc_feature 1..114: note = source = chr5:132720735-132720848; Gene: FSTL4 (intron)
  source 1..114: mol_type = genomic DNA
cgtgctccgttgtcgcgctccccaccctggtttacaataggcagggggtgtgtgtcccctctcagctccccatgggcagggccctctcacactcctcttggacccccgccaccg

SEQ ID NO: 2844 - DNA, 227 bp, Homo sapiens
  misc_feature 1..227: note = U/M: U (0.05:0.91) in Lung Alveolar Epithelium
  misc_feature 1..227: note = source = chr15:95850339-95850565; Gene: LOC400456 (intron)
  source 1..227: mol_type = genomic DNA
cgtcaagacaggaatgttcggtggacataaatgttcagtccatggcaacatacaatgaaatattatttagcctgaagaagaaaggaaattctaacatatgctacaacacaaactaatcttgaggacattgcgctaaataaaatagcctagtcacaaaaagacaaatacgttatgattccacttatatgaagtacttaaagtagtgagaagcatactcagcttttccg

SEQ ID NO: 2845 - DNA, 276 bp, Homo sapiens
  misc_feature 1..276: note = U/M: U (0.07:0.93) in Lung Alveolar Epithelium
  misc_feature 1..276: note = source = chr11:35284907-35285182; Gene: SLC1A2 (intron)
  source 1..276: mol_type = genomic DNA
cgagaggctgaggcaggagaattgcttgaacctgggaggcggaggttgtggtgagccgagagcacgccattgcactccagcctgggcaacaagagtgaaactccgtcttaaaaaaaagaaaaagaagcaaatttatcctcaggtgcttgatgtccttcaaaaacaaatccaggaagtctgaaatctaaagacatctccacgcccacaccttctttttcaaaaagtgtcctacaaaatattaagaggcctcttgagaaattccaaaagggccatacg

SEQ ID NO: 2846 - DNA, 284 bp, Homo sapiens
  misc_feature 1..284: note = U/M: U (0.04:0.9) in Lung Alveolar Epithelium
  misc_feature 1..284: note = source = chr10:80179638-80179921; Gene: LINC00595 (Intergenic)
  source 1..284: mol_type = genomic DNA
cggatgctgctcttctgccatcttccaagcagctcttgaggctttgagggcttggagtatgagggactcgacaaggcaatattaaattttgtacaaagactgtgggaaatttggaggctgatctgttcctctagtcctgggtgacgcaaccactcttccctgccttgtgtcaacacctcacccaggacatgagaactccccttcacccagctcattgggatttgctgtgcttatgggtgtacacccactacaggcacgcgtgggaacacgtgtgtgcacgcacg

SEQ ID NO: 2847 - DNA, 391 bp, Homo sapiens
  misc_feature 1..391: note = U/M: U (0.05:0.91) in Lung Alveolar Epithelium
  misc_feature 1..391: note = source = chr2:227714792-227715182; Gene: RHBDD1 (intron)
  source 1..391: mol_type = genomic DNA
cgaagggctgcatttgttaaggacgtgctaactgaatgtctactgacctgttttacagattgggaaacagacgggggttgatgagataatttgctcaaggtaactaacacaatgaatagactggccaagtggtcttgagtcaagagtggcttgatgctagtcagccatcttaaccacctcttggcacttgagcaaacacctaaagacaaacatgatctgattgggaaaccagtcgtaggagagtaatagaaaataaggttaaatactcagtgtcttaaatttaatttctgcggtttcagagaggtcttttagcaagggtcctctatcctgccattacaacaatgcacaaagggtttcattttatttttttttattcttttaaaactgttcg

SEQ ID NO: 2848 - DNA, 135 bp, Homo sapiens
  misc_feature 1..135: note = U/M: U (0.03:0.88) in Lung Alveolar Epithelium
  misc_feature 1..135: note = source = chr13:27754052-27754186; Gene: USP12 (Intergenic)
  source 1..135: mol_type = genomic DNA
cgggaggctgaggcaggagactcacttgaacccaagaggtggaggttgcagtgatccgagatcacgccactgcactccagcctgggcaacaagagcgaaactccgtctcaaaaaaaaaaaaaaaattccttaacg

SEQ ID NO: 2849 - DNA, 171 bp, Homo sapiens
  misc_feature 1..171: note = U/M: U (0.03:0.88) in Lung Alveolar Epithelium
  misc_feature 1..171: note = source = chr7:158595013-158595183; Gene: ESYT2 (intron)
  source 1..171: mol_type = genomic DNA
cgtcactcaggctggagtgcagtggcacgatctcagctcactacaacctcctcctcccgggttcaagcaattctcctgcctctcgagtagctgggactacaggtgcccgccaccacaagtggctaatttttgtagttttagtagagacagggttttgccatgttggccacg

SEQ ID NO: 2850 - DNA, 227 bp, Homo sapiens
  misc_feature 1..227: note = U/M: U (0.1:0.95) in Lung Alveolar Epithelium
  misc_feature 1..227: note = source = chr10:25352752-25352978; Gene: THNSL1 (Intergenic)
  source 1..227: mol_type = genomic DNA
cggctcaataggtcggacgtgcgcagatggtttgagagcaaagtctgtaactctggagtgttttccatcttcaagccccctcaaaatctatttgctcttcccagaaagattcttgccatatatttggtggttggagtggtcttgtcaccggccttcaagaacactgattattgtttgaagggtacaccgccattgaaagagtagctgatttcctcagccaccgtgcg

SEQ ID NO: 2851 - DNA, 257 bp, Homo sapiens
  misc_feature 1..257: note = U/M: U (0.07:0.92) in Lung Alveolar Epithelium
  misc_feature 1..257: note = source = chr1:94296799-94297055; Gene: BCAR3 (intron)
  source 1..257: mol_type = genomic DNA
cgtgtctctacctttctctttaaacttacctccttcactatgggcaactttccgccctccattcccccttcttctcccttagcctgtgttctcaagaacttaaaacctcttcaactcacacctgacctaaaacttaaacgccttatattcttctgcaataccacttgaccccagtacaaacttgacagtagttccaagtggccagagaatggcactttcgatttgtctatcctacaagatctagataatttttgtcg

SEQ ID NO: 2852 - DNA, 293 bp, Homo sapiens
  misc_feature 1..293: note = U/M: U (0.03:0.88) in Lung Alveolar Epithelium
  misc_feature 1..293: note = source = chr11:121367621-121367913; Gene: SORL1 (intron)
  source 1..293: mol_type = genomic DNA
cgacatgaaccctctggctactccactgtcttccgaagtacagatttcttccagtcccgggaaaaccaggaagtgatccttgaggaagtgagagattttcagcttcgggacaagtacatgtttgctacaaaggtggtggtaagttgaatgtactaaagaataaactacttttgagtttcctttgtgaagtttggcattctgtgattaaacaggtgagtttgcatacacaggaattggaaggatgtgcttgggacagattgactgaagggatctcaacattgacaacattgacg

SEQ ID NO: 2853 - DNA, 123 bp, Homo sapiens
  misc_feature 1..123: note = U/M: U (0.02:0.85) in Lung Alveolar Epithelium
  misc_feature 1..123: note = source = chr10:81345579-81345701; Gene: SFTPA1 (Intergenic)
  source 1..123: mol_type = genomic DNA
cgagggagaggagaaaggcagagacctcaagcagacaccagaccatctgtgctcgtccaggcctgagtttccagaagcgtccagttcttgtcgccagagcctagtcaagctgcccaggtcccg

SEQ ID NO: 2854 - DNA, 252 bp, Homo sapiens
  misc_feature 1..252: note = U/M: U (0.08:0.91) in Lung Alveolar Epithelium
  misc_feature 1..252: note = source = chr11:46200227-46200478; Gene: PHF21A (Intergenic)
  source 1..252: mol_type = genomic DNA
cggcacacagtaagcactgtgtaagtgtttactgttattaccctttccaatactctgtagtgccctgctctcattcctcaaacctagattagttctcttacagccaaacatcagtattccactatgtagtccatgtcacgctggtgataactgaagagattttaggtattttaagaagtatgctgacatgttttggccaggcgcagtggctcacgcctgtaatcccagcactttaggaggcctaggcgggcg

SEQ ID NO: 2855 - DNA, 499 bp, Homo sapiens
  misc_feature 1..499: note = U/M: U (0.07:0.9) in Lung Alveolar Epithelium
  misc_feature 1..499: note = source = chr2:85893108-85893606; Gene: SFTPB (intron)
  source 1..499: mol_type = genomic DNA
cgggattgtgtgtgaatgagcatgagcatatatgtgagaatgaataagtgtgtaagcatgtgtgtgagagtgagggtgtaagggtgtgtgagcgtacaggcccaccgtgtgcacctgaacctgggggcccatggtcgggtgcatggctgaagggcacgtagtttcctaggccctttgtggacagggtgtgtgtgtgtgtgtgtgtggccagctggggtgctgtgtgtgtgctgtgtgtgtgtgtgtgtgtgtgtgtgtgtgtgtgtctggctggctggggtactgtgtgggtatgtgtctggatggagtgctgtgtgtgtgtgtgtttccagctggctggggtactgtgtgtgtgtatgtgtctggatagggtgctgtgtgtgtgtgtgtccggccagctggggtactgtgtgtgtgtgtgtccggccagctggggtgttgtgtgtgtgtgtgtgtgtgtgtccggctggctggggtgctgtgtgtttgtgtctggccg

SEQ ID NO: 2856 - DNA, 162 bp, Homo sapiens
  misc_feature 1..162: note = U/M: U (0.05:0.87) in Lung Alveolar Epithelium
  misc_feature 1..162: note = source = chr5:1546436-1546597; Gene: LPCAT1 (Intergenic)
  source 1..162: mol_type = genomic DNA
cgcattgataacccagaatgaacatattttttgcagtgatattctttaagctgaaaatgaaatatttgcttctacaccatttagttgtgccagtcgcctttgatttagcagacgattttgctctggctaagttgctcttttagacagacgtttatatgggcg

SEQ ID NO: 2857 - DNA, 255 bp, Homo sapiens
  misc_feature 1..255: note = U/M: U (0.07:0.89) in Lung Alveolar Epithelium
  misc_feature 1..255: note = source = chr7:87920503-87920757; Gene: STEAP4 (intron)
  source 1..255: mol_type = genomic DNA
cgattcttaagaatctcctacttgtcccacttatttcttataaataaaactctatataaaatggcgtttgaggatcacttgaggtcaggagctcgagaccagcttggccaacatggtgacaccccgcctctactaaaaatacacaaaaaattagccaggtgtggtggaacacacttgtaattccagctattggagaggctgaaggggaaagatcgcttgaacctgggaggtggaggctgtagtgagccgagatcg

SEQ ID NO: 2858 - DNA, 275 bp, Homo sapiens
  misc_feature 1..275: note = U/M: U (0.04:0.86) in Lung Alveolar Epithelium
  misc_feature 1..275: note = source = chr11:27325873-27326147; Gene: CCDC34 (Intergenic)
  source 1..275: mol_type = genomic DNA
cgaggctcaatttagagctgatttccttcagaagagatttgtgtttgcttctgtcgatgacttggaaacattatcagttaaggaccactttaaagttaaattcttcacttgaattgtgtgaatgaatgtgtggttaccaattctcaggcagaattacccccacccccgactcagcactaccgataacagcagcagcccatctggagtggctgctgcaaagacttgggggtgtagtctagggggtgtggcaggagctgcactccacagatccaacg

SEQ ID NO: 2859 - DNA, 320 bp, Homo sapiens
  misc_feature 1..320: note = U/M: U (0.06:0.88) in Lung Alveolar Epithelium
  misc_feature 1..320: note = source = chr10:74176410-74176729; Gene: MICU1 (intron)
  source 1..320: mol_type = genomic DNA
cgacaggaaacacttagcaaaagcaaatgtctttataagcttctgcttgtcaaaatcctactccatgtttaaggccaagttcgaattgtacttcctctaagaaatcttactcggtctcttcagctggctctaatcttcctccttagtgcttcaaaaagatctcatacctttaatagagtactcaacatatttatcattgcacttgataagcatttaccgccaccatacagaggacatgcaaagatgaataaggcactgctctcaagaagctcaaagctaagtgagttaccttgctttatatttgtttaaaatctgtttcg

SEQ ID NO: 2860 - DNA, 393 bp, Homo sapiens
  misc_feature 1..393: note = U/M: U (0.12:0.94) in Lung Alveolar Epithelium
  misc_feature 1..393: note = source = chr17:15937103-15937495; Gene: NCOR1 (intron)
  source 1..393: mol_type = genomic DNA
cgtacagacagatgatggctttttttgtttttgttaagatggagtctctttttgttgcccaggctggagtgcagtggcgcaatctcagctcactgcaatttccgcctcccaggttcaagtgattctcccacctctgacctcaagtgatctgcccgcctcagcctcccaaaatgctgggataacaggcatgagccaccgcgcccagctagatgatggctttttaaactagtcttctcatttctaattttgatttcttagtatttccctaagaactttttctaagaataccaatatgaaaggtgaagtactcttagaagtggcatgggtacattcaggtacagttctcaaaagaactaaaaccaccttatttgctttgcaaatagtcaatgttcg

SEQ ID NO: 2861 - DNA, 133 bp, Homo sapiens
  misc_feature 1..133: note = U/M: U (0.11:0.92) in Lung Alveolar Epithelium
  misc_feature 1..133: note = source = chr8:12525700-12525832; Gene: LOC729732 (Intergenic)
  source 1..133: mol_type = genomic DNA
cgaaaagaagcaaatagagttcagcagaagaggtaagaaagtaagtttatgtttgaccaggcacggtggctcacgcctgtaatcctagcactttgggaagccaaggcgggcagatcacgaggtcaagagatcg

SEQ ID NO: 2862 - DNA, 169 bp, Homo sapiens
  misc_feature 1..169: note = U/M: U (0.07:0.88) in Lung Alveolar Epithelium
  misc_feature 1..169: note = source = chr13:113438392-113438560; Gene: ATP11A (intron)
  source 1..169: mol_type = genomic DNA
cggaagaaacagcttcattgaagaggctacagctccctgactgcccctgcagagcggggctgccctgttaggcggagaggagtagctcagggcagatttaattgcatgcagattaaggggtggtttatgcagaaatttctaggagaaggatgtaacttgtaggcgatcg

SEQ ID NO: 2863 - DNA, 183 bp, Homo sapiens
  misc_feature 1..183: note = U/M: U (0.03:0.84) in Lung Alveolar Epithelium
  misc_feature 1..183: note = source = chr9:138096180-138096362; Gene: LOC401557 (Intergenic)
  source 1..183: mol_type = genomic DNA
cggggaagttgtcgtgctgaggtggtaggacgtggcttctaaggtctcactcagctctgagaacccacagaatacttgaacatatttcgagggcacttcagggtagccacaaaggacggcattcattttctattgctgccgtcacaaattgccacaaatccagcatgtgtcttcccactgccg

SEQ ID NO: 2864 - DNA, 339 bp, Homo sapiens
  misc_feature 1..339: note = U/M: U (0.07:0.88) in Lung Alveolar Epithelium
  misc_feature 1..339: note = source = chr4:25515327-25515665; Gene: ANAPC4 (Intergenic)
  source 1..339: mol_type = genomic DNA
cgtctcggtccccagagtgctgggattacaggcgtgagctaccatgcccagctgaaaacattattcctaatgttacacattaacacatcaattaattacttcagttcaaaaaattttaaatatacttatgtgacattgtaacatacttattcaaatattttcttttttcttttcttttctttttttttttgagacagagttttgctctgccaaccaggctggagtgcagtggcgggatcttggctcactgaagcctccacctcccaggttcaagtgattctcttgcctcagcctctggagtagctgggactacaggcgtgtgccaccaagcccggcccg

SEQ ID NO: 2865 - DNA, 417 bp, Homo sapiens
  misc_feature 1..417: note = U/M: U (0.11:0.92) in Lung Alveolar Epithelium
  misc_feature 1..417: note = source = chr2:25851442-25851858; Gene: DTNB (intron)
  source 1..417: mol_type = genomic DNA
cggtatgggaaggactacttccagccttcacatttaaatagcgagtatttcacgtctctgcaaatagtgacccatgcaattcctaacaatggataacttgataaaaagatcaagaactactcctaagaacttctagtctttttgaaaatttgctgtattaccttgagtcagctttactgtattactttagccgagcaactaaagcaacattttacaactgaaactttactgtatgaccctaaagagagagacaaatacaactgcattaagtaaaatattaatatgctttagaggctactcagagctctgaacaactcatagctcagccaaaaataaatttatctactgcatatttcctccattatttaagaggctgactttcttttaaattccatttccagtaataaagtaggcgcg

SEQ ID NO: 2866 - DNA, 138 bp, Homo sapiens
  misc_feature 1..138: note = U/M: U (0.11:0.91) in Lung Alveolar Epithelium
  misc_feature 1..138: note = source = chr18:19356637-19356774; Gene: MIB1 (intron)
  source 1..138: mol_type = genomic DNA
cgaagtaaggactaaagttgatgtaaggccgggtgcagtggctcacgcttgtaatcccagcactttgggaggctgaagtgggcaggtcacttgaggtcaggcgttcgagaccagcctggccagcatggtgaaacctcg

SEQ ID NO: 2867 - DNA, 162 bp, Homo sapiens
  misc_feature 1..162: note = U/M: U (0.04:0.84) in Lung Alveolar Epithelium
  misc_feature 1..162: note = source = chr10:33997244-33997405; Gene: LINC00838 (Intergenic)
  source 1..162: mol_type = genomic DNA
cgttaagagtgtccagcttcccggaaaaactagtcctcatattgaaacaagatccactcgctcttaggctatttacatctgaggtttattttttcaagaaacccagattaaaccacttttaagggcattattcaaatatttttcaatctatcgtagtttccg

SEQ ID NO: 2868 - DNA, 223 bp, Homo sapiens
  misc_feature 1..223: note = U/M: U (0.1:0.9) in Lung Alveolar Epithelium
  misc_feature 1..223: note = source = chr16:69133299-69133521; Gene: HAS3 (Intergenic)
  source 1..223: mol_type = genomic DNA
cggctcactgcaacctctgcctcccgggttcaagcgattctactgcctcagcctcccgagtagctgggactacaggtgcacaccaccatgcccagctaatttttgtatttttagtagaggtggggtttcaccatgttgacccggatgatctcgatctcctgacctcatgatccacccacctcagcctcccaaagtgctggcattacaggcgtgagccaccgcg

SEQ ID NO: 2869 - DNA, 319 bp, Homo sapiens
  misc_feature 1..319: note = U/M: U (0.11:0.91) in Lung Alveolar Epithelium
  misc_feature 1..319: note = source = chr6:38572720-38573038; Gene: BTBD9 (intron)
  source 1..319: mol_type = genomic DNA
cgccttagcctctcaagtagctgggactacaggtgcacacaaccatgcctggattgatattaatttttaacctagaaaaatgagaataaaaatcagctttgctaattcttttttttttttttaaaggcaatcttgctctgtcactcaggctggagtgcagtggtgtgatctcggctcactgcaacctccacttcctgggttcaagtgattctcctgcctcagcctcccgagtagctgggattacaggcgcacaccactatgcctggttaacttttgtatttttagtagagacggggtttcaccatgttggccaggctcg

SEQ ID NO: 2870 - DNA, 466 bp, Homo sapiens
  misc_feature 1..466: note = U/M: U (0.13:0.93) in Lung Alveolar Epithelium
  misc_feature 1..466: note = source = chr2:65602434-65602899; Gene: SPRED2 (intron)
  source 1..466: mol_type = genomic DNA
cgaaggcttgtatgccggtctcaggtagctgtgaccacatgtgatttccactgtgtgtatagccctattcaaaagggacagagatctgtaggggagatgacaagtccctgatcaaatctcaactgaccagcactcatcctcataatagtactcacgtagtcctcattcaaggaagaaaagggccaaaggaggagggcttacccactctcttcatttagctggcattaaaaggacagctctcaagtttcattaaagtaagtgtcagctggctaagacgaaacagtagggggaatggacagtcaatgtgggctctacctattttgtaggtagaaacctaatagtaatgcacaaaccagaataaaatagaaaaggtacatttgtggcagagccgagaatagatcccaagtgtccttgaatttcatttttcagaacacttttaaacttttaaacaaggttcattctcacg

SEQ ID NO: 2871 - DNA, 113 bp, Homo sapiens
  misc_feature 1..113: note = U/M: U (0.1:0.89) in Lung Alveolar Epithelium
  misc_feature 1..113: note = source = chr2:109895272-109895384; Gene: SH3RF3 (intron)
  source 1..113: mol_type = genomic DNA
cggccaaggcaaatcgtggggctaagcccagggtcaagtgtggggacgtgcactctgcagaagtggagggtggggatgagtgtttgctgggcagtagtacacccgaggctccg

SEQ ID NO: 2872 - DNA, 199 bp, Homo sapiens
  misc_feature 1..199: note = U/M: U (0.1:0.89) in Lung Alveolar Epithelium
  misc_feature 1..199: note = source = chr10:3212788-3212986; Gene: PITRM1 (intron)
  source 1..199: mol_type = genomic DNA
cgaattgctgaaaacttaaaaagcctaatattaccgggaactctcatacactgctacagggagtacaaagtggaataactttggaaaagcacttggcattctttagaaaggctgaagaggccgggcgtggtggcttacgtctgtaatcccagcactttgggaggcctgggtgggcggatcacctgaggtcaggagttcg

SEQ ID NO: 2873 - DNA, 277 bp, Homo sapiens
  misc_feature 1..277: note = U/M: U (0.06:0.85) in Lung Alveolar Epithelium
  misc_feature 1..277: note = source = chr2:85892633-85892909; Gene: SFTPB (exon)
  source 1..277: mol_type = genomic DNA
cggctctgcctctcccagggcccagtgcccatgggcttcggaggtggctctagccctctggatctccactttactggctgtgggggcctccctcacctgtgtgtgaggcccaggcctcgcctggagggccccgggcagcacagggaggacgagcttgtccagcagagggtctggcagagggtcccgcagaggtttgggcagggggtctgacatccctggctcctgctctggctctggctgccgggatttgcacaggcccaggtgcatacagatgccg

SEQ ID NO: 2874 - DNA, 150 bp, Homo sapiens
  misc_feature 1..150: note = U/M: U (0.1:0.88) in Lung Alveolar Epithelium
  misc_feature 1..150: note = source = chr10:73956581-73956730; Gene: ASCC1 (exon)
  source 1..150: mol_type = genomic DNA
cgccagtacttcctcctggaatctcaggaatccttcctgaacctcaacttcattgaggaaaaaggcaaggaagtgagtgaagggctgctttcttcgaaaagtgtccaaaagaacatcaatccgtgttcgggctgaaattacaccatttcg

SEQ ID NO: 2875 - DNA, 274 bp, Homo sapiens
  misc_feature 1..274: note = U/M: U (0.1:0.88) in Lung Alveolar Epithelium
  misc_feature 1..274: note = source = chr5:132720911-132721184; Gene: FSTL4 (intron)
  source 1..274: mol_type = genomic DNA
cggaattgcagaatcctgccaaggtatgaatggcccagatgcaagaatcacagatctttctatgaaatcgtgaaacacaagaatgaaacttgatcggtgcagtgttgaaaacagggaccactactttactatcctcaggagtgtgaacaaacaggcaggatgaggtttagagcacatgccggtaccactcatgggttcctgtgtgatgtacactagagaagctctatccctgatcacacccaccctgaattccttttccaagactgccatctcg

SEQ ID NO: 2876 - DNA, 307 bp, Homo sapiens
  misc_feature 1..307: note = U/M: U (0.09:0.87) in Lung Alveolar Epithelium
  misc_feature 1..307: note = source = chr18:3512750-3513056; Gene: DLGAP1 (intron)
  source 1..307: mol_type = genomic DNA
cgtcttctgaccccagtctatttgggctctcttctctctaacactcgcagaaaattgcgtctgaatctacttaagtggaagctatccgagtgtgatttccttcttttttttctttactgtggtaagaacacttaacatgaaatctaccctcttaacaaatatttaagtgcacaatatagttttgttaatggtggcgcagcgttgtacagcagatctcgagaacttattcaccttgcataactttagatccactggacagcaattcccctttccctttccctctccctctacatcatggcacccaccg

SEQ ID NO: 2877 - DNA, 345 bp, Homo sapiens
  misc_feature 1..345: note = U/M: U (0.08:0.86) in Lung Alveolar Epithelium
  misc_feature 1..345: note = source = chr18:11585537-11585881; Gene: GNAL (Intergenic)
  source 1..345: mol_type = genomic DNA
cgttttcccaaagagttgggtctggggctcttgaggggggaaatgtttgagtgggtagttaggcagacataagcagggcaggagagggccctccatcaggaatgtcaggtgatagtcaggtgtctctctaaagaaatgattggttgcagctggcaccaggaaatggcactctcccaataaacagaaaacacctgaaactgctgattagccacttcatgattaagatcttaggagttgagcaagtgggctcaagcatgcgcactaagaggcaaaatggtgtaatttaactgatatgtgaccaacctctaggaaccctcgactagtaagggaaaaatgcctcacgcg

SEQ ID NO: 2878 - DNA, 377 bp, Homo sapiens
  misc_feature 1..377: note = U/M: U (0.12:0.9) in Lung Alveolar Epithelium
  misc_feature 1..377: note = source = chr3:48338671-48339047; Gene: NME6 (intron)
  source 1..377: mol_type = genomic DNA
cgtcacactctggtcagaaggtgttaagtagttcctgttattcaaggaatgaagtacaaccactttagcccagtgctcaaggttatactttccttactctgtaccaattctctagtctcaccatcgcaggctgcctgcggccctcagacccatcacatgcattcctgcctcagcgtctcccttctgtgcaacacctgtccttctcctggcactaaccaaagtttaccattcctttgaggcccagctgagtcctgccacttccaggcccccactcctgactgcttagatcttcctctgcaccatagtgggcttacttagcagtgctactcagttagtatttatcaaactatggtacacagaatgtgaaaatgaccccg

SEQ ID NO: 2879 - DNA, 460 bp, Homo sapiens
  misc_feature 1..460: note = U/M: U (0.12:0.9) in Lung Alveolar Epithelium
  misc_feature 1..460: note = source = chr6:150714124-150714583; Gene: IYD (intron)
  source 1..460: mol_type = genomic DNA
cggggtctgctccgggcgccgaagcacagtccgcgtgctctgtggagggaatggagagtgttggttcatccagtgagtcaggaaagtggattacaagtggctcctctgtgttgatatttccatgatttgaaattctgatgcttggctttaagccactttatgtattttaactattttcacccttgcaataaccacagggggtgggtacacaagagtacattttatagaggaggtaacagctccaggggaggccaagtagcttgcccagtggccaagacagcccagctccagtgcagatcttctaaagcgttaccattttccctctttatagggagaaaagaaatgataatggtcaaatgtgactaagctggttgaagtatggttaagtagctttgaaagtgtaacatacagatattcatagcgtaagaggagccatggagaaatacacaagtgagtttcg

SEQ ID NO: 2880 - DNA, 482 bp, Homo sapiens
  misc_feature 1..482: note = U/M: U (0.09:0.87) in Lung Alveolar Epithelium
  misc_feature 1..482: note = source = chr16:31523180-31523661; Gene: C16orf58 (Intergenic)
  source 1..482: mol_type = genomic DNA
cggatcacgaggtcaagagatcaagaccatcctggccaacatggtgaaaccccatgtctactaaaaatacaaaaatgagccaggtgtggtgatatgtgcctatagtcccagctacttgggaggctgaggcaggagaattgcttgaacctgggaggtgggggttgcagtgagccgagattgcgccactgcactccagcctgggcgacagagcaagactctgtctaaaaaaaaaacaaaaaacaaaaaagtcatgtcgtatgtgcaaaactcttaaagtatttagcacatagtacatactgtttaagtgttggttcttattcagagataatgtcaagtgttcaaatgtgaggcccttggctccaagtgaggcaggtggccctcatgactagtgtcactgtataatttattgtgcaaaccaggacttttgagagggtcattaaaggaagcactggtaataattgtgttgggaaaacaggtctgcg

SEQ ID NO: 2881 - DNA, 246 bp, Homo sapiens
  misc_feature 1..246: note = U/M: U (0.11:0.88) in Lung Alveolar Epithelium
  misc_feature 1..246: note = source = chr4:148745488-148745733; Gene: ARHGAP10 (intron)
  source 1..246: mol_type = genomic DNA
cggattcttttttctatattcttgaaaatgagtactatctagaattacgttatagtgtaagtgtatgagtgggtctagatgtggtagaaataatactggacatattagctaagttggtttaccttgactgtgtgccagtgcattagtccgttcttacagtgctatgaagaaatacctgagactgggtaatttataaaggaaagaggtttaattgactcacagttccgcattgctggggaggcctcg

SEQ ID NO: 2882 - DNA, 144 bp, Homo sapiens
  misc_feature 1..144: note = U/M: U (0.15:0.91) in Lung Alveolar Epithelium
  misc_feature 1..144: note = source = chr11:46959181-46959324; Gene: C11orf49 (intron)
  source 1..144: mol_type = genomic DNA
cgcgatcttggctcactgcaagctccgcctcccgggtagctgggactacaggcgcccgccacctcgcccggctacttttttgtatacttaatagagacggggtttcaccgtgttaaccaggatggtctcgatctcctgacctcg

SEQ ID NO: 2883 - DNA, 193 bp, Homo sapiens
  misc_feature 1..193: note = U/M: U (0.11:0.87) in Lung Alveolar Epithelium
  misc_feature 1..193: note = source = chr18:22059526-22059718; Gene: HRH4,HRH4 (exon,TTS)
  source 1..193: mol_type = genomic DNA
cgtcagcctccagagtagctgggaccgcaggcacttgccaccacgccccactaaaaattttttaaattgttgcctttcttgaagtgttctctgcctgtctttgtcacaaaatttcatttttctcatagttaatttcatctctccggtaagattttattggtgtttcttttataactttgcagttcttacaccg

SEQ ID NO: 2884 - DNA, 269 bp, Homo sapiens
  misc_feature 1..269: note = U/M: U (0.08:0.84) in Lung Alveolar Epithelium
  misc_feature 1..269: note = source = chr1:200393978-200394246; Gene: ZNF281 (Intergenic)
  source 1..269: mol_type = genomic DNA
cgtctcgaaaaaaaaaaaaaaaaattagccaggcataatggtgcacgtctgtaatctcagctactcaggaggcatgagaatcacttgaacctgggaggtagaggttgcagtgagctgagatcacttcactgtactccagactaagtgacaaagtgagactctgtctcaaaaaaaaaaaaaagaggaattaattctaagccaggtgtggtggcacgtgcctataggcccagctacttgggaggccaaggttggggaatcccttgagcccg

SEQ ID NO: 2885 - DNA, 214 bp, Homo sapiens
  misc_feature 1..214: note = U/M: U (0.14:0.89) in Lung Alveolar Epithelium
  misc_feature 1..214: note = source = chr16:47961569-47961782; Gene: ABCC12 (Intergenic)
  source 1..214: mol_type = genomic DNA
cgtgggttcttggtctcgctgacttcaagaatgaagccgcggaccctcgtggtgagtgttacagttcttaaagatggtgtgtcgggagtttgttccttcagatgttcagatgtgtcccaagtttttttcttctgatgggtccttggtcttgctgacttcaggagtgaagctgcagaccttctcagtgaatgttacagctctcaaagatggcacg

SEQ ID NO: 2886 - DNA, 98 bp, Homo sapiens
  misc_feature 1..98: note = U/M: U (0.23:0.97) in Lung Alveolar Epithelium
  misc_feature 1..98: note = source = chr13:27657033-27657130; Gene: USP12 (intron)
  source 1..98: mol_type = genomic DNA
cgtgatctcggctcaccgcaacctccgcctcccaggttcaagtgatgctcctgcctcagcctcccgagttgctgggattataggcatgcgccaccacg

SEQ ID NO: 2887 - DNA, 39 bp, Homo sapiens
  misc_feature 1..39: note = U/M: U (0.18:0.91) in Lung Alveolar Epithelium
  misc_feature 1..39: note = source = chr17:47496663-47496701; Gene: PHB (Intergenic)
  source 1..39: mol_type = genomic DNA
cgtcatcatggcccgttctcgatggtcgctgtctattcg

SEQ ID NO: 2888 - DNA, 302 bp, Homo sapiens
  misc_feature 1..302: note = U/M: U (0.14:0.87) in Lung Alveolar Epithelium
  misc_feature 1..302: note = source = chr3:171292399-171292700; Gene: TNIK (Intergenic)
  source 1..302: mol_type = genomic DNA
cgaaagatacagtaagaatctttagtcggtgtgacttacagaagcattcctgtagagggttcattttattccctgctaaagaacattgcttagctctactgattcatttctgagagtcttgtggtgtccttgacccagcctgatctgcctgggacgtggcatctttttatcagcgcctttattattcatagattttgtatctctggatacttcaagtttacttgaagtactgttttttaaatttgatttctaagatagctttgttttctccaatctattctgcaaaagttcctgctgttacg

SEQ ID NO: 2889 - DNA, 352 bp, Homo sapiens
  misc_feature 1..352: note = U/M: U (0.11:0.84) in Lung Alveolar Epithelium
  misc_feature 1..352: note = source = chr4:6180089-6180440; Gene: JAKMIP1 (intron)
  source 1..352: mol_type = genomic DNA
cgggaggtaattgaatcatgggggcagtttaccccatactattctcatgatagtgagtaagctctatttgatcagaactttaagtgggttctgaatatgttacgagtagcaattttatcagaaattatttgtgtctgtgggtgtgtttggtggggaattgaagtaggtggttttctgatgatattggaagcatttcatgaaccgggatatttcgaaactgcatctccttgataccgccaggtgaagaaggacgtgtttgcttcccctaatgccatgattgtaagttttttaaggcttccccagccatgcaaaactgtgagtcaattaaacctcttttctttataaattcccg

SEQ ID NO: 2890 - DNA, 186 bp, Homo sapiens
  misc_feature 1..186: note = U/M: U (0.14:0.86) in Lung Alveolar Epithelium
  misc_feature 1..186: note = source = chr1:1983574-1983759; Gene: PRKCZ (intron)
  source 1..186: mol_type = genomic DNA
cggagctcaggggagtcctgcgagagggaggtccacacccgaggggctgcaggggcccagaccctcctgcattccggcgtccaattcctgggaccaaggctcggaggcaatgccactggagttctgggccgccccgtcctccctctgccttgctttggcccctgggagcactttggtggtggggcg

SEQ ID NO: 2891 - DNA, 405 bp, Homo sapiens
  misc_feature 1..405: note = U/M: U (0.21:0.93) in Lung Alveolar Epithelium
  misc_feature 1..405: note = source = chr12:122486051-122486455; Gene: BCL7A (intron)
  source 1..405: mol_type = genomic DNA
cgcccgcctcggcctcccaaagtgctgggattataggcgtgagccactgcgcctaggctgagaaagctattttttttttttaagaaaactgggaaagtacatatttgaagagagtatttcttaacattttatttgtgaagcttatctatgtctgaatccaacagcccacttgactcatttgtggtattgcctggcccctcatggggcttttgagttcatagtcaccgctgtgatggacacagttaaaaagggattggaggggcctccaggaatgcttcttggaggagttgctgtcttgacctggtattagaaaggaggcaggctggccgggtgcagtggctcatggctgtaatcctagcactttgggaggtcgaggtgggtgaatcgcttgagctcaggagctcg

SEQ ID NO: 2892 - DNA, 102 bp, Homo sapiens
  misc_feature 1..102: note = U/M: U (0.22:0.93) in Lung Alveolar Epithelium
  misc_feature 1..102: note = source = chr7:65587218-65587319; Gene: CRCP (intron)
  source 1..102: mol_type = genomic DNA
cgggcgtggtggtgggtgcccgtagtcccagctacttgggaggctgaggcaggagaatggcatgaacccgggtggcggagtttgcggtgagctgagatcgcg

SEQ ID NO: 2893 - DNA, 167 bp, Homo sapiens
  misc_feature 1..167: note = U/M: U (0.18:0.89) in Lung Alveolar Epithelium
  misc_feature 1..167: note = source = chr9:130694348-130694514; Gene: PIP5KL1 (Intergenic)
  source 1..167: mol_type = genomic DNA
cgtcaccatgcccagctaattttttttttctttttttctgagacagagtcttgctctgtcgcccaggctggagtgcagtagcgcggtcttagctaactgcaacctccgcctcctaggttcaagagattcctctgcctcagcctcctgagtagctggggctacagccg

SEQ ID NO: 2894 - DNA, 335 bp, Homo sapiens
  misc_feature 1..335: note = U/M: U (0.24:0.95) in Lung Alveolar Epithelium
  misc_feature 1..335: note = source = chr9:127823530-127823864; Gene: SCAI (intron)
  source 1..335: mol_type = genomic DNA
cgcgcgactgcactccagcctgggcgatacagcgagactccgtctcaaaaaaaaaaaagtccttaagggctaaacccatgttacatttattcttgctcttcaactaaaccttcaatagaacttcaaatacctcaagtatttatttcagtcttatgaattgaaatggattatggtaatagttttggacaaagtaatataaaacctaaacttaaaaaaatattgttcaaggctgggcccagtggctcacgcctgtaatcccaacactttggaggctgagaagggcagatcacttgagtccagaagttagagatcagcctgggcaacacagtgaaacg

SEQ ID NO: 2895 - DNA, 243 bp, Homo sapiens
  misc_feature 1..243: note = U/M: U (0.15:0.85) in Lung Alveolar Epithelium
  misc_feature 1..243: note = source = chr1:1435888-1436130; Gene: ATAD3A (Intergenic)
  source 1..243: mol_type = genomic DNA
cgccactgccctccagtctctgggggacagagcgagactccgtctcaaaaaaaaaaaaaaattatcctgtgctattaataagacttcattcagtctaatatatatatatatgtataaatgtatatataaatgtgtatatatatataaatgtatcagccacttcaggcagggcgcagtggctcatgcctgtaatcccagcactttgggaggccgaggcgggcggatcacgaggtcaggagatcg

SEQ ID NO: 2896 - DNA, 162 bp, Homo sapiens
  misc_feature 1..162: note = U/M: U (0.24:0.93) in Lung Alveolar Epithelium
  misc_feature 1..162: note = source = chr7:97767447-97767608; Gene: LMTK2 (intron)
  source 1..162: mol_type = genomic DNA
cggcctatgtaaatacttgttataaaggaatacatgggggggagaaggaaggaatgtggcgtgcagagaaaatggtccttaatgtcactccctgttgaccgcgcagggctggcccaggagcctggaggtccagtggttcaaattgagggaaaaaaaaggtcg

SEQ ID NO: 2897 - DNA, 373 bp, Homo sapiens
  misc_feature 1..373: note = U/M: U (0.26:0.94) in Lung Alveolar Epithelium
  misc_feature 1..373: note = source = chr12:104911000-104911372; Gene: CHST11 (intron)
  source 1..373: mol_type = genomic DNA
cgaaattaaaactgcaccccaaagttcagcgcctgggctccatcctcagagccttttattgcacccgcgcttggatgggtgtcttgaagccgatttaatcctggtctgtctacacaggggagcagcaagctgttgacagcctcattttatggtcatcagtgccctcttccttctgaagcttgtcaattttaatgtctggagaaccagggggtggtgtaggggcttccagacccctgtttgcaatcatcacttgtacaccagagcttctcacacttagatgcatgtggaattccctggggttggagttaagttgcaggttgtgattccataggcctggcctggggtctgatcctgcatttgtaaccagctcccg

SEQ ID NO: 2898 - DNA, 209 bp, Homo sapiens
  misc_feature 1..209: note = U/M: U (0.24:0.9) in Lung Alveolar Epithelium
  misc_feature 1..209: note = source = chr17:80071399-80071607; Gene: CCDC57 (intron)
  source 1..209: mol_type = genomic DNA
cgcgctgcatgtttttgcacactgaggagctgcctccattcattccccctcgcattcctggagcccacgtgctccttaccaagctcgcctcctggttcatgtttgggtgaagggctccactccacgccaggctgggcgtggggcccacacctgtcatctcagcactttgggaggccaaggcggcaggactgcttgagcccaggagttcg

SEQ ID NO: 2899 - DNA, 314 bp, Homo sapiens
  misc_feature 1..314: note = U/M: U (0.27:0.92) in Lung Alveolar Epithelium
  misc_feature 1..314: note = source = chr1:167740172-167740485; Gene: MPZL1 (intron)
  source 1..314: mol_type = genomic DNA
cgtgatctctaaacttctgtctggcttagattccataacttgtgatttgtaatatgatgttgcatttctttttttttttttttttaattgatcattcttgggtgtttctcggagagggggatgtggcagggtcataggataatagtggagagaaggtcaacacgtgaacaaaggtctctggttttcctaggcagaggtccctgcggccttccgcagtgtttgtgtccctgggtacttgagattagggagtggtgatgactcttaacgagtatgctgccttcaagcatctgtttaacaaagcacatcttgcaccg

SEQ ID NO: 2900 - DNA, 229 bp, Homo sapiens
  misc_feature 1..229: note = U/M: U (0.08:0.93) in Lung Alveolar Epithelium
  misc_feature 1..229: note = source = chr6:151583157-151583385; Gene: AKAP12 (intron)
  source 1..229: mol_type = genomic DNA
cgagatcttgaaccgcctcccaggttcaagagattctccttcctcagcctcccgagtagctgggattataggcatgtgccaccatgcccggctaattttttgtatttttagtagagatggggtttctccatgttggtcacactggtctcaggtgatccacccgcctcaggtgatccacccgcctcggcctcccaaagtgctgggataacaggcatgagccactgcgccc

SEQ ID NO: 2901 - DNA, 247 bp, Homo sapiens
  misc_feature 1..247: note = U/M: U (0.1:0.9) in Lung Alveolar Epithelium
  misc_feature 1..247: note = source = chr18:61135163-61135409; Gene: SERPINB5 (Intergenic)
  source 1..247: mol_type = genomic DNA
cgaaagtggactggtcaggagcaaaggttatcgcaacggttttctgggatactcaatgcattttgcttgttgactttctggagagccaaggaacattacatctccttattttgagagcattctgagaaaatcagccaaaatgttatttaaacaccagagaaagcttcagtagagagcccttctctaccatgacaatgctccagtttgttcctctcatcagatgaggggacgtgtgcgagagtttccg

SEQ ID NO: 2902 - DNA, 355 bp, Homo sapiens
  misc_feature 1..355: note = U/M: U (0.09:0.87) in Lung Alveolar Epithelium
  misc_feature 1..355: note = source = chr10:93396090-93396444; Gene: PPP1R3C (Intergenic)
  source 1..355: mol_type = genomic DNA
cgtaagtgatcttgaagatcacttacggagtttcagtgaaagagtcagggaagttgcgaactggttttttttttttttaattattattaaaaggagcaggttttgcattttggagaacaaaaaaggtgccaattcatttgtctcagttaatagtaagcgctcttgtacactattttcttcttccttctttagctacattcaacaggaactccaatattaagtaaaaggatacaacctgaaaaacatatactgcttactttgggctcggcactgttttaagcacttagaaatattaactcatgtaatctttataagaatccggtgaggtagaaacccatttcacagatgaggaacg

SEQ ID NO: 2903 - DNA, 207 bp, Homo sapiens
  misc_feature 1..207: note = U/M: U (0.23:0.92) in Lung Alveolar Epithelium
  misc_feature 1..207: note = source = chr2:232035234-232035440; Gene: PSMD1 (exon)
  source 1..207: mol_type = genomic DNA
cgcttgaaatatgagtgtacgcttctgcacgcccctgtgtttccagctctctattggaggcatcatcattctgaaggataccagtgaagacattgaggagctggtggaacctgtggcagcacatggcccaaaaatcgaggaggaggaacaagagccagaacccccagaaccatttgagtatattgatgattaagggccagaggtgcg

SEQ ID NO: 2904 - DNA, 296 bp, Homo sapiens
  misc_feature 1..296: note = U/M: U (0.05:0.94) in Lung Alveolar Epithelium
  misc_feature 1..296: note = source = chr6:138883706-138884001; Gene: NHSL1 (intron)
  source 1..296: mol_type = genomic DNA
cgagaatcgtttgaaccctggaggtggagattgcagtgagccgagatcacaccagtccactccagtctggggcacagagtaagactctgtctcacacacaaaaaaatatatagcctaacatgaaaatctgtggtttcattactacttttcctcatgtgcctatataatcccttcaacgagaactttgtcttttctcggttacgacagcccctagatgacctggttctaacccctaatgctccaatcccttctgcacgccataaccagagcaggttccttccaatacggcttcgacc

SEQ ID NO: 2905 - DNA, 146 bp, Homo sapiens
  misc_feature 1..146: note = U/M: U (0.03:0.91) in Lung Alveolar Epithelium
  misc_feature 1..146: note = source = chr16:678028-678173; Gene: RAB40C (exon)
  source 1..146: mol_type = genomic DNA
cggggacgcacttgggactcctcgagaggggactcgcggccgcgatggcaaggcatcctgtgaattcatgcgctgcgagtggcggggctgcccagaggccgggggagcagacagggccggtgctccctctggaagcttgggtgacc

SEQ ID NO: 2906 - DNA, 256 bp, Homo sapiens
  misc_feature 1..256: note = U/M: U (0.06:0.94) in Lung Alveolar Epithelium
  misc_feature 1..256: note = source = chr2:97305286-97305541; Gene: KANSL3 (Intergenic)
  source 1..256: mol_type = genomic DNA
cgggaggctgaggtgggagaatctctcaaactcaggaggcagaggttgcggtgagccaaaatcgcgccattgcactccagcctgggcgacacagcaagactctgtctcaaaaaaaaaaaaaagataggtacagacatgcaaacactcgaaacattcagaaagccactcaaagctgtgttccacaaagatgagagggtaaactgagaagacggaaggcataggatcggggaagcagggtctaacacaagaagcagac

SEQ ID NO: 2907 - DNA, 403 bp, Homo sapiens
  misc_feature 1..403: note = U/M: U (0.06:0.92) in Lung Alveolar Epithelium
  misc_feature 1..403: note = source = chr22:24928939-24929341; Gene: GUCD1 (Intergenic)
  source 1..403: mol_type = genomic DNA
cgttacccctagaaaatatttataattgttggaggtcccccaagtgggacctatatttgttggagcacaggtcctggccacctggtggggcttcaggttcccagtttactttcttttttttttttttttttttgagctgaagtttcgctcttgtcacccaggctggaatgcggtggcgcgatctcagctcactgcactctccctgctaggttcaagtgattctcctgcctcagcctcccaagtagcttcccagtttgaataattcagtctagtccttgtatttggaaggacagcctgagggcagttagtccaatctatcccatttgtccataccactagcaaggtggcactcgttctctccacagaatggctgagtggagtctatgggaatagggatgggaac

SEQ ID NO: 2908 - DNA, 95 bp, Homo sapiens
  misc_feature 1..95: note = U/M: U (0.1:0.96) in Lung Alveolar Epithelium
  misc_feature 1..95: note = source = chr1:244823723-244823817; Gene: DESI2 (intron)
  source 1..95: mol_type = genomic DNA
cgcccaaagtgctgggattataggcgtgagccaccgcacccggtcggatttttcttaagatgggatgtacttacactttccgtttgttgactgtc

SEQ ID NO: 2909 - DNA, 383 bp, Homo sapiens
  misc_feature 1..383: note = U/M: U (0.03:0.89) in Lung Alveolar Epithelium
  misc_feature 1..383: note = source = chr21:33175293-33175675; Gene: HUNK (Intergenic)
  source 1..383: mol_type = genomic DNA
cgtggtagtgggcgcctgtagtcccaggtacttgggaggctgaggcaggagaatcgcttgaacctggtaggcggaggttgcagtgagccgagattgcacaactgcactccagcctgggtggcagagtgagacttggtctcaaaaaaaaaaaaaaaaaaaagaaatttcgcttatcggtctttcttataagcattacttacattatagatcagagcgatgcactagaacttttcaaaatgatgggaatgttctgtacctgcaccgtcctattaaactagccaccagccacctgtagcacttgaacacttcaaatgtgactagtgtgatcgagaaaccacattttcaattttacttaattctattcaattaaaatgtaaatagcc

SEQ ID NO: 2910 - DNA, 463 bp, Homo sapiens
  misc_feature 1..463: note = U/M: U (0.05:0.9) in Lung Alveolar Epithelium
  misc_feature 1..463: note = source = chr7:2473795-2474257; Gene: CHST12 (exon)
  source 1..463: mol_type = genomic DNA
cgtgcgggcgccgggaggggatgctgaggctgatggagctgcctccagggctagggccactcaccggaggagggcggggcctgcacttgaagtcaggccgcacctgtctgtttttggaagggtagccgacaaatccttccagagggaaagttctttgtttaagtgttgtacttgaaaaggtcaatcttcagggcttcctgtttgaagtcaagtcagaggtaaaccggtcagttacagaagcaggatttctaggatttctaactccagctgttcccatactgtctagtttaaattatggctgttaaggccgggcgggtgactcaggcaggtaatcccagaactttgggaggcccagacagaaggatcgcttgaggtcaggaatttgagacctggccaacatggtgaaaccctgtctctactaaaaaaaaaaaaaaaaaaaaaaaaaaaaaaaaaaaaatgagtc

SEQ ID NO: 2911 - DNA, 111 bp, Homo sapiens
  misc_feature 1..111: note = U/M: U (0.07:0.91) in Lung Alveolar Epithelium
  misc_feature 1..111: note = source = chr2:185490785-185490895; Gene: ZNF804A (intron)
  source 1..111: mol_type = genomic DNA
cggggtttcaccgtgttagtcaggatggtcttgatctcctgatctcgtgatccacacacctcggcctcccaaagtgctgggattacaggcatgagccaccgcgcccggccc

SEQ ID NO: 2912 - DNA, 447 bp, Homo sapiens
  misc_feature 1..447: note = U/M: U (0.08:0.92) in Lung Alveolar Epithelium
  misc_feature 1..447: note = source = chr14:62002256-62002702; Gene: PRKCH (intron)
  source 1..447: mol_type = genomic DNA
cgggttggagtgtgatgagcaaaggggtggggcagtgagagcttcaggtgaggaggctgagggaacagtgagagcccaaaggacatcctaggtcacgcgaaggagtctacactttatctgaagtgccaacgtaagtctttgaagaattccaagcaagcatgagtgatgcaatcactacttcatgtgtaaaagatcaccctggctattgtataaggagtggaccaacagactggagtatttgctgattaagtgacttctaggatttctttcaaattaatccaggagttgtggggagaaacagatgaaacaatattgggcatgtgtcagtaaccatcaaggctgagtgatgagtacatgagggtctgtgttactgtcgtctaaaatttccacatggaaaagttgttaaaaccaccatataaatgaatatcttttataaacaagctcagc

SEQ ID NO: 2913 - DNA, 401 bp, Homo sapiens
  misc_feature 1..401: note = U/M: U (0.08:0.91) in Lung Alveolar Epithelium
  misc_feature 1..401: note = source = chr2:160086171-160086571; Gene: TANC1 (exon)
  source 1..401: mol_type = genomic DNA
cgcgtagaagaggagtgcaaacaactccagaggagtcaacagcaaaaacagcagggcccgctaccagctccactcaacgactccgagaacgaagaggacaccccaacccctggcttaagtgaccactttcactctgaggagactgaagaggaagaaacttctccccaggaagaatctgtttccccaactcccaggtcccagccatcctcatctgtcccttcctcatacatccgaaaccttcaagaagggttacagtccaaaggaaggccggtatcgccacagagcagggcaggaatcggcaagtccctgagagagcctgtggcccagccagggctgctcctgcagccctccaagcaggcccagatcgtgaaaaccagccagcacctgggctctggccagtc

SEQ ID NO: 2914 - DNA, 282 bp, Homo sapiens
  misc_feature 1..282: note = U/M: U (0.15:0.95) in Lung Alveolar Epithelium
  misc_feature 1..282: note = source = chr17:57185537-57185818; Gene: TRIM37 (Intergenic)
  source 1..282: mol_type = genomic DNA
cgctcgaacccaggaggcggaggttgcggtgagccgagatcgcgccattgcactccaacctgggcaacaagagtgaaactccgtctcaaaaaaaaaaaaaaaaaaaatgcaatgctgtacttgggattcagagtaatgagaagtggcccttgctctcaaggagcagtacagaagacaaataagacaaattgcaatacttacatgataaatagttaagattcttgtatgtttgccgaagaacctaagaatgtcgaaggacttattgcaccaattcataatagc

SEQ ID NO: 2915 - DNA, 314 bp, Homo sapiens
  misc_feature 1..314: note = U/M: U (0.13:0.91) in Lung Alveolar Epithelium
  misc_feature 1..314: note = source = chr11:67781212-67781525; Gene: ALDH3B1 (intron)
  source 1..314: mol_type = genomic DNA
cggagacaggcctgatggtggctcgagaggctcgttcttggctcctgggtctcagtcctgctcccgtgacgagccatcccctatggggaccatggtgcctgtcctgtgtgcgggccactgcccagcttctcccaatcagagcaggaagatggtgggttcagcctggccccacaatcactccagctgagggctggcctggggctcctgaccaggctctcagtagcacactggtccagcagggccatcctgcagaccggagcaggtcccgccctcaaggtggccacttaacaatcacccacagccttgcgctcacc

SEQ ID NO: 2916 - DNA, 407 bp, Homo sapiens
  misc_feature 1..407: note = U/M: U (0.19:0.94) in Lung Alveolar Epithelium
  misc_feature 1..407: note = source = chr2:61452835-61453241; Gene: USP34 (intron)
  source 1..407: mol_type = genomic DNA
cgattaagtttctgtgagcctctggtaatatttttgtcaaccaatcgatacatttactttgttttatgagtgtttctgttaaagataccttatttagtatatattgttgattcattaacgtttaactcactgccaatagtattaaaactcatatgaatgaaatgtgtctaacacgtattttccctataagtcatatcatggccttcttgagcttaagaacactagagagcacttcagcactacacttgagggccattttatttacttatttttacagatggatcttgctatattgcccaaactggactgtaatggctattcacaggtgccaaagtagcatactgcagactcaaactcctggcctcaagccatccacctcatcctcccaagtagttgggactacaggc

SEQ ID NO: 2917 - DNA, 420 bp, Homo sapiens
  misc_feature 1..420: note = U/M: U (0.02:0.91) in Lung Alveolar Epithelium
  misc_feature 1..420: note = source = chr3:179449170-179449589; Gene: USP13 (intron)
  source 1..420: mol_type = genomic DNA
cgacagagtaagactccatatcaaacaaacaaacaaacaaaaaacaacacatagattccttagtccctccgtaggactgaggaatcagaatttcaggggagggcttggcattcctcaggtttggtaagctgccgggtggttcttaagcaggctcaagtaggagaaactccgtgggccagtcgttactaattaatagaaccactgaaagataggcttgatgttttaatggccagacctgcatttccactggaccctccctatgctgcttgttgtacaactccagagggtactactcataacttggtctttttgagtggtgcccttggaattgtgtagtgcacagcttacgcatctgtgtttggcaccgtcctctcccgttgccacagatgccctgagtggaacgcgtgccccacttccccg

SEQ ID NO: 2918 - DNA, 184 bp, Homo sapiens
  misc_feature 1..184: note = U/M: U (0.02:0.89) in Lung Alveolar Epithelium
  misc_feature 1..184: note = source = chr18:72670023-72670206; Gene: ZNF407 (intron)
  source 1..184: mol_type = genomic DNA
cgtctcacttacactgtgaagtggtctaaaaatgttcgtcttcacctacgagactctggacgtctttgagtattcattccttcattctttcattatgtattaaggtccttattatagatgaggctgatgtaagtgcctgcgataaaacagtggaaaagatcagcaaaagagaacactgtcgtcg

SEQ ID NO: 2919 - DNA, 350 bp, Homo sapiens
  misc_feature 1..350: note = U/M: U (0.06:0.91) in Lung Alveolar Epithelium
  misc_feature 1..350: note = source = chr20:49179013-49179362; Gene: PTPN1 (intron)
  source 1..350: mol_type = genomic DNA
cgcttaagaactgagtggcttcgggcaagttgttctctctcataggagtgtgtgaagatgaagcaacataagctgcttagcccagcgcccagtacctcacgcagacataagtgctcagtaaatgttgtctgtggtggggatggttgtcaccaacatctgaagtgcacttctaggtcatcaggtgacatgattggcgccaacacatggtactcttgatttagcacatctcagctgaggcacctcattgatatttgtttaaaaacaaaaacaaaaaaccttggtgattctgctgtgaagtcctggccagaaacctccagaccgctgatcaacacgcaacagaaccatcaccg

SEQ ID NO: 2920 - DNA, 365 bp, Homo sapiens
  misc_feature 1..365: note = U/M: U (0.06:0.91) in Lung Alveolar Epithelium
  misc_feature 1..365: note = source = chr15:42129252-42129616; Gene: JMJD7,JMJD7 (intron,exon)
  source 1..365: mol_type = genomic DNA
cgttcttcccacagtgaatttctggtatgacatggaatacgacctcaagtatagttacttccagctgctcgactccctcaccaaggcttcaggccttgactgatggagcactggtgaacaccaccaagcacgcctcgggggacggagccagcccctccctggccaggtcaattctcgagagagcctggagtgtgcatgctggctgctggccccgggtccagcatggcttgagatcagctttggaggatcttggaatgtggtcataaggactcaaggtgccaggcaggtctgggtgagggttctcaggaagttgccacacaggtgagcagagtggggatcaggtgcagcggcacctctccccagcg

SEQ ID NO: 2921 - DNA, 457 bp, Homo sapiens
  misc_feature 1..457: note = U/M: U (0.05:0.9) in Lung Alveolar Epithelium
  misc_feature 1..457: note = source = chr2:98870904-98871360; Gene: VWA3B (intron)
  source 1..457: mol_type = genomic DNA
cgtactataaatccttttaacaaatcttggaagccttaatcattattacctgaatcacatgattcaagaaagccaatttccaaataggcctcaaagaaccaaacatctcaagtgagacagaagcactgagctgacttatttccctcttcccgactctttttctatcacttagagcacatttacctggatcagacacaatttatgtgctgtgtacacactagctcaagtcctcatggcgacactaggagtggagcggtactactatccccactttaccgaaaagttgggcactggcccaaagcctcacggcaagaaggagaagaagccgactgagctttgggccctggagttgtggctccggagtctaccctcttcagaggccctgtctgcagacaccctttctgtgttcttaccaggctcatgatgggagggcagggcaggagaatgcagccacccg

SEQ ID NO: 2922 - DNA, 263 bp, Homo sapiens
  misc_feature 1..263: note = U/M: U (0.09:0.93) in Lung Alveolar Epithelium
  misc_feature 1..263: note = source = chr2:73723864-73724126; Gene: ALMS1 (intron)
  source 1..263: mol_type = genomic DNA
cgatgtgtaaattgtcaatatattttagccatttttatagttgtacagtggtatctcaacatagttttaatttgcatgtccttccttaatggctaattattatgaacaccgtttcaagagcttatttgccatcctcttcggtgaagtgctttttaaatagggttgtttgctttcttattggtgagttttgagagttcttaatatattctggatacgagtcttttctggatatgttatttgcaaatatctcttcacagtatgcg

SEQ ID NO: 2923 - DNA, 320 bp, Homo sapiens
  misc_feature 1..320: note = U/M: U (0.06:0.9) in Lung Alveolar Epithelium
  misc_feature 1..320: note = source = chr1:25200374-25200693; Gene: RUNX3 (Intergenic)
  source 1..320: mol_type = genomic DNA
cgaaactctgtctctacaaaaaatacaaaagttagccaggtgtggtggcagaggctgtagccccagctacttgggaggctggggcaggagagttgcttgaacccgggaggcggaggttgcagtgagccaagattgtgccactgcactccagtctgggtgacagagtgagactctgtcttaagaaaaaaaaaaaaaaagacaaactctgagtgagcagtagaagcccagctctttcccataagattgttctccgcaccagcaaatgctggcgatgaagatttctccctctctcttcaaaaatatgttagagaggaaaagcg

SEQ ID NO: 2924 - DNA, 405 bp, Homo sapiens
  misc_feature 1..405: note = U/M: U (0.1:0.94) in Lung Alveolar Epithelium
  misc_feature 1..405: note = source = chr6:127669486-127669890; Gene: ECHDC1 (Intergenic)
  source 1..405: mol_type = genomic DNA
cgcaatcttggctcactgcaacctccgcctcctgggttcaagcaactctgcctcagcctcttgagtagctggaatcacaggcacacgctaccacgccggccaatttttgtacttttagtagaaacggggttttgtcatgttggccaagcttgtcttgaactcctggcctcaggtgatccacgtgcctcagcctcccaaagtgctgggattacaagcgtgagccaccacgcccggcctgaaccactatccttttatgaagacaccttcacatgaactgaggaatccagatgagaaattatagcacctagatgtagcagagaattaagaaaagacacattgaagatagtaggaaagagtcaatcctttcccaagcctgggtagcacagagctgagacttatggtccg

SEQ ID NO: 2925 - DNA, 58 bp, Homo sapiens
  misc_feature 1..58: note = U/M: U (0.1:0.93) in Lung Alveolar Epithelium
  misc_feature 1..58: note = source = chr14:63872855-63872912; Gene: PPP2R5E (intron)
  source 1..58: mol_type = genomic DNA
cgcagtgactcacgcctgtaatcccagcactttgggaggccgaggcgggcagatcacg

SEQ ID NO: 2926 - DNA, 141 bp, Homo sapiens
  misc_feature 1..141: note = U/M: U (0.05:0.88) in Lung Alveolar Epithelium
  misc_feature 1..141: note = source = chr22:30907485-30907625; Gene: SEC14L4 (Intergenic)
  source 1..141: mol_type = genomic DNA
cgggcgtggtagcacacgcctgtagtcccagctactctggaggctgaggcaagcgaatcacttgaacccaggaggcagaggttgcagtgaaccaagatcgtgccactgcactccagcctgggtgacaagagcaaaactccg

SEQ ID NO: 2927 - DNA, 145 bp, Homo sapiens
  misc_feature 1..145: note = U/M: U (0.1:0.92) in Lung Alveolar Epithelium
  misc_feature 1..145: note = source = chr22:30216739-30216883; Gene: ASCC2 (intron)
  source 1..145: mol_type = genomic DNA
cgtggagaaaccccatctctactaaaaatacctgtaatcccagctacttcggaggctgaagcaggagaatcacttgaacctgggaggcggaggttgcggtgggccgagattgcaccattgcactctagcctgggcaacaagagcg

SEQ ID NO: 2928 - DNA, 240 bp, Homo sapiens
  misc_feature 1..240: note = U/M: U (0.06:0.88) in Lung Alveolar Epithelium
  misc_feature 1..240: note = source = chr12:107272882-107273121; Gene: RIC8B (intron)
  source 1..240: mol_type = genomic DNA
cgggaagctgaaactcgtataggtaaattcgaagggactcttgggagatctgcaagtgggaaacaagaatgcattttaccaactgcttaattatgtcctgtttttcaacaagtacacttgaattgaatgttttgtttgtattgcacaaaaacatgtgctgtgggcaagagtattctcttgctttcaggtcaagtaaagtgttttatacacatacacgtctgacctattctatattgtgcg

SEQ ID NO: 2929 - DNA, 493 bp, Homo sapiens
  misc_feature 1..493: note = U/M: U (0.06:0.88) in Lung Alveolar Epithelium
  misc_feature 1..493: note = source = chr18:12849921-12850413; Gene: PTPN2 (intron)
  source 1..493: mol_type = genomic DNA
cgctttctttgtatacctgtatttatgtgcccactctttctcctgatattgtttatatgcaccttctttctttcttgtttgattgatcgtgctcgatcttgacagagttgatcagtcttaccgaggctaacatttagtttagttggtcccttgtgctgtaactgtgatttctatttctgctcctttgttgttgttacttctttctgctttttttttctcattctcttatttttactctaaattaggttagacagcacattaattttaactttcatcttaaaatactgggctaggcacagtggctcatgcctgtaatcctagcactttggaaggccgaggcaggcagatcacttaaggtcaggagtttgagaccagcctggccaacacagtgaaactgtctctactaaaaaacacaaaattagccaggcctggtggcacgtgcctgtactcccagctactcgaggggctgaggcaggagaattgcttgaactcg

SEQ ID NO: 2930 - DNA, 86 bp, Homo sapiens
  misc_feature 1..86: note = U/M: U (0.14:0.93) in Lung Alveolar Epithelium
  misc_feature 1..86: note = source = chr3:37765199-37765284; Gene: ITGA9 (intron)
  source 1..86: mol_type = genomic DNA
cgtgtaggctgcatgtgctgcgacggcagcgctgtgtttgccattgtagccccatcccctagaacagggcgtgatatagggcagcg

SEQ ID NO: 2931 - DNA, 194 bp, Homo sapiens
  misc_feature 1..194: note = U/M: U (0.05:0.84) in Lung Alveolar Epithelium
  misc_feature 1..194: note = source = chr10:135030800-135030993; Gene: KNDC1 (intron)
  source 1..194: mol_type = genomic DNA
cgtagaaagtgtatccggtaaacacttctcaagctcctctcaaggcgctcaggcaagagggctggggccgcagtcggggtgagcccaggatcacatgaggcgccttcagctgcacaggggccctgcagacaagagttgagcccgggggcaggcgcggtggctcacgcctctaatcccagcactttgggagtccg

SEQ ID NO: 2932 - DNA, 202 bp, Homo sapiens
  misc_feature 1..202: note = U/M: U (0.13:0.92) in Lung Alveolar Epithelium
  misc_feature 1..202: note = source = chr12:131478682-131478883; Gene: GPR133 (intron)
  source 1..202: mol_type = genomic DNA
cgcttccgggctccgaagggaaggacccgcggggtgttgggtggaaagagcgggtatagacaagctggaaggtccttatgcatgtatgcacaggaccgggcgtgaggccccgagacagggcttggtatgcagtaagtgctttattaatacgaacactcttgtttttgttgagatgggctacaaggggtgactgtggcaggcg

SEQ ID NO: 2933 - DNA, 430 bp, Homo sapiens
  misc_feature 1..430: note = U/M: U (0.09:0.88) in Lung Alveolar Epithelium
  misc_feature 1..430: note = source = chr2:100812090-100812519; Gene: AFF3 (Intergenic)
  source 1..430: mol_type = genomic DNA
cgcagggcttttgaccctgagcagtggcggagcctctctgtggcttagtctctcaatgacaaatctatgatgcacctccctgccttgcttgtctcactgagggctgatggggacagagtgaaagcttgttcaagtgcttcaagcagcacagagcatcatacaaaggcagtttgctaggcatacggggctatcacctggtttgactcctaggggagttggaaggaggagggggcgtggaaaggatgggctgttccgcagcaatgcagtgcgtcttggctgctcatatggcagctggtttgggcagatgttgaaggaggtgagccgtgggtacacccctagctagtgatgccagcccctccctgatcccagaagctctaagccctgttttatcactaatcatggcgtatggtaagaacaggggtcatctccg

SEQ ID NO: 2934 - DNA, 145 bp, Homo sapiens
  misc_feature 1..145: note = U/M: U (0.15:0.93) in Lung Alveolar Epithelium
  misc_feature 1..145: note = source = chr9:2272215-2272359; Gene: SMARCA2 (Intergenic)
  source 1..145: mol_type = genomic DNA
cggcctccccaggtgctgggattacaggcgtgagccaccgcgcccggcctgcaagaacttctctctacgttagcaagaaacaaacacttgagaactaagttacactgctggaggaacgatgaacgtctccttactgccaattacg

SEQ ID NO: 2935 - DNA, 229 bp, Homo sapiens
  misc_feature 1..229: note = U/M: U (0.09:0.87) in Lung Alveolar Epithelium
  misc_feature 1..229: note = source = chr14:59165532-59165760; Gene: DACT1 (Intergenic)
  source 1..229: mol_type = genomic DNA
cgctctacatttatcagagtgatcgaagaggaatgagctctctccgttggccaaaagctcgtggtacttcagagggagacaggtggaggaggcgattgagaaaatattttagggcaatggagtgatttgttagttggccactacacaagagtctgtgtggcattctccagccatgtattgaaggctataatcttttaaataaatagtgccagttcacatttacttggcg

SEQ ID NO: 2936 - DNA, 399 bp, Homo sapiens
  misc_feature 1..399: note = U/M: U (0.14:0.92) in Lung Alveolar Epithelium
  misc_feature 1..399: note = source = chr16:11398056-11398454; Gene: PRM1 (Intergenic)
  source 1..399: mol_type = genomic DNA
cgttatgtttcagttgccggaattgaaatcacgttgccgttccctctgcctggaatgcttttctgcattagggcatggctgatgccttcctagcttccagatctcagcaaagtgtcctggggctgctgtgcctggaagggacacattttgggtgcctccttacattatccgcccataccactggacaatcgggtgctctgtcttgcctctctgtgtgctagctgcttctctccaccaaatcacaatatccttaagaacaaggacgttgttttgttcatggcttcagtcccagcacctagcaagtcgtaagtgcttagaaaataatgtgttcagaggccaggcgcggtggctcacacctgtaatcccagcactttgggaggccgaggcggtcggatcacg

SEQ ID NO: 2937 - DNA, 424 bp, Homo sapiens
  misc_feature 1..424: note = U/M: U (0.14:0.92) in Lung Alveolar Epithelium
  misc_feature 1..424: note = source = chr17:78587637-78588060; Gene: RPTOR (intron)
  source 1..424: mol_type = genomic DNA
cggtgttgagactcgggctgggccgcgtgttctggataagtggctgtggagcacgatgaagcgtctatcgcagcatcatctctgcacccagatgtggccgtgctgagtggattcctgccccagatcttgggaagaaggttggctttcctcctggtgttggtggaaggcctccccggcgacactgctgcactccactggggcctttcattgtcctgtcccttcctgacaaggaaatggctggacactctcttcatgtcagcacccctaggtgctgggggctcaaagataagccaggcctggaagacccacccagagccaggggagcccacccccaatacacatactcaccaagccacatgctgcggttgggggtcccagaggtgtgctcaggccagcctgtggggacagcaaagtggcctccccg

SEQ ID NO: 2938 - DNA, 233 bp, Homo sapiens
  misc_feature 1..233: note = U/M: U (0.13:0.9) in Lung Alveolar Epithelium
  misc_feature 1..233: note = source = chr14:103363706-103363938; Gene: TRAF3 (intron)
  source 1..233: mol_type = genomic DNA
cgaaataatgaatccaaaatccttcatttacaggtaagaatcttaggactacggccagatcaaagggtggaggagcttgcctgtgttccccttaagggtttcttagcaaactctttgagctgagtccttgacctttgcaagcagaaaggcaactgatttctctggcctaagtgaaggcttagaaaaggcagctggactagcacaggcccggcctgggaagccgcaggtcagcg

SEQ ID NO: 2939 - DNA, 275 bp, Homo sapiens
  misc_feature 1..275: note = U/M: U (0.17:0.94) in Lung Alveolar Epithelium
  misc_feature 1..275: note = source = chr1:231037988-231038262; Gene: C1orf198 (Intergenic)
  source 1..275: mol_type = genomic DNA
cgtggtggcgtgcgcctgaagtcccagaaactagggaggctgaggcaggagaatcgcttgaacccgggaggcggaggttgcagtgagccgagattgcgccatcgcactccagtctgggcaataaagagagactctgtctcgggattaaaaaaaaaaaaaaaaaaaaaaaaaggaaagaaaaatgccagccgtagtaagtgcttaaaacacattagctcccgaagggccccaaaccctggagacagaagcatccggttgcaacccctcatccctcg

SEQ ID NO: 2940 - DNA, 296 bp, Homo sapiens
  misc_feature 1..296: note = U/M: U (0.18:0.95) in Lung Alveolar Epithelium
  misc_feature 1..296: note = source = chr9:90154688-90154983; Gene: DAPK1 (intron)
  source 1..296: mol_type = genomic DNA
cgagagtagaagcatcctttgtccagctattcacgatgtctgtctacattcgctgactgtctgcactccctgcctgttagccactcaggagccctctgcgtatcaataattgtcgtagtctagtagtgcttgtgttcaaggagcccttattttacttcttaatgaccccaaagcccgagagtagtgatgccggcaattcggatgtgccaaaaagaagccgtcaagtgcttcctttaagtgagaaggtggaagttctcgacttaaggaaagaaaaaaaattatttactaaggttgcg

SEQ ID NO: 2941 - DNA, 438 bp, Homo sapiens
  misc_feature 1..438: note = U/M: U (0.11:0.88) in Lung Alveolar Epithelium
  misc_feature 1..438: note = source = chr1:87607301-87607738; Gene: LOC339524 (intron)
  source 1..438: mol_type = genomic DNA
cgtcatcatcctgggccccatgtggctgcccatcgcatacaggaggcctaattgtatgtctgctgtgtgtggcatgactccttcgaatggcgttccttttcccaccccgtggcattgctctgctctcgcagtctctctccatagtaacagaagcttccactgagttaacacctcaacctattaagcttaagtgcttttcaaaacattttattattggctgagtgtttgtgaagcagtttaccttggactccgactggcttcaagaggtttgagcctgtcttgtattccagggaagcgtcattgcaaacccagcacccagctttccaccctttctttacctctctcaccaaatggtgtgaggccattcatgggaaggccacgatgaattttgatttcagtcgttgtatcattacttagctaatttaaagatggatatcg

SEQ ID NO: 2942 - DNA, 497 bp, Homo sapiens
  misc_feature 1..497: note = U/M: U (0.16:0.93) in Lung Alveolar Epithelium
  misc_feature 1..497: note = source = chr6:14941192-14941688; Gene: JARID2 (Intergenic)
  source 1..497: mol_type = genomic DNA
cgggttcacaccattctcctgcctcagcctcctgagtagctgggactacaggtgcccgccaccatgcccggctaatttttttgtatttttagtagagacggggtttcaccgtgttagctagaatggtctcaatctcctgacctcgtgatctgcccgcctcggcctcccaaagtgctgggattacaggcatgagccaccgcgcccagccgaggagtgcattattccactgtcgcatgcatattcaaaggctcacactcaaagccctgtacaatgtcttcctttttcagcctcaaacatcccactgcaacccacatgtatcagccacaggggcttgtgggccattcttcaacatacctttgtgctctcctgcctctaagtgtttgttcaagctgctactaataggtccctccttttcctactactctggcgaaattctttcgtaaggcccagccctagtcctgccttctccataaagtttcctgagccccggccagacg

SEQ ID NO: 2943 - DNA, 392 bp, Homo sapiens
  misc_feature 1..392: note = U/M: U (0.16:0.92) in Lung Alveolar Epithelium
  misc_feature 1..392: note = source = chr6:158567331-158567722; Gene: SERAC1 (intron)
  source 1..392: mol_type = genomic DNA
cgtatcactgaagcttcttaaaatttttcaaatactttctatatatactaacactgcctgaattattttccttcctgaatctcactcccactcccttgtcttttttttttttttttttttttttttttgagatggagtctcgctctgttgcccaggctggagtgcagtggcgcaatctcggctcactgcaagctctgcctcctgggttcacgccattctcctgcttcagcctctcgagtagctgggactacagacgcccgccaccatgcctggctaatttttttgtatttttagtagagacggggtttcaccatgttagccagggtgggtcttgaactcctgaccttgtgatccaaccagcgtggcctcccaaagtgctgggattacaggcg

SEQ ID NO: 2944 - DNA, 439 bp, Homo sapiens
  misc_feature 1..439: note = U/M: U (0.15:0.91) in Lung Alveolar Epithelium
  misc_feature 1..439: note = source = chr4:1637282-1637720; Gene: FAM53A (Intergenic)
  source 1..439: mol_type = genomic DNA
cgccagccactgtgcccagctatttttcactcctatttcttctaatacagtcactgaggactgtaaattcccttctacacaccacttgggatctactccacaagcacggatctgccgcgcccactgccaacggttctaagtcttttctcacttccgttgatttcttctataacccatgagttacatcaagtgcatttttggaatttctgaaacacatgaggttttgtttgctttttggtattgagttgtggtcagaagataggacctgtataatactaattctttttttttttttttttttttttttgagatggagtcttgctctgtcgcccaggctggagtgcagtggcgcgatctcggctcactgcaagctctgccttctgggttcacaccattctcctgcctcagcctcccgactagctgggactacaggcacccg

SEQ ID NO: 2945 - DNA, 158 bp, Homo sapiens
  misc_feature 1..158: note = U/M: U (0.16:0.91) in Lung Alveolar Epithelium
  misc_feature 1..158: note = source = chr7:98601588-98601745; Gene: TRRAP (intron)
  source 1..158: mol_type = genomic DNA
cgggaggctgaggcaggagaatcactgaaacccgggaggcggacgttgcagtgagcggagatcgcaccactgcactccagccagggcaacaagagtgaaacttcatctcaaaacaaacaaacaaaacatgtaattcgtagctggtaggggcttgagcg

SEQ ID NO: 2946 - DNA, 431 bp, Homo sapiens
  misc_feature 1..431: note = U/M: U (0.17:0.91) in Lung Alveolar Epithelium
  misc_feature 1..431: note = source = chr9:102907198-102907628; Gene: INVS (intron)
  source 1..431: mol_type = genomic DNA
cgtgtagaagaatgcctggacgtcaggcacctcagaccatttgcctattttacaacaagaattatctagatcttgtaggatggaaaaatcgaaagtgccgttttctgtctatttggaaccactgttgagtttgtattggggtcaagcggcattgtagaagaaaataagttgtttaggttttaggtcaagtgtgagttgaagaggttttaagttcttgagaacacaggctaagggagaagaaggaggaatggagggtggaaggttgcccatagtgaaggaagcaagcccagagaacagagtagagacacggagggaaggggtttgggggttcttaccttccagaaaagcaggaaaggggtcggggcatggagatataaggggttggggtgcagagataagaggtcagggcacagaaataagggatcagggcg

SEQ ID NO: 2947 - DNA, 286 bp, Homo sapiens
  misc_feature 1..286: note = U/M: U (0.23:0.93) in Lung Alveolar Epithelium
  misc_feature 1..286: note = source = chr15:80217246-80217531; Gene: C15orf37,ST20 (TTS,promoter-TSS)
  source 1..286: mol_type = genomic DNA
cgatgtgtactagtggcagcaaatccaaacaaaatttaagtgctttgttttgatcacattcattgggcttcagatgtcaattgtgcgctgctttggcttgtgtttgcagccacaaacacaagtggagttattaacgccactcactaaacacaagtggaagttattaagagtggaggttccctcctccactcttaataacagtgatccagttcgtgttttttttttttttttttttagacggagtctcgctctttcgcccaggctggagtgcagtggcatgatctcg

SEQ ID NO: 2948 - DNA, 360 bp, Homo sapiens
  misc_feature 1..360: note = U/M: U (0.24:0.94) in Lung Alveolar Epithelium
  misc_feature 1..360: note = source = chr9:38075126-38075485; Gene: SHB (Intergenic)
  source 1..360: mol_type = genomic DNA
cggtcaaattaagcaagttaacctatcatctcacatagtgacctttttgtgtgtgtggtaatgagaggtgacagcgtgctggcagtcctcgcagccctccctcgctctcggcgcctcctctgcctgggctcccactttggcggcacttgaggagcccttcagcccgccgctgcactgtgggagccccttcctgggttggctgaggccagagccggctccggctccctcagcttgcggggaggtgtggaaggagaggcgtgggcgggaaccggggctgcgcgtggcgcttgcgggccagcgcgagttccgggtgggcgtggggtcagcgggccctgcactcggagcagccagccggccccg

SEQ ID NO: 2949 - DNA, 89 bp, Homo sapiens
  misc_feature 1..89: note = U/M: U (0.24:0.93) in Lung Alveolar Epithelium
  misc_feature 1..89: note = source = chr16:3139060-3139148; Gene: ZSCAN10 (exon)
  source 1..89: mol_type = genomic DNA
cgcagggcgcggctggcggaaggcgggccaagctagtacagcgtctcgcgggcgtgggtgcgcaggtggcgcagcaggtgggagttgcg

SEQ ID NO: 2950 - DNA, 291 bp, Homo sapiens
  misc_feature 1..291: note = U/M: U (0.25:0.94) in Lung Alveolar Epithelium
  misc_feature 1..291: note = source = chr22:29203527-29203817; Gene: XBP1 (Intergenic)
  source 1..291: mol_type = genomic DNA
cgccatctcagctcaccccaacctctgcctcctgggttcaagcgattctcctgcctcagcctcccaagtagctggaattacaggcatgtgccaccatgcccagctaattttgtatttttagtagagacggggtttctccatgtgggtgaggctggtcttgaactcccaacctcaggtgatccacccccctcggcctcccaaagtgctggaattacaggcgtgagccaccgctcctggccctgaatgtactcattttaaagcactaaggcaacagttctagttacctacacg

SEQ ID NO: 2951 - DNA, 103 bp, Homo sapiens
  misc_feature 1..103: note = U/M: U (0.26:0.92) in Lung Alveolar Epithelium
  misc_feature 1..103: note = source = chr19:7158237-7158339; Gene: INSR (intron)
  source 1..103: mol_type = genomic DNA
cgcggtgactcacgcctgtaatcccagcacgttgggaggccaaggtgggcagatcacgaggtcaggagatcgagaccatcctggctaacatggtgaaaccccg

SEQ ID NO: 2952 - DNA, 427 bp, Homo sapiens
  misc_feature 1..427: note = U/M: U (0.28:0.94) in Lung Alveolar Epithelium
  misc_feature 1..427: note = source = chr22:47197736-47198162; Gene: TBC1D22A (intron)
  source 1..427: mol_type = genomic DNA
cgtgctgatagatggaggtcagcgggagagggtgttttgggggttgggagggcatgaacagaagtttggagccgtacaccttggcagcactaatacgagtagatgcccccttggtgtccgtggctctagggcagccgtgaaggggcctgggcccttggtgacaggaggaagcaggtgcggccttggagtaggccctcagtgtgatggctggccgtgtccttactcatgaagtggctcaacctacctgtttcgtcagctgtagagggagcatgagacctgccctgcagggtcctcgtgaaggtcagtgggaatttatgtagagtcactcatccaggctctgttgagcacctgctgtggttgtaggcactggggaggaatcggcggcgaggcttgcgagggccctgccctcaaggagctgacattctcg

SEQ ID NO: 2953 - DNA, 293 bp, Homo sapiens
  misc_feature 1..293: note = U/M: U (0.35:0.93) in Lung Alveolar Epithelium
  misc_feature 1..293: note = source = chr1:150748460-150748752; Gene: CTSS (Intergenic)
  source 1..293: mol_type = genomic DNA
cgacaccacacctggctaattttttgtatttttagtagagacagggtttcaccataatggccaggctggtctcaaactcctgacctcaggtaatccgccacctcagcctaccaaagtgctgggattacaagcgtgagccactgcgcccggcccgcgcccggctaatttttgtatttttttgtagagatgggctttcaccacatttgcccggctggtctccaccttcctgagttcaagtgatctgcctgcctcggcctcccaaagtgctaggtttacagatctgagccactgcg

SEQ ID NO: 2954 - DNA, 379 bp, Homo sapiens
  misc_feature 1..379: note = U/M: M (0.94:0.16) in Lung Alveolar Epithelium
  misc_feature 1..379: note = source = chr5:87439252-87439630; Gene: TMEM161B (Intergenic)
  source 1..379: mol_type = genomic DNA
cgcggaaaagcatccactaaatcggagggattttccagaccttttaaaagtttccagtacccccaatccgtgatgtttccttccgcgttgcacctcctgcccgtcaagtgactagtagagggtatcttctaaagacagccagaaagtttcgacagtgtttggcgacccagccaaggccggggtgacgcacactcctactgcaggggccaatttggaattccatcttttagcatttcttactgcccaatcttttcttatgagactaataacctcattctcagggccaatgtaaaatgtgaaactatagagcatgtgggcctttaatgcagcagaagagttagattcctcaaaaattggggcattcttactttgctgcacg

SEQ ID NO: 2955 - DNA, 103 bp, Homo sapiens
  misc_feature 1..103: note = U/M: M (0.78:0.19) in Lung Alveolar Epithelium
  misc_feature 1..103: note = source = chr4:57521209-57521311; Gene: HOPX (intron)
  source 1..103: mol_type = genomic DNA
cgtgttgcattctttacctggcacttttcgggataatacaggagcatttaaaaaatagataagtcaatgaatgcacttagggggacatcggctgccgctgccg

SEQ ID NO: 2956 - DNA, 242 bp, Homo sapiens
  misc_feature 1..242: note = U/M: M (0.7:0.14) in Lung Alveolar Epithelium
  misc_feature 1..242: note = source = chr13:27050627-27050868; Gene: WASF3 (Intergenic)
  source 1..242: mol_type = genomic DNA
cggaggcaactttattcagaaatcaaccgctgcctggctccagggccagtgtcaggagccagcgggggtttgttctggccaacagccctctcctccatcagagtcatccccacatccaggcgggagttgctagaattatctgttcctgtttccttcagagtctgcacagaatgctttggattcccgagatctggcttcctctgtgtgttgtcactgactccagcccagctgctcgcagcacg

SEQ ID NO: 2957 - DNA, 195 bp, Homo sapiens
  misc_feature 1..195: note = U/M: M (0.63:0.16) in Lung Alveolar Epithelium
  misc_feature 1..195: note = source = chr14:91710906-91711100; Gene: GPR68 (promoter-TSS)
  source 1..195: mol_type = genomic DNA
cgagtcctctctgactctgcctgccccagctaggctctgccttcaaacctcaaacagctgggcttcctgcagaggctctgcaggagcctgggcacccttgcagccacgatcccagctctccctccagcgacttcccgcagcctgaacctcccagctccggctagaaaatccccagctggaggctgcccattcccg

SEQ ID NO: 2958 - DNA, 81 bp, Homo sapiens
  misc_feature 1..81: note = U/M: M (0.63:0.26) in Lung Alveolar Epithelium
  misc_feature 1..81: note = source = chr19:18706051-18706131; Gene: CRLF1 (intron)
  source 1..81: mol_type = genomic DNA
cggacgcagcggcctgctggctcctgtgcaagaatcgcaggtgccgggcacgagcaggggccaaggctcaggcccctcccg

SEQ ID NO: 2959 - DNA, 142 bp, Homo sapiens; identical to SEQ ID NO: 400
  misc_feature 1..142: note = U/M: M (0.63:0.28) in Lung Alveolar Epithelium
  misc_feature 1..142: note = source = chr19:49112138-49112279; Gene: FAM83E (intron)
  source 1..142: mol_type = genomic DNA

SEQ ID NO: 2960 - DNA, 71 bp, Homo sapiens; identical to SEQ ID NO: 399
  misc_feature 1..71: note = U/M: M (0.61:0.27) in Lung Alveolar Epithelium
  misc_feature 1..71: note = source = chr3:13908233-13908303; Gene: WNT7A (intron)
  source 1..71: mol_type = genomic DNA

SEQ ID NO: 2961 - DNA, 223 bp, Homo sapiens
  misc_feature 1..223: note = U/M: M (0.79:0.09) in Lung Alveolar Epithelium
  misc_feature 1..223: note = source = chr3:44063807-44064029; Gene: MIR138-1 (Intergenic)
  source 1..223: mol_type = genomic DNA
cgtgtcatttctcacggggcattgccggccgcttttctgcaactgtcctttcggatttggtgatctggtccggcacagaggctctcctaggaggtggtgcccatgcatattcattctgtgtagtaaccgactggccgtcttgccattgcaggctgatttattgatttatgtaggaagtgtgttttattttagtaattagggaaccctgaattcacgggaaccg

SEQ ID NO: 2962 - DNA, 277 bp, Homo sapiens
  misc_feature 1..277: note = U/M: M (0.78:0.1) in Lung Alveolar Epithelium
  misc_feature 1..277: note = source = chr19:17008520-17008796; Gene: CPAMD8 (intron)
  source 1..277: mol_type = genomic DNA
cgcgctccacttcgttgcacgcgggtccggcgcacagttcccgggcgagtgggctgtgggtgctgacgttgtagaagcgagtggcctcgaaggctacgggacgagggtggcgggtgaccaagtgcaggcgcgacgggtcagggaccgggccgggccgggggtgcgggcgcgcgggcctaccgggttcgtagtagtcgtacacggagactggcagcgccgacgtcctgcccaccacgcactcccggagagcacggaaccgcacgcacgtcaggcaccg

SEQ ID NO: 2963 - DNA, 414 bp, Homo sapiens
  misc_feature 1..414: note = U/M: M (0.71:0.03) in Lung Alveolar Epithelium
  misc_feature 1..414: note = source = chr2:111875094-111875507; Gene: ACOXL (exon)
  source 1..414: mol_type = genomic DNA
cgctgtgtgtgcgggtgcttggtgggctgaaagctgctgtcactagatggctgtaagtgtgccaacatctgacctgtcccattgtgttgtgttttgcagttgctggatttgtgcgactcggtgaaggatgatgcccggagggtgatctcgacctttaacattccacacacctacctccacgcaccaatcgccggaatctccaacccgcgggccgcgtgggctttctaccctgcaccgctgcagccgcggccacgggaagaggcgcgctcccggcggcccaagctgggagccaagctctaacgggtgtggcgggaagtgtggtggcccgccagcagctgccacgacgctcgctccaccgacgcccagagctgtggccgaggccgggggctggcacccgctgggccgccactctcg

SEQ ID NO: 2964 - DNA, 448 bp, Homo sapiens
  misc_feature 1..448: note = U/M: M (0.75:0.07) in Lung Alveolar Epithelium
  misc_feature 1..448: note = source = chr19:17007039-17007486; Gene: CPAMD8 (intron)
  source 1..448: mol_type = genomic DNA
cggctccattcagcttcacgtcctgctgtaaaggccccggggccacagaagccaggtcatccccgtaggtggaggacgacgaggccggcagccgctgctctggaaggaagggggcctcggtcgggagggcgtggcggggaggggacccaagggccgaggggaggagatccgtggcccagagcagcagcgatggtgtccccgaggctaggcggggggtagggtcctcaccgagggcgcagcagctgggaggcgcgggctccaggggcgcggcctggcggcaggcggcctcccgcaggcggcaggcgctggcgtagaccaccccgtcggagccgcacaccgggttcccctgggcgccgcagtcgtggtcgcagccgcatcgcgcgatcgccgccccctcctcaggggccacggcagggcccgactcgccggggaaccagcctgggggacg

SEQ ID NO: 2965 - DNA, 352 bp, Homo sapiens
  misc_feature 1..352: note = U/M: M (0.64:0.02) in Lung Alveolar Epithelium
  misc_feature 1..352: note = source = chr6:152623159-152623510; Gene: SYNE1 (intron)
  source 1..352: mol_type = genomic DNA
cgatctgctcctggtagcccttaattttctgcgccagctcctgaggaaacatttcccccaccggggtgtcagagcagcatcaaaaggaaacagaagtagtagcgttcatcttcctgcagggcgagccaatgagcgcgcagagccgcgcgggcccgggaggcaggatgtgtaggcggcgagtcctcctgcatctcgctaccgagccagaccgcaggctgcgcggcgcggcgcaggcacagccaaagtgcccgagcccgcgtccccgcgtcggtacaaaaggagaaatgaggggatgaggccgaatgagtggtttctaatcgcgagaggccccatatggaatcatgaacttccg

SEQ ID NO: 2966 - DNA, 389 bp, Homo sapiens
  misc_feature 1..389: note = U/M: M (0.76:0.14) in Lung Alveolar Epithelium
  misc_feature 1..389: note = source = chr5:87440121-87440509; Gene: TMEM161B (Intergenic)
  source 1..389: mol_type = genomic DNA
cggatcggcccgaaagcacccgagaaaacccagccctcaccttggaagcttgccttcagcaaactccagttgggtttacacctctcggtggtacaatagcccggagcccatgggtatccgctagtcgctgactctgaaatgcgccggtctgcgaggtaataatgaccgttgcttgcggctgtcagggctggcacgccgcaccaagggcactcagggccggccaagccttgaacaaggggaagggggatatggataacgtatacgttttaaagaggtttactgaaaacttttacagatcccacataagagatggaaggaaggctaagtgagtttaaaaaaaaaaaagtgtgtttactctttgtaccatgacagatccgggaggaaaaacg

SEQ ID NO: 2967 - DNA, 172 bp, Homo sapiens
  misc_feature 1..172: note = U/M: M (0.65:0.04) in Lung Alveolar Epithelium
  misc_feature 1..172: note = source = chr4:57521336-57521507; Gene: HOPX (intron)
  source 1..172: mol_type = genomic DNA
cgtcttataaaacgccaggaaaaacctctaaaccttagagccggggaattttttaaaaaatcggaaccaaatctccgtggcttcgtgcagcgtgagttctgcagctcgggggacgctgcagtgtgatgtggtggagagagcatgcttcaccgctcctgccatcctgacagcg

SEQ ID NO: 2968 - DNA, 36 bp, Homo sapiens
  misc_feature 1..36: note = U/M: M (0.73:0.15) in Lung Alveolar Epithelium
  misc_feature 1..36: note = source = chr19:17008817-17008852; Gene: CPAMD8 (intron)
  source 1..36: mol_type = genomic DNA
cggcgggcgcaggctcgacccgggccaggaggcccg

SEQ ID NO: 2969 - DNA, 38 bp, Homo sapiens
  misc_feature 1..38: note = U/M: M (0.72:0.15) in Lung Alveolar Epithelium
  misc_feature 1..38: note = source = chr3:44063289-44063326; Gene: MIR138-1 (Intergenic)
  source 1..38: mol_type = genomic DNA
cggggtaggaagtctttgtctgcctgcgcgcccgagcg

SEQ ID NO: 2970 - DNA, 285 bp, Homo sapiens
  misc_feature 1..285: note = U/M: M (0.71:0.15) in Lung Alveolar Epithelium
  misc_feature 1..285: note = source = chr19:11492629-11492913; Gene: EPOR,EPOR (exon,intron)
  source 1..285: mol_type = genomic DNA
cggtgatatcgcggagcgccggaggctgctgtgacgcgcaactctaggggcacgaagctcgacgtgtcggctgtaggcagcgaacaccagaagcgcaccgcaccacgagccgtgggagcctggtgcaggcgacacagcttccatggctcatccctatgcgcccagggaagggagcaggttgggaggggggaccggggagttggcattgcccggcctgtggggggcagtgtgtatgtgtgacacaaggtctagccttgtgtgtgtgtgtgacaaggtgttccttcg

SEQ ID NO: 2971 - DNA, 237 bp, Homo sapiens
  misc_feature 1..237: note = U/M: M (0.63:0.09) in Lung Alveolar Epithelium
  misc_feature 1..237: note = source = chr10:122708511-122708747; Gene: MIR5694 (intron)
  source 1..237: mol_type = genomic DNA
cgcagtggtcccgcccatcgccgcctctacagggagggagccgcggccccgagctggccacgcgatggcgctgtgcacccggccgcggagcccctgcacgtccggctcccgctcgcgctctcggctcgagctccggactccaggctcggagcaggggttcgggctacggttcccggctccgagggaccgcggggctctctgcctgggaaggaagcttgcgggcctcctcgggcctcg

SEQ ID NO: 2972 - DNA, 294 bp, Homo sapiens
  misc_feature 1..294: note = U/M: M (0.67:0.14) in Lung Alveolar Epithelium
  misc_feature 1..294: note = source = chr5:3594139-3594432; Gene: IRX1 (Intergenic)
  source 1..294: mol_type = genomic DNA
cggatttgtgtcaccaagaatccactccccaccaaccctcggcgtccccacaaacccagcccggaatctatgtaaaagcaggaaaggaaccctggaggttgtaggcggatcctggagtgtggaggggcgaattgagcgcgggaagcagcatgactagcaagacaatctgactcagagcagggaaaaatcaagcccgatgtcggagctggttattagtaattactaccatcacgggcattattgttgctaattataggcgatgtctcagtgtctgtcctcaggcccggaaaaccg

SEQ ID NO: 2973 - DNA, 137 bp, Homo sapiens
  misc_feature 1..137: note = U/M: M (0.58:0.06) in Lung Alveolar Epithelium
  misc_feature 1..137: note = source = chr19:11492268-11492404; Gene: EPOR (exon)
  source 1..137: mol_type = genomic DNA
cggaccggccctgaaagcggcaccgggcgcgacctcgagaggcgtggctgggccgtagtcagtggagctttgggggctgggccgtaggggctggcctcaccctctgtacgctccctgcgccgttgccggccgagacg

SEQ ID NO: 2974 - DNA, 423 bp, Homo sapiens
  misc_feature 1..423: note = U/M: M (0.63:0.14) in Lung Alveolar Epithelium
  misc_feature 1..423: note = source = chr5:3606587-3607009; Gene: IRX1 (Intergenic)
  source 1..423: mol_type = genomic DNA
cggcgcccctccgcgaggaaaggccggccctggccctttctgggcagtgaggggggtcaggccgacccggggaagaggccgagcagtcagcgcccctccttcccctcgggcggggcataagtggccgccctctccgcggctgctgttgggcttctgaagacgcagcgggtgtctctgatcccctaatccatttatccagagtcccgagcgcaatggctggtgcggggacacaacggcaggaggtggcgggggtggagggagaccgggcactcagctagcgccaccctcctcccgccccacccgagacgctgagccacgacccaccctccacgggtcccacgccctcaggcagaacgcaatggtgggaatgacgccaaggtcggtgaaatcttccaaattgaagggcttttattttaaattccg

SEQ ID NO: 2975 - DNA, 171 bp, Homo sapiens
  misc_feature 1..171: note = U/M: M (0.61:0.13) in Lung Alveolar Epithelium
  misc_feature 1..171: note = source = chr4:122301277-122301447; Gene: QRFPR (intron)
  source 1..171: mol_type = genomic DNA
cggattcatttgacagagaagtgtaaggaagagacagacgagagagagacagacagacgagagaggagagagagagagagagagagagagagagagagagagagagagagagagagagagagagagatcccctgaaaggcagagggttaagagagaaggagcgaaggagcg

SEQ ID NO: 2976 - DNA, 222 bp, Homo sapiens
  misc_feature 1..222: note = U/M: M (0.61:0.13) in Lung Alveolar Epithelium
  misc_feature 1..222: note = source = chr1:47974491-47974712; Gene: FOXD2 (Intergenic)
  source 1..222: mol_type = genomic DNA
cggagcagtgtggaggctgagagctgtctgggccctgctcacccatttttttttttttttttggcatttctgcatctagaaaggggatgtcataagcgaggcacctcctaagtaggggctccggtggcctggctctgtcttttcaaggaacagaggagacctctctctccgaagatgtctatgggacagaggagggctctgcctgagccgcagtcttcagcg

SEQ ID NO: 2977 - DNA, 47 bp, Homo sapiens
  misc_feature 1..47: note = U/M: M (0.63:0.16) in Lung Alveolar Epithelium
  misc_feature 1..47: note = source = chr19:10407214-10407260; Gene: ICAM5 (exon)
  source 1..47: mol_type = genomic DNA
cggacccgaggcggcggggggcgcggccgagtcgccggcggagggcg

SEQ ID NO: 2978 - DNA, 405 bp, Homo sapiens; identical to SEQ ID NO: 427
  misc_feature 1..405: note = U/M: M (0.61:0.14) in Lung Alveolar Epithelium
  misc_feature 1..405: note = source = chr8:102038446-102038850; Gene: FLJ42969 (Intergenic)
  source 1..405: mol_type = genomic DNA

SEQ ID NO: 2979 - DNA, 419 bp, Homo sapiens
  misc_feature 1..419: note = U/M: U (0.05:0.93) in Lung Bronchial Epithelium
  misc_feature 1..419: note = source = chr16:23408418-23408836; Gene: COG7 (intron)
  source 1..419: mol_type = genomic DNA
cggggtccccctatgttgcccagactggtttcaaatttttgggctcaagcaattctctcgcctctacctcccaaagtgctgtgactataagcatgagccaccatgcccagcctaacatttataatacttctaaaattcctttctagtcattttggcagagtcacaacttacacataggggttggattctaaggcaagagcgtaaggcagaaatcaccttgaaaagtctcagaaatctcccattgtgtgaggtgagtgtggtttggcacatattactcctctatagtgtttcttgtgcgcactgacatttaagagcacctgagctagactgcaggaagtaacggaaggaaaggccatgtgcaggtgtctgggtgactgtcaattcccaggggtgaatggggagggcagcaaggactccac

SEQ ID NO: 2980 - DNA, 312 bp, Homo sapiens
  misc_feature 1..312: note = U/M: U (0.08:0.92) in Lung Bronchial Epithelium
  misc_feature 1..312: note = source = chr8:26293472-26293783; Gene: BNIP3L (Intergenic)
  source 1..312: mol_type = genomic DNA
cggcctcccaaagtgctaggattacaggagtgagccaccacacctggcctcttttttgtatttttagtaaagacggagtttcatcatgttggccaggctggtctcgaactcctgacctcaagagatccgccccatcttggcctcccaaagtactggcattacaggtgtgagccactgagccgggccattgtttttgtatttttagtaaagatagggtttcaccatgttggccaggctgatctggaactcttggcttcaagtgatctgccgcctcaggctcccaaggtgctaggattacagatgtaagccacc

SEQ ID NO: 2981 - DNA, 92 bp, Homo sapiens
  misc_feature 1..92: note = U/M: U (0.1:0.94) in Lung Bronchial Epithelium
  misc_feature 1..92: note = source = chr17:56027572-56027663; Gene: CUEDC1 (intron)
  source 1..92: mol_type = genomic DNA
cgcgatctcggctcactgcaacttctgcctcctgggttcaagcgattctcctgcctcagcttcccaagtagctgggactacaggcgcctgcc

SEQ ID NO: 2982 - DNA, 146 bp, Homo sapiens
  misc_feature 1..146: note = U/M: U (0.1:0.94) in Lung Bronchial Epithelium
  misc_feature 1..146: note = source = chr17:64274922-64275067; Gene: PRKCA (Intergenic)
  source 1..146: mol_type = genomic DNA
cgcagtggctcacgcctctaaacccagcactttgggaggccgaggcatgtggatcgcttgaggtcaggagttcgagatcagcctggccaacatgatgaaacctcgtctctactaaaaatacaaaaattatccaagcatggtggtgc

SEQ ID NO: 2983 - DNA, 110 bp, Homo sapiens
  misc_feature 1..110: note = U/M: U (0.09:0.92) in Lung Bronchial Epithelium
  misc_feature 1..110: note = source = chr8:19268415-19268524; Gene: CSGALNACT1 (intron)
  source 1..110: mol_type = genomic DNA
cgctaactggaaggacgcgctcaatagcagtctggcgggagtgtgtgccctcaagcacacatccgattatatcacgttcccatgtgaagccctgcaagggttccctaatc

SEQ ID NO: 2984 - DNA, 135 bp, Homo sapiens
  misc_feature 1..135: note = U/M: U (0.07:0.9) in Lung Bronchial Epithelium
  misc_feature 1..135: note = source = chr17:8209419-8209553; Gene: ARHGEF15 (Intergenic)
  source 1..135: mol_type = genomic DNA
cggacgtggtggcgcatgcctgtaatcctagctgcttagaaggttgaggtaagacaattgcttgaacccaagaggcagaggttgcagtgagccgaaatcctgccactgcattccagcctgggcaacacagacttc

SEQ ID NO: 2985 - DNA, 140 bp, Homo sapiens
  misc_feature 1..140: note = U/M: U (0.04:0.87) in Lung Bronchial Epithelium
  misc_feature 1..140: note = source = chr8:59583884-59584023; Gene: NSMAF (Intergenic)
  source 1..140: mol_type = genomic DNA
cgcaggcacaatcatccccgttttgtatatgaggaaactgaagcatgagatcacacatctggaaagtcgaggagcagggattggaatctctcagtttagacccaaagcccggtcacgtaactactagatcacattgcctc

SEQ ID NO: 2986 - DNA, 377 bp, Homo sapiens
  misc_feature 1..377: note = U/M: U (0.04:0.87) in Lung Bronchial Epithelium
  misc_feature 1..377: note = source = chr5:132231880-132232256; Gene: AFF4 (exon)
  source 1..377: mol_type = genomic DNA
cgcctgggccttgggtttacccactattttccttcacagcttatgacccaccttgttactttgtggcttactgagatttccaccgcatttcagattctgatgtttcaaaacaaacaacaaaaacccttcacaaaccttatgcttcctcttgcctttgttggaaactttttctgaggcttgtttctgagcctctctcgtgtgcttttctggcacatttttcttttcccccttgggcggctctgtttctttgtaaggctttcctggtattctagtcaaaagattcaggtcaatcttcacaataagtgggtacctgtcatcaggctcactgaggggtgaaagaagttccttctcttccataggagagaacattcgttgcc

SEQ ID NO: 2987 - DNA, 229 bp, Homo sapiens
  misc_feature 1..229: note = U/M: U (0.1:0.92) in Lung Bronchial Epithelium
  misc_feature 1..229: note = source = chr11:120077845-120078073; Gene: OAF (Intergenic)
  source 1..229: mol_type = genomic DNA
cggaggtctcaagacacagaaaacttagacacctaaagaggatagagaggaagaaatatttcttttttatgtatttatttttttctttgagaccaactcgctctgttacccaggctggaatgcagtggcacgatctcagctcactgcagcctctgcctcctgggttcaagcgattctcgtgcctcagtcgccggagtagctgggattacaggcgcccaccaccacaccc

SEQ ID NO: 2988 - DNA, 417 bp, Homo sapiens
  misc_feature 1..417: note = U/M: U (0.12:0.94) in Lung Bronchial Epithelium
  misc_feature 1..417: note = source = chr17:64571956-64572372; Gene: PRKCA (intron)
  source 1..417: mol_type = genomic DNA
cgggcacgtggctcatgcctgtaatcccagcactttgggaggccaaggtgggtggatcatgaggtcaggagtttgagaccagcctaaccaacatggtgaaaccccatctctactaaaaatacaaaaattagccaggtgtggtgatgcatgcctgtaatcccagctactccggaggctgaggcaggagaagtgcttgaacctgggaggtggaggttgcagtgagccgagattgtgccactgcactccagcctgggcgacacacccagactccatctcaaacaaaaacttagaaacaaatattcatctaataactggaggaaaagcaaaataaatttcagatggaggctgtgctatgaagactgtcacagttggttacaacacagtgttcattgtaaggataccaaatttcatgtgcgc

SEQ ID NO: 2989 - DNA, 498 bp, Homo sapiens
  misc_feature 1..498: note = U/M: U (0.11:0.92) in Lung Bronchial Epithelium
  misc_feature 1..498: note = source = chr21:33872620-33873117; Gene: EVA1C (intron)
  source 1..498: mol_type = genomic DNA
cggctaatttttgtatcttttagtagagatggggtttcgccatgttggccagcctgatcttgaactcctgacctcaagtgatccacctgcctcagcctcccaaagtgctagaattacaggcatgagccatcatgcccagcccagagttaaccactctattgaggtgttattttccttaaaattctattacatgtgaatacaatgcaatgatttttagtaaatttagagttgtgcaaccatcactaccctccagttttaaaacattttcacaatgccccgaagctcccttgtgcccatttgccgtcactgccccattcccacccccccggtcccagataaccacgcatcaactttctgtctctagatttgccttttctgaatattttgtacaaatggaattatgcaatggatggttttgtgtgtgtgtgtgcgtggttggcttctttaactgaatgtgatgtttcagaggttcatccatgttgtagcatgtatcatatc

SEQ ID NO: 2990 - DNA, 107 bp, Homo sapiens
  misc_feature 1..107: note = U/M: U (0.09:0.89) in Lung Bronchial Epithelium
  misc_feature 1..107: note = source = chr12:98213200-98213306; Gene: MIR4303 (Intergenic)
  source 1..107: mol_type = genomic DNA
cgggggtttcaccatgttagccaggatggtgtcgatctcctgacctcgtgatccgcccacctccgcctcccaaagtgctgagattacaggcatgagccaccgcgccc

SEQ ID NO: 2991 - DNA, 197 bp, Homo sapiens
  misc_feature 1..197: note = U/M: U (0.06:0.84) in Lung Bronchial Epithelium
  misc_feature 1..197: note = source = chr18:44084653-44084849; Gene: LOXHD1 (intron)
  source 1..197: mol_type = genomic DNA
cgagttgggtttcgtcagtgaccgtgacagataggctagtcctccgcaggggtttggaagaagtgaggaacaacacaacattcaggacagctctgggcagccatttgggagacccagcaaaggctagagaaggctttgagcagatagctttgcagagacatgtttctacagaagacaaaagggtgaatgaagaaagc

SEQ ID NO: 2992 - DNA, 219 bp, Homo sapiens
  misc_feature 1..219: note = U/M: U (0.05:0.82) in Lung Bronchial Epithelium
  misc_feature 1..219: note = source = chr3:147749806-147750024; Gene: ZIC1 (Intergenic)
  source 1..219: mol_type = genomic DNA
cgtgcaggtctgctacataggtatacgtgtgccatggtggtttgctgcacccatcaacccgtcgtccaggttttaagcctgcatgtattaggtatttgtcctaatgctctccctccccttgcctcccatcacccaacaggcccccgtgtgtgatgttcccctccctgaatagacacttatttcaaaattgaatgaatttttttaagcctatccaaattc

SEQ ID NO: 2993 - DNA, 294 bp, Homo sapiens
  misc_feature 1..294: note = U/M: U (0.15:0.91) in Lung Bronchial Epithelium
  misc_feature 1..294: note = source = chr17:53331547-53331840; Gene: HLF (Intergenic)
  source 1..294: mol_type = genomic DNA
cgtctctactaaaaataccaaaattggctgggcgtgatggcacatgcctgtaatcccagctactcgggagactgaggcaggataatcaattgaacccaggaggcggaggttgccgtgagccaagatcgcgccactggactccaggctgggcaataagaatgaaactccatctccaaaaaaaaaaaaaaaagcaaaagaaagaaagaaaatcccatgggctgcctgccatcttcttaacaaagaaccagaatggttaggcaatggtatgagatacccagattactagttttcggc

SEQ ID NO: 2994 - DNA, 360 bp, Homo sapiens
  misc_feature 1..360: note = U/M: U (0.12:0.88) in Lung Bronchial Epithelium
  misc_feature 1..360: note = source = chr8:59582952-59583311; Gene: NSMAF (Intergenic)
  source 1..360: mol_type = genomic DNA
cggggatgtgagtcctccctttgtccagcatctccatgccacagatgttccctgccctttacacacttagtagccacctcagttatcagatggaaaaacatagtgtgtatagggttcggtactatctgaggtttctggcagccactggggacctcagaaggtattcctcacacatatggggagacttctgtataagttttccctcagtgttttggggatattccaggacttgcctatactctctgtgcaaataccaaattctcagatgctcaagtcctttatagtcggcctctgtatctgtgggttcttcatccatggattcaatcaaccgtgtctctaagggtggactgtactactttc

SEQ ID NO: 2995 - DNA, 131 bp, Homo sapiens
  misc_feature 1..131: note = U/M: U (0.11:0.86) in Lung Bronchial Epithelium
  misc_feature 1..131: note = source = chr8:72269986-72270116; Gene: EYA1 (intron)
  source 1..131: mol_type = genomic DNA
cgtaaaatttctaggtatgtttctacaatacgtgcaggatgaaaaacaatttttaaaagacgcttgagtataagataaaaattaaatttcaatgcctacagatgtgtcattccgtgataacaaccttctgc

SEQ ID NO: 2996 - DNA, 186 bp, Homo sapiens
  misc_feature 1..186: note = U/M: U (0.08:0.83) in Lung Bronchial Epithelium
  misc_feature 1..186: note = source = chr7:64711787-64711972; Gene: ZNF92 (Intergenic)
  source 1..186: mol_type = genomic DNA
cgggttcaagcgattctcctgcctcagcctaccgagtagctgagattacaggcgcccgctaccactcccagctaatttttgtatttttagtagagacggggtttcaccatgttggccaggctgctctcgaactcctgacctcgtgatctgcccgcctcggcctcccaaagtgctgggattacaggc

SEQ ID NO: 2997 - DNA, 217 bp, Homo sapiens
  misc_feature 1..217: note = U/M: U (0.19:0.94) in Lung Bronchial Epithelium
  misc_feature 1..217: note = source = chr3:57143301-57143517; Gene: IL17RD (intron)
  source 1..217: mol_type = genomic DNA
cgagtagtgggattacaggcgcctgccaccacgcctggctaatttttgtatttttagagagacagggtttcaccatgttggccaggctggtctcgaactcctgaccttgtgatctgcctgcctcggcctcccaaagtgctgggattagaggtgtgagccaccgcgcccggccttggcacgttcttgaacacatttctgtagaaaaatcattaaaagc

SEQ ID NO: 2998 - DNA, 354 bp, Homo sapiens
  misc_feature 1..354: note = U/M: U (0.14:0.85) in Lung Bronchial Epithelium
  misc_feature 1..354: note = source = chr2:231426805-231427158; Gene: LOC151475 (Intergenic)
  source 1..354: mol_type = genomic DNA
cgggcgtggtggcacctgtaatcctagccactcaggaggctgaggcaggagaatcacttgaactcaggagatggagcttgcagtgaactgagaccacaccactgcactccagcctgggtgacagagcgagactccatccccctccaaaaaatatatatatatatacctacagcatacttcacactcaatgatggaaagttgaaagctttctgatgattgcttgagaccaagacaaagtgctcaagcaagttgagaccaagaccaagtgctcctattaccccttttattcagcatcgtactggaggtctttgctggtgcagaaactcaaagaaaagaaatatatgttaaagaatc

SEQ ID NO: 2999 - DNA, 304 bp, Homo sapiens
  misc_feature 1..304: note = U/M: U (0.22:0.92) in Lung Bronchial Epithelium
  misc_feature 1..304: note = source = chr2:62030600-62030903; Gene: FAM161A (Intergenic)
  source 1..304: mol_type = genomic DNA
cgaaggagtaaagatattgcaaggatgttatctgcggccattgaggatttttcacaataagattaataaggccgggcgcagtggcttacgcctgtaatcccagcactttgggaggccaaggcaggtggatcacaaggtcaggagttcaagatcagcctggccaacatggtgaaaccccacctctactaaaaatataaaaattagctgggcatggtgacacttgcctgtaattccaacttctcaggaagctgaggcaggagaatggtgtgaactcgggacatggaggttgcagtgagctgagatc

SEQ ID NO: 3000 - DNA, 285 bp, Homo sapiens
  misc_feature 1..285: note = U/M: U (0.32:0.93) in Lung Bronchial Epithelium
  misc_feature 1..285: note = source = chr16:1752224-1752508; Gene: HN1L (TTS)
  source 1..285: mol_type = genomic DNA
cggggccagatgagatgaaagtcaacgcttgagaaagaaaaccaacatgcattaactgaaacaccgtcttcacttgttcatccacagggtatagagcgagttccaagaaccaggctaggaaatgacacgctaagtttcctatttctagcagctgccaaggccaccagcaagcatgggaacctctgggagtcacagctcctccgtctccagaggcctggcagtggccaagtctagaaggacgcgggtgccacctggtacagggtgagggtgtgaataacagacccc

SEQ ID NO: 3001 - DNA, 380 bp, Homo sapiens
  misc_feature 1..380: note = U/M: U (0.38:0.95) in Lung Bronchial Epithelium
  misc_feature 1..380: note = source = chr1:155691915-155692294; Gene: DAP3 (intron)
  source 1..380: mol_type = genomic DNA
cgggcgctatggctcacgcctgtaatcccagctgcactttgggaggccaaggtggaaggatcacttgggcccaggagttcgagaccagtctaggcaacatagggagacctgtctctacaaaaattaaaaattaaaaattagctgggcatgatgcacacctgtagtcacagctactcaggtggctgaggttggaggatcgcttgagctcaggaggtgagggcttcagtgagccatgattgcaccactgtaccccagcctgggcaacagagcaagaccttatctcaagcataaaataaaataaggtataacaggccaggcaaggtagtttatgcctgtagtctcagcactttgggaggtgaaggtgggaggattgtttgagc

SEQ ID NO: 3002 - DNA, 256 bp, Homo sapiens
  misc_feature 1..256: note = U/M: U (0.05:0.93) in Lung Bronchial Epithelium
  misc_feature 1..256: note = source = chr6:107980870-107981125; Gene: SOBP (exon)
  source 1..256: mol_type = genomic DNA
cgagttgcgggtgggcagggccaggacggtgtggcgccagccttgaagcaccacggcccaaggatgcggtgtacatactgtatttctagattctcctttgtacagagtcacttcacaagtcaagctactgttttacaggtgctccttatttattagagctgtgagagcttgggggacacacctggcgagcaagctcgctttttaaaaatgaaatttgggggcaggggaaggggaggcgggagggaggggaagctcg

SEQ ID NO: 3003 - DNA, 376 bp, Homo sapiens
  misc_feature 1..376: note = U/M: U (0.04:0.92) in Lung Bronchial Epithelium
  misc_feature 1..376: note = source = chr5:137191290-137191665; Gene: MYOT (Intergenic)
  source 1..376: mol_type = genomic DNA
cgtgggaggatcgcttgaacccggaaggtagaggttgcagtgtgccaggattacaccactgcactcaagcctgggcaacaaagcgagactccatctaaaaagaaaaaaataataaaaataaaataaaataaaaagaatccagatgttctggattaacctgtctgtaaccgatacctgctgctagtccgagtgtaaatacaatacactggaactaaattgtattaaaacccaatgagatttagaacaaatctattttttctctttcttgcaggtgctcagggaagtaaggaagttttatctctggaattgtggttgaaatgtgctacagaaatttcagggtaagtgcagaatctcatgtggatgtgcatttgttgcg

SEQ ID NO: 3004 - DNA, 226 bp, Homo sapiens
  misc_feature 1..226: note = U/M: U (0.04:0.9) in Lung Bronchial Epithelium
  misc_feature 1..226: note = source = chr13:80201369-80201594; Gene: NDFIP2-AS1 (Intergenic)
  source 1..226: mol_type = genomic DNA
cgctgattaataaataaatggataaataaaatgcggtatatacatgtaacagaatattattcagccttaaatgggaaggaaattctgacacatgctacaacatggatgaaacttgaggacattttgctaagtaaaataagccagttgtaaaaagacaattactgtataattctacgtaaatgaggaacctagcgtagccacactcatagaagcagaagatagaacg

SEQ ID NO: 3005 - DNA, 231 bp, Homo sapiens
  misc_feature 1..231: note = U/M: U (0.06:0.92) in Lung Bronchial Epithelium
  misc_feature 1..231: note = source = chr17:53331611-53331841; Gene: HLF (Intergenic)
  source 1..231: mol_type = genomic DNA
cgggagactgaggcaggataatcaattgaacccaggaggcggaggttgccgtgagccaagatcgcgccactggactccaggctgggcaataagaatgaaactccatctccaaaaaaaaaaaaaaaagcaaaagaaagaaagaaaatcccatgggctgcctgccatcttcttaacaaagaaccagaatggttaggcaatggtatgagatacccagattactagttttcggcg

SEQ ID NO: 3006 - DNA, 345 bp, Homo sapiens
  misc_feature 1..345: note = U/M: U (0.08:0.93) in Lung Bronchial Epithelium
  misc_feature 1..345: note = source = chr2:33447183-33447527; Gene: LTBP1 (intron)
  source 1..345: mol_type = genomic DNA
cgggttataagcgggttaacaacaccttttgccaaggtaagactaactgaattcattgatgtggactcaacagttgttttggctttttagaaacttcagttgtttgccacggcttgctcattcgcccagcctgtcacagtgaaccacctcatgttcactccttttggctaaggaaatgtaaggaaataagtttaaaatatggttattggaattgctttactaccactgaaacttgatgcaagtttttaatctaaaagagtttggatagaatttaaaagagtttggatcacattagagagcacactgtggtttccatgctagtcacctcatatcctttcatgggcg

SEQ ID NO: 3007 - DNA, 402 bp, Homo sapiens
  misc_feature 1..402: note = U/M: U (0.05:0.9) in Lung Bronchial Epithelium
  misc_feature 1..402: note = source = chr2:61359540-61359941; Gene: KIAA1841 (intron)
  source 1..402: mol_type = genomic DNA
cgcatgaaaagttgctcaacatcattggccatcagggaaatgcaaatcaaaaccacagtgagatatcactttaacgctcagtagaatggctataagcaaaaagctacataacaacaaatgttgccaaggatgtggagaaattggaaccctctacactgctgatgggaatgtaaaataatgcagccactttgaaaagccacctgtcagctcttcaaaaagttaaacatatagagttaccatatgacccagatatatacgcaaaagaattgaaaacaggtactcaaaccaatacttgtacacaaatgttcatagcaacactattcacaatagccaaaatgtggaaacaacccaaatgtctattgactgataaatggagaaagaaaatgtcgtatgtctataccg

SEQ ID NO: 3008 - DNA, 92 bp, Homo sapiens
  misc_feature 1..92: note = U/M: U (0.03:0.87) in Lung Bronchial Epithelium
  misc_feature 1..92: note = source = chr2:206421572-206421663; Gene: PARD3B (intron)
  source 1..92: mol_type = genomic DNA
cgaacatcaacgtatgtgtttttgcaaacggctcctttttcactccagcctgccagccgctcgcaattctcccaggtcccattctgatttcg

SEQ ID NO: 3009 - DNA, 204 bp, Homo sapiens
  misc_feature 1..204: note = U/M: U (0.08:0.92) in Lung Bronchial Epithelium
  misc_feature 1..204: note = source = chr10:13789249-13789452; Gene: FRMD4A (intron)
  source 1..204: mol_type = genomic DNA
cgggccaggcgtggtagctcacccctgtaatcccagcactttgggaggccgaggcaagcggatcacctgagtgaggtcaggagtttgagaccagcctggccaacatggtgaaacccggtctctactaaaaatacaaaaattagccaggtgtggtggtgcgtgcctgtaatcccagctactcaggaggctgaggcaggagaatcg

SEQ ID NO: 3010 - DNA, 412 bp, Homo sapiens
  misc_feature 1..412: note = U/M: U (0.05:0.89) in Lung Bronchial Epithelium
  misc_feature 1..412: note = source = chr2:68057829-68058240; Gene: C1D (Intergenic)
  source 1..412: mol_type = genomic DNA
cgaactcctgacttcaagtgagccacctgcctcggcttcccaaagtgctggaattacaggcatgagccaccttgcccagccattcatgctttttaaaagctcccccggtgattcaaagttgagaaccactgctctacctagatcatattccaacacacaatgacagtttctttttctcttccaaaagctaagatgtttacatttcaagtgaactgactctctgtgaatctcagagttgagagaagctctgaagcttctcaatgcagtaggtgtctcaagattctgagatcatttacaaccagctaacacaaggcacgatacgtccagccctccttctcttttgctttattcttgctagtccaggtctcttggcatgaaatcctgagaaagtttattcgtgggagaagctccg

SEQ ID NO: 3011 - DNA, 39 bp, Homo sapiens
  misc_feature 1..39: note = U/M: U (0.11:0.93) in Lung Bronchial Epithelium
  misc_feature 1..39: note = source = chr21:36192712-36192750; Gene: RUNX1 (TTS)
  source 1..39: mol_type = genomic DNA
cgaggcgggcggatcacctgtggtcaggagttcgagacg

SEQ ID NO: 3012 - DNA, 161 bp, Homo sapiens
  misc_feature 1..161: note = U/M: U (0.05:0.87) in Lung Bronchial Epithelium
  misc_feature 1..161: note = source = chr4:124277967-124278127; Gene: SPRY1 (Intergenic)
  source 1..161: mol_type = genomic DNA
cgagtagctgggattataggtgcctgccaccacccccagctaatttttgtatttttagtagagacaggttttaccacgttagccagactggtctcgaactcctgaccttactgcctcagcctcccaaagtgttggattactggcgtgggacaccacacccg

SEQ ID NO: 3013 - DNA, 93 bp, Homo sapiens
  misc_feature 1..93: note = U/M: U (0.14:0.95) in Lung Bronchial Epithelium
  misc_feature 1..93: note = source = chr14:90006939-90007031; Gene: FOXN3 (intron)
  source 1..93: mol_type = genomic DNA
cgagcgtggtcgcacgcacctgtggtcccagctacttgggaggctgaggcaggagactcgcttgaactgggaggcggaggctgtagtgagccg

SEQ ID NO: 3014 - DNA, 132 bp, Homo sapiens
  misc_feature 1..132: note = U/M: U (0.09:0.9) in Lung Bronchial Epithelium
  misc_feature 1..132: note = source = chr16:4345479-4345610; Gene: TFAP4 (Intergenic)
  source 1..132: mol_type = genomic DNA
cgggcgtggtggtccacgcctgtaatcccagctactccagaggctgaggcacaagtatcgcttgaacttgggaggcagagcttgcaatgagcagagatttcaccattgcactccagcctgagcgacagagcg

SEQ ID NO: 3015 - DNA, 197 bp, Homo sapiens
  misc_feature 1..197: note = U/M: U (0.05:0.86) in Lung Bronchial Epithelium
  misc_feature 1..197: note = source = chr16:14108508-14108704; Gene: MKL2 (Intergenic)
  source 1..197: mol_type = genomic DNA
cgagaccagcctggccaacatggtgaaaccccgtctctactaaaaatgcaaaaaagaaaaaaagaaaattagccgggcatggtggtgggtgcctgtaatcccagctactcaggaggctgaggcagggagaattgcttgaacccagaaggcggaggttgtagtgagctgagatcgtgccactgcactccagcctggcg

SEQ ID NO: 3016 - DNA, 250 bp, Homo sapiens
  misc_feature 1..250: note = U/M: U (0.11:0.92) in Lung Bronchial Epithelium
  misc_feature 1..250: note = source = chr11:27461641-27461890; Gene: LGR4 (intron)
  source 1..250: mol_type = genomic DNA
cgtggtttcaccatgttggccaggatggtcttgaactcctgacctcaggtgatctgcccgcctcggcctcctaaagtactgggattacaggcgtgagccactgcacccagccttgaggtaggatttctacaatgcatcttgaccacagtggaggggtgtggagaggcacggagcacatgggaaggaatacacctgcccacccagcagatggacccttctccaaaccaatcctgaaagccaacccagaccg

SEQ ID NO: 3017 - DNA, 270 bp, Homo sapiens
  misc_feature 1..270: note = U/M: U (0.12:0.93) in Lung Bronchial Epithelium
  misc_feature 1..270: note = source = chr10:70192040-70192309; Gene: DNA2 (exon)
  source 1..270: mol_type = genomic DNA
cgaaagtcaataattaaatctcgaagttttttgctgaaaagtgaaaaagcacttttagtaatattccttagaaaagtggagtgaaattcaaatttgctcattgttacaaacctgacaaacgtgttttccatcaatttggaaagatttcctaatggggtatctatatcacaatttttttcttcttggtctaatctgaacaaagttgattctggaaggaccgacaagtttctaaaacaacaaaacaaatatacatgaatgctcgccatttcg

SEQ ID NO: 3018 - DNA, 293 bp, Homo sapiens
  misc_feature 1..293: note = U/M: U (0.08:0.89) in Lung Bronchial Epithelium
  misc_feature 1..293: note = source = chr17:71045999-71046291; Gene: SLC39A11 (intron)
  source 1..293: mol_type = genomic DNA
cgcctataatcccagcacttcagcaggctgaggcaggcagatcacttgagtccaggactttgagaccagcttggccaacatggtgaaaccccatccctactaaaaatacaaaaattagccgggcggagtggcacgtctgtaatcccagctactcaggaggctgaggcacgagaatcacttgaacccgggaagaagaggttgcagtgagctgagattgcaccactgcactccagcttgggcaacagagtgagactgtctctatttaaaagcaaacaaacaaacaaacatgtccg

SEQ ID NO: 3019 - DNA, 136 bp, Homo sapiens
  misc_feature 1..136: note = U/M: U (0.1:0.9) in Lung Bronchial Epithelium
  misc_feature 1..136: note = source = chr2:97080460-97080595; Gene: NCAPH (Intergenic)
  source 1..136: mol_type = genomic DNA
cgtggcggcgggtgcctgtaatcccagctacttgggaagctgagacaggagaattgcttgaacccgggaggtggaggttgcagtgagccgagatcgcaccgttgcactccagctgggcaacaagagagaaactccg

SEQ ID NO: 3020 - DNA, 220 bp, Homo sapiens
  misc_feature 1..220: note = U/M: U (0.12:0.92) in Lung Bronchial Epithelium
  misc_feature 1..220: note = source = chr3:4401572-4401791; Gene: SUMF1,SETMAR (TTS,Intergenic)
  source 1..220: mol_type = genomic DNA
cgcctcgacttcccaaagtgctgggattataggtatgagccaccgtccccaacttaggaattcattttaaatgccttccagtattatgctgctgctagaaatgcaattctaaaaagtacacccaaaacaccaaaaatacttacgcaatgtaacattaacaagacaagaattcaaaatagacacaccataaatataacaatgtaaaaaatatatgcaggcg

SEQ ID NO: 3021 - DNA, 256 bp, Homo sapiens
  misc_feature 1..256: note = U/M: U (0.12:0.92) in Lung Bronchial Epithelium
  misc_feature 1..256: note = source = chr16:58613625-58613880; Gene: CNOT1 (intron)
  source 1..256: mol_type = genomic DNA
cgcgctctctccctgtagccctgcgtacttcaaaaatgatcaaagtacttgtaccattctttcttcacacattcacagagaggaatgacgggacagagttccaagagaaacctgatatacacaccaggccggactaagattctacctcgaaaatttgaaactggaactcagagaaactagatactttagctgaaaagcattagatttggccaggtgctgtagctcacacctgcaatcccagcactttgagagaccg

SEQ ID NO: 3022 - DNA, 299 bp, Homo sapiens
  misc_feature 1..299: note = U/M: U (0.12:0.92) in Lung Bronchial Epithelium
  misc_feature 1..299: note = source = chr3:141828866-141829164; Gene: TFDP2 (intron)
  source 1..299: mol_type = genomic DNA
cgggcgcatgccaccacacccagctaatttttgtattttttgtagagatggagtttcgccacattgcccaggctggtcttgaaatcctaaactcaagagatccacccatctaagtctcccaaagtgctgggattacaagcatgagccaccacgcccagtccattgctcacttttaaaaattgaagaaaaaaaaaatgcagccaggcacggtggctcacgtctgtaatcccagcactttggtaggccaaggcaggcagatcacctgaggtcaggagtttgagaccagcctggtcaacacg

SEQ ID NO: 3023 - DNA, 81 bp, Homo sapiens
  misc_feature 1..81: note = U/M: U (0.06:0.85) in Lung Bronchial Epithelium
  misc_feature 1..81: note = source = chr2:233979823-233979903; Gene: INPP5D (intron)
  source 1..81: mol_type = genomic DNA
cgcctcagcctcccaaagtgctgggattgcaagcgtgagccatcgcgcctggcctgtttcccagttcttaatactgtcccg

SEQ ID NO: 3024 - DNA, 348 bp, Homo sapiens
  misc_feature 1..348: note = U/M: U (0.04:0.83) in Lung Bronchial Epithelium
  misc_feature 1..348: note = source = chr2:28941738-28942085; Gene: PPP1CB (Intergenic)
  source 1..348: mol_type = genomic DNA
cgggagaatcacttgaggtcaggagttcaaaaccagcctggccaaaatagcgaaaccccatctctacttgaaaaataaaatacaaaaatcatctgggcatggtggcacaggcctgtagccccagctactcgagaggctaaggcaggagaattgcttgaacctggcagagggaagctgcagtgagctgagatcgcaccactgcactccagcctgggggacagagtaagactctgtctcaaagagaaaaaagaaaaaattgttccttttcagtaaacataaaaaccacatacccttgtttaaaatggtttgaaatttcaaactaaatagagtgactggaaaaaacatgcg

SEQ ID NO: 3025 - DNA, 227 bp, Homo sapiens
  misc_feature 1..227: note = U/M: U (0.11:0.89) in Lung Bronchial Epithelium
  misc_feature 1..227: note = source = chr15:84557339-84557565; Gene: ADAMTSL3 (intron)
  source 1..227: mol_type = genomic DNA
cggtctctaaggtaccgggggtacttgaatggactttcctagtcccgtctgtaatcgtcgatgtgagacacttgagatcaatttggagaaggtacctagattgccattgccatctgatatcgttgactttctggcagatattggcacccaagtaacattttattgactccatttggattttcattcttgcggtttcgaccttgctttttataatgcataccagtccg

SEQ ID NO: 3026 - DNA, 67 bp, Homo sapiens
  misc_feature 1..67: note = U/M: U (0.08:0.85) in Lung Bronchial Epithelium
  misc_feature 1..67: note = source = chr8:32160407-32160473; Gene: NRG1 (intron)
  source 1..67: mol_type = genomic DNA
cgaacctgtggccgagcacgggggctcacgcctgtaatcctagcactttcggaggccgaggagggcg

SEQ ID NO: 3027 - DNA, 132 bp, Homo sapiens
  misc_feature 1..132: note = U/M: U (0.08:0.85) in Lung Bronchial Epithelium
  misc_feature 1..132: note = source = chr17:56027864-56027995; Gene: CUEDC1 (intron)
  source 1..132: mol_type = genomic DNA
cgctctgtcgcccaggctggagtgtaacgctgtgatctctgctcactgaaacctccgcctcctgggttcaagctattctcctgcctcagcctcctgggtagctgagattacaggcgcccaccaccatgcccg

SEQ ID NO: 3028 - DNA, 448 bp, Homo sapiens
  misc_feature 1..448: note = U/M: U (0.09:0.86) in Lung Bronchial Epithelium
  misc_feature 1..448: note = source = chr18:75987918-75988365; Gene: SALL3 (Intergenic)
  source 1..448: mol_type = genomic DNA
cgagacttggtctcaaaaaaaaaaaacaccgcaattcatccttgaaaccgagatgtattgtgtactaagagaaaatcttgttcaattgtacaagtgaatttatactcagagacaaataatgtaattgatattttgaaggaagtatttattattaaaagaccgtctagattttctatttccttaccgagcaaatgacatgcttcatgggactgtgtaagaagaaagacaaccacaagtacactaagctgtgctccctgtgaaaacattcttctcactcctgggcaaggcaaaggaaggcggggaaattcgcaaaatgcctccaaataggtggaagaacattcccggtggggagacgggtccggcggactcatgcatccactaaggtgttggaagacaattcctcagaaacttccctctgtctttgaacagaatggcttagactctagcg

SEQ ID NO: 3029 - DNA, 202 bp, Homo sapiens
  misc_feature 1..202: note = U/M: U (0.14:0.9) in Lung Bronchial Epithelium
  misc_feature 1..202: note = source = chr4:95632650-95632851; Gene: PDLIM5 (Intergenic)
  source 1..202: mol_type = genomic DNA
cgccaggctggagcacagtggtgtgatctcagctaactgcaacctctgcctcctgggttcaagcgattctcttgcctcagctccgagtagctagaattataggcgtccgccaccttgcccggcttagtttttgtgtttttagtagagatggggtttcaccatgttggccaggctggtgtcgaatttgacctcaagtgatccg

SEQ ID NO: 3030 - DNA, 371 bp, Homo sapiens
  misc_feature 1..371: note = U/M: U (0.13:0.89) in Lung Bronchial Epithelium
  misc_feature 1..371: note = source = chr19:47266433-47266803; Gene: STRN4 (Intergenic)
  source 1..371: mol_type = genomic DNA
cgggcgtgatggtgggtgcctgtaatcccagctactcaggaagctgaggcaggagaattgcttgaacctgggaggtggaggttgcagtgagccgagattgcaccactgcactccagcctgggcaacagagcaagattctgtctcaaaaataaaataaggtaaataaaaaataaaaaacctgtctacaaatgcacctttatgcacaatagccccaacctggaaaccatcagatgtaaatcaacaggtgggtggataagcaaactgtggtacactcagacaacataatactccttagcaagttttttaaaaaaggaaagaactgggccggacgtggtggctcacgcctgtaatcccagcactttgggaggtcg

SEQ ID NO: 3031 - DNA, 438 bp, Homo sapiens
  misc_feature 1..438: note = U/M: U (0.12:0.88) in Lung Bronchial Epithelium
  misc_feature 1..438: note = source = chr11:67488307-67488744; Gene: ALDH3B2 (Intergenic)
  source 1..438: mol_type = genomic DNA
cgacttggcctcccagagtgctgggattacaggcctgagccaccgcacctggccaaggtttccttttttcttcctacatagaagtgaggacatgaaatatttgtcattctgtgcctggcttctttcatttaatatacagacctgcaatctcatccattttgtctgcagcggagaggagtttcttccttttttggatgaataatacttcactgggtgtgtataccacagtttcttcattgaaacaaatttctgaagagcaaatatttttaaaatgtctcgggatgtgaaacttcagggatactgtgcccattttattctttactatttcccatcttatgtatatgcaagtgtataacaaagcagcaatcaatgtgtgtataaatctataacttcaacagatgtaaaatgtaaatgctaagtggtggctgggtgcggtcg

SEQ ID NO: 3032 - DNA, 56 bp, Homo sapiens
  misc_feature 1..56: note = U/M: U (0.15:0.9) in Lung Bronchial Epithelium
  misc_feature 1..56: note = source = chr17:4549899-4549954; Gene: ALOX15 (Intergenic)
  source 1..56: mol_type = genomic DNA
cggcccgcctcggcctcccaaagtgctgggattacaggcgtgagccactgcacccg

SEQ ID NO: 3033 - DNA, 144 bp, Homo sapiens
  misc_feature 1..144: note = U/M: U (0.12:0.87) in Lung Bronchial Epithelium
  misc_feature 1..144: note = source = chr2:118875322-118875465; Gene: INSIG2 (Intergenic)
  source 1..144: mol_type = genomic DNA
cgatggggttcaaaggaaggagcagacccagctggaggaggccaaggcctttctccttggatggtatggacaggaaacccacgtggacagattcgtgcatgttctctcaagaaccgaaagtctggtctggtggtagtaaagtcg

SEQ ID NO: 3034 - DNA, 430 bp, Homo sapiens
  misc_feature 1..430: note = U/M: U (0.09:0.84) in Lung Bronchial Epithelium
  misc_feature 1..430: note = source = chr12:70367811-70368240; Gene: RAB3IP (Intergenic)
  source 1..430: mol_type = genomic DNA
cgcgttattggcatttctgtcccccagaacagtaaggaatttggttaccctgggccatggctggggcactggttagcagctgcccctcctgctcattttgcggctctatttcaacaagacttgaaaacctttgtcttcagagaactctccggctctaagcttttgtgcttttgtttggagcagcctgttcttgtacttgtagtttcaggtaaggcatctgatgtgtaattaaaggataaacacagagagaaataaaagtattttattacttatatgaagtgaagtaggtgcaaataataaaaagtgcaaatgaatttgagagaggaattgtgcaagcccttaaggggctattacccatctttaaaaaccaagagttgcttaacatgttactactttgtattttcatcttcatttagaacataaatttacg

SEQ ID NO: 3035 - DNA, 431 bp, Homo sapiens
  misc_feature 1..431: note = U/M: U (0.11:0.86) in Lung Bronchial Epithelium
  misc_feature 1..431: note = source = chr1:168809120-168809550; Gene: LINC00626 (Intergenic)
  source 1..431: mol_type = genomic DNA
cgaattgacttggggagtttttgcttgcttcctttcctctggaaaaatgcttataagatgaaagtatgtgttatattctctattgataggtaaagtgttctaagcatgtctacttaatcaagcttataaacacgaatattcaaatatttatatcttcaccagtttttattagcttcatctaccagtttttgatgggaggtaaaaaaaatctcccatttcgattttgtatttgtcagtttctgtttgtagtatgtaatgattattatattttcctgatgtacctttttttgttgttgttgtttgtttgtttttgattttgtttttctcatcttttttgagacagagtttcactcttgtcacccaggctggagtgcagtggcgtgatctcagctcactgcaatatctgcctcctgggttcaagcaattctccg

SEQ ID NO: 3036 - DNA, 157 bp, Homo sapiens
  misc_feature 1..157: note = U/M: U (0.15:0.89) in Lung Bronchial Epithelium
  misc_feature 1..157: note = source = chr8:122873916-122874072; Gene: HAS2 (Intergenic)
  source 1..157: mol_type = genomic DNA
cgaatagctgggattataggtgcctgccaccacgcccagctaatttttgtatttttagtagagatagggtttcgccaggttggccaggctggtcttgaactgctgacctcaggtgatccacccgcctcggcctcccaaaatgctgggattacaggcg

SEQ ID NO: 3037 - DNA, 245 bp, Homo sapiens
  misc_feature 1..245: note = U/M: U (0.07:0.81) in Lung Bronchial Epithelium
  misc_feature 1..245: note = source = chr12:52071638-52071882; Gene: SCN8A (intron)
  source 1..245: mol_type = genomic DNA
cgcaatccaatttcaatttcccttttaactcatttacttcacaaagatctaatttgagacagattaggtaaaatattattggacttcatgggcaccaagtgattgttgtttaagaagtattgtaaaaacccaaagcttgctgtcctttccactatatctaggctttgaaggatctggcgttagagcgtagtgttgaacgagagaggacaaatgtccttttctggattcccaccagaagtttaacg

SEQ ID NO: 3038 - DNA, 266 bp, Homo sapiens
  misc_feature 1..266: note = U/M: U (0.1:0.84) in Lung Bronchial Epithelium
  misc_feature 1..266: note = source = chr13:24248486-24248751; Gene: TNFRSF19 (exon)
  source 1..266: mol_type = genomic DNA
cgtgagaacacaccacatgttaggactagaagaaaatgcacaatttgtaggggtttggatgaagcagctgtaactgccctagtgtagtttgaccaggacattgtcgtgctccttccaattgtgtaagattagttagcacatcatctcctactttagccatccggtgttggatttaagaggacggtgcttctttctattaaagtgctccatcccctaccatctacacattagcattgtctctagagctaagacagaaattaaccccg

SEQ ID NO: 3039 - DNA, 471 bp, Homo sapiens
  misc_feature 1..471: note = U/M: U (0.1:0.84) in Lung Bronchial Epithelium
  misc_feature 1..471: note = source = chr13:25509965-25510435; Gene: TPTE2P1 (intron)
  source 1..471: mol_type = genomic DNA
cgctatactgacggccctttcccagttcacagggaaaaatcaggaacagggagagaattttcaaaatattaagtttccccatagaattttctgaagaactttggtgtatgttgccacttgttcactaacaagttctagcagatgacagaacaatgaggaagtagctaattaatattaatgaacaacctcagaatttttctgagtgttgaatagacttgaatattcaacagtctcaaatatttgacaccatttagtggacacagacttgactcgatatgcttattctaccaagttgttcctggtttacgtgacacaactgaatgtatgccagtttcatgggggactctcagatattctgaaggtacctaatcaagtcagtatagtgggaaggagagagaaacagaagcctcatttgtgaaatagtacttgagtttgtgcgtgaagaatggataggatttagactgagaagcg

SEQ ID NO: 3040 - DNA, 194 bp, Homo sapiens
  misc_feature 1..194: note = U/M: U (0.16:0.89) in Lung Bronchial Epithelium
  misc_feature 1..194: note = source = chr10:74846359-74846552; Gene: P4HA1 (intron)
  source 1..194: mol_type = genomic DNA
cgtgaattattactcaataaaactgttttaaaaaaattaaaaagaaaacaggctgggagcggtggctcacgcctgtaatcccggcactttgggaggctgaggcaggcagatcacttgaggtcaggagttcaagaccaacctggccaacatggtgaaaccccatctctactaaaaatacaaaaattagccaggcg

SEQ ID NO: 3041 - DNA, 314 bp, Homo sapiens
  misc_feature 1..314: note = U/M: U (0.11:0.84) in Lung Bronchial Epithelium
  misc_feature 1..314: note = source = chr6:158196250-158196563; Gene: SNX9 (Intergenic)
  source 1..314: mol_type = genomic DNA
cgtggtggcacacacctatagtcccagccacttgggaagctgaagcaggagaattgcttgaacctgggaggtggaggttacagtgagccgagatcgcaccaccacactccagcctgggtgacagaggagactctgtctctcaaaaaaaaaaaaaaacttaagcagcaggctggctcttgctgggagccttgaaagtttttaaaaaatcaggacccactccagttttctttcagagaaagaaaccggatctttctcctccaggccagtcgtatgccaggaggcttggcccattttcccttggtacctccactccg

SEQ ID NO: 3042 - DNA, 317 bp, Homo sapiens
  misc_feature 1..317: note = U/M: U (0.21:0.94) in Lung Bronchial Epithelium
  misc_feature 1..317: note = source = chr9:123360632-123360948; Gene: CDK5RAP2 (Intergenic)
  source 1..317: mol_type = genomic DNA
cggctcactgcaaactccgcctcccaggttcaagcaattttcctgcctcagccccctgagtaagtgagatcacaggcacccgccaccatgcctggcttaattttgtattttagtagagatggggtttcaccatgttggccaggctggtctcgaactcctgacctcaggtgatccacccatctcggtctcccaaaatgctgggattacaggcatgagccactgtgccgggccgatcatggatccttttgagacaatgattaaagtatgggtcttctctccagaaaaaaagaaacacaattgcatcaataaacaaaacg

SEQ ID NO: 3043 - DNA, 330 bp, Homo sapiens
  misc_feature 1..330: note = U/M: U (0.15:0.88) in Lung Bronchial Epithelium
  misc_feature 1..330: note = source = chr10:129014611-129014940; Gene: DOCK1 (intron)
  source 1..330: mol_type = genomic DNA
cgaaaccaacctgaaagcgcaggatacagatacttatgggcagagagagactattgcctgtctttggaagcattgccagctattgctgggaagaccactcctgcttagaggggtggaattctttctgagctagcttgtcctggaagtctccgccccaagagtgttcttgatgcgtgtgccttacagccattgggctgggcaacctcacctttccattggctggaaaatgaagaggataaaccccactctcatatgtaggcaaaaggttccttttgataaagtcgtgatttctccatctcaataataatagtaatgcacccatcccaaccg

SEQ ID NO: 3044 - DNA, 357 bp, Homo sapiens
  misc_feature 1..357: note = U/M: U (0.07:0.8) in Lung Bronchial Epithelium
  misc_feature 1..357: note = source = chr2:218071757-218072113; Gene: TNP1 (Intergenic)
  source 1..357: mol_type = genomic DNA
cgtttatttttctctcatcttagttcctttctttacaagaagaatctaacttgccagacacggcttaagtgacgtgtgactggagaaggcccatgctcagggggatagattttaagatgcagctgcctgttaatggacttggtgaaaagactgggtaagatatcattcatttttcgtagaggagacaaagatcagattgtggggaggtgatgagagattcctctataagcagagctggagactcctgtgtatcaggtatcttgtgcctggcagtctccacaaatccacaagtatttgcttctctctctatcgcagcctctaaaaggttagataataacaaaggcaagactcatgtcg

SEQ ID NO: 3045 - DNA, 435 bp, Homo sapiens
  misc_feature 1..435: note = U/M: U (0.16:0.89) in Lung Bronchial Epithelium
  misc_feature 1..435: note = source = chr1:24855202-24855636; Gene: RCAN3 (intron)
  source 1..435: mol_type = genomic DNA
cgaaagtgaccaaatgtacgaaaaaataacacatccacctaatagtgggagaatctaatagatctttcctgataatagttgaaacagacccccaaaaaatcaggatatagaacttgtaaagcacaggagctggatatactgaacatgtttataatactgtaccaaacagctgcgcaaacacactctttgtaagcacatgtagatttatgaaatttgatgacactgaaccaaaagcaagcctcaaactgtcaaaggattactatcactgtggatagcctactccaatcagagggaaaatgagttagacattaaaaagataaaaaactcccatctatttgcaatttgagaaacatacatctaaataattcatgagacagggagagatcataagggaaattagagagtatttagaatcaactggcgcagttgctcacg

SEQ ID NO: 3046 - DNA, 486 bp, Homo sapiens
  misc_feature 1..486: note = U/M: U (0.17:0.9) in Lung Bronchial Epithelium
  misc_feature 1..486: note = source = chr13:50142996-50143481; Gene: RCBTB1 (intron)
  source 1..486: mol_type = genomic DNA
cggaggttgcagtgaactgagattgtgccactgaactccagcctggtgacagagcgagactctgtctcgaaaataaaaaataatgatcagaataattgcaacaataacaactaacttactgggcactatgtgccaagcactatttttagaaaatttatatttattcattcatttaatcctcactttaccaataaggaaatggagaaaaagagattttaagaagtggcagagtcgggatctgcacccaggcaacctgaagcctgagtctgaactcttcacctctcactcacattttaagagcccactgtcagccttttgtgcaaagtgcctatctttttctactggatcattgttctttttcttgttcttgatttataagtattctttgtatggtaagatgatcttaaatgcttttaaaagtttaaaaataaaggctgggcgcagtagctcacgcctgtaatcctagcactatgggagcccaagccg

SEQ ID NO: 3047 - DNA, 157 bp, Homo sapiens
  misc_feature 1..157: note = U/M: U (0.19:0.91) in Lung Bronchial Epithelium
  misc_feature 1..157: note = source = chr3:13287610-13287766; Gene: NUP210 (Intergenic)
  source 1..157: mol_type = genomic DNA
cgagcatccatcaatggatgaatatacaaacaaaatgcggcctatccatgcaagggactattagccctacaaaggaagaaggttctgggccgcactgccacatgggtgaaccttcagggtgtgccgcagagtaaaacaagccgatcaccaaaggccg

SEQ ID NO: 3048 - DNA, 305 bp, Homo sapiens
  misc_feature 1..305: note = U/M: U (0.23:0.95) in Lung Bronchial Epithelium
  misc_feature 1..305: note = source = chr19:10271487-10271791; Gene: DNMT1 (intron)
  source 1..305: mol_type = genomic DNA
cgagacgtagaggttgcagtaagcagagatcatgccactgcattccagcctgggcgacagagtgagtgagactccatctcaaaataaatgaataaataaatctcataaccaaagacttcctgaaaagatttagaggaaaagccaattttttaaaaccttagctttcctgtgtaagtggacacctcaaggtaaacaaataattggccaggcacagggccgggcgcgatggctcacgcctgtaatcccagcactttgggagaccgaggcggatggatcacgagatcaagagattgagaccatcctcg

SEQ ID NO: 3049 - DNA, 320 bp, Homo sapiens
  misc_feature 1..320: note = U/M: U (0.22:0.94) in Lung Bronchial Epithelium
  misc_feature 1..320: note = source = chr12:39751580-39751899; Gene: KIF21A (intron)
  source 1..320: mol_type = genomic DNA
cgggtgcctataatcccagctactcaagaggctgagacaggagaatcatttaacccgggaggcggaagttgcagtgagccgagatcacgccactgcactccagcgtgggtgatagagggagactccatctcaaaaaaaaaaaaaaaaaaaaaaaaaaaaaaaaaaaaaaaaaaaaaaaattgggtaggaaagcttttgaacaaacagttgttaagttagactgaacatagttaaagactgtccacaaggaaaactagagactcttacctccaaaaggaaggaggacactattatgacaaccaagagattccagaaacacg

SEQ ID NO: 3050 - DNA, 332 bp, Homo sapiens
  misc_feature 1..332: note = U/M: U (0.2:0.92) in Lung Bronchial Epithelium
  misc_feature 1..332: note = source = chr7:70256599-70256930; Gene: AUTS2 (exon)
  source 1..332: mol_type = genomic DNA
cgggcttttcacaaaagcccgcctaactcaaaggagccttttcaaatccatttacagcatacttaaggtcatattttccctgaacaagcgcttacgtgatatgactctgttttccttgcttgttttttttcaaacggagaaacatcctgttttgcaaattggaccccaggctggaacttagcatctgaagttgccgcttgtgggctctgggggaaagtgtagccccggagaggtaactgaggacatgagcaaccagtgccagggagggtgggatttgccagatgccaaaatcaggggacgggtggtggtgtctgtcagacacacacaggtcg

SEQ ID NO: 3051 - DNA, 360 bp, Homo sapiens
  misc_feature 1..360: note = U/M: U (0.21:0.93) in Lung Bronchial Epithelium
  misc_feature 1..360: note = source = chr4:124427917-124428276; Gene: SPRY1 (Intergenic)
  source 1..360: mol_type = genomic DNA
cgggactggggatacactaggaccatcagatcccacccccagtcagtctgaaatgaattcaaccaaccgtccacacatataagtctcagtttttgtttaaaacatgcagtcaggcgaggcgcagtggctcacgcctgtaatcccagcactttcggaggcccaggcgggcggatcacttgaggtcaggagtttgagaccagcctcgccaagacggtgaaaccctgtctctactaaaaaatacaaaaattagccgggcttggatcccagttactcaggaggctgagatgggagaatcgtttgaacccagaaggcggaggttgcagtgagcccaaatcgtgccactgcactctagcttgggcg

SEQ ID NO: 3052 - DNA, 134 bp, Homo sapiens
  misc_feature 1..134: note = U/M: U (0.17:0.88) in Lung Bronchial Epithelium
  misc_feature 1..134: note = source = chr7:92105316-92105449; Gene: GATAD1 (Intergenic)
  source 1..134: mol_type = genomic DNA
cgtatcaattactgaatacccattgtggtttttttcctcaatcacctgggaggaaccatctatcgtcctgtcctgaagggagttccgcctaggtctggtcggacctttgtatggtaattaagatttaaatcccg

SEQ ID NO: 3053 - DNA, 163 bp, Homo sapiens
  misc_feature 1..163: note = U/M: U (0.15:0.86) in Lung Bronchial Epithelium
  misc_feature 1..163: note = source = chr8:146007799-146007961; Gene: ZNF34 (intron)
  source 1..163: mol_type = genomic DNA
cgggaggtggaggttgcagtgagttgagattacatcactgcacattccagtctgggcgacagagtgagactctgtccaaaaacaaaaaacaaaaaacaaaagaaaagaaatcagatacagaataagaaagtaactcaaggagggccgggcacggtggctcacg

SEQ ID NO: 3054 - DNA, 485 bp, Homo sapiens
  misc_feature 1..485: note = U/M: U (0.13:0.84) in Lung Bronchial Epithelium
  misc_feature 1..485: note = source = chr2:74446080-74446564; Gene: SLC4A5 (intron)
  source 1..485: mol_type = genomic DNA
cgcatctggtctcaccctgtaaacctatcttcacattgctgccaaggtgaacttttgaaatcacaaatttggtgattcctcattgggttcaaagaatctaagctccttagtgtgagaagacaggagtgtcttgtcttctcacaaacacaaacacagtcttctgtgtttgtagtcctgcctgcttagtttgccccatccattgcagtgttctttgctctttggaggtgtgtgtgtgtgtgtgtgtgtgtgtgtgtgtgtgtgtgtgtgtttgtgtgtgttttcaaatggtacttcgggcctgtgtccactgcctgaaatgccttttcttttctctgccccgctctatgtctggcagattccagtttccctttcttagattctcaaaacgaggctactccctccctgtgtactccgatattcttgcacagggtgctctgtctttgtttgcatgcctttctttccacatcctcagggattaagcatcg

SEQ ID NO: 3055 - DNA, 120 bp, Homo sapiens
  misc_feature 1..120: note = U/M: U (0.22:0.92) in Lung Bronchial Epithelium
  misc_feature 1..120: note = source = chr1:21693223-21693342; Gene: NBPF3 (Intergenic)
  source 1..120: mol_type = genomic DNA
cgcccaggctggagtgcagtggcgcaatctcagctcaccacaacctccgcctcccaggttcaagcgattctccttcctcagcttcccaagtagctgggattacaggtgcccaccaccacg

SEQ ID NO: 3056 - DNA, 222 bp, Homo sapiens
  misc_feature 1..222: note = U/M: U (0.2:0.9) in Lung Bronchial Epithelium
  misc_feature 1..222: note = source = chr17:7423900-7424121; Gene: TNFSF12-TNFSF13 (Intergenic)
  source 1..222: mol_type = genomic DNA
cgaactcccgaccttgggtgatctgcccgcctcagcctcccaaagtgctgggattacaggcctgagccaccgtgcctggcttcaatatcttttctcttaattccttcttgcatctcaaattttctttcatccgggatcatgtttcttctgtctgatgcatgtcaaacaatttcctttaatgagttatgttggtcttaatctttttcagcttttgtttatccg

SEQ ID NO: 3057 - DNA, 247 bp, Homo sapiens
  misc_feature 1..247: note = U/M: U (0.12:0.82) in Lung Bronchial Epithelium
  misc_feature 1..247: note = source = chr12:16917346-16917592; Gene: LMO3 (Intergenic)
  source 1..247: mol_type = genomic DNA
cgttcttactgagaaacgatactgcatgattaaaagatatccttcagatgagaaggacattgggtaatttataaatcattcatttgtgacacagcttcatacagtatttcaaggaattgcattaactgctttcgcagtctcctcaaatgttgctttcagttgacagtgtcataggtcattaccgattttttccttatgtaagcaataccaactttctattaaaaatactaatttccactctactacg

SEQ ID NO: 3058 - DNA, 407 bp, Homo sapiens
  misc_feature 1..407: note = U/M: U (0.17:0.87) in Lung Bronchial Epithelium
  misc_feature 1..407: note = source = chr6:140843328-140843734; Gene: MIR4465 (Intergenic)
  source 1..407: mol_type = genomic DNA
cggaaaggagactttctattcttttgtaaatgatccgtagacccttttaacatagcacacattaagaatgtttagttcaaaaaattttgttatgaattgtacacaccgtagcaacacaaatcctgtttaagcgtgttactgtggcttatcttaaaaagagaactgtttaattttcagtcagcttctaatttgatatcaaatgatatttaccttccaaaataaagtggatgggttcaacataatacgtgttattaaacataacataacataaatacgtgttattaaagtatgaaatgtttttattaaaaatgctttcagatgagctgtatttattaatactctcttaatacaaaaaataattttaggtaatctatttactttatgccacacatttctattaattatcg

SEQ ID NO: 3059 - DNA, 462 bp, Homo sapiens
  misc_feature 1..462: note = U/M: U (0.17:0.87) in Lung Bronchial Epithelium
  misc_feature 1..462: note = source = chr8:123543820-123544281; Gene: ZHX2 (Intergenic)
  source 1..462: mol_type = genomic DNA
cgcaactaaggacaaaggagatagttatttacacaccagcatgcaccaaccattagaaagggctgctgagcatgcaggtaattggagctccggccttacccagcagagattgaacagtcattcactacaatggtaaattccaaggagatatgggcagagcctggatagtatttgctatagggttctaaacctttgaatgcctaatccgttcatttgttcacttattcattcatccatttagtcatcatccatttaatatgtctcctctgccaggcaaaggaaactggcattatgtaaacacagaactttagaaaggaaactgacctcaggactatttaatctgaaatgggatatgcataaaaatcacttgaggagctatttgaaaatgcagattgttgggcctgacctacagaagttttaacagatatgcaatagatacagcatgggtcccgggaatttgcg

SEQ ID NO: 3060 - DNA, 317 bp, Homo sapiens
  misc_feature 1..317: note = U/M: U (0.15:0.84) in Lung Bronchial Epithelium
  misc_feature 1..317: note = source = chr7:40647660-40647976; Gene: C7orf10 (intron)
  source 1..317: mol_type = genomic DNA
cgtcttcctaatttagaaccaaggtagcccctttctctctgaatctgaagctctttgtatcaaacagccttttgttgggatgtagtatctcgtttcttccacattacgtaatgtaacatacatgaagtagatcaggatatagctaatttacaactttcctgcatcgttcctgaatgttcctttttcatttttttaagtgggaaaaatgaacactatattttaaatcttccttatacactctaggcaatacttaaacatttaactcttagcaatttgtgtttttaatggaatagggttttccttttgggtcattttcg

SEQ ID NO: 3061 - DNA, 211 bp, Homo sapiens
  misc_feature 1..211: note = U/M: U (0.19:0.87) in Lung Bronchial Epithelium
  misc_feature 1..211: note = source = chr12:4000795-4001005; Gene: PARP11 (Intergenic)
  source 1..211: mol_type = genomic DNA
cgtccagttacaaatcccaggccagtccatcgcctggactctggcttccccacccagtttctcctcttctgctctgccttgtcacctcctttcctccttgctctcctgctgcatcgctcgggaagaaagcctgctccccgagaggctgggcagcagaggtacgaccatgctctccttctacctgagaaaacccaggcccagggaagcctcg

SEQ ID NO: 3062 - DNA, 158 bp, Homo sapiens
  misc_feature 1..158: note = U/M: U (0.21:0.88) in Lung Bronchial Epithelium
  misc_feature 1..158: note = source = chr1:230085990-230086147; Gene: GALNT2 (Intergenic)
  source 1..158: mol_type = genomic DNA
cgctcacccgagtagtgtacattgtacctaatgtgtagttttttttatccccggccccctctcaccctcccgcttctgagtctctacagtccattatatcactctgtatgcttttgtatactcatagcttagttgtcacttataagtgagaagatacg

SEQ ID NO: 3063 - DNA, 220 bp, Homo sapiens
  misc_feature 1..220: note = U/M: U (0.21:0.88) in Lung Bronchial Epithelium
  misc_feature 1..220: note = source = chr6:122869021-122869240; Gene: PKIB (intron)
  source 1..220: mol_type = genomic DNA
cgtctgtgctccaaactcaccgaagtcactttggcctggatgtctcctttggcctatccttgactaaagcacatccatataccttacactccaaacgctaggcctagggagacataggccttggatacacaggttatacacataaactttgggtacataggctccatctacacacaccggctttatacataagttttgggcatacagatttgattcaccg

SEQ ID NO: 3064 - DNA, 180 bp, Homo sapiens
  misc_feature 1..180: note = U/M: U (0.22:0.88) in Lung Bronchial Epithelium
  misc_feature 1..180: note = source = chr16:29586452-29586631; Gene: SLC7A5P1 (Intergenic)
  source 1..180: mol_type = genomic DNA
cggcctcccaaagtgctggaattacaggcgtgagccaacgtgcccggccccttcttcacttctttaaccagcttagatttcattgtgtatcatttcaacaacactcttgcctatacccttaactcttaagattttcatcacagccatctggcaaaaccccaatcctggataaacccaacg

SEQ ID NO: 3065 - DNA, 344 bp, Homo sapiens
  misc_feature 1..344: note = U/M: U (0.22:0.88) in Lung Bronchial Epithelium
  misc_feature 1..344: note = source = chr1:113369423-113369766; Gene: AKR7A2P1 (Intergenic)
  source 1..344: mol_type = genomic DNA
cgccagagcagcgtgtggcaggcccctgcagaggatcaacacagtggatgaacaccgggaaggaactggcacttggagtctggacatctgaaacttgctaagactggtctttggaacttgtgcactccatttgagtggaagcgtggcctgatcacccatggcgtgcctctaccagcactttggtttttgttttttacttgacttggattacttgatactttggttttggttttggcctggcttggatttcctgatactctgattttggttttgattctggtttggtgtaaactgtaaaagtgtgtgtgtgccctttttacttgttctttgttttgtggggtgcg

SEQ ID NO: 3066 - DNA, 409 bp, Homo sapiens
  misc_feature 1..409: note = U/M: U (0.19:0.85) in Lung Bronchial Epithelium
  misc_feature 1..409: note = source = chr3:5759429-5759837; Gene: MIR4790 (Intergenic)
  source 1..409: mol_type = genomic DNA
cgcttggagtggcttagaccttaaatgtttaatatcgtttacattgcgttgcgttggtaattgaatcagcaccacactccagtcactcaatctttttactttttgaaaccacacttttccctggacaattgaaaagctacatttaatgaagttaagggctcacacttgtaagtgtcaatttttgttgcatcatttaaattatccgtggcaatccatttactgaacactcttcctaactctttccttgggtgtctacacaggcaaagggaggagggaggtaagtagaattgccttaataatgtaagccaaaacaaataacaaaattgtgtgatgacagtaagtagtgttatacccaattgatgaatgtatcttttgatggagtctctggtctgtagtatatttttctccg

SEQ ID NO: 3067 - DNA, 462 bp, Homo sapiens
  misc_feature 1..462: note = U/M: U (0.19:0.85) in Lung Bronchial Epithelium
  misc_feature 1..462: note = source = chr17:20338997-20339458; Gene: LGALS9B (Intergenic)
  source 1..462: mol_type = genomic DNA
cgggacccaggtgacaccgagtatgcaattgctctatccctgcaggcctgcccctcactcatctcatccccaaacacagacacatgcaagaatgtgacactcccttcccaatacaacactaggacatttgattccctttgtattcccagtacctagtgcaatgtctggtacacggtaggtcatcagtaaataataaattgaattaaaccttgcaaaggcctccaaatatcagaattagtaagctctaaaggctttgtttattcctgcagattccttctcaggtttcagcaggtcatagagaacatctcttccaccagtcctagtctcaatgggacagtaaatgaaacagaaacaccaccatcccataccctccccttcagtccctctaaaatgagctgccgctgctgggagaaccagagctaagcttctgcagaggcctctgcccatgtcaccccagctccg

SEQ ID NO: 3068 - DNA, 189 bp, Homo sapiens
  misc_feature 1..189: note = U/M: U (0.14:0.79) in Lung Bronchial Epithelium
  misc_feature 1..189: note = source = chr1:10702185-10702373; Gene: CASZ1 (intron)
  source 1..189: mol_type = genomic DNA
cggctccgagagtggcactgagcagagagtatgagagacaggacggagagaagaggcaggggaggggggggaggggcggccggagcgtggccggcgagaaggatggagtcgctggcggctgcggggccgtgcgggcagcctcatcaccagcggccgcaggaggaggaagaggaggaggaggaggagccg

SEQ ID NO: 3069 - DNA, 338 bp, Homo sapiens
  misc_feature 1..338: note = U/M: U (0.28:0.93) in Lung Bronchial Epithelium
  misc_feature 1..338: note = source = chr13:50143575-50143912; Gene: RCBTB1 (intron)
  source 1..338: mol_type = genomic DNA
cggtagctcactcctgtaatcccagcactttgggagaccaaggtgggtagatcacttgaggtcaagagttcgtgaccagcctggcaaacatagtgaaaccccatctttactgaaaatacaaaaaaaattagcctggcggtagtggcgcatgcctgtaatcccagctacttgggaggctgaggcaggagaatcacttgagcccgggaggcagaggtggctgtgagccgagactgcatcactgcactccttgtctgggtggcagagtgagagaccctgtctcaaaaaaaaaaaagaaagaaagaaagaaaaagaaaaattattagccaggcatggtggcg

SEQ ID NO: 3070 - DNA, 362 bp, Homo sapiens
  misc_feature 1..362: note = U/M: U (0.2:0.85) in Lung Bronchial Epithelium
  misc_feature 1..362: note = source = chr10:21621413-21621774; Gene: NEBL-AS1 (Intergenic)
  source 1..362: mol_type = genomic DNA
cgttggcatttcctttctaataatgggtagaagtttgttatgaatcataattagtgatgttacttgatctcattctgatgttaattcaaagttgccctgttcaagaaggcagtgtgctggtgtgcagggatcacatatctgtgattaatccggctgagtgctagagctgcaattgtttcttcgtgtagctgcagataaaataacagtcttggccgggcccggtggctcacgcttgtaatcccagcactttgggagaccaaggtgggcagatcatgaggtcaggagttcaagacctgcctggccaacacagtgcaaccccatctctactaaaaacacaaaaattagccaggcacagtggcacg

SEQ ID NO: 3071 - DNA, 206 bp, Homo sapiens
  misc_feature 1..206: note = U/M: U (0.29:0.93) in Lung Bronchial Epithelium
  misc_feature 1..206: note = source = chr9:130261931-130262136; Gene: LRSAM1 (intron)
  source 1..206: mol_type = genomic DNA
cgggtgcggtgcctcacgcctgtaatcccagcactttgggaagccgaggcgggcagatcacgaggtcaggagatggagaccatcctggctaacatggtgaaaccctgtctctactaaaattagctgggcacagtggcgtgtgcctatagtcccagatacgcaagaggagaggctgaggcaggagaatcacttgaatccaggaggcg

SEQ ID NO: 3072 - DNA, 174 bp, Homo sapiens
  misc_feature 1..174: note = U/M: U (0.28:0.91) in Lung Bronchial Epithelium
  misc_feature 1..174: note = source = chr3:170186154-170186327; Gene: SLC7A14 (intron)
  source 1..174: mol_type = genomic DNA
cggctcactgcagtctctgcctcatgggctcaagcgattctcctgccttggcctctcgagtagttgggaccacaggcatgtgccaccacgcccagctaatttttgtatttttgagagatggagtttcaccatgttgcccaggctggtctcaaattcttggactcaagtgatccg

SEQ ID NO: 3073 - DNA, 226 bp, Homo sapiens
  misc_feature 1..226: note = U/M: U (0.29:0.92) in Lung Bronchial Epithelium
  misc_feature 1..226: note = source = chr21:39623442-39623667; Gene: KCNJ15 (intron)
  source 1..226: mol_type = genomic DNA
cgggcacttcatgcacccaacttttaagtatatacattcccacctgacaaagttagattttacagatgccgtggcaaatgtgcactcagtgctaacaaattaggatatcaggcctgtattaatgctttcattttccaattattttttattgcatttaacagctgacttcaaaagagctgaggacacacagaggaatagcgtgacccatcatcgcaatttgccagcg

SEQ ID NO: 3074 - DNA, 227 bp, Homo sapiens
  misc_feature 1..227: note = U/M: U (0.15:0.78) in Lung Bronchial Epithelium
  misc_feature 1..227: note = source = chr2:2752011-2752237; Gene: MYT1L (Intergenic)
  source 1..227: mol_type = genomic DNA
cggggggcccacagcctgcagcccaccctggcagtgccagtcctcagcccagcaactctggtcagcccgtgcaatctctctgtgcgtccatttcctcatttgcaaatggagtagttgatgcactttgtgttgaaattgaataagatggtgtgtggtgtgtgtggccaagagcagagctctctcctctcccggtgggtgggtgggtgctggtgcctttctcactgccg

SEQ ID NO: 3075 - DNA, 295 bp, Homo sapiens
  misc_feature 1..295: note = U/M: U (0.27:0.89) in Lung Bronchial Epithelium
  misc_feature 1..295: note = source = chr8:126844817-126845111; Gene: LOC100130231 (Intergenic)
  source 1..295: mol_type = genomic DNA
cgggcacagtggctcatgcctgtaatccctgcactttgggaggctgaggtgggaggatcacttgaggttaggagttcgagaccagcctggccaacatggtgaaaccctgtctctactaaaaaaaatacaaatacaaaaaataactgggcttggtggcgggcacctgtaatcccagctactgggcaggctgaggcaggagaattgcttgaacctgggaggcagaagttgcagtgaaccgagatcgccgctattgcactccagcctgggcgacaagagtgaaactctatcccccccg

SEQ ID NO: 3076 - DNA, 389 bp, Homo sapiens
  misc_feature 1..389: note = U/M: U (0.22:0.84) in Lung Bronchial Epithelium
  misc_feature 1..389: note = source = chr9:1654895-1655283; Gene: SMARCA2 (Intergenic)
  source 1..389: mol_type = genomic DNA
cgactcacattcaaaccctgccgtattctttgggattggggcagattctttatgtgtaatcctcagtagcatcctcttgttttatataatttcaatatttcttttagattcagagggtacatgtgcaggtttgtaacctgggtatattgtgtgatgctgcggtttgaggtacaaataatcccacgggaataggtagtgagcataatgcccaataggtagtgtttcagcccttgccctcccctctagtagttcccagtatctattgtttccatctttatgctcatgctttatgccaatgcttagctcccacccgtaagtgagaacatgtggtatttggttttctgtttctgcattaattcactcaggataatggcctccagctgcatccg

SEQ ID NO: 3077 - DNA, 492 bp, Homo sapiens
  misc_feature 1..492: note = U/M: U (0.27:0.89) in Lung Bronchial Epithelium
  misc_feature 1..492: note = source = chr2:225670270-225670761; Gene: DOCK10 (intron)
  source 1..492: mol_type = genomic DNA
cgtatgggaatgagatgtatgggcacacacacacaaaaggttcacatgatgaaccaaaaagatgttgatactgaggtagcagcagtgttgtcaaagaccaacataacagcgtctgggattggcattaaagccagctcttgttttaaaaatgctttagtaaaagttcataaagatacttttgggaaggggctttcaacttttgactgtttatgagaaactgaaatgacatttccaaaacagttcttaaaaataatacttgaagttgaaaagccattatatcttaaaaggctgtctgcaatgaaaacttaaagacggtttccagaataaagtaatttgataacatccaagtaggctgctccttaagccaagtaatactgaacactaagtagaagaggaagtcactggatggaattcaaagaaatatgtaaaaagactctttggttgtataaatgtagtatactttgccacgtagattatgcataataaattacg

SEQ ID NO: 3078 - DNA, 97 bp, Homo sapiens
  misc_feature 1..97: note = U/M: U (0.27:0.88) in Lung Bronchial Epithelium
  misc_feature 1..97: note = source = chr15:47216695-47216791; Gene: SEMA6D (Intergenic)
  source 1..97: mol_type = genomic DNA
cgggaggctgaggcaggagaatcacttgaacctgggaggcggatattgtggtgagcagagatcgtgccgttgcactccagcctgggcaacaagagcg

SEQ ID NO: 3079 - DNA, 187 bp, Homo sapiens
  misc_feature 1..187: note = U/M: U (0.29:0.9) in Lung Bronchial Epithelium
  misc_feature 1..187: note = source = chr10:99450493-99450679; Gene: AVPI1 (Intergenic)
  source 1..187: mol_type = genomic DNA
cggattcaagtgattctcctgcctcagcctcctgagtagctgggactacaggcgtgtgccaccacgcccagctaatttttgtatttttagtacagacagggtttcaccatgttggccaggatggtctctatctcttgacctcgtgatctctctgcctcggcctcccaaagtgctgggattacagacg

SEQ ID NO: 3080 - DNA, 334 bp, Homo sapiens
  misc_feature 1..334: note = U/M: U (0.26:0.87) in Lung Bronchial Epithelium
  misc_feature 1..334: note = source = chr17:10043549-10043882; Gene: GAS7 (intron)
  source 1..334: mol_type = genomic DNA
cgggaggactgcgtgtgcctaggagatcaagagcagcttgtgcaacatatggaaaccctatctctacaaacaatttaaaaattcgccaggcatggtggggcatgcctgtggtttcagctacctgggaggctacggtgggaacatcatttgagtccgggggttgaggctgcagtgagccgtgactgccactgcactccagcctgggtgacagggcgagaccctgtctcaaaaataagtcaataaataaaaatgtgtatatctgcatttgtgtgtgtgtacctgtgtgtctatgtctatgtgtgtatatacatgtgtgtctgtggctatatgcacg

SEQ ID NO: 3081 - DNA, 482 bp, Homo sapiens
  misc_feature 1..482: note = U/M: U (0.26:0.87) in Lung Bronchial Epithelium
  misc_feature 1..482: note = source = chr3:125144031-125144512; Gene: ZNF148 (Intergenic)
  source 1..482: mol_type = genomic DNA
cgagatggaatttcactctgtggtccaggctggagtgcagtggcatgatctcagctcactgcaacctctgcctcccggattcaagcaattctcccacctcagcctcctgagtaactgggattacaggcgtgtgcagccatgactggataatttttgtatgtttagtaaagataggattttaccatgttggccaggttggtctcaaactcctgacctcaggtgatccacccgcctcccaaagtgctgggattacaggtgtgagccactgttcctggcctgattgtcattttcaatgcatgtcttctggttatattaaagctttcccatgcaagagggctgttataacagcagctcattatgccaaagtgtattttcaccaggtaaagagagcttttcatggtcctctgactaggacaatcaacttcttcacaatataggacctgaagatgagttcaggttctgagaacatcagaaacaaaccg

SEQ ID NO: 3082 - DNA, 501 bp, Homo sapiens
  misc_feature 1..501: note = U/M: U (0.32:0.93) in Lung Bronchial Epithelium
  misc_feature 1..501: note = source = chr19:42907630-42908130; Gene: LIPE (intron)
  source 1..501: mol_type = genomic DNA
cgctctgtcacccaggctggagtgcagtggcaagaacatggctcactgcaacctccacctcccaggttcaagtgattctcgtgcctcagcttcctgagtagctgggactataggcatgtgccaccatgcccggctaatttttgtgttttttttttagcagagatggggtttcgccatgttggccaggctgttctcgaattcctggcctcaagtgatccgctcgcctcggcctcccatagtgctgggattacacttaccacaaggtgtaaatggatcaaaatgatttgaatagtaagcaggcccagtggcttgaagggaggctctgttcacagggagctaacaagtctccagggtgtatcacatttctaggggtctggcacctgtagccacatggatctgcttccccacatttcctttgtgttcttcagttttatccgttcacgtgaccaggcaagcaagtgcccaaacgatgctaaagatacacttccagcccacctggcg

SEQ ID NO: 3083 - DNA, 321 bp, Homo sapiens
  misc_feature 1..321: note = U/M: U (0.35:0.95) in Lung Bronchial Epithelium
  misc_feature 1..321: note = source = chr16:68249693-68250013; Gene: NFATC3 (intron)
  source 1..321: mol_type = genomic DNA
cgatctccgctcactgcacgctccgcctcccaggttgacgccattctcctgccttagcctcccgagtagctgggactacaaggcgcctgccaccacgcccggctaattttttgtatttttagtagagatggggtttcactgtgttagccaggatggtctcgatgtcctgacctcgtgatccgcccaccttggcctcccaaagtgctgggatgacaggcatgagccaccgcgctggcccagatttacacatattaagtgctgatgagaaggatctggggagacaagttgatagagacaaagaagtgaagaaaattgatgccg

SEQ ID NO: 3084 - DNA, 357 bp, Homo sapiens
  misc_feature 1..357: note = U/M: U (0.33:0.92) in Lung Bronchial Epithelium
  misc_feature 1..357: note = source = chr12:105604559-105604915; Gene: APPL2 (intron)
  source 1..357: mol_type = genomic DNA
cgtcttcccctttctccaaaccccgctttccattccaaagcattcacggttcccccaagaacagcatgactttacaaatgtcccctaatctggaacacagccttaatgtcatttttcaaaacccagctcagagatcaccttcttcaggaagccgtccctagcacgcctttctgtgtgctgtttctactcctgtgcgtctctgtcctgctaccctcagcaaatgacattacaacgatctgtttccacacctgtcttctcactggcctgtgatctcctttaggtgagccgggaacacagtgggaagtcagtaaaagttcactgaattgaactgctcaaaaagaaaggcatttctcagcg

SEQ ID NO: 3085 - DNA, 440 bp, Homo sapiens
  misc_feature 1..440: note = U/M: U (0.3:0.89) in Lung Bronchial Epithelium
  misc_feature 1..440: note = source = chr3:12413887-12414326; Gene: PPARG (intron)
  source 1..440: mol_type = genomic DNA
cgtacttttaggcaagttacttacttccaggtccatgcctcagttttcccatctttaaagtaaattataaatgcacctacttcctcgggctggttgtgaggattaaatgacacaatccgggcacaatatttggcgtagtactttgcacagatttagtgtcctgttagtattagctaatgtaaatatgaagaagatgtaacattttaccagctattctaatcatagcttttcttttcttttcgtaagggacaacataaaaccccaaaggtaaagcatatatttctggtgttcaattttacaatttagcatcttttccaacccacttccatactcccaaataataatgcctatcagattaaagaagttactttatttttgcatgaaattggttgtatttttgttgcactacttcatcctttgagtattgtgaaaagtctgcg

SEQ ID NO: 3086 - DNA, 323 bp, Homo sapiens
  misc_feature 1..323: note = U/M: U (0.33:0.91) in Lung Bronchial Epithelium
  misc_feature 1..323: note = source = chr11:77859346-77859668; Gene: ALG8 (Intergenic)
  source 1..323: mol_type = genomic DNA
cgtgtacctgcattcacttgcatgcatacacacacaccctcttccttaaccaggtttattgtgtctgaaattttccgaaactttgtataggctttctgaaggaagtagaaaccccatgtagtatttgtgttttttttaagacagggtctcactctgttgcccaggctggagtgcagtggcgtgatcttggctccccgtgtagtattcgtagcaaggctttggtcatagttgctttttcactgtttgaggccttcactggagctatctaccatgagtcctcagaggccaggatttccaaggagtaactgatcagttttcattcg

SEQ ID NO: 3087 - DNA, 231 bp, Homo sapiens
  misc_feature 1..231: note = U/M: U (0.34:0.9) in Lung Bronchial Epithelium
  misc_feature 1..231: note = source = chr19:41659761-41659991; Gene: CYP2S1 (Intergenic)
  source 1..231: mol_type = genomic DNA
cgtcattgcactccagcctgggcaacaagagcaaggcacggtggctcacgcctgtaatcccagcacattgggaggttgaggcgggcggatcacgaggtcaggagatcaagaccaacctggctaacacggtgaaaccccatctctactaaaaatacaaaaaaaaattagccgggcgtggtggcggggtcctgtagtcccagctattcaggaggcggaggcgggagaatggcg

SEQ ID NO: 3088 - DNA, 100 bp, Homo sapiens
  misc_feature 1..100: note = U/M: U (0.08:0.9) in Lung Bronchial Epithelium
  misc_feature 1..100: note = source = chr13:111897872-111897971; Gene: ARHGEF7 (intron)
  source 1..100: mol_type = genomic DNA
cgttgagttctttagcagcttctcgtgtagttgtaagaggatcagcttcagtgattgctctcatttggtcgttgtcaacttctgatggccggccactacg

SEQ ID NO: 3089 - DNA, 467 bp, Homo sapiens
  misc_feature 1..467: note = U/M: U (0.08:0.84) in Lung Bronchial Epithelium
  misc_feature 1..467: note = source = chr6:152651802-152652268; Gene: SYNE1 (exon)
  source 1..467: mol_type = genomic DNA
cgagcaagaattgcttcctggactttatagaacttgtctttagccaaggcaacaattacattaaattgtcgaggcaaagcatttagcttttcactgaggtaggaatgatcgacttcattcagcgatggtaatatggtctgcccagttctctgcagcgtaagtagaagattttcatattctggagattgttcaagaatgttttggtatttagccagttgtgtatgaagctcagaactctcattcattaggttgatttcaggaaatgtaacaatatctgcttgttttagccagtggcaagctttatcaaaatcttccttaaaatgcttcctagaaaccaaattcttctctagttcttgtaaccggtgactgcacttttgtaaaacactgtcatagacactctgcaattcctgaagcttccccagcacttcactcttttcctgctctgtgacttccttcattagttcgcg

SEQ ID NO: 3090 - DNA, 441 bp, Homo sapiens
  misc_feature 1..441: note = U/M: U (0.23:0.87) in Lung Bronchial Epithelium
  misc_feature 1..441: note = source = chr10:88544748-88545188; Gene: BMPR1A (intron)
  source 1..441: mol_type = genomic DNA
cggcttttctgtatcccttaagttttggaatgttctgttttcttcttcatttgtctcaagatgttttctaaactgccttgtgatttcttctttgagtcattagtttttcaaaagtgtgttaaatatttgtgaattttttagttttcctactgcttttgatttcccattgtggtcagaaaagatacttgctatgatttcagtcttcttaaatttgctaagacttgttctgtggcctaacatgtgatctgtcttggagaatgttgcatgtgtacttgagaaaatgtgtattcagctagtgttgggtgtagtgtttttttgtttgtttgtttttgagatggagtttccgctcttgttgcccaggctgcagtgcagtggtgggaactcagcccaccgcaatctgcgcctcctgggttcaagtgattctcctgcctcaccttcccg

SEQ ID NO: 3091 - DNA, 311 bp, Homo sapiens
  misc_feature 1..311: note = U/M: U (0.03:0.87) in Lung Bronchial Epithelium
  misc_feature 1..311: note = source = chr1:164761969-164762279; Gene: PBX1 (intron)
  source 1..311: mol_type = genomic DNA
cgagcaggtaaccagaaccacctggggctcggcacccaggccctttaggaaagggtggaggaagcacaaccccggggcttgcagagaggagcggctcacctttcccaggtgctggcatccctgtgcccggcatcccctgcccagccacagagccctggccaaacttgagtctgccaagtcctggtctcaactgttaaaaacctaggcattcaatggaggtaaaggcattaaaaaatgtgtgacgctgtaaatgatttcaaggaaacataaatcgtgcatagaaggaacactccatacctggactccagaac

SEQ ID NO: 3092 - DNA, 327 bp, Homo sapiens
  misc_feature 1..327: note = U/M: U (0.11:0.9) in Lung Bronchial Epithelium
  misc_feature 1..327: note = source = chr9:107601248-107601574; Gene: ABCA1 (intron)
  source 1..327: mol_type = genomic DNA
cgaatgtctggagtgctttactccagagaagaaaaggttcttgtgttacaataaagtacaaaacctgcctcactcagtgtctgaaagacacacctgtggttggaaatggagaaaggttcccctgcatcaagttttcaaggaaaaggatgccactgcctaaaactgtgacattggatccctgctgccacgaggcatacggcacacgggcccacaaaagtgcttaagtgtggggagtggatatggagacacagggttctttaacactgccttgcagctaagaatgggaaacaaagggcagatcaaatgtctgagtgtgagaacacacac

SEQ ID NO: 3093 - DNA, 171 bp, Homo sapiens
  misc_feature 1..171: note = U/M: U (0.04:0.92) in Lung Bronchial Epithelium
  misc_feature 1..171: note = source = chr1:164761784-164761954; Gene: PBX1 (exon)
  source 1..171: mol_type = genomic DNA
cggctggacaacatgctgttagcggaaggcgtggcggggcctgagaagggcggagggtcggcggcagcggcggcagcggcggcggcttctggaggggcaggttcagacaactcagtggagcattcagattacagagccaaactctcacagatcagacaaatctaccatacg

SEQ ID NO: 3094 - DNA, 91 bp, Homo sapiens
  misc_feature 1..91: note = U/M: U (0.07:0.88) in Lung Bronchial Epithelium
  misc_feature 1..91: note = source = chr13:25561062-25561152; Gene: TPTE2P1 (Intergenic)
  source 1..91: mol_type = genomic DNA
cgcagagtggctgggtgtgtgggaaccatgcccgtgaccggtcctcggggatgctgctgctgcagtcgctgagggtcctagttgctgggcg

SEQ ID NO: 3095 - DNA, 188 bp, Homo sapiens
  misc_feature 1..188: note = U/M: U (0.09:0.9) in Lung Bronchial Epithelium
  misc_feature 1..188: note = source = chr20:20752152-20752339; Gene: RALGAPA2 (Intergenic)
  source 1..188: mol_type = genomic DNA
cgccaatccgtttcctaggatcgctttctgagagactccagactgagacaatgtgcatttcaaaagggcacctacatgtgccaaggccctgatcaaatgacactttcatgtaaaacttctttttttttttttttttgagagagagtctcaatctgtctcccaggctggagtgcagtggcgcgatctcg

SEQ ID NO: 3096 - DNA, 222 bp, Homo sapiens
  misc_feature 1..222: note = U/M: U (0.06:0.87) in Lung Bronchial Epithelium
  misc_feature 1..222: note = source = chr20:20542933-20543154; Gene: RALGAPA2 (intron)
  source 1..222: mol_type = genomic DNA
cggtgatctgggctctgtgacaggccacagtagagtctccttccagagagaaacctcagagcaaaagaacatgttctcaactgaaaaatgtatgccaactgatacacgatatcacacggtaacagtttactaagaacaaaatctttccttttcccacatatactgagagttgctatactatttttatgctttatttcacgtagcatgtcttattagataccg

SEQ ID NO: 3097 - DNA, 284 bp, Homo sapiens
  misc_feature 1..284: note = U/M: U (0.13:0.93) in Lung Bronchial Epithelium
  misc_feature 1..284: note = source = chr16:16022532-16022815; Gene: ABCC1 (Intergenic)
  source 1..284: mol_type = genomic DNA
cggaggttgcagtgagtggcgatcactgcactgcactccagtctgggtaacagagcgagacacacacacacgcacacgcacacgcacacgcgcgcgcgcacacacacacacacaccctacctttcctgcaacacaccccacctatcctagctcagctctgggaagtaacacaaaagagctaatccttttccacatgacagcccttaaaatatttgaagactgtatcacatttccccagagccttctttttgtggggtacaacttcccagttgtgaccaaacacg

SEQ ID NO: 3098 - DNA, 51 bp, Homo sapiens
  misc_feature 1..51: note = U/M: U (0.15:0.94) in Lung Bronchial Epithelium
  misc_feature 1..51: note = source = chr14:61150822-61150872; Gene: SIX1 (Intergenic)
  source 1..51: mol_type = genomic DNA
cggcctcccaaagtgctaggattacaggcgtgagccaccgcgcccagcccg

SEQ ID NO: 3099 - DNA, 346 bp, Homo sapiens
  misc_feature 1..346: note = U/M: U (0.1:0.88) in Lung Bronchial Epithelium
  misc_feature 1..346: note = source = chr1:226003504-226003849; Gene: EPHX1 (intron)
  source 1..346: mol_type = genomic DNA
cggctttcagtgctctcctgttacacactgcaaggaagcttccagatcgtggagcacattgttgaggaaaagacaccttggggagaagggggaggtgcagagtgtggttaatggtgggaaggaactccggtaagtgtgttatatgatctgctcctattatcccctggaataggagcctctctccactcaagtagagaatgccaaggactggcccggcatggtggctcatgcctgtaatcccggcactttgggaggccaaagcaggcggatcgcttaacaggagtttgagaccagcctggccaacatggcgaaacccctttcctactaaaaatacaaaaatcagccg

SEQ ID NO: 3100 - DNA, 213 bp, Homo sapiens
  misc_feature 1..213: note = U/M: U (0.15:0.92) in Lung Bronchial Epithelium
  misc_feature 1..213: note = source = chr22:36683736-36683948; Gene: MYH9 (intron)
  source 1..213: mol_type = genomic DNA
cgagatcatgccactgcactccagcctgagcgacagagcgagactccgtctcaaacaaacaaacaaaaaaaaatttgttaaactaaggttattcttgttacatgatatggcgtatcagagctgtttttacgtgttaattattctttaattattagtgaggtgaagatttccaagtatgtgtcccacactccgggctgcttcttggaaccatcg

SEQ ID NO: 3101 - DNA, 172 bp, Homo sapiens
  misc_feature 1..172: note = U/M: U (0.14:0.85) in Lung Bronchial Epithelium
  misc_feature 1..172: note = source = chr1:22092159-22092330; Gene: USP48 (intron)
  source 1..172: mol_type = genomic DNA
cgaagctaaacaaggtgtgagacataactaacaatttttctagtggaagatgaggtcttaaaaagccaatttaggccgggtgtggtggctcacacccgtaatcctagccctttggaaggctgaggtgagtggatcacctgagacaggagaatagtttgaaactacgaagccg

SEQ ID NO: 3102 - DNA, 43 bp, Homo sapiens
  misc_feature 1..43: note = U/M: U (0.23:0.89) in Lung Bronchial Epithelium
  misc_feature 1..43: note = source = chr16:89189928-89189970; Gene: ACSF3 (intron)
  source 1..43: mol_type = genomic DNA
cgatccactcttgtctgtgccgaggcgtgggtcccggccagcg

SEQ ID NO: 3103 - DNA, 247 bp, Homo sapiens
  misc_feature 1..247: note = U/M: U (0.27:0.93) in Lung Bronchial Epithelium
  misc_feature 1..247: note = source = chr12:110384902-110385148; Gene: GIT2 (TTS)
  source 1..247: mol_type = genomic DNA
cgcaagcatctgtggacatgttaatacagcaaacacaatggtaactctcttagtccaatttggcaaagcagagctgtggggacctgtaggttcagaagagggaacagagtagacaggctgcatagagtgaacagcagaagcgccagtggtgttacttacgtgcgcggggaagggctggagtctcatcctgctctcttcggggcggctcgcttctcccattgggagatatggtttctgacctgatccg

SEQ ID NO: 3104 - DNA, 417 bp, Homo sapiens
  misc_feature 1..417: note = U/M: U (0.34:0.93) in Lung Bronchial Epithelium
  misc_feature 1..417: note = source = chr20:36697235-36697651; Gene: RPRD1B (intron)
  source 1..417: mol_type = genomic DNA
cgtgaatactgtgaattccttcagattgtccaaaagtctctctgcgtgatggggcagtacataaagtttacccacttttttaacattcatttttgtaacacagccagtccgttttaaaacttccaaatcagaatgctaattaaatattttattttttaatcctttcattgccttcaggatatacatagatgaaattctcagaactctttggagaagtagttatttgcttgcgagtctgttttcatcccaaagctctaatatacttaggttttgtgctttcctttttaactttgtatcttgctttatgtaataagcatctttttctctttcacttgggaattttatgtcggtggctcctgcatgtcaggatagggcgtgtgatgattcagagcctaggatgtaggagagggaattacg

SEQ ID NO: 3105 - DNA, 296 bp, Homo sapiens
  misc_feature 1..296: note = U/M: M (0.96:0.15) in Lung Bronchial Epithelium
  misc_feature 1..296: note = source = chr8:72469784-72470079; Gene: EYA1 (Intergenic)
  source 1..296: mol_type = genomic DNA
cgggtccttctccccgcccactgccgagagtagggggctcatctgtcagtagagggcacacccattcatgcctgtgtcatatttgacagcctgagggatcttagcgatattgcagtcgtccaaccctgcagttctgctgaagaagaaatgagcattcccaggggtcaagtgacctgcccacggtgacatcgctgtatgccaagcgtctaaaatagttcctggcgcaggacgacccaccagtaaatgtgtgttcgatgaatgaacactcagcaaggggatcgtagactctggatccg

SEQ ID NO: 3106 - DNA, 348 bp, Homo sapiens
  misc_feature 1..348: note = U/M: M (0.75:0.12) in Lung Bronchial Epithelium
  misc_feature 1..348: note = source = chr7:19147936-19148283; Gene: TWIST1 (Intergenic)
  source 1..348: mol_type = genomic DNA
cgcagagcagggtcagtaggaagccaaggcaggcatactttgggcacgccatcctcctgatgccacatttgttagggtcttaagaaggcccctagccggagaccagaagagcttgctcttaaggtgggggttgcctgccttcggaaactagaagatgaggtcctcacagccaagtcccatgggcctggctctgcccagaaaaggctcgtgctggggtagggagccagtacaccgggggaagcctcagcctgcggttctgtgcgggccggggctcatcagaacaaccactttggcttaattggggagggaaggaggcagctggaaagggggagaggggagaggatcacg

SEQ ID NO: 3107 - DNA, 209 bp, Homo sapiens
  misc_feature 1..209: note = U/M: M (0.67:0.08) in Lung Bronchial Epithelium
  misc_feature 1..209: note = source = chr17:36101312-36101520; Gene: HNF1B (intron)
  source 1..209: mol_type = genomic DNA
cgtgagaacacaggctttgatagagatgtttttgagaaatgcaaactttttatattaattatatataagaacgaatttctcaagtatttacaaaggtaatttccaagtacacaatatgaggaagtaacaagaagaacaaaaaatgagaaaacgagttacagtttcaaacgtggagaattcacattaagaggaaaataatgtaataaacg

SEQ ID NO: 3108 - DNA, 78 bp, Homo sapiens
  misc_feature 1..78: note = U/M: M (0.81:0.28) in Lung Bronchial Epithelium
  misc_feature 1..78: note = source = chr17:36101617-36101694; Gene: HNF1B (intron)
  source 1..78: mol_type = genomic DNA
cggctacgaacaagacgcctcgaaccttaggggaaaaattgcattttaaaagtgaatattgctttagcaaattcttcg

SEQ ID NO: 3109 - DNA, 494 bp, Homo sapiens
  misc_feature 1..494: note = U/M: M (0.69:0.16) in Lung Bronchial Epithelium
  misc_feature 1..494: note = source = chr5:134365897-134366390; Gene: PITX1 (intron)
  source 1..494: mol_type = genomic DNA
cggattttcctccagttctgagtggagtttcctgagctagtttgccagatccctgcttctcagctttccctagtccccagcactgacactacctgattccacccccacccacccctaccaccataaacctgggcaggattagtgagttcaggattactgagtgctgtgtcttcattccaagtcccactgggctggccagcctgcctagggaggggtgagggctggggttatggtaaggagtctgtgggccagctgggattttggtcgacttgggaggtgctcccaatatctgattaaatatttacgcccccagggaagaaatgattctcttgctaccctggcaggaaagccttgcttttactggaaaccaaacgggtgagaagagggagaatgcaggctggtcttgggtctgagatggcatatcctaaaagggactgggaaggacatttggctcccggagccaccccccacctcacctgacgggagaccttccg

SEQ ID NO: 3110 - DNA, 298 bp, Homo sapiens
  misc_feature 1..298: note = U/M: M (0.95:0.09) in Lung Bronchial Epithelium
  misc_feature 1..298: note = source = chr8:72470207-72470504; Gene: EYA1 (Intergenic)
  source 1..298: mol_type = genomic DNA
cgggcgacaaatcccgaactcatctcccttcttttctgatttctaagaatccacggtctccagccctaatcccaacccctcctccgttttcatccctaagctctagactgttttgtggtcagtaccatttccttactatcaaaaacggccgcgggcagaaaattacgataagtaaagcatagtctcttctcgcctttatggacatccccgcattttttggcggtcttagcctcggccaagtgcaagccgtccgtttcaaggcaggggtggagcctttaaagggtcgcttgggccagcg

SEQ ID NO: 3111 - DNA, 310 bp, Homo sapiens
  misc_feature 1..310: note = U/M: M (0.93:0.11) in Lung Bronchial Epithelium
  misc_feature 1..310: note = source = chr8:72470524-72470833; Gene: EYA1 (Intergenic)
  source 1..310: mol_type = genomic DNA
cgcccgccgggaacatccaatctaagtggtaaaaatgctagtgtgcagtggagctcagcttgaagacaagaccccccacctccagccgtaagacccaaaccaattcttgcccttagcggaggcctcctagaatttctggggccgccactgctctgggggaatcgtgggacacagtccggggaaagaacaaagctaggcgccaggaagggccgaccagcccggacgggtcagccgggtcctagccgtctcgggttctttccaagaaatcaggaaggtgactgtgcaggaggcaaaggacgcccagttaccg

SEQ ID NO: 3112 - DNA, 319 bp, Homo sapiens
  misc_feature 1..319: note = U/M: M (0.9:0.08) in Lung Bronchial Epithelium
  misc_feature 1..319: note = source = chr14:36993562-36993880; Gene: NKX2-1 (Intergenic)
  source 1..319: mol_type = genomic DNA
cgctggggggcgctgctccgcaaccccaagatccgaggaatgcctccgggggatgatttctctggaggggtctcgcagggccccctctgcgctgctttctcaggcaccagaaccgaaatcctcgggagggaccgcgggagcccggggcgtgcagacaggcggctttcacagacgcagcgggaggaaggatccctctactgctccctttcccgatttgaccgtctagggcctttgagaggactttccttttgggaaagcttttctcaattcgtggcctgtgggcaggctggggggtggggcgccaagtcatccgagcgcg

SEQ ID NO: 3113 - DNA, 150 bp, Homo sapiens
  misc_feature 1..150: note = U/M: M (0.97:0.16) in Lung Bronchial Epithelium
  misc_feature 1..150: note = source = chr8:72469494-72469643; Gene: EYA1 (Intergenic)
  source 1..150: mol_type = genomic DNA
cgccgggtgaggacgggcccggcccgtggcgcctagctgtaaagggccctaatgctgcgcgtttgtcgcaaagggaggcctgttctgacaccaaggagtgtcagatacttgaggataagcttccgaagggagttttcacctagactgccg

SEQ ID NO: 3114 - DNA, 144 bp, Homo sapiens
  misc_feature 1..144: note = U/M: M (0.9:0.1) in Lung Bronchial Epithelium
  misc_feature 1..144: note = source = chr8:72471017-72471160; Gene: EYA1 (Intergenic)
  source 1..144: mol_type = genomic DNA
cgtttgtaaaacccgacattcgttgtaagcaccttcaagaaaggcgagttctcgcccctaatatgcccctaatacagagcttgcacacggaagtgccatggccattgaatgaatgcgggaccgtttgcgttaataccggcaacg

SEQ ID NO: 3115 - DNA, 220 bp, Homo sapiens
  misc_feature 1..220: note = U/M: M (0.89:0.09) in Lung Bronchial Epithelium
  misc_feature 1..220: note = source = chr8:72469259-72469478; Gene: EYA1 (Intergenic)
  source 1..220: mol_type = genomic DNA
cggtcctctccctctttctggcactccactgtcagcgtcggctagaagcaaacgcccaggaagcactaaccgatgcacacaaggtttcgatggacagggacaggaaaatcggctctgcagcgcgggggagcgcaggctggaggccgggccactgaggtggccccggctgagcgactggcgtcggtttctcctcctagcgctaggcgggagtgggaccccg

SEQ ID NO: 3116 - DNA, 46 bp, Homo sapiens
  misc_feature 1..46: note = U/M: M (0.94:0.18) in Lung Bronchial Epithelium
  misc_feature 1..46: note = source = chr14:36993918-36993963; Gene: NKX2-1 (Intergenic)
  source 1..46: mol_type = genomic DNA
cggagggtatgggaggcgagggcgcgtctatgagggccagagtccg

SEQ ID NO: 3117 - DNA, 174 bp, Homo sapiens
  misc_feature 1..174: note = U/M: M (0.95:0.2) in Lung Bronchial Epithelium
  misc_feature 1..174: note = source = chr14:36993345-36993518; Gene: NKX2-1 (Intergenic)
  source 1..174: mol_type = genomic DNA
cgctaatagaaggagttattccttctgattctgtattttggatttagagaaactgtgactctaggcctctgaccttcaacaagaaacacttgggcccctcagttgctcccgcagtctcccacagctaggcacaggcttctaagccgggctgagctgggctcgcgagtgccatcg

SEQ ID NO: 3118 - DNA, 132 bp, Homo sapiens
  misc_feature 1..132: note = U/M: M (0.82:0.08) in Lung Bronchial Epithelium
  misc_feature 1..132: note = source = chr14:36992248-36992379; Gene: NKX2-1 (Intergenic)
  source 1..132: mol_type = genomic DNA
cgcaactagcttgctcccgggtggagtgggcacagtggggagcggtcagggcagggcagggcccaacgctggcccctcgcggagctttccctggcgcgacctcacacggtcgctgcctctattccgaccacg

SEQ ID NO: 3119 - DNA, 101 bp, Homo sapiens
  misc_feature 1..101: note = U/M: M (0.85:0.12) in Lung Bronchial Epithelium
  misc_feature 1..101: note = source = chr14:36992388-36992488; Gene: NKX2-1 (Intergenic)
  source 1..101: mol_type = genomic DNA
cgctggctgcggctccgccaggaatccgagggggcgcaggcccaggctcggccctagatgcgcggaatcgccatcagcctttgcttacaccagcgtggccg

SEQ ID NO: 3120 - DNA, 121 bp, Homo sapiens
  misc_feature 1..121: note = U/M: M (0.84:0.12) in Lung Bronchial Epithelium
  misc_feature 1..121: note = source = chr14:36992090-36992210; Gene: NKX2-1 (Intergenic)
  source 1..121: mol_type = genomic DNA
cgaaacacctccctctgaccgaagagcgtcctttctttccgccgcctcctggactcatcctaaatagggcagacccgggctaaaccagtgatttttttttccatgaatacgaagaaccccg

SEQ ID NO: 3121 - DNA, 223 bp, Homo sapiens
  misc_feature 1..223: note = U/M: M (0.84:0.17) in Lung Bronchial Epithelium
  misc_feature 1..223: note = source = chr14:36992526-36992748; Gene: NKX2-1 (Intergenic)
  source 1..223: mol_type = genomic DNA
cgagacaagaacagagggctcatacaaaagaaggctaatttggggtctgtagcttggaccaggtggaactgtgaggaggaaccacctgtctcaccgccccaccccccaactgctttttctaactccctttgtggtcctccacacctgtttagggcgctgagccactctgtctcctggtagtgttattttgctccaagttttatcgcaatttttgattcactcg

SEQ ID NO: 3122 - DNA, 160 bp, Homo sapiens
  misc_feature 1..160: note = U/M: M (0.83:0.18) in Lung Bronchial Epithelium
  misc_feature 1..160: note = source = chr5:134367238-134367397; Gene: PITX1 (intron)
  source 1..160: mol_type = genomic DNA
cgccccgttgcaccccgtcccggctccaccgaaccgctcgccaccagcgctggcggtcttccctccctccctccctctagggttcctgggaactgtccccactggaaagcgcccgccgggtgctggtcgtcagtaggcacctctagtctggtgtgccgcg

SEQ ID NO: 3123 - DNA, 282 bp, Homo sapiens
  misc_feature 1..282: note = U/M: M (0.73:0.1) in Lung Bronchial Epithelium
  misc_feature 1..282: note = source = chr1:50891470-50891751; Gene: DMRTA2 (Intergenic)
  source 1..282: mol_type = genomic DNA
cgtgaggaacttcattttctcaggagtgggaggaggagcatcctggcatctaacacagcccaaccagagggaatccgcccaacccctagtggcggcatctcactcttctctcgctcctcttttctggcattcacatccccacaggtctgagacccacagccttttctcccactccccggaggttagggtgttcatgtgagtgaatgtgttatggagggaggcaaaataaacccgttatggagggagggcaaataaacccaaggtcatctcacccacacttcg

SEQ ID NO: 3124 - DNA, 81 bp, Homo sapiens
  misc_feature 1..81: note = U/M: M (0.74:0.12) in Lung Bronchial Epithelium
  misc_feature 1..81: note = source = chr1:18972420-18972500; Gene: PAX7 (intron)
  source 1..81: mol_type = genomic DNA
cgctttcccccgcctcccgcggtcctcaccctgcagctctccttcccgcctggacttcttgagttcgaattcacccttccg

SEQ ID NO: 3125 - DNA, 80 bp, Homo sapiens
  misc_feature 1..80: note = U/M: M (0.74:0.13) in Lung Bronchial Epithelium
  misc_feature 1..80: note = source = chr6:1605274-1605353; Gene: FOXC1 (Intergenic)
  source 1..80: mol_type = genomic DNA
cgcagggttccgcgaagggagcactcggaaggaaggctggctgcggccccggcgcctgggtccgctgcggcgccgggccg

SEQ ID NO: 3126 - DNA, 320 bp, Homo sapiens
  misc_feature 1..320: note = U/M: M (0.69:0.09) in Lung Bronchial Epithelium
  misc_feature 1..320: note = source = chr14:36994016-36994335; Gene: NKX2-1 (Intergenic)
  source 1..320: mol_type = genomic DNA
cgggtcaagccccactagaagttaacacctgtggtctccaaacttgcctattttcctgtcacgcagttcaagccaagattcaactcgtcttgaatttttgtatttagagcccctaccttctccaccgactccaggggcgccctctggcgggaaggggcctggggtaggagggaacctgagggagcgggttacaaagcagagaacagcgggagctcagcagctccctttgaattgcgaggaaaccaagacggagacgggaggtaggagcacgggcctgaagcggtcagccgaccctgtgaggcccgcgctgccgtgctacg

SEQ ID NO: 3127 - DNA, 447 bp, Homo sapiens
  misc_feature 1..447: note = U/M: M (0.67:0.09) in Lung Bronchial Epithelium
  misc_feature 1..447: note = source = chr14:36976428-36976874; Gene: SFTA3 (intron)
  source 1..447: mol_type = genomic DNA
cgagccgctgtatatcctggatccgggaaggtgtgaagggatcaaccaccacttctagaaatagtcatgtgggcaatatatctctatggggttttcagatggctgcaacttcctaccctggatctctgctgctcttgggcaccacattcctgtccacccagccaagcctggtctgaggctgtgtccttagtcaggggagcctgtttccctttcccctggcagactaggtcctgtgggtcccagcgtcctcttcacctcctgccagttgtaggagttctgtcctcccattttgcggaaccagggagcctgtgggaggccttacctccactgccagccccacctcaccccagggcagattagtgcctctgagccactcaattatccgcaggatgggtggggggggggcggggaggggaatctagaatttatagctgggggtggaaggcg

SEQ ID NO: 3128 - DNA, 270 bp, Homo sapiens
  misc_feature 1..270: note = U/M: M (0.62:0.1) in Lung Bronchial Epithelium
  misc_feature 1..270: note = source = chr9:967980-968249; Gene: DMRT1 (exon)
  source 1..270: mol_type = genomic DNA
cgcagtattctcgccgcccagcagtcaagattctggcttggtttccctctcgagcagctctcctattagtaacaagagcacaaaggcagtgcttgaatgtgagcctgcgtcggagcccagcagcttcacagtcactcccgtcatcgaggaggacgagtgagcagtgcctgctgccgatggcggttcacttggagtaacaggcttattccactttccatggggtttgttaatattttgcattgactcatactatcttaactgttgagaacg

SEQ ID NO: 3129 - DNA, 140 bp, Homo sapiens
  misc_feature 1..140: note = U/M: M (0.6:0.12) in Lung Bronchial Epithelium
  misc_feature 1..140: note = source = chr14:36991185-36991324; Gene: NKX2-1 (Intergenic)
  source 1..140: mol_type = genomic DNA
cgaatggggtctaattgcgaaggcggggtgggtttcccagtcacccagcttctttctctcactcgccattatttcatagttgtttgtaagtttaaggaacaccaagtgtagaatgttgtacatctcttccagtctcaacg

SEQ ID NO: 3130 - DNA, 119 bp, Homo sapiens
  misc_feature 1..119: note = U/M: U (0.02:0.96) in Heart Cardiomyocytes
  misc_feature 1..119: note = source = chr17:45289451-45289569; Gene: MYL4 (intron)
  source 1..119: mol_type = genomic DNA
cgttatggcgggtgcctgtaatctcagctactgaggcagaagaatcgcttgaacttgggaggcgaaggtcgcagtgagccaagatcacaccattgcactccagcctgggtgacaagtgc

SEQ ID NO: 3131 - DNA, 350 bp, Homo sapiens
  misc_feature 1..350: note = U/M: U (0.04:0.95) in Heart Cardiomyocytes
  misc_feature 1..350: note = source = chr11:58317179-58317528; Gene: LPXN (intron)
  source 1..350: mol_type = genomic DNA
cgtgactaccaggaaaggtgttgctggtcttataactacccactggggtgtgggatacagcctctcaagtcgggtcataccttctgcaccaaacacctctccgcagtgagagcagaagaagtgctctgggtgccaggtctggttcattgctgtcagcactttctggaaagggaacacacagatattataatgatgcagaagttgtaaagcatgactctggttctaagtgagtgactgaaagctggagaggagcggggatttacttacatccaggatgggagcagcgcagtaagcacagcgtggagaaaaaagttggtggtagtcgttggggcagtaggccaagccactcc

SEQ ID NO: 3132 - DNA, 83 bp, Homo sapiens
  misc_feature 1..83: note = U/M: U (0.03:0.93) in Heart Cardiomyocytes
  misc_feature 1..83: note = source = chr20:50123513-50123595; Gene: NFATC2 (intron)
  source 1..83: mol_type = genomic DNA
cgctgagctgccgcagaggaccctttctaaagcctgtcccatctcactctcacatccagccccggctggagcgctccacaggc

SEQ ID NO: 3133 - DNA, 57 bp, Homo sapiens
  misc_feature 1..57: note = U/M: U (0.04:0.94) in Heart Cardiomyocytes
  misc_feature 1..57: note = source = chr1:150995966-150996022; Gene: PRUNE (intron)
  source 1..57: mol_type = genomic DNA
cgggcggatcacgaggtcaggagttcgagaccagcctggccaatatggtgaaacccc

SEQ ID NO: 3134 - DNA, 245 bp, Homo sapiens
  misc_feature 1..245: note = U/M: U (0.05:0.95) in Heart Cardiomyocytes
  misc_feature 1..245: note = source = chr10:855627-855871; Gene: LARP4B (exon)
  source 1..245: mol_type = genomic DNA
cgaaaccctcgaggagcgaccacatgacccccgcgctgtgagctgctggcggccagcgccctcgcctcgattgtctgcagccctgtagtgggccgcgaggcacgcaagccgcaactacagctcgccagcggggcacacagacaggcatgcaccaccactacccgtcgcccggatacactgaactggttttgaagcctgaactgcagagatcctaatatagcaacgcaggacgtttacggccaccc

SEQ ID NO: 3135 - DNA, 167 bp, Homo sapiens
  misc_feature 1..167: note = U/M: U (0.04:0.93) in Heart Cardiomyocytes
  misc_feature 1..167: note = source = chr19:16495864-16496030; Gene: EPS15L1 (intron)
  source 1..167: mol_type = genomic DNA
cgcctggcagcccacaccatgacaagaggcacaaagacactagcagaggcgcgggggctccgtggaggggctttaccttggacatctggctgaagtcggcaaagccttcagcactattgaaggacccacttccgaagggatctaaggttccaaagggatctgcaatc

SEQ ID NO: 3136 - DNA, 493 bp, Homo sapiens
  misc_feature 1..493: note = U/M: U (0.04:0.93) in Heart Cardiomyocytes
  misc_feature 1..493: note = source = chr9:134111086-134111578; Gene: FAM78A (Intergenic)
  source 1..493: mol_type = genomic DNA
cgcctgaactgtcaggatatccggctggaatgcacagtcgctcccacctgcccagggaggagatggcggggcttgagccatctccaaatcggggcaggcaaagagcctggatgacaagaaggggccccagggatgcccacgcagcccttctggggcatgtgctgcagcggcaggcacaggaggtttcatttatgtttctgctccgcgtaactcaggaaagggggcgcagactgagctaggctgtgttttgcttggcttttccagacacacatatcacactggtaattggtgcttcagatggcaacatagggatagaggccaaattgagctcctcagggacaggtagaaccccagttacacgacacccacaatcccggcctctcgtttgggcaaaagtatgagtcctgtggcacggtgatgtggctgagccggtggtcccctccacatggccctgcccacctgtgagtgtcctggtgcctgctttcagctttgc

SEQ ID NO: 3137 - DNA, 425 bp, Homo sapiens
  misc_feature 1..425: note = U/M: U (0.06:0.95) in Heart Cardiomyocytes
  misc_feature 1..425: note = source = chr19:2797235-2797659; Gene: THOP1 (intron)
  source 1..425: mol_type = genomic DNA
cggtggatggtgccccagagtgtaggggctcgagactagttgatttgcacgtgaaagatgtttgcaggcgagctgttggctgtctctgggaggggccatttctcgagggccagcaaggcacccaaatgtcaaagcatcagaatacaggcccctgattcaccatggtgtgtgttcagtagaaaccgtgcttggaatgctgatctttccgaggccggccacttgggcacttgctgtcctgtgacgctgggcgccagccacagctaccagctagcctgcaatgacgcaggcaaactgaaaaccgaagttacatgagatacccaacacctcatatccgatagcctttgccttcggcgatctcaccagaatgtgggctgctgtgagttcctgagcacgcttaagacaggccaggttaagctgtgatgttc

SEQ ID NO: 3138 - DNA, 72 bp, Homo sapiens
  misc_feature 1..72: note = U/M: U (0.06:0.94) in Heart Cardiomyocytes
  misc_feature 1..72: note = source = chr14:93410391-93410462; Gene: ITPK1 (intron)
  source 1..72: mol_type = genomic DNA
cgcctcgtgaggacgaagtgaggcgtcggggcaggcctggctcacggtgtcatcagcgcttgcagctgttgc

SEQ ID NO: 3139 - DNA, 369 bp, Homo sapiens
  misc_feature 1..369: note = U/M: U (0.06:0.94) in Heart Cardiomyocytes
  misc_feature 1..369: note = source = chr12:1752352-1752720; Gene: WNT5B (intron)
  source 1..369: mol_type = genomic DNA
cggcaacaccagtggctgatggtgttttgccactcaaggatttctaagcattttccagataaaagcctggtgcctaatcctgtaacattcctgtctgtcaccaggctcagcacaccattagatagaagtggaagaggagctgagaggcgcttttccagggacagatcgtagaactaaaacttttttctttttttttgagacggagtttcgctcttgttgcccaggctggagtgcaatggcgcgatctcggctcactgcaaacctctgcttcccaggttcaagcgattcttctgcctcagcctccctagtagctgggattacaagcatgtgccaccacgcctgggctaattttgcatttttagtagagac

SEQ ID NO: 3140 - DNA, 399 bp, Homo sapiens
  misc_feature 1..399: note = U/M: U (0.06:0.93) in Heart Cardiomyocytes
  misc_feature 1..399: note = source = chr12:113712523-113712921; Gene: TPCN1 (intron)
  source 1..399: mol_type = genomic DNA
cgtggaggtagtgagtatggttctccatgtgcagatgaagagactgagggtcagagtgacagtgtgatttgcccatggctacatagcttggagtggccaggccaggctcatcccagagccctgttcctaaccactctgttcagttgcactcacgtgccagaaatgtcttgtgtatttctacctcacttatcaggaaccatcagaaaatccagtatagaacacgttctgtgaaggagaacgtaaagcctctgtgctcaaagaactttgagggtgtttgtggaggtgtggacagcctccaggagtgtcccagccatcacagatcacatccgacaccaggctgttaggccggtgcccagaccacacatccatggcagagctaacggggagaggcttccgatc

SEQ ID NO: 3141 - DNA, 157 bp, Homo sapiens
  misc_feature 1..157: note = U/M: U (0.05:0.92) in Heart Cardiomyocytes
  misc_feature 1..157: note = source = chr5:31957413-31957569; Gene: PDZD2 (intron)
  source 1..157: mol_type = genomic DNA
cgccagtcacgcagtggttcaagctctaggaatttaatctagcacaagagcccacactcggtcaggaggttgcacatcacagaccagtgcctggggtgttacggggctgaccagggtaacattcatacatgaacgagtcaacttaacacgcattacc

SEQ ID NO: 3142 - DNA, 113 bp, Homo sapiens
  misc_feature 1..113: note = U/M: U (0.07:0.93) in Heart Cardiomyocytes
  misc_feature 1..113: note = source = chr1:86157317-86157429; Gene: ZNHIT6 (intron)
  source 1..113: mol_type = genomic DNA
cgcctgtaatcccagcactttgggaggccgaggcaggcggatcacctgaggccaggagcctggccaacacggtgaaatcccagctctactaaaaatatataaattagcagagc

SEQ ID NO: 3143 - DNA, 457 bp, Homo sapiens
  misc_feature 1..457: note = U/M: U (0.05:0.91) in Heart Cardiomyocytes
  misc_feature 1..457: note = source = chr15:91462055-91462511; Gene: MAN2A2 (exon)
  source 1..457: mol_type = genomic DNA
cggtgacaggctgggagaagaaagtgtcactccagggctttctggagagaaggggggaagctgtagacatgttttcagagctccggaggcctggcagggggagttccagacaaggtagatcgcttgagaacttttgttccctgagcagggacctctatcaagcaaagtggaaaacaccagaaatagaaaaccagaacccatcctgttgttactttgtaagctcatatcagccggcactgataaatgtccccgggtgccaggtcctctgctgggctccagtgtttcagaagtgaaccaagacatggtcactgttttcacagagctcacagctcagtggaacggttcttacccagagatctgtaggcaggctttagggttgagcaaatctcagcaagcccgtgagactggatgcacactcatgtgtaagaaggcatggtgttgctgagaggggccagcc

SEQ ID NO: 3144 - DNA, 166 bp, Homo sapiens
  misc_feature 1..166: note = U/M: U (0.1:0.95) in Heart Cardiomyocytes
  misc_feature 1..166: note = source = chr2:39480266-39480431; Gene: MAP4K3 (intron)
  source 1..166: mol_type = genomic DNA
cgtagcagccaccttttttttggagggggacggagtcttgttctgtcgccaggctggagtacagtgacgcgatcttggctcactggaacctccgcctcctgggttcaagcgattctcctgcctcagcctctcccgagtagctgggactagaggcacgcgccaccac

SEQ ID NO: 3145 - DNA, 437 bp, Homo sapiens
  misc_feature 1..437: note = U/M: U (0.08:0.92) in Heart Cardiomyocytes
  misc_feature 1..437: note = source = chr1:11906187-11906623; Gene: NPPA (intron)
  source 1..437: mol_type = genomic DNA
cggcccccaccccagcctgatgaccctctgagcttcatgaattgataagcaagttactcatcagagtaaatttcacttaagcccttcaggatcttgcaattctggggaggaatatgaactgctaatcagccatgcaaagataacttggctctatgaatattttaatttcccagtgctagtggcagttgctttttttttttttttttttgagacggagtcttgctctgtcgcccaggctggagtgcagtggtgccatctctgctcactgcaagctccgcctcccgggttcacgccattctcctgcctcagcctccggagtagctaggacttacaggcgcctgccaccacgcctggctaattttttgtatttttagtagagacggggtttcaccgtgttagccaggatggtctccatctcctgacctcgtgatccaccc

SEQ ID NO: 3146 - DNA, 294 bp, Homo sapiens
  misc_feature 1..294: note = U/M: U (0.1:0.92) in Heart Cardiomyocytes
  misc_feature 1..294: note = source = chr12:89815348-89815641; Gene: POC1B (exon)
  source 1..294: mol_type = genomic DNA
cgttctaagtggtgccataagctacacacttagtggagaaggggagggggtgcgaaattccacatgccagccagatgccactgaaatgtcatcactactcattctgtcacaatccaatccatggcaaaccgtacctatagcactgcagatggatggctagattgctttgaaaatatcctaacaatcgcctccagttccctcacacagaagatgctaatattacctcgtggagttgttaggaggattgaataaaataatgcatgtaaaatgcttacgctagtgttggacacacac

SEQ ID NO: 3147 - DNA, 351 bp, Homo sapiens
  misc_feature 1..351: note = U/M: U (0.13:0.94) in Heart Cardiomyocytes
  misc_feature 1..351: note = source = chr10:71091101-71091451; Gene: HK1 (intron)
  source 1..351: mol_type = genomic DNA
cgtgttctacatttcagcggccttcttcatagaaactgtcacccaaggctctgataatggagatatgtcagaaatgctggggctgtgtgtccagaatagtaggcgccagccataggtggctgttgagctcttaaaatgtagcaagtctgatttgagatgtgctgtggcatataaactccacacaggttttcaaaaatttcatgtgacacaaagaatatgaaatagcccgttaatagttttctaatattggctgggcatggtggctcacacctgtaatcctggcactttagaaggctgaggccagaggatcacttgagcccaggagcttgagatcagccagggcaatatagc

SEQ ID NO: 3148 - DNA, 101 bp, Homo sapiens
  misc_feature 1..101: note = U/M: U (0.02:0.93) in Heart Cardiomyocytes
  misc_feature 1..101: note = source = chr5:11175520-11175620; Gene: CTNND2 (intron)
  source 1..101: mol_type = genomic DNA
cgctctattcttatcatatactcacatgtcactttacagaaatagaatcccagcacgcacgctgttcgttaacttgacttttgcattcaacacatgttacg

SEQ ID NO: 3149 - DNA, 142 bp, Homo sapiens
  misc_feature 1..142: note = U/M: U (0.04:0.95) in Heart Cardiomyocytes
  misc_feature 1..142: note = source = chr11:11324205-11324346; Gene: GALNT18 (intron)
  source 1..142: mol_type = genomic DNA
cggttgaagaattgggcttggctcagggaaaggatatgcgcaggatgcgtgctgctggcagaacaaaatcagagacagcaaagagccgcaaagggcatggggagcgacatcgcactcggatatctcaagtgctctggagacg

SEQ ID NO: 3150 - DNA, 236 bp, Homo sapiens
  misc_feature 1..236: note = U/M: U (0.04:0.95) in Heart Cardiomyocytes
  misc_feature 1..236: note = source = chr8:28853345-28853580; Gene: HMBOX1 (intron)
  source 1..236: mol_type = genomic DNA
cgcggtggctcacgcctgtaatcccagcactttggaaggccgcggcgggtggatcacaaggtcaggagattgagaccatcctggctaacatagtgaaaccccgtctctactaaaaaaaaatacaaaacattagccgggcgtggtggcaggcgcctttagtcccagctacttgaaaggctgaggcaggagaatggcgtgaacccgggaggcagagcttgcagtgagccgagatcacg

SEQ ID NO: 3151 - DNA, 101 bp, Homo sapiens
  misc_feature 1..101: note = U/M: U (0.02:0.92) in Heart Cardiomyocytes
  misc_feature 1..101: note = source = chr2:10985095-10985195; Gene: PDIA6 (Intergenic)
  source 1..101: mol_type = genomic DNA
cgatccacctgcctcagcctctcaaaatgctgggcttacaggcgtgagccatcgcacctgaccaacccgctgttttattctagagatagtctgaatgtgcg

SEQ ID NO: 3152 - DNA, 205 bp, Homo sapiens
  misc_feature 1..205: note = U/M: U (0.04:0.93) in Heart Cardiomyocytes
  misc_feature 1..205: note = source = chr6:118876312-118876516; Gene: PLN (intron)
  source 1..205: mol_type = genomic DNA
cggccaggtgcagtggctcacgcctgcaatcccagcactttgggaggccgaggcgggtggatcacgaggtcgggagatcgagaccatcctggctaacatggtgaaaccccgtctctactaaaaacacaaaaaaattaggcatggtggcgggcacctgtagtcccagctactcgggaggctaaggcaggagaatggcgtgaacccg

SEQ ID NO: 3153 - DNA, 96 bp, Homo sapiens
  misc_feature 1..96: note = U/M: U (0.04:0.92) in Heart Cardiomyocytes
  misc_feature 1..96: note = source = chr3:151599078-151599173; Gene: SUCNR1 (exon)
  source 1..96: mol_type = genomic DNA
cgtcatgcggaatgtgaggatcgcttcacgcctggggagttggaagcagtatcagtgcactcaggtcgtcatcaactccttttacattgtgacacg

SEQ ID NO: 3154 - DNA, 162 bp, Homo sapiens
  misc_feature 1..162: note = U/M: U (0.03:0.91) in Heart Cardiomyocytes
  misc_feature 1..162: note = source = chr7:151419637-151419798; Gene: PRKAG2 (intron)
  source 1..162: mol_type = genomic DNA
cggctttgataaaggaatgctagactttagcaggtgagtggcgggggtaggatcctgtctattctccagaaatgccatgagactcccgtggggacacacggacatgcagccccatgctctgcgaggttcgtgtgcaagggaagccgagagtgtgcaccgccg

SEQ ID NO: 3155 - DNA, 200 bp, Homo sapiens
  misc_feature 1..200: note = U/M: U (0.06:0.94) in Heart Cardiomyocytes
  misc_feature 1..200: note = source = chr13:31797516-31797715; Gene: B3GALTL (intron)
  source 1..200: mol_type = genomic DNA
cgcaggccgtccgggagcaggctgtccacttgctgacctgcagacacctccatgcctttcaggagtcagctcaccagtcacgtctgccaaacttgtcccgagcatcctggcctggaagccgttactccttcctttgtaaggcatcatacttctatcattgcccattccttatttgtactccttttgaaacaccctctccg

SEQ ID NO: 3156 - DNA, 230 bp, Homo sapiens
  misc_feature 1..230: note = U/M: U (0.04:0.92) in Heart Cardiomyocytes
  misc_feature 1..230: note = source = chr21:29935537-29935766; Gene: LINC00161 (Intergenic)
  source 1..230: mol_type = genomic DNA
cggtctccctctccctctctttccacggtctcgctctgatgctgagccaaagctggactgtactgctgccatctcggctcactgcaacctccctgcctgattctcctgcctcagcctgccaagtgcctgcgattacaggcgcgcgccgccacgcctgactggttttcgtacttttttggtggagacggggtttcgctgtgttggccgggctggtctccagctcctaaccg

SEQ ID NO: 3157 - DNA, 56 bp, Homo sapiens
  misc_feature 1..56: note = U/M: U (0.09:0.96) in Heart Cardiomyocytes
  misc_feature 1..56: note = source = chr18:19444129-19444184; Gene: MIB1 (intron)
  source 1..56: mol_type = genomic DNA
cggcgcgatcttggcttactgcaatctctgctgcccgcgttcaagtgattctcgcg

SEQ ID NO: 3158 - DNA, 166 bp, Homo sapiens
  misc_feature 1..166: note = U/M: U (0.05:0.92) in Heart Cardiomyocytes
  misc_feature 1..166: note = source = chr13:113384765-113384930; Gene: ATP11A (intron)
  source 1..166: mol_type = genomic DNA
cgtgtgatgtgatgaactcccctgctgatgcgtgaataactcctgacacatccctgttctctagtaacacggtgctaggcatgggacacacagccgcttcccaggaaactccacagcgtgagcaccgggtgcctgcgcaggtgcgggaggatggggctcccgtgcg

SEQ ID NO: 3159 - DNA, 204 bp, Homo sapiens
  misc_feature 1..204: note = U/M: U (0.06:0.93) in Heart Cardiomyocytes
  misc_feature 1..204: note = source = chr18:21114779-21114982; Gene: NPC1 (intron)
  source 1..204: mol_type = genomic DNA
cgttaaggtcaccccacccgcaccgagctggcgcattgtcacaacttcttttcttggacctcagtgctcccctatctgaagcagggctcatatctgagagtacggatacactgttctattttccatgaataccttctcaagtgctctcatctttaatgattaaaagtacctgataaccacataggaggcaaaaggcactggtcg

SEQ ID NO: 3160 - DNA, 162 bp, Homo sapiens
  misc_feature 1..162: note = U/M: U (0.04:0.9) in Heart Cardiomyocytes
  misc_feature 1..162: note = source = chr1:74714016-74714177; Gene: TNNI3K (intron)
  source 1..162: mol_type = genomic DNA
cggccagtccagagaggggctcccacagtgcagtgtcaggctgaagggctcctcaagtgcagccagagttggcaccgtggcctgaggaggtgccgagagcgagcgagggctgctagcacgttgtcacctctcactgtggtgaggaataagtaagattaagcg

SEQ ID NO: 3161 - DNA, 199 bp, Homo sapiens
  misc_feature 1..199: note = U/M: U (0.05:0.91) in Heart Cardiomyocytes
  misc_feature 1..199: note = source = chr1:39702578-39702776; Gene: MACF1 (intron)
  source 1..199: mol_type = genomic DNA
cggccttccaaagtgatgagattacaggcatgagccaccgcgtccagccgtgatttccttttgtaaatttcttccatggctactagttgcctctagagtttgatgtcacctaactctttcctgatgtagagcactttgcagcgtttccaacccacctgtctagcttcatttctaagcactctgttttttgtagcttgcg

SEQ ID NO: 3162 - DNA, 239 bp, Homo sapiens
  misc_feature 1..239: note = U/M: U (0.09:0.95) in Heart Cardiomyocytes
  misc_feature 1..239: note = source = chr8:103879036-103879274; Gene: AZIN1 (Intergenic)
  source 1..239: mol_type = genomic DNA
cgcacagagagagtagagataatcttgactttcaaaggagatgagaaggtgtcaagtgatttggggatattaagcttatcaacagggagaattctggagccataaacagagatagaaatagaaggaccctgccaggagcagtggctcacgcctgtaatcccagcactttgggaggctgaggcaggcgggtcacgaagtcaagagatcaagaccaccctggccaacatgacgaaaccccg

SEQ ID NO: 3163 - DNA, 246 bp, Homo sapiens
  misc_feature 1..246: note = U/M: U (0.07:0.93) in Heart Cardiomyocytes
  misc_feature 1..246: note = source = chr18:20780515-20780760; Gene: CABLES1 (intron)
  source 1..246: mol_type = genomic DNA
cgtgcccggtcaggagagggtagattttaataatcatagactggcaagcctagagctgatgcttagcagtttgagaacagacggtttgtgtggaggttgctagcagtcaacgtgagttcactaagaaaatgtcatgtcccatcaacttcgactcctcattgatggaataacttagttaagtgaggaagtgccatggacattgcatatctagattgcggcaaaatgtcagtttattcctcactatcg

SEQ ID NO: 3164 - DNA, 143 bp, Homo sapiens
  misc_feature 1..143: note = U/M: U (0.06:0.91) in Heart Cardiomyocytes
  misc_feature 1..143: note = source = chr21:36822397-36822539; Gene: LOC100506403 (intron)
  source 1..143: mol_type = genomic DNA
cgaggggatggcgctaaaccattcatgaggaatctgcccccacgacccaatcacctcccaccaggccccatcaccagcatgggaatcacgttccaacatgagatttggaggtgacagacactcaaacgatatcattcagcgcg

SEQ ID NO: 3165 - DNA, 151 bp, Homo sapiens
  misc_feature 1..151: note = U/M: U (0.06:0.91) in Heart Cardiomyocytes
  misc_feature 1..151: note = source = chr4:186583258-186583408; Gene: SORBS2 (intron)
  source 1..151: mol_type = genomic DNA
cgagggatgtgccgtgctgcatgacaatgctggagttgagtgaggctgggagagaatatgccgagggggaaaacggcctctgatagtaactcatgggactcacggcacctcctgagtttccattcactgttatctggctctgagaaaagcg

SEQ ID NO: 3166 - DNA, 185 bp, Homo sapiens
  misc_feature 1..185: note = U/M: U (0.06:0.91) in Heart Cardiomyocytes
  misc_feature 1..185: note = source = chr16:58137284-58137468; Gene: C16orf80 (Intergenic)
  source 1..185: mol_type = genomic DNA
cgtcactcgtcacataggtctcaactcgggccccattcctgaggctcaatgcctataatgcaccttaagtgttatctatttatttatttatttatttttgagatagagtctcactctgtcgcccaggctggagtgcagtggcgcgatcttggctcactgcaacctccacctcccagattcaagcg

SEQ ID NO: 3167 - DNA, 194 bp, Homo sapiens
  misc_feature 1..194: note = U/M: U (0.07:0.92) in Heart Cardiomyocytes
  misc_feature 1..194: note = source = chr12:659008-659201; Gene: B4GALNT3 (intron)
  source 1..194: mol_type = genomic DNA
cgctcttcccagggatgagcagccgcccgctgacatgcttcggcctgacccccgggacaccctctatcgaggtaaggcctcggccagcgcttggcgtcctttctggggacactgcactgccaggtccactgctgatggtggagaaggcttgagagacctgccaagtatcccaatcaccgtagaactttttatcg

SEQ ID NO: 3168 - DNA, 311 bp, Homo sapiens
  misc_feature 1..311: note = U/M: U (0.07:0.92) in Heart Cardiomyocytes
  misc_feature 1..311: note = source = chr11:11832410-11832720; Gene: USP47 (Intergenic)
  source 1..311: mol_type = genomic DNA
cgatcctgtgattaacgataccggagctgaagctgtgaaacttcaccagactgccctttatagacttgcaggacggaagtcttggggagcattccttttatgggtgacagaatgaaggaagcccagaaagttaactgactcattcgagatgacagaggaccgcagtgatagaggaaggactatctcagttcccagctcagcacccctttcgctggagggccttattaattaacatcatctaaatactttctgtgtatttttaagaagtggctttggctctatctattccacttactattttaacaaagacg

SEQ ID NO: 3169 - DNA, 326 bp, Homo sapiens
  misc_feature 1..326: note = U/M: U (0.08:0.93) in Heart Cardiomyocytes
  misc_feature 1..326: note = source = chr21:40723800-40724125; Gene: HMGN1 (Intergenic)
  source 1..326: mol_type = genomic DNA
cgtgttagccaggatggtctcgatctgctgacctcgtgatctgcccgcctcagcctccaaaagtgctgggattacaggcgtgagccatcgctcctgtcctatagtgaagtattttttcaacatgtcagagtcagaaattttcacttacaaatttagctcttccacttctcttggcgtcctttgggcgtgcgttccacagactgcacttgaccttgtatcttgtaaggaggtgttctttctccagctgccaaggttccagacctgctgatttcactcctttgtatttcctactgggcttctggaggaattttagtttgtgatgcccg

SEQ ID NO: 3170 - DNA, 393 bp, Homo sapiens
  misc_feature 1..393: note = U/M: U (0.04:0.89) in Heart Cardiomyocytes
  misc_feature 1..393: note = source = chr17:79664393-79664785; Gene: HGS (intron)
  source 1..393: mol_type = genomic DNA
cgcctttaatctagagtgttccccagtcagcttctgtgttttgtgacatctactgtcccaagagcactggcctgtcattcggcagaccgtcctcagctcaggtttgtctggtgtctccacgcggtgaccataaggctgtgcttttctcagagtggcagccgaggtgacgtgcatcccgtcagtcccattgctggccgttcggctgagacggggtctgccaggggttttcactgtgaagtgactgttttgccctttacagatgtctcttgggggaggccttccaaataccctgggactcctcaaggtctagcattttttgctaatgttgcctgtgtttattacggtgtttgccaaatagcgccttctaattctgctgttgtctttccactggcg

SEQ ID NO: 3171 - DNA, 175 bp, Homo sapiens
  misc_feature 1..175: note = U/M: U (0.07:0.91) in Heart Cardiomyocytes
  misc_feature 1..175: note = source = chr4:3168017-3168191; Gene: HTT (intron)
  source 1..175: mol_type = genomic DNA
cgtcccagagcacgaaggtgtctgcctgtatgaggtgtttgttggcccctactgggaggtgtctcccagtcaggctacatgggggtcagggacccacttgaggcagtctgttcattatcggagcttgaatgccgtaccgggagaaccactgctctcttcagagctgtcaggcacg

SEQ ID NO: 3172 - DNA, 273 bp, Homo sapiens
  misc_feature 1..273: note = U/M: U (0.12:0.96) in Heart Cardiomyocytes
  misc_feature 1..273: note = source = chr16:31905880-31906152; Gene: ZNF267 (intron)
  source 1..273: mol_type = genomic DNA
cgcgctctcaccttttcatccagagctttgtgctgttcagataatgacttcagtgctttcagcacttcagcttcgctggacatgcctgctggagactgcacttgtttcttcatcactgtcatcctgagataccgctcatgcctggagacagggcattccaaatgctctaatagtagcctggtggtgttcctttctgctttcatttttcagcagtttcttctttcctttcaaggagctgttccctgcatacattgacttctttagtaagtgccg

SEQ ID NO: 3173 - DNA, 336 bp, Homo sapiens
  misc_feature 1..336: note = U/M: U (0.06:0.9) in Heart Cardiomyocytes
  misc_feature 1..336: note = source = chr2:220494796-220495131; Gene: SLC4A3 (exon)
  source 1..336: mol_type = genomic DNA
cgtgctctgagctgagggacggtgatggaaccaccgacctggccctgtcaagtccaaggctgctgtgttgcctccccagctcccccagcccccgggcccgggcctcccgactcgctggggagaaaagccggccctggagcccatcggccagttatgacctgcgggagcgactgtgcccaggcagtgccctgggcaacccaggtggtccagagcagcaggtgcccacagatgaggcggaggcccagatgctgggttctgcagacctggacgacatgaagagtgagtgagaccttgtggcagcccccatggtccactgcgacggactcccagcctgcg

SEQ ID NO: 3174 - DNA, 377 bp, Homo sapiens
  misc_feature 1..377: note = U/M: U (0.07:0.91) in Heart Cardiomyocytes
  misc_feature 1..377: note = source = chr1:197611724-197612100; Gene: DENND1B (exon)
  source 1..377: mol_type = genomic DNA
cgtatgtagatattgtcttataagtacacatagcacatttctaaatctgcaaaggtttttaggtctttttgtgaaacactcaatacctgctacttaaaagaagtgtgaagtacttacagtgcttaatttgctcgagataatcacgatgcgcctttcatgcagcatactggcatacagctgcagcatgttgttcacatccacggcaacaaaatattctgtaagatttctctgtacaagtaaaagataattgtgtaagttacagctcatagtgaatgtgaagaaaaacattttacacacttaccagaaagtcttgaagttcaaagggtattattatttaaaatggtatttattaaaataattaagtgtaatactagtcg

SEQ ID NO: 3175 - DNA, 465 bp, Homo sapiens
  misc_feature 1..465: note = U/M: U (0.06:0.9) in Heart Cardiomyocytes
  misc_feature 1..465: note = source = chr11:72403812-72404276; Gene: ARAP1 (intron)
  source 1..465: mol_type = genomic DNA
cgctccacggcctctggctctgtttgatagaggatcagggttatggaagaagtcccaggtctagagccaggacagcatgtgcagtgatgtgtggggttggggtgtgtgtatggcatgtatgtgcagaaggtggagggtgtcaaatggagtctgggttgggagaacacctgcatgtggacagaatgagggagaagggtggcccgggaggcatatgacatacgatatgacaaggcatgcatgcacaacttggggctgtcatcaagtaacaggttcctgtggatgcagtgataaggcacaggcacagtgagacagagcatgggcatggagtggtgtgatggcatccgggtgccagggcttagtggggctacagggcacactagagtggccgtccagggccacagcaggaggggtcttgagagtctacagttctcccccactgctgtgccatcctgagagcctgtaacg

SEQ ID NO: 3176 - DNA, 498 bp, Homo sapiens
  misc_feature 1..498: note = U/M: U (0.1:0.94) in Heart Cardiomyocytes
  misc_feature 1..498: note = source = chr6:40900691-40901188; Gene: UNC5CL (Intergenic)
  source 1..498: mol_type = genomic DNA
cggaagcatggctcttacaggacaggacccattcaggcttggcagccaccaagtcaggcctccccctgctgagctgcctgcaaagttgttcatttatcttgtccggaagaggcagctcacttgtgaatcttggcatatcaatcaacacatccagcagaggcattgagagattcagagcccgcaaagcatatctaagcttgtttatggctatcctaagggctgtgctagttgcttgcaaacaaaatgctccaactcattgtggatctatatttggttccagcatgaacattgtaatcgctaaaattcaaaaccaggcagacagtcggcgccttgggacttgtttctgaggctgaactgggatatgccgggggtaatcaaccaactgatccttcaatatttgttggctccttggcctgtacctgttggccccattgtgacttgggcagaatttgtctttagtgcttctgctcacccatccccaaagcctttgcacctccg

SEQ ID NO: 3177 - DNA, 57 bp, Homo sapiens
  misc_feature 1..57: note = U/M: U (0.06:0.89) in Heart Cardiomyocytes
  misc_feature 1..57: note = source = chr6:42840212-42840268; Gene: RPL7L1 (Intergenic)
  source 1..57: mol_type = genomic DNA
cgggcacagtcacagtggctcacgcgtgtaatcccagcagtttgggaggccgaggcg

SEQ ID NO: 3178 - DNA, 121 bp, Homo sapiens
  misc_feature 1..121: note = U/M: U (0.06:0.89) in Heart Cardiomyocytes
  misc_feature 1..121: note = source = chr19:4891305-4891425; Gene: ARRDC5 (exon)
  source 1..121: mol_type = genomic DNA
cgggtcacgggggtgttggcctcctgcctcagaagctcgctgctgtccagccgagaccgccgctctgcactgggcgtgaagccctcgtactgtatgtgggcatacagggcgaatacgaccg

SEQ ID NO: 3179 - DNA, 179 bp, Homo sapiens
  misc_feature 1..179: note = U/M: U (0.08:0.91) in Heart Cardiomyocytes
  misc_feature 1..179: note = source = chr17:1406919-1407097; Gene: INPP5K (intron)
  source 1..179: mol_type = genomic DNA
cgagaatcacttgagcccaggaggcggacgttgcagtgagccaagatcatgccattgcactccagcctgggtgacaagaagaaaactctgtctcgaaaaaaataaaacactttgtctgggctcacagtggcaactataacaaaactccagtgtaaccccggactttagcaggattcccg

SEQ ID NO: 3180 - DNA, 199 bp, Homo sapiens
  misc_feature 1..199: note = U/M: U (0.08:0.91) in Heart Cardiomyocytes
  misc_feature 1..199: note = source = chr2:220495885-220496083; Gene: SLC4A3 (intron)
  source 1..199: mol_type = genomic DNA
cgtccaggctcccaccttgtaggagagccgaggggtctggtagggagcggaggccgaggtctcggccaccgggagaatgacgagcccactggagaaggaccctgagcccaatggggcactgagccctgggcctggggataccaatagctggggctttgggagggatccagcccccagtcctcgagactcactggccccg

SEQ ID NO: 3181 - DNA, 209 bp, Homo sapiens
  misc_feature 1..209: note = U/M: U (0.11:0.94) in Heart Cardiomyocytes
  misc_feature 1..209: note = source = chr16:12221232-12221440; Gene: SNX29 (intron)
  source 1..209: mol_type = genomic DNA
cgaaagaagtcctataccctttaattatcacctccttagcctaggcagtcttttttttttttttttgagatagttctggctctgtcacccaggctggaatgcagtggcgcgatctctgctcactgcaacctccacctcccgggctcaagtgatcctccagcgtcagccttctgagtggctgagactacaggcgcatgccaccatgcccg

SEQ ID NO: 3182 - DNA, 223 bp, Homo sapiens
  misc_feature 1..223: note = U/M: U (0.03:0.86) in Heart Cardiomyocytes
  misc_feature 1..223: note = source = chr12:133317312-133317534; Gene: ANKLE2 (intron)
  source 1..223: mol_type = genomic DNA
cgttttcacatgcctggcacctacaaaccgcaaggcacaggggccaacaactagaagctgctgactagaagagggcggcccagaaagcaaaggcctctctcccagaggcgagtggggagggaacgtcccggaggcgagtggggagggagtgtcccggagccaagacaggagcctgggcgtgcaccaggagtacaggaggaggaaggaggcagcttcagaatcg

SEQ ID NO: 3183 - DNA, 233 bp, Homo sapiens
  misc_feature 1..233: note = U/M: U (0.08:0.91) in Heart Cardiomyocytes
  misc_feature 1..233: note = source = chr12:110725576-110725808; Gene: ATP2A2 (intron)
  source 1..233: mol_type = genomic DNA
cgcccgggtaattttttgtatttttagtagagacggggtttctccatgttgaccaggctggtctccagctcctggccttaggtgatccgcctgcctcagcttcccaaagtgctgggattacagacatgagccacctcacccagcccagataatccttttacacactgtttaaaattttcaattttcctggagatagggtctcctgtcgcccagcgggtaaatgcagtggtgcg

SEQ ID NO: 3184 - DNA, 300 bp, Homo sapiens
  misc_feature 1..300: note = U/M: U (0.06:0.89) in Heart Cardiomyocytes
  misc_feature 1..300: note = source = chr10:855884-856183; Gene: LARP4B (exon)
  source 1..300: mol_type = genomic DNA
cggtgatgtgatgacaggagggcctgggtgaaaatgtcaagacactcactctcagagaacgacgactccacttgaaattcatgtctggtgaaacgggaccaggtttttattcttctatttcaaaatgataagcatcatcacacgattttacaagttaaaatgccatttgtcactgctgcatctctgattctataacctgagatactgctgggggtaaaggagggtgttaacttaaaaaaaaaaaaagtatgaaagccactctcatcgctgtatgtgacacagcacagttggcatggaccg

SEQ ID NO: 3185 - DNA, 312 bp, Homo sapiens
  misc_feature 1..312: note = U/M: U (0.11:0.94) in Heart Cardiomyocytes
  misc_feature 1..312: note = source = chr20:62894192-62894503; Gene: PCMTD2 (intron)
  source 1..312: mol_type = genomic DNA
cggaagcagggcagacctaggagcggctctgccaggggggcctcgctgctctggtttcatgccgtgctccagtgctgagtcccaggtgccgtgttcctgacaccccccggccaccctgtgtcctcctcccctgctagtcatctttgtattaagcaggtgggtcgaggtatttgtgttactactgtttggtgttaagcttcttgggaataggaaccatatctcatatctgttactagaattaactgcttattaagtgtttgatagtgaaggtgaggggtcagtgaaaataagatgagtgggaagaatcaagcg

SEQ ID NO: 3186 - DNA, 62 bp, Homo sapiens
  misc_feature 1..62: note = U/M: U (0.12:0.94) in Heart Cardiomyocytes
  misc_feature 1..62: note = source = chr2:220500101-220500162; Gene: SLC4A3 (exon)
  source 1..62: mol_type = genomic DNA
cgtgacctgctgcgctccgtggctgctttccagcgagagctgcttaggaagcggcgagagcg

SEQ ID NO: 3187 - DNA, 96 bp, Homo sapiens
  misc_feature 1..96: note = U/M: U (0.13:0.95) in Heart Cardiomyocytes
  misc_feature 1..96: note = source = chr1:1560960-1561055; Gene: MIB2 (exon)
  source 1..96: mol_type = genomic DNA
cggaccgcggggacgtgcgcgtgcagttcaaccacgagacgcgctggaccttccaccccggggcgctcaccaaggtgccgggggggctgggctgcg

SEQ ID NO: 3188 - DNA, 217 bp, Homo sapiens
  misc_feature 1..217: note = U/M: U (0.1:0.92) in Heart Cardiomyocytes
  misc_feature 1..217: note = source = chr17:78862340-78862556; Gene: RPTOR (intron)
  source 1..217: mol_type = genomic DNA
cgaggtgggccagtagcccatggtcagtgcagccgtgtcaacactgggaagtgtgtgggcccccagcggggcaggacatgtgtccaagaaagatgtccttgagtcctggcaccagttcacggttagaaactaaccatgtgctacagacgacacccctgcagggagggctgcacccacccagaacacacttgtcaggcacgtgccacgtgccgggccg

SEQ ID NO: 3189 - DNA, 354 bp, Homo sapiens
  misc_feature 1..354: note = U/M: U (0.09:0.91) in Heart Cardiomyocytes
  misc_feature 1..354: note = source = chr19:3965028-3965381; Gene: DAPK3 (intron)
  source 1..354: mol_type = genomic DNA
cggagggagtaagtgggggtggctggctccccgtcacctccacttgctcctcttgggcgcggccctgcaccaggcacttgaaggacatgagctggccactgcgggggtgcagactctgcgccttctcagagagcaattccttagcgccccacaccatcagacgcggcgttcccacccctcccagggctatgcccagcaggtgtgtggaggggagtgcagagccacacgttaacaccatggcaccggcgtatttttgaaaagtgaaagaatgaacagttcaatgcatatcaagagggaactgagggggccaggcgcggtggctcacgcctgtaatcccagcactttgggagttcg

SEQ ID NO: 3190 - DNA, 391 bp, Homo sapiens
  misc_feature 1..391: note = U/M: U (0.12:0.94) in Heart Cardiomyocytes
  misc_feature 1..391: note = source = chr22:47368954-47369344; Gene: TBC1D22A (intron)
  source 1..391: mol_type = genomic DNA
cgtgggaggtggcgtgtcacctcgtctcttccagtcacacacttcagtgtgagttagcaattgtgcagggctgcgactggggaagcagcgcgatgggataggactgtacacgacacgaatgtgaggtgggcctctgggtcctcagggagcacttagggacctgggttctgggaccagtaggtggggctgcatctggcacccccctccccatgtgtaccaggctgctcggcatagccacggccctgcccctctttaccccgctgttgtccggggctcaagggtggtgacagcagagtggtgacagctgaaatgagcacgcacattcacagtgcgcaggagagggcctggcgcgtcagcagaccccggtcaacaccagcggcagcatcatccg

SEQ ID NO: 3191 - DNA, 228 bp, Homo sapiens
  misc_feature 1..228: note = U/M: U (0.09:0.9) in Heart Cardiomyocytes
  misc_feature 1..228: note = source = chr1:12060489-12060716; Gene: MFN2 (intron)
  source 1..228: mol_type = genomic DNA
cgcccgcctcggcctcccaaagtgctgggattacgggcgtgagccactgtgcccgcttgtgactgacactaggcagtgtgactttgttagcttccttgacccttctggtaatccaatttcctggccagtgtgatggtgtgataaatagacttgttgagaggatgaaatctgtcaaaaacacctgacacgtggtaggtgtctacaagaagctattgtcacattttatcg

SEQ ID NO: 3192 - DNA, 296 bp, Homo sapiens
  misc_feature 1..296: note = U/M: U (0.04:0.85) in Heart Cardiomyocytes
  misc_feature 1..296: note = source = chr17:45290345-45290640; Gene: MYL4 (intron)
  source 1..296: mol_type = genomic DNA
cggtgtgggaagccttcattgaagggagtggatttaaaatcagaatcaaatagaaagagcagtccgagtgtggggagtggtggtgcccaaagagggcagaagtgcagcttgtcagaggactatggactaggaagagattgaaggggcaacagtgagggcagtttgtgggtggctaggatgaagaatttacctcagacccggaggcattacaataggcagtccgtgtacgttctagaattatccagggaatttttctttccctttcgctcttacctggagccatcacttaataagcg

SEQ ID NO: 3193 - DNA, 386 bp, Homo sapiens
  misc_feature 1..386: note = U/M: U (0.1:0.91) in Heart Cardiomyocytes
  misc_feature 1..386: note = source = chr15:29067052-29067437; Gene: LOC646278 (intron)
  source 1..386: mol_type = genomic DNA
cggtagcaacaaaaaggataaaatataaaatataagtttgtcatatatgagacctgtgtgaagaaaaaactatttcaaggacacaaaagaaggcttgagcaagttaaaaagcatgttcttggataggatgactcaacttcatcaagatgtcaactctcagttaacttatgtatcaactgggcgtgatggcatgcacttctagtcccatctacttgggagattgaagtgggaggatggtttgagccctggaattctaggttgtagtgcgctatgattgtacctataaatagccacggtactccagtctgggcagcagtgagaccctatctctaataacaaacataaataaagaaataaacatatacggccgggcgcagtggctcacg

SEQ ID NO: 3194 - DNA, 480 bp, Homo sapiens
  misc_feature 1..480: note = U/M: U (0.08:0.89) in Heart Cardiomyocytes
  misc_feature 1..480: note = source = chr2:106053411-106053890; Gene: FHL2 (intron)
  source 1..480: mol_type = genomic DNA
cggtagaaagagtgcaggtccctgtgctttaggtcatgggaatgcagtgagaggcatggcttggcctggccttggggatctgaaatcaatggagaactctggaagccctgaatagaacaatgaaacctaaaagtacgaaacctgctgaaaggcaagatggtgggtgagcagtcagggaaccccgtattggaaaatatgcaacttttcatggaagttatgcattaaaatattttttaatataagaaaatgcctccaaagtgtaatcatttgagtggattagtcacctactcagttaaatacaaaaacttgtgtaaggggtcgggtggatctcaacacataatagaccttattccagcccatcctggataccccaaaaccctgacttggtcattacacattctatgtatgtactgatacacattctatgtatgtaccgaacactcacatgtaccccataaatatgtaaaatattatgtatcg

SEQ ID NO: 3195 - DNA, 191 bp, Homo sapiens
  misc_feature 1..191: note = U/M: U (0.14:0.94) in Heart Cardiomyocytes
  misc_feature 1..191: note = source = chr15:44166456-44166646; Gene: FRMD5,PIN4P1 (exon,TTS)
  source 1..191: mol_type = genomic DNA
cgggaaagcaacatcagctccaggctgtgctcagccacaggggtgggcagcacgctgtctgcagggctgtaggcctcgtctgcaatcacagctactcgctcattgctatctgtccggctgcttctcacgtgaggcaggaaggtgtccccatgggaagtggaacgcactggtgtggaatgggcactgtcccg

SEQ ID NO: 3196 - DNA, 208 bp, Homo sapiens
  misc_feature 1..208: note = U/M: U (0.14:0.94) in Heart Cardiomyocytes
  misc_feature 1..208: note = source = chr11:47371760-47371967; Gene: MYBPC3 (intron)
  source 1..208: mol_type = genomic DNA
cgcctcccaggttcacaccattctcctgcctcagcctcccaagttagctgggaccgcaggtgcccgccaccacgcccggctaatttttttgtatttttagtagagatggggtttcatcatgttagccaggatggtctcaatctcctgacctcatgatccgcccacctcggcctcccaaagtactggggattataggcctgagccaccg

SEQ ID NO: 3197 - DNA, 249 bp, Homo sapiens
  misc_feature 1..249: note = U/M: U (0.05:0.85) in Heart Cardiomyocytes
  misc_feature 1..249: note = source = chr16:46780409-46780657; Gene: MYLK3 (intron)
  source 1..249: mol_type = genomic DNA
cgaagcctccatttccaggactcaaacaattctcccaccttagcctcccgagtagctaggactacaggtttgtgccacaatgcctggtaaatttatttatttattttttgtagagacggggtcttcctatgttgcctaggctggtctcaaactcttggcctcaagcaatcctcccacctcggcctcccaaagcactaggattacaggcatcagccactgcacccagcataattttattttttaaagccg

SEQ ID NO: 3198 - DNA, 308 bp, Homo sapiens
  misc_feature 1..308: note = U/M: U (0.11:0.91) in Heart Cardiomyocytes
  misc_feature 1..308: note = source = chr11:47371313-47371620; Gene: MYBPC3 (exon)
  source 1..308: mol_type = genomic DNA
cggtggacccaccttgctggcgcggtcgtagctgtcgtgcagctgcaggtgctggcccaccttgctgctcaggtccacccatttgcccttgaaccacttgaccacaggcggcttcaggaggctggcgccggccacgcgggctgagaaggtgatgctgccacctgcaaaggcaggggcgacaggcccggcttggggagtgtcctgctgcccccccttcccaccccaatgctgggcacagcagctcacactcacccacggtcacctcgccatcctgtggccgcatcacgaagaggccaatggggtcatcg

SEQ ID NO: 3199 - DNA, 330 bp, Homo sapiens
  misc_feature 1..330: note = U/M: U (0.13:0.93) in Heart Cardiomyocytes
  misc_feature 1..330: note = source = chr16:79577110-79577439; Gene: MAF (Intergenic)
  source 1..330: mol_type = genomic DNA
cgcgatccatgctagctgggtctgtccatatgattccccagtatcttggagacaggcaagagtgtagctagaatgggattttaagccagggagaactggggatcaatcccggtcagacaccatgaccctggtcaagtgcctccttcccacttatctcatacacaaaatgggaatggtgcctacagtagaggctttctgccaagatgacaagagccacttacacaaagagcatgtggtggacacctagcggatgttcaacaaatgtctggatgttctcaagatggcgggcagtcccacctttccaaagcctttgcgggcaggacagacgcg

SEQ ID NO: 3200 - DNA, 115 bp, Homo sapiens
  misc_feature 1..115: note = U/M: U (0.15:0.94) in Heart Cardiomyocytes
  misc_feature 1..115: note = source = chr5:134686461-134686575; Gene: H2AFY (intron)
  source 1..115: mol_type = genomic DNA
cggccgactgaccatgcacacacacactcggcagcacccggctaggcattacctacttcaccaccgatgtagaagtcagtgtttgtcgggtgaacgacagcatcactgtcgatcg

SEQ ID NO: 3201 - DNA, 232 bp, Homo sapiens
  misc_feature 1..232: note = U/M: U (0.15:0.94) in Heart Cardiomyocytes
  misc_feature 1..232: note = source = chr7:1880766-1880997; Gene: MAD1L1 (intron)
  source 1..232: mol_type = genomic DNA
cgtcccgataacctggctgctgcccactgcccaagcgccagagcacacggccaccaatgagagctgtgcttccctggtcctgggttaaaaatatccccgtaagtgacaagactttgagaatttcgtctctccagtcactcacatggggggcgaggacagctcttggctccgcgtctcgcccggctgcatctgatgcctccctgggctgaagctgcatctcatgaaacagacg

SEQ ID NO: 3202 - DNA, 312 bp, Homo sapiens
  misc_feature 1..312: note = U/M: U (0.12:0.91) in Heart Cardiomyocytes
  misc_feature 1..312: note = source = chr6:158320269-158320580; Gene: SNX9 (intron)
  source 1..312: mol_type = genomic DNA
cggtctttttaatgtccccctcgttgcccttctctcccctttattgttagtgttaaacagctgcttttcaaagttctgtcgtccctttcgtcctccccaagcctctagaattaaagggtattctgcttatttgtaaatgtataagactagatttatcagtgtctaggcctctagaagtcttttctactgtgtaccacttaacattcttacagtctgcatttatctgaagtgatgtggactgacagccctttaaaaaaattatctatattttcacgcctgtaatcccagcagtttgggaggccgaggcaggcg

SEQ ID NO: 3203 - DNA, 480 bp, Homo sapiens
  misc_feature 1..480: note = U/M: U (0.12:0.91) in Heart Cardiomyocytes
  misc_feature 1..480: note = source = chr3:123212568-123213047; Gene: PTPLB (TTS)
  source 1..480: mol_type = genomic DNA
cggtagtaccaaactatttcttggctgctccaacatgcggagatgacactgcttttagctcatgacagcccaaggggaatgttttactgactatggacttatagcttggtggaaattaacataggaagttaattagcaaaagtatccaaacagaagagtgaatgaaaatttaaaaataaaacaataatggtgtataaatctattcctgaatgtttttcctgactacctttctaaagcaacaccttccatgtgctttcactaacacagcctcctttcctatgtgactggatccgcttcttcagggccatcagtgcatcagtgagaatagctactggcaaacacgttactcagaggtgttctgagaatggtgctgtgaaaaggacttgtcacttttgagctattgagctccccctttctgagacctgtcattttgttaagacatgattgaggctgagctccagataagatatattctttacg

SEQ ID NO: 3204 - DNA, 144 bp, Homo sapiens
  misc_feature 1..144: note = U/M: U (0.1:0.88) in Heart Cardiomyocytes
  misc_feature 1..144: note = source = chr2:175827352-175827495; Gene: CHN1 (intron)
  source 1..144: mol_type = genomic DNA
cggtggctcacgcctgcaatcccagcactttggaaggcccggggggggggggggggggggcagatcacctgaggtcaggagttcgacaccagcctagccaacagggtgaaacccggcctctactaaaaatacaaaaattagccg

SEQ ID NO: 3205 - DNA, 92 bp, Homo sapiens
  misc_feature 1..92: note = U/M: U (0.11:0.88) in Heart Cardiomyocytes
  misc_feature 1..92: note = source = chr4:8374310-8374401; Gene: ACOX3 (intron)
  source 1..92: mol_type = genomic DNA
cgagtaaatgtggccacatacgtgcgccacaatcagacacgcccctctctggaaccgcaggctcagggaagggctttatacaacgaatcccg

SEQ ID NO: 3206 - DNA, 179 bp, Homo sapiens
  misc_feature 1..179: note = U/M: U (0.14:0.91) in Heart Cardiomyocytes
  misc_feature 1..179: note = source = chr3:58271022-58271200; Gene: ABHD6 (intron)
  source 1..179: mol_type = genomic DNA
cggtggtgccacaggcacagtccagcacatactcactttgttttccttttctgacaagtgtttttggaaatcgtcagtgagaagtccagatactctctccatcagaacatggacaagatcaaggttccgacgcagatcatctgggggaaacaagaccaggtatgtaacacatccccgcg

SEQ ID NO: 3207 - DNA, 193 bp, Homo sapiens
  misc_feature 1..193: note = U/M: U (0.16:0.93) in Heart Cardiomyocytes
  misc_feature 1..193: note = source = chr7:101662149-101662341; Gene: CUX1 (intron)
  source 1..193: mol_type = genomic DNA
cgcaggcatctggaaaactccactgtacacttgcgggagaaggcgaggaaaaggcaagtaacaagaatagttttgaccttgtggatccatgaaaggatctggggagccgggagtccccagaccctgctttgaggatcgttggcttagtggcattggcatccaggctccaccataatcctgagccgtggccacg

SEQ ID NO: 3208 - DNA, 449 bp, Homo sapiens
  misc_feature 1..449: note = U/M: U (0.14:0.91) in Heart Cardiomyocytes
  misc_feature 1..449: note = source = chr1:1164854-1165302; Gene: SDF4 (intron)
  source 1..449: mol_type = genomic DNA
cgtgctgggattacaggcgtgagccactgtgcccggtcttttttttacagacactgagttttcagccctgtctctccgtctttccatctctctctcgagctgtcagcacctccaggggctaacctgtccccatcgcccaacacctgcagcacagctttcctgtggggcccggctctgtccctcctggcatcatgccactgacccatggggttagggtcactctccagaccctgacttgaacattcttgagatctatgaccttagctaagtcatgtggcctccccggcctcagcttctcactaagaaacaggaggctccccctctccccccgactgaccaggctttgcgaagacagccaaccctaagtgcagagggcgtcagggcctggtcccagcaaacaaacacacaacccccacacacagatgtgcacacacacatccacactcacg

SEQ ID NO: 3209 - DNA, 136 bp, Homo sapiens
  misc_feature 1..136: note = U/M: U (0.15:0.9) in Heart Cardiomyocytes
  misc_feature 1..136: note = source = chr4:1670472-1670607; Gene: FAM53A (exon)
  source 1..136: mol_type = genomic DNA
cggggccccgtgtcctccgtccacaccaacaggcactggagtcctggaacatcagacttgcgaaggccccagcattgctgggtcagccaaatctcaaggtcatgtctccactttctttacagatgagcagtccacg

SEQ ID NO: 3210 - DNA, 430 bp, Homo sapiens
  misc_feature 1..430: note = U/M: U (0.15:0.9) in Heart Cardiomyocytes
  misc_feature 1..430: note = source = chr20:2126781-2127210; Gene: STK35 (exon)
  source 1..430: mol_type = genomic DNA
cgttttagccccaagtgcctgcccttgcttcttacccctcccctgctttctcaaacacttgcccacctcaggcactcagcgggctccgccgtggtgagagaactggccgtggctcagccccgggtagcacctgtagtttcagtgccactctccactgtccccttgtggaccagcttccactcactgtcacgtcccccctcctgcgtcttcactgggtctcaggctgccagcagctctctggtgcatcgtctcaacaccaccaagtttgtaggacctgcccaagttctagtagtattcaaaacttcaaacggcagtcatttgttctcctcggctctgtggcaaggatagccctttggagggggactcttgacctcggctgttagggatctgaacttggttttcccgtcagaagaatcagcaggacagatcg

SEQ ID NO: 3211 - DNA, 157 bp, Homo sapiens
  misc_feature 1..157: note = U/M: U (0.2:0.94) in Heart Cardiomyocytes
  misc_feature 1..157: note = source = chr12:65076064-65076220; Gene: RASSF3 (intron)
  source 1..157: mol_type = genomic DNA
cgggcgccacgagataggtggctcacgcctgtaatcccagcactttgggaggccgaggcgggcggatcacaaggtcaggagatcgagaccatcctggctaatacggtgaaaccccgtctctactaaaaatacaattagccgggcgtggtggcgggcg

SEQ ID NO: 3212 - DNA, 188 bp, Homo sapiens
  misc_feature 1..188: note = U/M: U (0.22:0.96) in Heart Cardiomyocytes
  misc_feature 1..188: note = source = chr2:134867260-134867447; Gene: MIR3679 (Intergenic)
  source 1..188: mol_type = genomic DNA
cgcaagctccacgggcagccctggttcccgctagcgcctctccctccacacctccccgcaagctgagggagccggcttaggcctcggccagcccacgaaggggctcccacagtgcagcggcgggctgaagtgctcctcaagtgctgccaaagtgggagcccaggcagaggaggcgccgagagcgagcg

SEQ ID NO: 3213 - DNA, 243 bp, Homo sapiens
  misc_feature 1..243: note = U/M: U (0.22:0.96) in Heart Cardiomyocytes
  misc_feature 1..243: note = source = chr9:135195492-135195734; Gene: SETX (intron)
  source 1..243: mol_type = genomic DNA
cgtcacatcaatatacaaaagactcatttctaaaagttgaatctgttctcatttgtctttcgtaagagataattctacgtaatgtcactacattccacttgcaataaaacataaccaaataattaaatctatgtttcaggttctaaataggatataaaccaaatttggtaaccccaaaaaaaaagtctaggccgggcgcagtggctcacgcctgtaatcccagcactttgggaggctgaggcg

SEQ ID NO: 3214 - DNA, 468 bp, Homo sapiens
  misc_feature 1..468: note = U/M: U (0.2:0.94) in Heart Cardiomyocytes
  misc_feature 1..468: note = source = chr3:176989876-176990343; Gene: TBL1XR1 (Intergenic)
  source 1..468: mol_type = genomic DNA
cggttcaggctcgcgcctctccctccatacctccctgcaagctgagggagcaggctccggccttggccagcccagaaaggggatcccacaatgcagcggtgggctgaagtgttcctcaagtgccgccaaagtgggagcccaggcagaggaggcgccgagagcgagcgagggctgtgaggactgccagcacgctgtcacctctcaacactgcggtgctgataatgacacttcctgataattaggtaagaatctggccattgccaccctcttcagggctgtgaatttaacataatcatgataatttcaagcaacaaaatgctctaggttgttggggtaggaaggattttgagatggtctctaggattctgtcccctgatacacgtgccctgtaaaaccccattctctggagtgtgagtgcgaacagtgactatgatggaatcatcgttggtgattccacagacctccacg

SEQ ID NO: 3215 - DNA, 246 bp, Homo sapiens
  misc_feature 1..246: note = U/M: U (0.2:0.93) in Heart Cardiomyocytes
  misc_feature 1..246: note = source = chr20:2123464-2123709; Gene: STK35 (intron)
  source 1..246: mol_type = genomic DNA
cgccctgcccaggacagcgctatacttagcactgatccgatagctcagagtgggcgctgcccaagactaatctctgtgggcccttgtattctaggcctccagtagaataagccactgaagggcaggcttcttgtcttattcctgaggcctggcactaaggcagtttccaaataatagccaacactaataggatcaggcactcttcttggttttacgttcatttaatcttcataatagcctgtgacg

SEQ ID NO: 3216 - DNA, 380 bp, Homo sapiens
  misc_feature 1..380: note = U/M: U (0.19:0.92) in Heart Cardiomyocytes
  misc_feature 1..380: note = source = chr12:133323784-133324163; Gene: ANKLE2 (intron)
  source 1..380: mol_type = genomic DNA
cgcaccccagcagcctctctctctccacagccctgcgtgtcaggcagcctctctctcacaccacagccctgcgtgtcaggcagcatctctctctctccacagccctgcgtgtcaggcagcctctctctctctccacagccctgcgtgtcaggcagcctctctctctctccacagccctgcgtgtcaggcagcctctctctctctccacagccctgcgtgtcaggcagcatggtttgcaggggcagctctgtgcctcagtggctcttggtaggacactgagggcctgcctgtggtgtgcacagctctgccactcccgggaggggaagtgctgctcagctcaaggtgtcctgttcggcagaggaaatgtcctctgacaaccg

SEQ ID NO: 3217 - DNA, 217 bp, Homo sapiens
  misc_feature 1..217: note = U/M: U (0.22:0.94) in Heart Cardiomyocytes
  misc_feature 1..217: note = source = chr11:2756110-2756326; Gene: KCNQ1 (intron)
  source 1..217: mol_type = genomic DNA
cggctgggaccaccgcagaggtgatgtctccaggaggcttctgggccagcagcatgttccagtgcgacacatgtgccccggagtggccgcgtgcccagccggctgtgcacgctgccccaggctggtggggtaagcgcctcggagggcacactaacaagaggcacatgtgccagggaagccctgccttgtcatcacctgtgccgtggctgtcagcgcg

SEQ ID NO: 3218 - DNA, 285 bp, Homo sapiens
  misc_feature 1..285: note = U/M: U (0.21:0.93) in Heart Cardiomyocytes
  misc_feature 1..285: note = source = chr17:78937940-78938224; Gene: RPTOR,RPTOR (intron,exon)
  source 1..285: mol_type = genomic DNA
cgtgggggttcctgagaccccggcaggagctgcctaaggatgcgggttggcctgcgcccccccgccccccgcagtgtctgcccgcacctgaacccctgctcaccccttctctctccttgcagcctcacctggccgtgggaagcaacgactactacatctccgtgtactcggtggagaagcgtgtcagatagcggcgtgacccgggcccaccaggccacggccgcctgctgtacatagtgaagctgtcactcgccggggcacggggcgtcggctgctgcggccccg

SEQ ID NO: 3219 - DNA, 209 bp, Homo sapiens
  misc_feature 1..209: note = U/M: U (0.22:0.93) in Heart Cardiomyocytes
  misc_feature 1..209: note = source = chr10:103727302-103727510; Gene: C10orf76 (intron)
  source 1..209: mol_type = genomic DNA
cggccaacatggtaaaagcccgtctctactaaaaatacaaaaattagccaggcatggtggtgtgcgcctgtattcccagctactcgggaggctgaggcaggagaattgcttgaaccagggaggcagaggttacggtgagctgggatcgcgccacggcactccagcctgggctacagagcaagactcagtcgtggggggagcagggggcg

SEQ ID NO: 3220 - DNA, 229 bp, Homo sapiens
  misc_feature 1..229: note = U/M: U (0.23:0.94) in Heart Cardiomyocytes
  misc_feature 1..229: note = source = chr2:100037591-100037819; Gene: REV1 (intron)
  source 1..229: mol_type = genomic DNA
cgggaggctgaagtgcagagagtaacaagactcagacttaacacgcaactctaaacccataccaccacctagctttaaatacggtttccgttcacttttgggaaaaaaaaaactgtttacaaatgttgaatgaaaccttcccaattttttaagaataagtaagaaatattctaacttatttattgcgaagattatcaaccatttacttatatttccagcacttatctcg

SEQ ID NO: 3221 - DNA, 425 bp, Homo sapiens
  misc_feature 1..425: note = U/M: U (0.25:0.94) in Heart Cardiomyocytes
  misc_feature 1..425: note = source = chr20:55982343-55982767; Gene: RBM38 (intron)
  source 1..425: mol_type = genomic DNA
cgggggtgcagtctgggaaggccttgctgagaaggagacatggagtggaggagggagcctggtggttagtgcagacagtcagtgcgaaggccttgaggcggcagcatctggccaggtgctgtttctgtgcccatctgaccgatgaggaaagtcggggctcggggtggggggcggcacgcatcgtgtaccccactgttctcccagctgtattccccaactccgttctggccctaacctgctctgcttggccccacaggctgaccccgcactacatctacccaccagccatcgtgcagcccagcgtggtgatcccagccgcccctgtcccgtcgctgtcctcgccctacattgagtacacgccggccagcccggcctacgcccagtacccaccggccacctatgaccagtacccatacgccgcctcg

SEQ ID NO: 3222 - DNA, 410 bp, Homo sapiens
  misc_feature 1..410: note = U/M: U (0.22:0.9) in Heart Cardiomyocytes
  misc_feature 1..410: note = source = chr16:88019671-88020080; Gene: BANP (intron)
  source 1..410: mol_type = genomic DNA
cgtctcaacctcccttacctctgcctgccaaattccagtactctctgaatcttgaccaccaaagatgtcccacgggatctcaaagcacccctgggcacctgcattgagaaccactgttttaaggaattaaacacaaggatgaacgaacctctcctgtccccggagccttgcgtgctggcggacagctgcccatcacgtgtcacttgtcacttgtcacgttgtgccagtgctgggcaggtcattgtcaccacttgggaaaagcgttgacaaaattggtcgttagattccaccgctgacaatgtgtgatggggggagaggttcctctgtgaagaactccaaaggctggagtgtagtttctgtagtgggttggccttgagggtgccttgcttggattccatctgcacagggcg

SEQ ID NO: 3223 - DNA, 239 bp, Homo sapiens
  misc_feature 1..239: note = U/M: U (0.29:0.93) in Heart Cardiomyocytes
  misc_feature 1..239: note = source = chr16:87432441-87432679; Gene: MAP1LC3B,MAP1LC3B (exon,intron)
  source 1..239: mol_type = genomic DNA
cgacttattcgagagcagcatccaaccaaaatcccggtaggtagtctcaggcctcggtttcagtcatgaatgtacgcagaggagagcaccgcataagtgcatccacttgacgggtttttacaggaatcaccagacagccaaaccctgggtgtcagtttcacaacctagagagaggtatcctttttttaagagacagggtctcactctctttcccaggctggagtgcagtggtgcgatcg

SEQ ID NO: 3224 - DNA, 213 bp, Homo sapiens
  misc_feature 1..213: note = U/M: U (0.06:0.97) in Heart Cardiomyocytes
  misc_feature 1..213: note = source = chr14:31642248-31642460; Gene: HECTD1 (intron)
  source 1..213: mol_type = genomic DNA
cgaaggggtgccactttgttatctggatttctaagagtactgtccgaaaactagaaactgcctatatggttatctcacaactttctttttatatttaaaaaaatattttctgacctcctgtgtcaattgcatctataagtgcatcggtatctttacttcgaatacaatctataagctgccgatgtgagcgctccccagaactatctaatctcc

SEQ ID NO: 3225 - DNA, 372 bp, Homo sapiens
  misc_feature 1..372: note = U/M: U (0.03:0.92) in Heart Cardiomyocytes
  misc_feature 1..372: note = source = chr14:23874990-23875361; Gene: MYH6 (intron)
  source 1..372: mol_type = genomic DNA
cgcataagcaggaggatgagtgaccacaatccctccgggacccttgccagcactgcccactgacctcctcccaggacacagggacttggccttgctccccttgctctgaccagtgccccggcccctaccccgatgtcccctgggacactttccccaggtaatttcccttcccattgtatctcccatcctagagactgtcctagggtacctttctcttgccagatccccagaccatcctggggacaccctgtgcccatgaccatcactcttcagtccctatgttccaagggtcttggggcagacctggagattggcagctctcagatctgtgcacaccttatgctgaccccgaggctgtctcccgcgggcagc

SEQ ID NO: 3226 - DNA, 283 bp, Homo sapiens
  misc_feature 1..283: note = U/M: U (0.06:0.93) in Heart Cardiomyocytes
  misc_feature 1..283: note = source = chr1:230978623-230978905; Gene: C1orf198 (exon,intron)
  source 1..283: mol_type = genomic DNA
cgaggcccacagaggggcaagacccagtgaggcctctcaagtgtgcctgcctgctttgccaacaggcagctcccctggcccaaatccagaccagtcctaaagaacagaccattgcctctatggacagctcccaaaaagaaggcccaacacagctttgagctgtgacagccctgggcgcagcgccttccaggggcctcttctgatagcagcccgcgcactggggaaagcgcagtgggccacggaaccctgactggtaaacaaattagggcacccagatggactc

SEQ ID NO: 3227 - DNA, 469 bp, Homo sapiens
  misc_feature 1..469: note = U/M: U (0.07:0.93) in Heart Cardiomyocytes
  misc_feature 1..469: note = source = chr11:68550868-68551336; Gene: CPT1A (intron)
  source 1..469: mol_type = genomic DNA
cggctcctgcctgctctgctaccccggggcatgcggctccaccccctggacacccactgtcctcctggtctgctcccaccctctgcaagacacagcccacctgcggcccctccacgcagcacagaacctctcctgatctttgcagaaggggccccaacacctgcccctcccgccttactcccagcgatagcgtagcagttgtcacactgctggaacgcagcagctctcagctggggacaacagtgtccccctgatgctgggcaatgtctgcgacacttctggttgtcacacaggttgctgctggcagtcggtgggcagaggccagggctgctgctcagcatccaacgctacacagggcagtgccccccacaaagaggtacccggccctgagtgtgcacagctctgaggtgagaaaccctcctatacaatacacaccacacctgcgagaaaaccaagctcgggctgattc

SEQ ID NO: 3228 - DNA, 231 bp, Homo sapiens
  misc_feature 1..231: note = U/M: U (0.09:0.92) in Heart Cardiomyocytes
  misc_feature 1..231: note = source = chr22:19858222-19858452; Gene: GNB1L (Intergenic)
  source 1..231: mol_type = genomic DNA
cgcagggcgtaggcaccgtgtgggttgtcgtcctccactcctggccagtgcaggcagtctcggctgctgtcgcctgtattccctgacgacccgtagtgccagcccgagctggatgctgtcaccgcctgacggagcgcagggtgtctgtggcaagtcctcaactcttggccaaacttcaccctgcatggtggattctgggaacagaaatcgatgatgccagccacgcctgcc

SEQ ID NO: 3229 - DNA, 373 bp, Homo sapiens
  misc_feature 1..373: note = U/M: U (0.11:0.93) in Heart Cardiomyocytes
  misc_feature 1..373: note = source = chr22:42042134-42042506; Gene: XRCC6 (intron)
  source 1..373: mol_type = genomic DNA
cgtctctactaaaataaaaagaaattagctgggtgtcgtggcaggtgcctgtaatcccagccacttgggaagctgaggcaggagaatcgcttgaacccgggaggtggaggttgcagtgagccgagatcacgcgactgcactccagcccaaccaatagtgtgagactctgtctcgaaaaaaaaaaagcagagacaagacaactagtacagtacttacagggttattatgatgattaaatgagagaatagctgtgaggtgattgatatagtgctgtgcttaatacaaactatcattttattatacgggttgagtgtttctaatctgaaaatccaaaattagaaatgctctacagtctgaaacttttttgagcacc

SEQ ID NO: 3230 - DNA, 461 bp, Homo sapiens
  misc_feature 1..461: note = U/M: U (0.13:0.95) in Heart Cardiomyocytes
  misc_feature 1..461: note = source = chr11:68550315-68550775; Gene: CPT1A (intron)
  source 1..461: mol_type = genomic DNA
cggcacgtacggagcccttcctgtgaatgactcccatgggtaagatgctgatctggccctatccagagggggcatcgggaccgaggcgcctacagacccacagggagcccaggccccgcggcgccggctcaggctccccacgtctcctccgctggggattccaggctctgagaggagggcatcggatgagcgcatcttcacccgagatgcatctcctgccgccgctctttccagccttgtcaacaccacagcagataccgaacaacgccggcttgcccgcacacatcctcctccatcccgctcctgctcccaggcctggccctctttcaggccctcactacttgggccaccgaaaagcatccctgtgtccagggcccctcctccctgcccaaccagaagaatctcccacattaacctactcatgcacccccggccccaccccaccctacaccacctgaagc

SEQ ID NO: 3231 - DNA, 224 bp, Homo sapiens
  misc_feature 1..224: note = U/M: U (0.03:0.92) in Heart Cardiomyocytes
  misc_feature 1..224: note = source = chr13:113383612-113383835; Gene: ATP11A (intron)
  source 1..224: mol_type = genomic DNA
cgtttgctttcccacccctgctgtttccatgggtttatccgactctgcccactgaggcagcacagtcccctcgccttagcattgcgggcccagagtatctaacgcgtccgagtgcgaacagtgtcagaaggcactgaggcagcgcggttcccacctcggcattgcaggcccagagtatctaacgcgtctgcgtgtgaacagtgtcggaaggcactgaggcagcg

SEQ ID NO: 3232 - DNA, 439 bp, Homo sapiens
  misc_feature 1..439: note = U/M: U (0.07:0.95) in Heart Cardiomyocytes
  misc_feature 1..439: note = source = chr6:504028-504466; Gene: EXOC2 (intron)
  source 1..439: mol_type = genomic DNA
cgtgctgggacaggtgctggggtggcccggctcgctggctccatgcagctctgacggccaacaccgttggcaaaagcagtagccacgtgctttcccgactgggcagaggaaggtgctggcagccagggtaaaggcatgcacatgcgaacactgagaggaggcccagaccaggcaggggctgggacggtgacgtacggtgatgcagggctcgcctgcggcctcgcagtctcttccttaaatgggaggtcagacggagaaggtgaggcagaggccgtcagagaggggctccgtgtgcatccgttatggaagcggctgaggcctcgcggtgatggcagaacgatgtgtgggatgagtttcaaaggacctcagttgtggctcctggcggcaggaccagaatctgatttttggtgacagaacctttttcaaagggccagtgacg

SEQ ID NO: 3233 - DNA, 130 bp, Homo sapiens
  misc_feature 1..130: note = U/M: U (0.07:0.93) in Heart Cardiomyocytes
  misc_feature 1..130: note = source = chr22:28374497-28374626; Gene: TTC28 (exon)
  source 1..130: mol_type = genomic DNA
cggcacgggccagggaccggctgcagtgatcatatgctggagcgtcactgggacagagagagcaggatgaggacagcgtgggtgacacctttgtctcctgctaaaacccagcaagtttcagtgtggaccg

SEQ ID NO: 3234 - DNA, 448 bp, Homo sapiens
  misc_feature 1..448: note = U/M: U (0.07:0.93) in Heart Cardiomyocytes
  misc_feature 1..448: note = source = chr14:52477280-52477727; Gene: NID2 (intron)
  source 1..448: mol_type = genomic DNA
cgcctgatcatttgattcagagtagccctagttctcacaacactatctgaattttctacatatcacatcacagactaatattgtttataccagtcttgtttcctcctaataaaatataagtgccatgaaagaacagaccttgtcttttcctagaacaggtcctgacacctcttagatcctcagtaaatctttgttacatgaatgcatttgagctttcactctcttgttctgaccttccccacattgtatttaaaacccaagggcttcacatcaggatctacaggtaagagaagaattagggaagcccagctgaccctcggattggatccacagcgatggcacggggattcaccagatctgtgtagaagaggaccttgcgctcagagccatccagcagggcgctctctatcttatccaggacactgtccgtccagtacattgttctgcg

SEQ ID NO: 3235 - DNA, 275 bp, Homo sapiens
  misc_feature 1..275: note = U/M: U (0.07:0.92) in Heart Cardiomyocytes
  misc_feature 1..275: note = source = chr17:1792185-1792459; Gene: RPA1 (intron)
  source 1..275: mol_type = genomic DNA
cggaggccctcccgtgtgccaggcactgtggtcacaacagtagagacaaagcattcctggtaggaagcccgcagatgagtaggtgtggaagagcttatccatccgctttttcatgccagaaagtggtgttgagataccccagctgattcagtctttcatgcacgtcatacagccatagcgtcagtgacacttgcctgctaactgctatgaagataaattaatttgaaaacggcatttatagacagcactaattgtacttacacagccaatgcccg

SEQ ID NO: 3236 - DNA, 476 bp, Homo sapiens
  misc_feature 1..476: note = U/M: U (0.05:0.9) in Heart Cardiomyocytes
  misc_feature 1..476: note = source = chr16:46781730-46782205; Gene: MYLK3,MYLK3 (exon,intron)
  source 1..476: mol_type = genomic DNA
cgatggccctgtccaccgcagccaccatcctgaagagggcctccagcctggcaccgtgctgggccgcatcctgctgcatggccctcaccagctccaggacctcgggccacccagcctgggtgtcaatgtggggaaccccatcagccccgcccgggcccggtgcccgggaggcctccagcctgtgcaggccccgctccaggtggcccatgtctcggcacatgctctgcaacttctctgtgacatcttcttggaagtgcaggagctggtccaccttctcgttcagcatgttcagctttgtgtccatggttgttaagcaggtcttgcccaaccctggcagccccccatgccccagactctccttggaggttcctgacatgctggtgcaggcttgacaagggcaagagcggggaatgaggagaggcacagacccctggttctcactcaggcggtggtgtctgcaaggtcattgtcctccg

SEQ ID NO: 3237 - DNA, 358 bp, Homo sapiens
  misc_feature 1..358: note = U/M: U (0.1:0.94) in Heart Cardiomyocytes
  misc_feature 1..358: note = source = chr11:16877102-16877459; Gene: PLEKHA7 (intron)
  source 1..358: mol_type = genomic DNA
cgaggaaagtgaagaacatgctcaaggacctatagacaccagtgctgggtctgtcagcaatcacctgttctgctggacaagggacatatccctcttggcctcagtttcctgatctgtcatttggggagaacacttcttatgggtctctctcacaaaactatagtgaagatcaaatggacttctggttacaaaggggcttggcaaaatataaaagaagggaaggaaggaacaagtggccaggagctcaccttgggtccaggcttggcctccagggtggaggcggtcccagccgtggatgtttcactgaccatgctggacggtctttggtttctgtcttgcttcgacatatgtggattcg

SEQ ID NO: 3238 - DNA, 35 bp, Homo sapiens
  misc_feature 1..35: note = U/M: U (0.08:0.91) in Heart Cardiomyocytes
  misc_feature 1..35: note = source = chr22:22053867-22053901; Gene: YPEL1 (exon)
  source 1..35: mol_type = genomic DNA
cgcagggacgggcaacgcgtctagcaggccaggcg

SEQ ID NO: 3239 - DNA, 200 bp, Homo sapiens
  misc_feature 1..200: note = U/M: U (0.07:0.89) in Heart Cardiomyocytes
  misc_feature 1..200: note = source = chr2:220508803-220509002; Gene: SLC4A3 (Intergenic)
  source 1..200: mol_type = genomic DNA
cgaaaaagcttcagtgacagccagtgataaccgcttgtcaccctggcagccttactcatttaaagacgacccatctatggcaagggagggcggccgtagtttaggaagggcaggaggcgagggttagctaacattctgagctcacccaacacacccagcacactcagggggaccatggagggttgagaagacccaggacg

SEQ ID NO: 3240 - DNA, 206 bp, Homo sapiens
  misc_feature 1..206: note = U/M: U (0.1:0.92) in Heart Cardiomyocytes
  misc_feature 1..206: note = source = chr13:113383324-113383529; Gene: ATP11A (intron)
  source 1..206: mol_type = genomic DNA
cgacatttaggatggttagttttttaacacatttaaagcaaaggctttgttctctgttgagagtccaggaaaggatcctgacgtcttaagaatctgagtgacaaaatcggtgaacctgagtgaaaatttagaattggaagacatttctgttagcgtatcatcccgggtgctcctggacgcaggactctccacacgtctggttggcg

SEQ ID NO: 3241 - DNA, 275 bp, Homo sapiens
  misc_feature 1..275: note = U/M: U (0.12:0.94) in Heart Cardiomyocytes
  misc_feature 1..275: note = source = chr14:74297801-74298075; Gene: PTGR2 (Intergenic)
  source 1..275: mol_type = genomic DNA
cggagtttcactgtgttagccaggatggtctcaatctcctgaccttgtgatccgcccgcttcggcctcccaaagtgccgagattataggcgtgagccaccgcgcccggcatgatactaaaattctacaattagaaattaattcctttgtccccacctcacagttatatgggagagactacatgttaatccttctcagccatttataccttaacatgagtgaacttctaatcctttcctgagaggtggttttggaagaggagacaggggaaaagcg

SEQ ID NO: 3242 - DNA, 293 bp, Homo sapiens
  misc_feature 1..293: note = U/M: U (0.1:0.92) in Heart Cardiomyocytes
  misc_feature 1..293: note = source = chr10:13735916-13736208; Gene: FRMD4A (exon)
  source 1..293: mol_type = genomic DNA
cgctgctgccgctgatgatcttccccttgctacccatgttggccagcttcgaggtcttcagcgtccccgtctcggtcaggtcgatggcgatctcactcaggctgcgtgctgcatggattttggactggaatggaaagggaagcaggtcaaagaagtgacgctcaccttgcggaaaggacagtcatccctcgcccgcgcctgctcaccgtcttgacattccgcaaagggacttatctccctgactaatgtgcagcatttttgtttgcatcccttggcctcatcattaatcaccg

SEQ ID NO: 3243 - DNA, 334 bp, Homo sapiens
  misc_feature 1..334: note = U/M: U (0.08:0.9) in Heart Cardiomyocytes
  misc_feature 1..334: note = source = chr20:47570179-47570512; Gene: ARFGEF2 (intron)
  source 1..334: mol_type = genomic DNA
cgttcgtttgaagcacagtcaggcacaaagcaaaccaacaactcccgaaaaaacagatttaaccaacggtgaacatgccaggagtgattctggaaaagtaagcacagaaaatggagacgcacccagagaaagaggctcatcactgtcaggtacgggctgatacggtatggctctttttccaagtgtgagagggaatcagcctgtgaggggcagaagaagtgtatgtcataacatctgaaggaaacctctgataacagcttatctctttctgggcctttccctttgcttttctcttagggaacacaaccagtgaggcatgatgtcaagtgtcccg

SEQ ID NO: 3244 - DNA, 106 bp, Homo sapiens
  misc_feature 1..106: note = U/M: U (0.13:0.94) in Heart Cardiomyocytes
  misc_feature 1..106: note = source = chr1:164810236-164810341; Gene: PBX1 (intron)
  source 1..106: mol_type = genomic DNA
cggcgatgtgtcgggcactgtggtgggcactttggaataaaagataaattccacacccttgcttttatggtcgggtaggtgaaaccgacgtgtgaaggaacacacg

SEQ ID NO: 3245 - DNA, 494 bp, Homo sapiens
  misc_feature 1..494: note = U/M: U (0.05:0.86) in Heart Cardiomyocytes
  misc_feature 1..494: note = source = chr16:46781221-46781714; Gene: MYLK3 (intron)
  source 1..494: mol_type = genomic DNA
cgggtgggtttctgagcagggctccatcaggacaaactggccactcctgcctgtcccaccccatgtgtgaaggagcagaagggcagtcacgggggtgtcagagaagtgtggtggtcctccctcccaaaccgccagcgtgtcccccacagctaggttccctggagctgccaagaccctgcagtcctggccagagccccgcttcttcccttccctggggagaatggcaggcagtgtccggactggaaatccacctatgacctgtaagtttccagctctccttttccccatcaacaggtcacacaggaaggggacaccatgcctccagctctccaaacactggctgcctggccagtctcccaccagggccggggcctcccatccagccagggcagggaagcaggaaccaacctcctcagggctgtcacctgggctgcctctcctccagggcacacgcccctgcatgaggaaatccgccacctttgatttctggaacg

SEQ ID NO: 3246 - DNA, 259 bp, Homo sapiens
  misc_feature 1..259: note = U/M: U (0.11:0.91) in Heart Cardiomyocytes
  misc_feature 1..259: note = source = chr1:1499885-1500143; Gene: SSU72 (intron)
  source 1..259: mol_type = genomic DNA
cgctatgtcacgaccctctgctgaaccacgtcagggtgaaccccacaccgtgtctgtgcgcctcaccacgcctactgccatgggtggcactggaactaacccgtggacgatccgacgtgcaccaggaatagaaaccaagctctcgcaaagacagaggagccagtgtgtgcactgcacagggtgacacgcctcctgtgcccgagccacacgtaacaccttccagggaggaccacacggggggtttttaaagggcaacccg

SEQ ID NO: 3247 - DNA, 175 bp, Homo sapiens
  misc_feature 1..175: note = U/M: U (0.17:0.95) in Heart Cardiomyocytes
  misc_feature 1..175: note = source = chr21:43271512-43271686; Gene: PRDM15 (intron)
  source 1..175: mol_type = genomic DNA
cgacacacactcagactctggtgggccctgggtgcattgggcgggcagggctctagaagcgccactgtgcctcgagagggacccctggcagggtcagggaggaggggctcaggggaaggagccagataggtggcagagggtgagaggcagtgtgtgtgtggcgggggcgctgacg

SEQ ID NO: 3248 - DNA, 392 bp, Homo sapiens
  misc_feature 1..392: note = U/M: U (0.13:0.91) in Heart Cardiomyocytes
  misc_feature 1..392: note = source = chr14:23866021-23866412; Gene: MYH6 (exon)
  source 1..392: mol_type = genomic DNA
cgatacctgaggagggaagtgtccagagtcacccatgctctgcagtgatctgctctgcccacagaattccagggtcacctgcagatcccattcccatcagggcagcctggctccccctgttctatgagctctggggcaccctcatacccacctctgccggaagtccccgtagaggatgcggttggggaagcccttcctgcagatgcggatgccctccagcacgccattgcagcgcagctggtgcatgaccagggggttgtccatcacccctgtgtcaggagggaaggggaaagggtcagccttagggtaaagtggatgccagctgtcctccccagactaaggtcttctcctggctcacctggagccttccgctcattggggatgatgcaacg

SEQ ID NO: 3249 - DNA, 487 bp, Homo sapiens
  misc_feature 1..487: note = U/M: U (0.16:0.94) in Heart Cardiomyocytes
  misc_feature 1..487: note = source = chr22:42056809-42057295; Gene: XRCC6 (intron)
  source 1..487: mol_type = genomic DNA
cgcaggcatgagcacttgtttgaattcccagaatctagcttagtatctccactgtaccactgccctttgggaaagtcatgtaatctctctccttttctcctctgtaaaactggggacaaatcaagaggctgaggcaggagaatcgcttgaaccagggagtcggaggttgcagtgagccaagatcgcgccactgcactccagcctggcaacagagcaagactccatctcaaaaaaaaatctaaaaaaaaaaaaactggggacaaatttacctatcctataggttgttagaaggagtaaatagagtaagtttaaagcatttacaacagtgcctggcggtagtatgtgtaattacagtaaatgcaggtgttggaaggtacttggtaaatgctggaaagacatttccctagacccctcccaccttagcagttaggtgctctctcttctggttctcagagagttctggaagtggacagcaagctggggctcg

SEQ ID NO: 3250 - DNA, 225 bp, Homo sapiens
  misc_feature 1..225: note = U/M: U (0.21:0.95) in Heart Cardiomyocytes
  misc_feature 1..225: note = source = chr10:11505339-11505563; Gene: USP6NL (exon)
  source 1..225: mol_type = genomic DNA
cgtttgacacccgcacctcggcaggacctgggacggtaactgcgagcgcggggtgcgctgctcgacctttgccttccatggtgtatttggcagttctctctgtagctgagacgtctgacggtttattccatttgggcacaaactccttcctgatatttgaagtggcgttgctattttggttggcagctgcgtgattatattgcctggaactgtcctgtggacccg

SEQ ID NO: 3251 - DNA, 372 bp, Homo sapiens
  misc_feature 1..372: note = U/M: U (0.25:0.93) in Heart Cardiomyocytes
  misc_feature 1..372: note = source = chr6:158094254-158094625; Gene: ZDHHC14 (exon)
  source 1..372: mol_type = genomic DNA
cggtggagatgacagccccaggtctggggtacagagaccacttaggatggcacagggtggctggccccggatgctgagagcttggtttcatttgaattttcttccccaacctgagtgctttgacaacaatggaaatagagaagtggctgctttcttttggtgaccctccaggggtggaatcggagtgtgtctgcccgcccttgtgacagacacacggaaggcttctgacgcttgtggccagactgcaattgcacttatgtgttatgctactaatatttgaaacagacctgccattccatttgttaattaaaaaaaaaaaaaatcctaaagggaaaaaaccgaccaggtgtggatctgcatgccacgctgccg

SEQ ID NO: 3252 - DNA, 97 bp, Homo sapiens
  misc_feature 1..97: note = U/M: U (0.25:0.92) in Heart Cardiomyocytes
  misc_feature 1..97: note = source = chr11:47367776-47367872; Gene: MYBPC3 (intron)
  source 1..97: mol_type = genomic DNA
cgcgcctcatgcccttgagcctctttagcatgccgcgcaggtcagtgacgccgtactggaaggcgatgcgctcgtactcagatgggggtgcctgccg

SEQ ID NO: 3253 - DNA, 268 bp, Homo sapiens
  misc_feature 1..268: note = U/M: U (0.28:0.92) in Heart Cardiomyocytes
  misc_feature 1..268: note = source = chr8:141570717-141570984; Gene: AGO2 (intron)
  source 1..268: mol_type = genomic DNA
cgtttcccctccttttaaatccacgtttaccacacggcactccagcctgtgtgcatggcctgctgtgtgggacactgtgacagcagcaggctgggggacccgtggcctcactgggggatggtgaaagacgtttaaagacaccgcacaggtggatcacaagcccccaggacctggcgtgtttctggtccagactccctgtcctggctttgcctcgccttactgtcctcactgtctactcttcacctcttggggcctgtgtccccaagcg

SEQ ID NO: 3254 - DNA, 309 bp, Homo sapiens
  misc_feature 1..309: note = U/M: U (0.3:0.93) in Heart Cardiomyocytes
  misc_feature 1..309: note = source = chr9:134136258-134136566; Gene: FAM78A (exon)
  source 1..309: mol_type = genomic DNA
cgccacatgaggacctgggcatcgttggcattgggcttgaccagggcgctgggcgggatgggctcattcttgctcaggattttgggctggtcctgggcgatgggctcccgcagccgggcgcgctggcccaggggccggttggggttcacctcgatgctgagctgcatgcgccagtgcagcgtctgcaggatgatcatgtcgttggtggaggtgttggtggccaccagccaggtggtgaagctctggtcccggtagatattggtgagcttggccacgttgctctcgctgacgggcacggcccatgtgacg

SEQ ID NO: 3255 - DNA, 125 bp, Homo sapiens
  misc_feature 1..125: note = U/M: M (0.86:0.14) in Heart Cardiomyocytes
  misc_feature 1..125: note = source = chr2:132249139-132249263; Gene: MIR4784 (promoter-TSS)
  source 1..125: mol_type = genomic DNA
cgtcttgattcccgactttgtaggatgaaggcctgagtgaagaggtggggaggagctaagcggaggagccctacccagcctggaccaccctggggcacgcactctgcgtccacctgacctggacg

SEQ ID NO: 3256 - DNA, 254 bp, Homo sapiens
  misc_feature 1..254: note = U/M: M (0.81:0.09) in Heart Cardiomyocytes
  misc_feature 1..254: note = source = chr3:138892681-138892934; Gene: PISRT1 (Intergenic)
  source 1..254: mol_type = genomic DNA
cgggggaacaatagcaggcagctgaagagatctgggaggcccgtgggtttttatgtagtaaaagtgaaaataaaactggtttctaagttggcaaactcctttttcagatcatttcagggaattgctgagaaaacatatgccctgccctgcccagccctagcctgtggctgacacattggccaaatttatttttgctgcagttgcacgcttgtttgctttagaaggcgtctgctttctccgtaactgagagaacg

SEQ ID NO: 3257 - DNA, 296 bp, Homo sapiens
  misc_feature 1..296: note = U/M: M (0.85:0.15) in Heart Cardiomyocytes
  misc_feature 1..296: note = source = chr9:139636512-139636807; Gene: LCN10 (intron)
  source 1..296: mol_type = genomic DNA
cgggggctgtccccacccccgaggttcccagctagagaacccaggagacaaatgacccttctgtgagccggagtcccagctccgcccaggtgccgcctcggtcccggccactcaagccctggccactggagcagggctgcagagaagcaggtgcccggctggtcagggaccccaggcagcaaagggctgggctgtgggcgccagcaggtgggaggccccctacctcagaggccccggctccttcccacatggcctcctgggggctgggtactgctcggccacttcccttcctgccg

SEQ ID NO: 3258 - DNA, 252 bp, Homo sapiens
  misc_feature 1..252: note = U/M: M (0.78:0.09) in Heart Cardiomyocytes
  misc_feature 1..252: note = source = chr13:74862518-74862769; Gene: LINC00381 (Intergenic)
  source 1..252: mol_type = genomic DNA
cggcagacaagcgaggtaacggggtaaaacagcagcagagtgggactctctaacatctgaaagtcattttccaaaacttcattcagcacaggaacaatgcggcattcaggcagaatgagctgaaaatgtggggtgctccaggtcaaatcagcaacttctgcactcctctcaacagggtggggagtggtttgccaaggtagggcaggaaacagtctgatttcaaaggaagggctaggattaggcagaaaaccg

SEQ ID NO: 3259 - DNA, 182 bp, Homo sapiens
  misc_feature 1..182: note = U/M: M (0.88:0.2) in Heart Cardiomyocytes
  misc_feature 1..182: note = source = chr10:98869374-98869555; Gene: SLIT1 (intron)
  source 1..182: mol_type = genomic DNA
cgatggagtttggatattaacatttcaaagtaaatactggaagagtgctgcctgagccttggagtggcaggtgcacagaggaggggtgaggggcgggtctggcgtgtgtgctctccacagcttttgtgcctgatcagtcatctcatttcccttctgtagcacattaaagagaaacatcgccg

SEQ ID NO: 3260 - DNA, 177 bp, Homo sapiens
  misc_feature 1..177: note = U/M: M (0.81:0.16) in Heart Cardiomyocytes
  misc_feature 1..177: note = source = chr13:108373877-108374053; Gene: FAM155A (intron)
  source 1..177: mol_type = genomic DNA
cggtgtagtgcaaatctggctttctctctctccgtgtggcctcacgctgcaggaaattgcaggcaggctcatcaatcccctttgacgggatttccctcttctgggacctgcccagaaggtacactggctgtttttctggcagaatccaaacacctaattcccagggagggatggacg

SEQ ID NO: 3261 - DNA, 474 bp, Homo sapiens
  misc_feature 1..474: note = U/M: M (0.71:0.08) in Heart Cardiomyocytes
  misc_feature 1..474: note = source = chr9:118915832-118916305; Gene: PAPPA,PAPPA (promoter-TSS,intron)
  source 1..474: mol_type = genomic DNA
cggcctctccaaactgattgattagtcatgatccccgcagttttaacagggactcattcaattgggaaggtggagcgctggggagcagattagcatacgcttgtttactcatcttctgagggattttttccccctctttcctttcattttgagaagaaggagggaggggaggggggacttggggggggagaagggggctgtggcttgtgttataaaggacgcaaaaaataaataaattagagcatcttttggggggagggaattcagcggatcagtcttaagaggagcttttttttggagcgagaaatcatataaaataaaatgaaataaaacaaggaggaaggcaaccagctgttaggggaaaaataaggcagataaaggagcggggagagaaattaattgccaaccaggaggagttgggctgtatttttcaaaggtggggagagtggagcacacaccttgaggaggaaagcg

SEQ ID NO: 3262 - DNA, 330 bp, Homo sapiens
  misc_feature 1..330: note = U/M: M (0.65:0.06) in Heart Cardiomyocytes
  misc_feature 1..330: note = source = chr16:79320968-79321297; Gene: MAF (Intergenic)
  source 1..330: mol_type = genomic DNA
cgaacattccagaatcagctttgttgtcctccacgtactctgccttccttttttttttttttttttccttcagcaacaacagaaatctgtgaaatgactgagggtggttaattaagcattgcagcccatattccactgcagtttcaattggatatggtgttctctttcacttcctgttatgcaggattgcggcaggctgttagacacctgccacgctcccagcccagctgctgttcagctaggggcagagaggaagcactcccgggccctcggccttgagagggtctcattctgcaaaccagccccttcccggtgaggcgggggctggcg

SEQ ID NO: 3263 - DNA, 74 bp, Homo sapiens
  misc_feature 1..74: note = U/M: M (0.74:0.18) in Heart Cardiomyocytes
  misc_feature 1..74: note = source = chr14:94405462-94405535; Gene: ASB2 (exon)
  source 1..74: mol_type = genomic DNA
cgctgggctccttgtcggccgcgggcgcgtcgttgaacctgctggagggctgcggggccggcgggtgcgggccg

SEQ ID NO: 3264 - DNA, 300 bp, Homo sapiens
  misc_feature 1..300: note = U/M: M (0.62:0.06) in Heart Cardiomyocytes
  misc_feature 1..300: note = source = chr5:99606013-99606312; Gene: LOC100133050 (Intergenic)
  source 1..300: mol_type = genomic DNA
cgtggatgttttgaaatggttgaacgattcaggctcctgcttcatcagagataaaagaagcaagccaactggtcaagtagggacttatcacagtgtaaatctctgggggatagctaactcagctcaattaataatcaaactcttttcttttacatattgctaagaaaccacagacggtagaaagtttggattttttcccagaaatcagtctgagagcaaaggcagaagaggcaactgtggtttttgttctactttttagcacaaccatctcgtttttataaataatgaagtactgagccg

SEQ ID NO: 3265 - DNA, 205 bp, Homo sapiens
  misc_feature 1..205: note = U/M: M (0.54:0.07) in Heart Cardiomyocytes
  misc_feature 1..205: note = source = chr15:68870038-68870242; Gene: CORO2B (Intergenic)
  source 1..205: mol_type = genomic DNA
cgacagagtgagactactccggtctcaaaaaaaaaaaaaaaaaaaaaattgcacaatgacccacaaagcacttcctggaggctggttactctattattattgctccaatctagacactggtctcccggaaggcaggcatcccatctcctctctgttcccccagcactttccacagagcaggtgctcatatatgacgttgccttcg

SEQ ID NO: 3266 - DNA, 99 bp, Homo sapiens
  misc_feature 1..99: note = U/M: M (0.57:0.12) in Heart Cardiomyocytes
  misc_feature 1..99: note = source = chr22:45016649-45016747; Gene: LINC00229 (intron)
  source 1..99: mol_type = genomic DNA
cgggattgggccaggtggcccggaagtgcctgggtccccagatggcttggatccgtgtctgtgggtctggcgggcccctcatgtatgccggctcccccg

SEQ ID NO: 3267 - DNA, 405 bp, Homo sapiens
  misc_feature 1..405: note = U/M: M (0.77:0.09) in Heart Cardiomyocytes
  misc_feature 1..405: note = source = chr16:4010758-4011162; Gene: CREBBP (Intergenic)
  source 1..405: mol_type = genomic DNA
cgagaattccctaagcttaaattactctaatattcattaacaactctttagagtcatgatatttaaaaaaacaatttttaaaaaggaactgtataaaaatagacacttgggaagattttaaatgtacatgtccattgcgtgcaagtgtgtactttttcttaatcgcttcctcttggctttctccggttagtttcactttcccagtacgcgggatctattccaggtggccacagccatagattcccacagtgggggaaaagcaaccatgtgaacaagatttcagatgaaagagaaaccacaaatgatcagttctggggctgattgcaaaaattagaggctgcctttcttggctgtttgagaaatcctctaagtcactgggtgccctttctagtagaaagacccacg

SEQ ID NO: 3268 - DNA, 192 bp, Homo sapiens
  misc_feature 1..192: note = U/M: M (0.78:0.06) in Heart Cardiomyocytes
  misc_feature 1..192: note = source = chr13:35324583-35324774; Gene: LINC00457 (Intergenic)
  source 1..192: mol_type = genomic DNA
cgaaaggtccggggaggctcctggctagaaactgtgcagggcccctcccttggagcagtctgtctccatggagaccgacgcgacggagaaaactcacaccgggccaggtggagaccacagcagcgggggagataccgagagtcaacagatggggaaaaacaagaaacactaaatgggagactgaagtgttcg

SEQ ID NO: 3269 - DNA, 183 bp, Homo sapiens
  misc_feature 1..183: note = U/M: M (0.77:0.07) in Heart Cardiomyocytes
  misc_feature 1..183: note = source = chr9:82188645-82188827; Gene: TLE4 (intron)
  source 1..183: mol_type = genomic DNA
cgaatcctgtgatcggattaaggaagagtttcagtttttacaggctcaataccacaggtaacgatattgactttagctgatccttctgtttgcttagctcttgtctccccgacaaatacacacaaacacttaccctcctccttttttgtgggggcgtcacaaaggtattatttttttttctcg

SEQ ID NO: 3270 - DNA, 218 bp, Homo sapiens
  misc_feature 1..218: note = U/M: M (0.7:0.02) in Heart Cardiomyocytes
  misc_feature 1..218: note = source = chr11:3877391-3877608; Gene: STIM1,MIR4687 (promoter-TSS,TTS)
  source 1..218: mol_type = genomic DNA
cgcgagggcatcttgcctggagaccgtcggctgcactcccgggctcctggctttgcctctgggatcccgaggtgtccacatcagacgcatgttgactgagacctagagtcatggatgtatgcgtccgtcttgccctgtggctcctctggggactcctcctgcaccagggccagagcctcagccatagtcacagtgagaaggcgacaggaaccagctcg

SEQ ID NO: 3271 - DNA, 343 bp, Homo sapiens
  misc_feature 1..343: note = U/M: M (0.76:0.1) in Heart Cardiomyocytes
  misc_feature 1..343: note = source = chr14:76795912-76796254; Gene: ESRRB (Intergenic)
  source 1..343: mol_type = genomic DNA
cggctccgcggtggggtggcagggagctgtattaaatcaccgaggtgcccatgtagcgcgggctctcttttctcctctcaactccccccaccacccttgtgggcacacacagacccgggcgcacactcacatgcacacgctgccctgcctgcaatggccgctcagtccgtcctgccgttgttcctgccagcccgggtcccagcaggtgttccctaattagcaatctcttcatttccaatcaaagcacaaagcggccccaaaagcctgtctttacgagggagccgagcagcggctagggatgtgcgggggggataattgtcttcgccagtggcggcagtaagcg

SEQ ID NO: 3272 - DNA, 449 bp, Homo sapiens
  misc_feature 1..449: note = U/M: M (0.7:0.08) in Heart Cardiomyocytes
  misc_feature 1..449: note = source = chr11:125133120-125133568; Gene: PKNOX2 (intron)
  source 1..449: mol_type = genomic DNA
cggttcataaaggagacctcctctctctagagccaagctcccccaccccacccccatcctgccagggcaggctcagccgctcccttcccgtccctagcagtgggggaagccgcatgaggaggagcggcgtgggagcaaatggaggggatctgctggcgggcctagtttaggcaaacagcagggactgctggcgacggctccagcccccactcccgcggtaacagctgcagtccagctgctggcatccctgctgggggagcgtgctaaacctctccggggtcagcactgtggtatgtcggtttccatagcaaccagccaacgggccactttctcagaacaattcccctactcagccgggttctggacttagctcagcccaagggcatgtggctgaggagcagcgcgggagggggagagctgccgagggccagactgggccccacagaacg

SEQ ID NO: 3273 - DNA, 173 bp, Homo sapiens
  misc_feature 1..173: note = U/M: M (0.66:0.06) in Heart Cardiomyocytes
  misc_feature 1..173: note = source = chr6:12638413-12638585; Gene: PHACTR1 (Intergenic)
  source 1..173: mol_type = genomic DNA
cgtgaaacagcttcccagggtcaattttccctgtggtggccagcaggcggtgctcacacacagattagaaagacctctgtggtcactgattctctaacgcaaaaaacttcattcacatcacctcaaacccttggacaacactacgtggcctgtgaaaaccacctgattgctcg

SEQ ID NO: 3274 - DNA, 117 bp, Homo sapiens
  misc_feature 1..117: note = U/M: M (0.67:0.08) in Heart Cardiomyocytes
  misc_feature 1..117: note = source = chr1:167090576-167090692; Gene: DUSP27 (intron)
  source 1..117: mol_type = genomic DNA
cgtttgaccaacgtgggattgaatgggtctgtcggtcgcctgcggcgtaaggagtgtgtcccacctcgctcgcaggtcctggagcgcaccggcagacctcgaggcggagcgggtacg

SEQ ID NO: 3275 - DNA, 150 bp, Homo sapiens
  misc_feature 1..150: note = U/M: M (0.67:0.1) in Heart Cardiomyocytes
  misc_feature 1..150: note = source = chr17:45331940-45332089; Gene: ITGB3 (intron)
  source 1..150: mol_type = genomic DNA
cggtgcctctgctcccagggcagaccctgcacccgaaaaatctctagtgtattcggggagccatgaaaaggctcccttgggccggtgggatccttggctttgtctctggctgctgcgcacaccgtcagccgtcagggcaattggcattcg

SEQ ID NO: 3276 - DNA, 92 bp, Homo sapiens
  misc_feature 1..92: note = U/M: M (0.57:0.04) in Heart Cardiomyocytes
  misc_feature 1..92: note = source = chr6:53517075-53517166; Gene: KLHL31,KLHL31 (exon,intron)
  source 1..92: mol_type = genomic DNA
cgcttctggttcatgctggccaggtgtatccaggtgttgaagcggggatcgtatctggaaatgatagagaaggtgtaacagctttgtcggcg

SEQ ID NO: 3277 - DNA, 282 bp, Homo sapiens
  misc_feature 1..282: note = U/M: M (0.61:0.08) in Heart Cardiomyocytes
  misc_feature 1..282: note = source = chr8:23560853-23561134; Gene: NKX2-6 (intron)
  source 1..282: mol_type = genomic DNA
cgtccttttcctaaaggtagactctagataaagagttaaggcagctccatttgcttcttagaatgtgtgtgcatgggccgggcgcagtggctcatgcctgtaatcccagcactttgggaggccgagacgggcggatcacgaggtcaggagatcgagaccatcctggctaacacgatgaaaccccgtctctactaaaaatacaaaaaattagccgggcgaggtggcatgtgcctgtagtcccagctactcgggaggctgaggcaggagaatggcgtgaacccg

SEQ ID NO: 3278 - DNA, 95 bp, Homo sapiens
  misc_feature 1..95: note = U/M: M (0.55:0.04) in Heart Cardiomyocytes
  misc_feature 1..95: note = source = chr11:47587672-47587766; Gene: PTPMT1 (exon)
  source 1..95: mol_type = genomic DNA
cggtctgtgcctctaaatggcacctggaggtaggctagaagctgtgaaaggcgtttatttaaaagttcaagttgggccgggcgcggggactcacg

SEQ ID NO: 3279 - DNA, 173 bp, Homo sapiens
  misc_feature 1..173: note = U/M: M (0.55:0.08) in Heart Cardiomyocytes
  misc_feature 1..173: note = source = chr18:45934528-45934700; Gene: CTIF (Intergenic)
  source 1..173: mol_type = genomic DNA
cggccttgcgcccgcgccgcggaaggttgggtaccagcctccacagctttgcagattgcaaagataacgggagctgccgcttcgcttttctttggctcctcctggccttcatcctagtaaaaccagacaagcaaccggaaaaacaaagcagcacagcggccagagacaattcg

SEQ ID NO: 3280 - DNA, 191 bp, Homo sapiens
  misc_feature 1..191: note = U/M: U (0.04:0.92) in Heart Fibroblasts
  misc_feature 1..191: note = source = chr2:236526611-236526801; Gene: AGAP1 (intron)
  source 1..191: mol_type = genomic DNA
cggcgagttaactgaactgagttgagtagctcacatctcgtggagcatcaaccaagaggatgcaacttgtgtaactgtgagaagctcagacttggaagatctgcgtctgtatgtgatcgcacacattttggagggtgggatgtgctcggtcttgggcgcgtgcagtttttgctcccttttactgttactgc

SEQ ID NO: 3281 - DNA, 57 bp, Homo sapiens
  misc_feature 1..57: note = U/M: U (0.05:0.92) in Heart Fibroblasts
  misc_feature 1..57: note = source = chr1:20355843-20355899; Gene: PLA2G5 (Intergenic)
  source 1..57: mol_type = genomic DNA
cgttcctccgctgacatgttcctccgctgacatgttcctccgctgatatgttcctcc

SEQ ID NO: 3282 - DNA, 321 bp, Homo sapiens
  misc_feature 1..321: note = U/M: U (0.08:0.92) in Heart Fibroblasts
  misc_feature 1..321: note = source = chr16:79173770-79174090; Gene: WWOX (intron)
  source 1..321: mol_type = genomic DNA
cgcatacccaagaccctccccataaactatttgaaagaagcaaagttgtaattctccaaatacggacttgtacatttctgatcattttagcaccaacattggttcaaactctggcagccgaccacagttccagctgagctttgctgcgctgtcagcaccatggggcctgataaagcatttttggatttttcctactcacagtgcccccatggtctcaatgctgttgagaacattaagctccttacctgtgttttgtggttgttgttattgtttttctttctggtaaaggactttatctgcagtcctaacaaattgacttac

SEQ ID NO: 3283 - DNA, 311 bp, Homo sapiens
  misc_feature 1..311: note = U/M: U (0.08:0.89) in Heart Fibroblasts
  misc_feature 1..311: note = source = chr17:10810563-10810873; Gene: PIRT (Intergenic)
  source 1..311: mol_type = genomic DNA
cgggtggtgcacgcctgtaatcccagctacttggaaggctgagtcaggagaatcgcttgaacctgggaggcagaggttgcagtgagccaagatcgcagcattgcactcccgcctgggcaacagagccagactccattccaaggaaaaaaaaaaaaaaagtaaggctaacctccatgtgaggttttctcacagacagagccatggtgccattattatctccattccagagtttgaacaaagcacaaggataaagtcaggagggaaaaatgaagtctgagcagctggtgtttgcttcagcctcttccggagcc

SEQ ID NO: 3284 - DNA, 102 bp, Homo sapiens
  misc_feature 1..102: note = U/M: U (0.11:0.91) in Heart Fibroblasts
  misc_feature 1..102: note = source = chr16:55010895-55010996; Gene: IRX5 (Intergenic)
  source 1..102: mol_type = genomic DNA
cgatgctgctgccgccgccgccgccgccgccactggtaacgatgatgaggcaaaggtggtggcgatggtgatgatgacagtacagcctcctggatggggtcc

SEQ ID NO: 3285 - DNA, 131 bp, Homo sapiens
  misc_feature 1..131: note = U/M: U (0.12:0.92) in Heart Fibroblasts
  misc_feature 1..131: note = source = chr16:79174152-79174282; Gene: WWOX (intron)
  source 1..131: mol_type = genomic DNA
cgctctgagcagtctattggatgcggtggtgtggccgatttcttggacttgctacattcttaggcaagtgacatctcccttcatttgtacagagggagttagaattgaatcgaacttccaccgcagcatcc

SEQ ID NO: 3286 - DNA, 124 bp, Homo sapiens
  misc_feature 1..124: note = U/M: U (0.05:0.85) in Heart Fibroblasts
  misc_feature 1..124: note = source = chr13:47760131-47760254; Gene: HTR2A (Intergenic)
  source 1..124: mol_type = genomic DNA
cgcagtgctctggagttagaaccatagatggttcggttggaaatgattgagcaggaagtgttaaagataaattccactcttttcgggaagccagaacgatatagtatctaagaacctagacttc

SEQ ID NO: 3287 - DNA, 196 bp, Homo sapiens
  misc_feature 1..196: note = U/M: U (0.15:0.93) in Heart Fibroblasts
  misc_feature 1..196: note = source = chr21:41033887-41034082; Gene: B3GALT5 (exon)
  source 1..196: mol_type = genomic DNA
cggagccggcatccttccatccctgtcgagtcccctccacctcagctcccagtccttgtgctttttggagctaagcctgggatgaccaaattcaccccagctccttcattcacagggctggatgtagctgggattgagtccatgttatcggctcggtactcaacacaacccaagtttcatccgaggaaatgtcccc

SEQ ID NO: 3288 - DNA, 176 bp, Homo sapiens
  misc_feature 1..176: note = U/M: U (0.07:0.83) in Heart Fibroblasts
  misc_feature 1..176: note = source = chr8:49110226-49110401; Gene: UBE2V2 (Intergenic)
  source 1..176: mol_type = genomic DNA
cgcgggaggggacagacatgtcacgtgcataaatattgaaaccctggcacagggaccccttctgacatcagcagcaggtgattgcaacacaatgagacaagctgaaaacctaagtaagtaagctgcggctccttagtcaaatccactggctcttggaatccatgtacaacaccccc

SEQ ID NO: 3289 - DNA, 233 bp, Homo sapiens
  misc_feature 1..233: note = U/M: U (0.09:0.85) in Heart Fibroblasts
  misc_feature 1..233: note = source = chr7:104544631-104544863; Gene: LHFPL3-AS2 (intron)
  source 1..233: mol_type = genomic DNA
cgtgagttctcttgctgagagaagttcattaagatcataatgtggatacgatttttttaagtgtgttgaaaaacaagggggaacataccaaaaacaacaacagaatgatccagaggattttctagcacacattcagaaaccatatcttatcttgtgttttaaagggctctgtgacgcaaaacctcggctgggcacagtggctcatgcctataatcccaacactttgggaggcc

SEQ ID NO: 3290 - DNA, 281 bp, Homo sapiens
  misc_feature 1..281: note = U/M: U (0.09:0.84) in Heart Fibroblasts
  misc_feature 1..281: note = source = chr8:13295679-13295959; Gene: DLC1 (intron)
  source 1..281: mol_type = genomic DNA
cgatgctcaagcctcatctcaattaaattaaatcagaatctctttgtggactctagcacgggtatatttaaaaatgtgtccaggagatttttaatgagcagtcagagttgaaatgattgctttgtcttatggcccttgctgatggacaggtgcttaatcaatagtatttttgtaagctaatgataggataaatatcgtgtttctttttaaatttggaattgtcgcttgcattcttttttgtttctctgcaatcagttttgaaaaaaatagccagaatgatc

SEQ ID NO: 3291 - DNA, 356 bp, Homo sapiens
  misc_feature 1..356: note = U/M: U (0.16:0.91) in Heart Fibroblasts
  misc_feature 1..356: note = source = chr15:45622883-45623238; Gene: GATM-AS1 (Intergenic)
  source 1..356: mol_type = genomic DNA
cgctgcactgttggaacacacagagattccttatagtaactctcagaggttagttgagattctaggttaccttgctgagctctgcagaatttcccagagacttttatttgaatatcaagattggttatcaaattcatgccttccccaaattcatgataagttttaatattttccaatacttcattagtgatacgataccaccatgaagctgctggctgcaaagaaaacatcagagattttcccctagagatttttttcccaaagcctcttgtaagataagacatttttaagaacatttataaaaatgaaatcaaggccgggagtgatggcgctcacctgtagtcctagcactttgc

SEQ ID NO: 3292 - DNA, 452 bp, Homo sapiens
  misc_feature 1..452: note = U/M: U (0.16:0.9) in Heart Fibroblasts
  misc_feature 1..452: note = source = chr3:64580263-64580714; Gene: ADAMTS9 (exon)
  source 1..452: mol_type = genomic DNA
cgtaaaacagaccaagactctcctactttaatggcaggtattagttattaagtgctttctcttaacttgcactgaggacttttgcatatattatctaatcaagaggagtgtaattatttgccccatcttatatatgaagcaattaaggtgaagggaggttaattaactcgatcaagtccaatctgttagcaagtaacaaagatcctttctttttttttgagacggagtcttgctctgtcatccaggctggaatgcagtggcacgatctcggctcactgcaacctccgcctcccaggttcaagtgattctcctgtctcagcttcccgagtagctgggactacaggcgtgtgccatcacactcggctaatttttttgtatttttagtagagatggggtttcaccgtgttagccaggatggtctcgatctcctgagctcatgatcctcccacctc

SEQ ID NO: 3293 - DNA, 472 bp, Homo sapiens
  misc_feature 1..472: note = U/M: U (0.1:0.83) in Heart Fibroblasts
  misc_feature 1..472: note = source = chr13:38955429-38955900; Gene: UFM1 (Intergenic)
  source 1..472: mol_type = genomic DNA
cgatgataacgtagtctgtcagcactactgtaacaaaatactacagcctgggtcatttatagagaatagaaatgtgtttctcagagttttggagcctgggaagtcccagatcaagacaccggcattgttgtctagtgaaggctgctccatgcttccaacatggcaccttgtttctgtgccctcacatggcagaaggcaggagggcaagaggatcaaatgctgtgggaagcttctttcataaaggccttattattccccatacagcccgtatgccttgtcttggatgagtagattgcaaatcaaacctatagttcctacactcaaatgctgtggcagcatcatatgctgagatgagtgctgggctagggatcttaaaatttggattcaatctcagtgttgctttttattactgtgttacttaaattctattagtatatttcattatctgtacaaataagagaactaaaaggcc

SEQ ID NO: 3294 - DNA, 238 bp, Homo sapiens
  misc_feature 1..238: note = U/M: U (0.24:0.95) in Heart Fibroblasts
  misc_feature 1..238: note = source = chr1:198237636-198237873; Gene: NEK7 (intron)
  source 1..238: mol_type = genomic DNA
cgtctctcatttggagagagcgagagctttttgtctcccaacatccagcacccattccttaaatccgtttctccatcagtctttaagacgttagaagggagagaaacaaagaaaaaagaaaaacttcctttcaatcacatctttctaggttttcactttaagggtaaagactaaaatgtttggcaagattcagcaagccttgtgtgatacagaagatacgctccctcagagaggatcc

SEQ ID NO: 3295 - DNA, 459 bp, Homo sapiens
  misc_feature 1..459: note = U/M: U (0.22:0.92) in Heart Fibroblasts
  misc_feature 1..459: note = source = chr18:32893374-32893832; Gene: ZNF271 (Intergenic)
  source 1..459: mol_type = genomic DNA
cgtggcaacatgcgcctgtagtcccagctactcaggaggctgaggcaggagaatggcgtgaacctgggaggcggagcttacagtgagccgagatcgcgccactgcactccagcctgggcgacagagtgagactgtctcaaaaaaagaagtaacaccaacttttattaaattcctacaaaatattacaaaggaaggaacaattccaaattcattttatgaagccagcattaatctgacaccacgccagacaaagacactacaagaaagctacagaccaatgtcccctataaataatcctcaacaaaattctagaaaacacaatccaacaatgctttaaaataattatacaccatgtccaggtaagatttatttttgaaattcagaatgattcaacatacaaaaatcaatcaatgtactacatcacagtaacagaatgaaggaaaaaagtgtgattaactc

SEQ ID NO: 3296 - DNA, 306 bp, Homo sapiens
  misc_feature 1..306: note = U/M: U (0.13:0.82) in Heart Fibroblasts
  misc_feature 1..306: note = source = chr6:169497716-169498021; Gene: THBS2 (Intergenic)
  source 1..306: mol_type = genomic DNA
cggtgctggattgctcttggggatttctgctgaagagtcacagtccagagagagagggtccgtgtgatccctctctgctcaccatttagcttctagaagcttcctacctccaaaaaatgatctgagggaggggcctccagggacagaagtgagagtagtggcccagatttcctaactcaccaagagtggaagcacacagaagcaccatgggaaagaggaaagactcagtgaggacggccaaaaatgttcagagtgatggggaaaatcgacaccctgtcctcctaacacagagcatcctgagtcccc

SEQ ID NO: 3297 - DNA, 104 bp, Homo sapiens
  misc_feature 1..104: note = U/M: U (0.23:0.91) in Heart Fibroblasts
  misc_feature 1..104: note = source = chr8:25626261-25626364; Gene: EBF2 (Intergenic)
  source 1..104: mol_type = genomic DNA
cggaagctcgcattgtgaattttagctccagatcaactggcaagtacaaaccagcaaacccgagaggacccacagaccgtccgaaggaaacagactgctcctgc

SEQ ID NO: 3298 - DNA, 194 bp, Homo sapiens
  misc_feature 1..194: note = U/M: U (0.24:0.91) in Heart Fibroblasts
  misc_feature 1..194: note = source = chr7:35569892-35570085; Gene: HERPUD2 (Intergenic)
  source 1..194: mol_type = genomic DNA
cgggcccctctgcccactgatgcgagggtcctgtaggcatttgggtcaagtagcgtggaaggcagacattcttcctggggcttccacaagagcccaggggagccgccccggaggcctgcccccagaccgccaccaccaatgccgcaagaagcttcccacaagactcctcgccatcatctttcagcccctctgcc

SEQ ID NO: 3299 - DNA, 304 bp, Homo sapiens
  misc_feature 1..304: note = U/M: U (0.22:0.88) in Heart Fibroblasts
  misc_feature 1..304: note = source = chr16:940791-941094; Gene: LMF1 (intron)
  source 1..304: mol_type = genomic DNA
cgctccaagctccagggagagtgggtttgggccctgcctgcaggccctgacactgctgcggccaaccctccggtggcagtgacaccgagggtgcctcgagacatccagggccatccctctggcccgggctgcccctgcctgtgtgctccaggccgggcccaccctgtccaccgtctcgggccatgtctgaactggtgttgacggctgacacagagcactcctcacaaacagcacagcagagagctctggtgaggggcagtcctgggcctttaaggcacaggaagaactgggtgctcatgggggc

SEQ ID NO: 3300 - DNA, 417 bp, Homo sapiens
  misc_feature 1..417: note = U/M: U (0.25:0.9) in Heart Fibroblasts
  misc_feature 1..417: note = source = chr19:3012448-3012864; Gene: TLE2 (intron)
  source 1..417: mol_type = genomic DNA
cgagtgatcgtcctgccttggcctcccaaagccctgggatgacagggatgagccacagcacccagccactgttgagattcttgaacaacaaggaattagaaactccgggatgggctcgtggagaggcagaccccacagcggcatattcccaggtgaaggaagagtgcctagcacacactgcaatcctccttgagcccccacagagagggaggtgtcacccagagctgtccctccccaaggagagctctgaggaaagcagcagctggacctccatctaggggcaggctctgttatctcggcttcatgtcatcgcctcccctgcctcccctgcctcccaagaaacttcgcatccttgtcttgcgtctgtctcggcttcccatgacaccatcgcacaaacagtgacagccacgcaacacc

SEQ ID NO: 3301 - DNA, 135 bp, Homo sapiens
  misc_feature 1..135: note = U/M: U (0.01:0.93) in Heart Fibroblasts
  misc_feature 1..135: note = source = chr6:169568431-169568565; Gene: THBS2 (Intergenic)
  source 1..135: mol_type = genomic DNA
cgcaagtagaaaattgaaagtttcagcaaaaactaagtccaaagcaacagctgcgccaggacggagagcccacagtgaaattgctgcgtgcgcccagggcggcggcggcgccaggcaggcgcggatcccgctgcg

SEQ ID NO: 3302 - DNA, 181 bp, Homo sapiens
  misc_feature 1..181: note = U/M: U (0.01:0.88) in Heart Fibroblasts
  misc_feature 1..181: note = source = chr6:169568591-169568771; Gene: THBS2 (Intergenic)
  source 1..181: mol_type = genomic DNA
cgcagggagctctgctttatcaggagaatatttgaaaagcgatctattaaaaggaatgcttaagtgaattataaaagtctgagaaaggaaatgggagaaccaagttatctaaattttctcaaaactaattattagctgggcgaaaatgtagatattcggggcactgagggtggtgagtgcg

SEQ ID NO: 3303 - DNA, 99 bp, Homo sapiens
  misc_feature 1..99: note = U/M: U (0.07:0.91) in Heart Fibroblasts
  misc_feature 1..99: note = source = chr21:27223171-27223269; Gene: ATP5J (Intergenic)
  source 1..99: mol_type = genomic DNA
cgattctttagcgcagtgtctttgcagtcagaatatgaatcgctcgttgccaatttttggtatattctgatgcgagcagaactgcaaatgttggccccg

SEQ ID NO: 3304 - DNA, 302 bp, Homo sapiens
  misc_feature 1..302: note = U/M: U (0.08:0.89) in Heart Fibroblasts
  misc_feature 1..302: note = source = chr13:23013641-23013942; Gene: BASP1P1 (Intergenic)
  source 1..302: mol_type = genomic DNA
cgcgatgctggagtcattgcaggaaactccggattttatcgtggtaaacggagccccaagagatgctcagcagctgtacacattgcattgctcacatctcattagccaaagcaagtcatgttgttatccctcattttaaacagtgttctaagtatggatagttggagtagtgcgaggaaaatgaagataatgtgtgataactgggaatgctatccataattaccacagaggctaaagccagatatactcaggctctcacagtttattttgttaacttaatcataatgaaatgtaagtcatcg

SEQ ID NO: 3305 - DNA, 56 bp, Homo sapiens
  misc_feature 1..56: note = U/M: U (0.08:0.88) in Heart Fibroblasts
  misc_feature 1..56: note = source = chr9:136576958-136577013; Gene: SARDH (intron)
  source 1..56: mol_type = genomic DNA
cgcacggggagtggcccgggccacaggccctgctgtgtgggtcggagaggccaccg

SEQ ID NO: 3306 - DNA, 163 bp, Homo sapiens
  misc_feature 1..163: note = U/M: U (0.08:0.88) in Heart Fibroblasts
  misc_feature 1..163: note = source = chr5:147854029-147854191; Gene: HTR4 (intron)
  source 1..163: mol_type = genomic DNA
cgtaacccccctaatgacattcaatacggagaaagactaaatcgaaattaaattatctgatctcgaccaagtttttaaaagtacagataatgtctgccctttcattcaggactccagaccaatttaaatgactattcatccaggctactagactaccctcacg

SEQ ID NO: 3307 - DNA, 177 bp, Homo sapiens
  misc_feature 1..177: note = U/M: U (0.1:0.9) in Heart Fibroblasts
  misc_feature 1..177: note = source = chr17:34278491-34278667; Gene: LYZL6 (Intergenic)
  source 1..177: mol_type = genomic DNA
cgggcggatcacgaggtcaggagatcaagaccatcctggctaacatggtgaaaccccatcgtctctactagaaatacaaaaaaaaaaaaaaaaaattagccgggcgtagtggcgggcacctgtagtcccagctactagggaggctgagccaggagaatggcgtgaacccgggaggcg

SEQ ID NO: 3308 - DNA, 187 bp, Homo sapiens
  misc_feature 1..187: note = U/M: U (0.08:0.88) in Heart Fibroblasts
  misc_feature 1..187: note = source = chr9:136576746-136576932; Gene: SARDH (intron)
  source 1..187: mol_type = genomic DNA
cgtaatgtcctcatcaggccaggaaaggactaggtcagcagaggcgaggggcgcaccgagctgagccaggccttctccctccggagcccacccacctactgcctccccagggaggctgtccaccagcagcagcagccgggagcagagtgggctggagagacccggaggccgggctccctccaagccg

SEQ ID NO: 3309 - DNA, 226 bp, Homo sapiens
  misc_feature 1..226: note = U/M: U (0.1:0.9) in Heart Fibroblasts
  misc_feature 1..226: note = source = chr5:160367907-160368132; Gene: LOC285629 (Intergenic)
  source 1..226: mol_type = genomic DNA
cgtctctctgtctttgtcttggcatcgttctaaaactggcccttctttatctgtggtcacgcgcttgttcccttgtcctgaaggagctgggactcaagcatgtccagcctttgtcccatgatgtcatgccttctaaactgataagaagtgcaatttaggattactctttttttattattttatttttttaattatactttaagttctagggtacatgtgtacaacg

SEQ ID NO: 3310 - DNA, 257 bp, Homo sapiens
  misc_feature 1..257: note = U/M: U (0.07:0.87) in Heart Fibroblasts
  misc_feature 1..257: note = source = chr1:12726365-12726621; Gene: AADACL4 (exon)
  source 1..257: mol_type = genomic DNA
cgagaagtggctcagccctgacaacatccccaagaaatttaagaacagaggctaccaaccctggtctcccggcccttttaatgaagctgcctatctagaagccaaacatatgctggatgtagaaaattcacccctgatagcagatgatgaggtcatcgctcagcttcctgaggccttcctggtgagctgtgagaatgacatactccgtgatgacagcttgctctataagaagcgcttggaggaccagggggtccgcg

SEQ ID NO: 3311 - DNA, 391 bp, Homo sapiens
  misc_feature 1..391: note = U/M: U (0.07:0.87) in Heart Fibroblasts
  misc_feature 1..391: note = source = chr3:176304417-176304807; Gene: TBL1XR1 (Intergenic)
  source 1..391: mol_type = genomic DNA
cgcatgttgttatcgacacatttttgcacacagttttagggagtacgtgactctctaaagcctatccaaggaattactaggacaaaaataccagctccaaaagagaattgctttgaaaatgttttctctcctccttctcccttttttgctttttttcctagttggcaaaaatataataacaggaaatgtgttgaaaatgaaagctaatgacccatcatcatacaaaaagatgtcttcataaaagtaataaaagaagtacacattaaaacaaatgtgaatgattggattgctttattaatcacagcaaaatttatcaagggtgcaagaaaccgggttcttatcatatattgctgaatcagactgtcgtgctaaaggaatcagattcttctcg

SEQ ID NO: 3312 - DNA, 155 bp, Homo sapiens
  misc_feature 1..155: note = U/M: U (0.08:0.87) in Heart Fibroblasts
  misc_feature 1..155: note = source = chr4:144518334-144518488; Gene: FREM3 (intron)
  source 1..155: mol_type = genomic DNA
cgagagggagagagaggagtttgaaacaggaaaatcaagagagtaaagaatcttgagaagaatgagtggtgacaatgtcaaacgcagcgagcacatccagaaagatacatgtaagccaacagtggacgtcaacggcaaaaacccaaaacacatcg

SEQ ID NO: 3313 - DNA, 259 bp, Homo sapiens
  misc_feature 1..259: note = U/M: U (0.1:0.88) in Heart Fibroblasts
  misc_feature 1..259: note = source = chr11:75984963-75985221; Gene: WNT11 (Intergenic)
  source 1..259: mol_type = genomic DNA
cgctccatctctcggttctcctggttcccatgttggcttcatttttaggctccaagtggtgaaaagataactataaaattaacttccaggttcaggtccagccaaaaaaaattttgttaagagtcctcctttgtcagtagacccagcaagcattcaaatatgtaacccattgcttctaacgggtcgtgagtccatctgtgaacaagtccttgtggccaggaatatgtgaagctctgactgacggggcctatgtctcacg

SEQ ID NO: 3314 - DNA, 339 bp, Homo sapiens
  misc_feature 1..339: note = U/M: U (0.06:0.84) in Heart Fibroblasts
  misc_feature 1..339: note = source = chr10:100600096-100600434; Gene: HPSE2 (intron)
  source 1..339: mol_type = genomic DNA
cgtagatgttaaaaagttttgaacagaggaatgccttgaagtctgaaagtatgaagaaagaataaatctgacagcacagtggaaaactgataggagagatgataggctagaagcagagacagcagttgggagctatttcaatattgcagaagagagataataagggcttcgactagggtgatgacagtgggaacagagaagacagcagggaagcgggaaaagcagagatagactccgcagggcttgaaaactgattggattgggaagagacaaaaaatgaggagggattcagagatgattccaaattctcatgccttagtggctcagaggagtatagcg

SEQ ID NO: 3315 - DNA, 450 bp, Homo sapiens
  misc_feature 1..450: note = U/M: U (0.14:0.92) in Heart Fibroblasts
  misc_feature 1..450: note = source = chr10:14745177-14745626; Gene: FAM107B (intron)
  source 1..450: mol_type = genomic DNA
cgtgctaatgaatttgccttttctcctaatcatcagcctttgtcagttgatttttcaatgaaccctccaagggcaaagggaaagatttcacaagatttccctttgctcctacaaagtcttcctaagtttgtttccttttccttcttcttctttttttttttttttttctgagacagagtctctctctgtcccccaggctggagggcagtggcatgatcttgtgatcccggctcactgcaacctccgcctctgggttcaagcaattctggtgcctcagcctcccaagtagctgggactacaggcgtgcgtcatcacccctgctaatttttgtatctttagtagagacagggtttcaccatgttggccaggctggtctcgaactcctggcctcaagtgatacacctgcctcggcctcccaaagtgctaggattacaggcgtgagccactgcg

SEQ ID NO: 3316 - DNA, 80 bp, Homo sapiens
  misc_feature 1..80: note = U/M: U (0.09:0.86) in Heart Fibroblasts
  misc_feature 1..80: note = source = chr15:47933263-47933342; Gene: SEMA6D (intron)
  source 1..80: mol_type = genomic DNA
cggagtgggagggggaggagttgttccatttccccactgctgcttccgcccgagggctgccgcagtatccattcctctcg

SEQ ID NO: 3317 - DNA, 429 bp, Homo sapiens
  misc_feature 1..429: note = U/M: U (0.12:0.89) in Heart Fibroblasts
  misc_feature 1..429: note = source = chr4:25067589-25068017; Gene: LGI2 (Intergenic)
  source 1..429: mol_type = genomic DNA
cgctgctgataaagacatacccaagactgggtaatttatccagcaaaagaggtgtaatggactcacagttccatgtggctagggaggactcataatcatgacggaaggtgaaaggcatgtcttgcacggcagcaggcagagagaaaatgagagctaagcgaaaggagaaaccgcttacaaaatcatcagatctcatgagacttattcactacttgagaatagtatgggggaaaccacctccatgattcaattatctcccactgggtccctcctacaatatgtgggaattatgggagctgtaattcaagatgagatttaggtggagacacagccaaaccatatcagccaccagctggcctctatcatctgtagcaaattcaatagtagcatttcatgaactttcatttcccgcacttccactatggggcg

SEQ ID NO: 3318 - DNA, 166 bp, Homo sapiens
  misc_feature 1..166: note = U/M: U (0.07:0.83) in Heart Fibroblasts
  misc_feature 1..166: note = source = chr5:8232971-8233136; Gene: LOC729506 (Intergenic)
  source 1..166: mol_type = genomic DNA
cgcttcacgtattccgttacaatcagaatgtctgataaggattttctgcggtccttccaatgcagtgctggcctctggggctaccttctgacatggcagggtggagcctccaacctactccagaaggaagaggagagggcaggattcccagcgcaaatccctgccg

SEQ ID NO: 3319 - DNA, 175 bp, Homo sapiens
  misc_feature 1..175: note = U/M: U (0.14:0.9) in Heart Fibroblasts
  misc_feature 1..175: note = source = chr12:104750546-104750720; Gene: EID3 (Intergenic)
  source 1..175: mol_type = genomic DNA
cggccgcaaaatccaaggaggcacacgctctcccagagcaagatcggtcctttaacagcactgagagttcagtttcctattccctcaccctaagcctggccctgcagaaccaataaacagctgggctctgagcagattaaattcccaagccacacaggtttgaatcccagcagcg

SEQ ID NO: 3320 - DNA, 351 bp, Homo sapiens
  misc_feature 1..351: note = U/M: U (0.12:0.88) in Heart Fibroblasts
  misc_feature 1..351: note = source = chr2:236845416-236845766; Gene: AGAP1 (intron)
  source 1..351: mol_type = genomic DNA
cgctgttgtgaccttcatgcctaacactcgtttccctggggatcatcatctctgataactgagcttccaaaaggctgagaaaccaagaccatacttatcattattagccaaaattcaaacccagatctttctgatttcaaagcttgtaatcattcccctctgcttttttttttttaaggagaaacgcatgcttagtactaaaacattgtatcataaaaattgtttgtcttttgatagcgcttgcttttcaaggaaatatgttctaagatggatagacattttgtcttctctcactgatgctgaagtttcctttatcaattcttcccaaatcttggctggcattcaaaagcg

SEQ ID NO: 3321 - DNA, 443 bp, Homo sapiens
  misc_feature 1..443: note = U/M: U (0.1:0.86) in Heart Fibroblasts
  misc_feature 1..443: note = source = chr10:108807125-108807567; Gene: SORCS1 (intron)
  source 1..443: mol_type = genomic DNA
cgataagcccacatgacattatgcaaccctttccactttaagattgtctgtacagccctgataggttattattttgttactgtcgctttaactcacttttctaccagaaattttattattaggcatggtatctattttacgtaaggaaaatgggttattctgattatcagaaaaagtactttacatatttttgttaaagttgctcttatattcaaacttctcactttagcattcaaagcccttcaacacttggctacaggctaactccacactctgttctcacttttactgcactctagccaaaacggaccatttgtcaccgcagtgcgttgccaatattttcccaatgttatgtccctgctccagttgttccctgaaaatggagacccatctttacccaagcccatctctcatacccctgtttaggaagcttgccgggtgcg

SEQ ID NO: 3322 - DNA, 449 bp, Homo sapiens
  misc_feature 1..449: note = U/M: U (0.11:0.87) in Heart Fibroblasts
  misc_feature 1..449: note = source = chr2:33461893-33462341; Gene: LTBP1 (intron)
  source 1..449: mol_type = genomic DNA
cgtcgtccatgtgtagcacacatgtgtcaagaaataaatacaagctgttctctgggctctgataattcctttatcatgttaccccgaagacagaagaattggaaggaaaggagttgctgccacagtggtttgacttttttcagtgagtccagtgattgaatccatcctatggtggatggtcattttataatcatgggacagttacagggtggtgggtaggcttttaatggcagtggggcctagatagaagcaaatataatcacgaagagactcatacaatagtctttgaagctggccccagagagcagcatttcacaaaaatgtttccacagatgaccagttcagaaggatgttaatagattgtgtgttaaaaagggtcccacagccaaatgtgcagaaaaaccaagttaaacacagaaaaacaagagattttgccaaaggactcttcg

SEQ ID NO: 3323 - DNA, 84 bp, Homo sapiens
  misc_feature 1..84: note = U/M: U (0.14:0.89) in Heart Fibroblasts
  misc_feature 1..84: note = source = chr2:3045032-3045115; Gene: TSSC1 (Intergenic)
  source 1..84: mol_type = genomic DNA
cggtcagagccaaggcaggcccagccgtgggactggctcctaatcagcgatgcctgcgtggagcactctccaaacggaaccccg

SEQ ID NO: 3324 - DNA, 86 bp, Homo sapiens
  misc_feature 1..86: note = U/M: U (0.14:0.89) in Heart Fibroblasts
  misc_feature 1..86: note = source = chr2:129096704-129096789; Gene: HS6ST1 (Intergenic)
  source 1..86: mol_type = genomic DNA
cgccggacacgttgaggctgaacgtcacactgcgtgggaacgtcagcacctcagggaagagcctctctgtgcccctgacctccccg

SEQ ID NO: 3325 - DNA, 106 bp, Homo sapiens
  misc_feature 1..106: note = U/M: U (0.13:0.87) in Heart Fibroblasts
  misc_feature 1..106: note = source = chr5:141683140-141683245; Gene: SPRY4 (Intergenic)
  source 1..106: mol_type = genomic DNA
cgggaagcactagagtcgtggacaaaagaggccaagttgtctgctctcatcgagcttatcccccagtggggaacagacaggctgcgaacaagtcagcaaatcaccg

SEQ ID NO: 3326 - DNA, 125 bp, Homo sapiens
  misc_feature 1..125: note = U/M: U (0.17:0.91) in Heart Fibroblasts
  misc_feature 1..125: note = source = chr10:36381288-36381412; Gene: FZD8 (Intergenic)
  source 1..125: mol_type = genomic DNA
cgggaggcgggagacaatgatttcaggatgattcaagcatattttttttttcttttcttttctttttttttgagacggagtctcactctgtcacccaggctggtgtgtgcagtggcgtgatctcg

SEQ ID NO: 3327 - DNA, 148 bp, Homo sapiens
  misc_feature 1..148: note = U/M: U (0.15:0.89) in Heart Fibroblasts
  misc_feature 1..148: note = source = chr6:159807233-159807380; Gene: FNDC1 (Intergenic)
  source 1..148: mol_type = genomic DNA
cgctgtgtgtgctgtttgttgtcttctccagttagaggaggcaacggagtatggcagaactgtcttcgtcattagttttcactgggatgtttctgctttggcaaaatactcatcaaatatctgagtccgcaaaacgcatggcttgccg

SEQ ID NO: 3328 - DNA, 150 bp, Homo sapiens
  misc_feature 1..150: note = U/M: U (0.2:0.94) in Heart Fibroblasts
  misc_feature 1..150: note = source = chr16:72939959-72940108; Gene: ZFHX3 (intron)
  source 1..150: mol_type = genomic DNA
cgcccaaactctgggatctccagccttctgactggccaaccccccgataagatccctcccgggacatccaagcaattcgatccaaagatgccgcctcctggttggtcagctctccagctcctagtggaatgagactggaaggccggcccg

SEQ ID NO: 3329 - DNA, 238 bp, Homo sapiens
  misc_feature 1..238: note = U/M: U (0.11:0.85) in Heart Fibroblasts
  misc_feature 1..238: note = source = chr10:102188822-102189059; Gene: WNT8B (Intergenic)
  source 1..238: mol_type = genomic DNA
cggaaggacttagcagatgctttggcagactcgtcaattctgagtcaaagcacatatgtgataagaagcatagggcgtagtgtccaagaatattttgttctccctagttttaaagtttaaagccttgtttgccttatttaaagagatgtgtttgacaattattcagattttttttttttttttttttttaagacagtctcgctctgttgccaggctggagtgcagtggtgtgatctcg

SEQ ID NO: 3330 - DNA, 301 bp, Homo sapiens
  misc_feature 1..301: note = U/M: U (0.09:0.83) in Heart Fibroblasts
  misc_feature 1..301: note = source = chr9:136577116-136577416; Gene: SARDH (intron)
  source 1..301: mol_type = genomic DNA
cgggataggctgccgtcaccggctctggccaccagcaccccagtccatgcctcggctggggatgacttagcgtttccatgtgcagaccccatgctgggtgcctcaccagtacaaatgccctccctgctcccagaacctccacagcccctccccatcaccctgcattagagacgaggaagtggcttgcactgggtctcattcctggccgctttgtcagtgtacgattgaacgggacagccggggctgcctggctgcaagccgcggcatacacactcagcacagttttcccagctcagccccg

SEQ ID NO: 3331 - DNA, 323 bp, Homo sapiens
  misc_feature 1..323: note = U/M: U (0.14:0.88) in Heart Fibroblasts
  misc_feature 1..323: note = source = chr1:61898568-61898890; Gene: NFIA (intron)
  source 1..323: mol_type = genomic DNA
cgctgcagtactcgagagccctctaaggtgctacatctccattttacagatgaggaaaccgaagtttcagaagagtacatttgtcccatggtaattgaagtagctgagatttgaaccagtctccagaacttctgtttttcacaaatacttatctgcatccccagttgtttgtagtgataggttactgaccattttctctttaaaagagtctaagattgactcacactcttatatcaaggaatcagaagccttgaagttagtcccagtgctccctggctccagtgggactgtgctgaacttcgttcttctgaagatctgccccg

SEQ ID NO: 3332 - DNA, 369 bp, Homo sapiens
  misc_feature 1..369: note = U/M: U (0.1:0.84) in Heart Fibroblasts
  misc_feature 1..369: note = source = chr13:26556444-26556812; Gene: ATP8A2 (intron)
  source 1..369: mol_type = genomic DNA
cgcctgtgacaaattccttttgcatgttcccaatttatgcacagtgcttttcacatgacgcagaagattgcagacacgaaagcactcaaaagcaaagagacaccggggctgggtggggcacaagcttgctgccatgttgccggacaaattggttgtattctgtgatcaaacatctaaagatattctgtacactggagcatttgagacacagtgacatttcaaagtgaaatccaagtgagcttttttatttgataacccagagaaatgcagtggccacacatttctgctccattttggcctctgcttcttggacccataaactatgtgattgcaatgcagccagctggagataacatttctgctgtggcg

SEQ ID NO: 3333 - DNA, 394 bp, Homo sapiens
  misc_feature 1..394: note = U/M: U (0.19:0.93) in Heart Fibroblasts
  misc_feature 1..394: note = source = chr7:4038381-4038774; Gene: SDK1 (intron)
  source 1..394: mol_type = genomic DNA
cgggaggaacaacacctccgtatcttccgcatcgctcgctgtcttccacgtggagttccgtgcagtcggcgtctccactgcctagggagtgctggcttctctgggtgaatgtgggagcttccttttgcaagtgtgccatccatgtgtccctttatgccttggctaccaggaagcccaaagctaacctgagtgtctaactgaagtacctcagtcattccaactgcttagaacatctccatctctttgcattcttctcctttatgagtttgattttgtttttgtttgtatgtatgtcattgtatcacccaattttatgcagattttcactttagaatatccttaagctctctttaaaaataggagatatctctccccaaacacacacacacacacg

SEQ ID NO: 3334 - DNA, 278 bp, Homo sapiens
  misc_feature 1..278: note = U/M: U (0.16:0.89) in Heart Fibroblasts
  misc_feature 1..278: note = source = chr21:28838198-28838475; Gene: MIR5009 (intron)
  source 1..278: mol_type = genomic DNA
cgatgaggcctgcactgtctgtgcactgctcctactaagcactgttccaatgtagcattcaggcatggggactcattgcctctggatatggcccactctatctctaaatagttctagccgttagacaactggggccaacccaagagagataaattttggagcaatttcgggtagtgttttctattttctagagataggacagaaacaaattagaaaaaatatcgggaaacatgcactgtgtcctgcctcactatccaagacttctttttaaccagacg

SEQ ID NO: 3335 - DNA, 312 bp, Homo sapiens
  misc_feature 1..312: note = U/M: U (0.11:0.84) in Heart Fibroblasts
  misc_feature 1..312: note = source = chr3:108214631-108214942; Gene: MYH15 (intron)
  source 1..312: mol_type = genomic DNA
cgagaggagttgtcatttctcagggttttagcatttccaaatgcttccaagatagtattcgcttgcatgatttgatcttctaacgccccctgagacacatgcaagagaagtacagctgatgaaactattagtagaattctgtaatgcggcaagccctccatctccaggtcaaaccccattcttgctttgataaccaatggccaaaagctgcttccaaatttggttatattatcttcgaatgagaaatcagaaaaacagttggatgacagaggctaacaatatacaatacccctatgaatatgtgggagctcg

SEQ ID NO: 3336 - DNA, 372 bp, Homo sapiens
  misc_feature 1..372: note = U/M: U (0.16:0.88) in Heart Fibroblasts
  misc_feature 1..372: note = source = chr2:204891253-204891624; Gene: ICOS (Intergenic)
  source 1..372: mol_type = genomic DNA
cgggtgtgactgaatacctatttgttaaaagattaatgttccagaagcatactttctaggaggcttaaaactgcaataactccaagatctgaaactgtggattccctgaaaaggggagttgtagagaaagacgagaacctaggccaatggtgaagccacaggagaatgaggaaggcatagggggaaagctgaacatctgggagacttagaccagggtgttgaaaggaaagcaactggcgtcaagaagtcagggcaaggatggaggagtccgggttgctagcacatgattccctagtcctgagctatacacagaggagacggtgcagtgagagatagagcaagacagacctctaaaagtatccattatgctcg

SEQ ID NO: 3337 - DNA, 387 bp, Homo sapiens
  misc_feature 1..387: note = U/M: U (0.14:0.86) in Heart Fibroblasts
  misc_feature 1..387: note = source = chr14:80778042-80778428; Gene: DIO2-AS1 (intron)
  source 1..387: mol_type = genomic DNA
cgactgactataatactaattcagaaaatgcagcttccaatcacacaaaacaagccctgttctctctgcaatgtttcatgccatcatctttctgaaaaatgagataaactgctgcatgtcttacaaaaatgtttagcaaaagttgtgatttgagttttcttttaaaactggctatgctaagtaggatatcaaaaactgcttttccgtttctgagcctaaaaatgtctccagagccatatagccacacacttatctgtcttttatctctcctctaaaacatgcactgaacatctactccggggcagatcctgctggaactggaaatataagtaccggttgagtatcccttatccaaaatgcctgggaccagaagtgtttcggatttcg

SEQ ID NO: 3338 - DNA, 495 bp, Homo sapiens
  misc_feature 1..495: note = U/M: U (0.16:0.88) in Heart Fibroblasts
  misc_feature 1..495: note = source = chr17:70290476-70290970; Gene: SOX9 (Intergenic)
  source 1..495: mol_type = genomic DNA
cggttcctggagcagatgcgtctataccccagagagcagacaagccacttgtgcctttagtttccgctccacggaccctttccaccatgacttcatatttcctaccactgatgctctctgttggtcttggcaagaatcagcaaatgcctcagtccactgtagatgggagttgggggccagggcgacccattcagcccctcctgcccacagcttcttgggtatgtgacttagcaacaagccaagcctgggctggggagacaagagcacacacaagcaaccagccagggagggctgctccctgactccagtctagttttccagcttctgagacacattgctttctttgggcctccagagaagcacatgggaacaaatccaggttgaagaggatgataagcgagaaatggcttcaagaaaaaattttttatcatgctgctgcttattattgagcaagagttcccaaaatgttttaaccatgtaatagaatttggggcg

SEQ ID NO: 3339 - DNA, 153 bp, Homo sapiens
  misc_feature 1..153: note = U/M: U (0.17:0.88) in Heart Fibroblasts
  misc_feature 1..153: note = source = chr5:40914883-40915035; Gene: C7 (intron)
  source 1..153: mol_type = genomic DNA
cggagatataggaaatgctaccctatgcacatttgagaaaatgtaaaggtacagacctcctttagcagagtaaataaacccagcagtatcagttacagcgcggacattcagagtttggcaggacacggatgtgtgcagggatcccatggcccg

SEQ ID NO: 3340 - DNA, 75 bp, Homo sapiens
  misc_feature 1..75: note = U/M: U (0.2:0.9) in Heart Fibroblasts
  misc_feature 1..75: note = source = chr17:4510524-4510598; Gene: SMTNL2 (intron)
  source 1..75: mol_type = genomic DNA
cgctggtgggtccttgggaacctctggctgccggctgagctctgttcccgggaccgagacaccggccctgtcgcg

SEQ ID NO: 3341 - DNA, 150 bp, Homo sapiens
  misc_feature 1..150: note = U/M: U (0.14:0.84) in Heart Fibroblasts
  misc_feature 1..150: note = source = chr6:160683680-160683829; Gene: SLC22A2 (Intergenic)
  source 1..150: mol_type = genomic DNA
cgaggcttccgggagggctgactagaactctccttgggctttcttcatcagtgtcgttctgattttattcatttctctttactggttctattttccctacaaaatgttagctctgtgccgatatcctttgaggcaggaaattggaattcg

SEQ ID NO: 3342 - DNA, 183 bp, Homo sapiens
  misc_feature 1..183: note = U/M: U (0.16:0.86) in Heart Fibroblasts
  misc_feature 1..183: note = source = chr7:70096458-70096640; Gene: AUTS2 (intron)
  source 1..183: mol_type = genomic DNA
cgagactctccatgatttctgaaccgtgggggacggggtggtcgcaacctagaatgtgggctggagagcgctgtcccagtggtggccccgaggccacaggttctgtcccagatgttctcagcaccattttagcgacaagggcagctatgaaaatggcccagctgcagaaagtcattcctcacg

SEQ ID NO: 3343 - DNA, 187 bp, Homo sapiens
  misc_feature 1..187: note = U/M: U (0.15:0.85) in Heart Fibroblasts
  misc_feature 1..187: note = source = chr18:49667627-49667813; Gene: DCC (Intergenic)
  source 1..187: mol_type = genomic DNA
cgctggcacagagcgtgtcagtttctaattcttccttgggaatatatcatttgattcatgtgtgaaagatcagtgagggaggagtataaatcccacttttgttcagccttctgggcagttcgagcctgctaatttctgcaatatgcatgatgtacggcaacctctcagatttacagtctctccttcg

SEQ ID NO: 3344 - DNA, 278 bp, Homo sapiens
  misc_feature 1..278: note = U/M: U (0.23:0.93) in Heart Fibroblasts
  misc_feature 1..278: note = source = chr4:184849937-184850214; Gene: STOX2 (intron)
  source 1..278: mol_type = genomic DNA
cgacagagcgagactccatctcaggaaaaaacaaacaaaaaaaaaacaacaaaaaaacttggtttctttttggaaatagtcctgaaaagaacaccaacccaccacagctgctggtgataagaaataagagaaaatgacgatgtctgagaaagtcatagctcttactcaaaggaaaagaagctttggataaagtgtgaaatacttgtaacacaagccccgaaagcgtaactcctgtaaccgtctcgagaattcctcagatgagtatgtttcacttgccg

SEQ ID NO: 3345 - DNA, 139 bp, Homo sapiens
  misc_feature 1..139: note = U/M: U (0.22:0.91) in Heart Fibroblasts
  misc_feature 1..139: note = source = chr17:3671806-3671944; Gene: ITGAE (intron)
  source 1..139: mol_type = genomic DNA
cgccagcatttcctgcctcaggccctccacggcgctgttccctccacggcactgttccctccaccgcgctgtttcctattcccagagccctcaccttccactctccccaaggttggcttattctccttccccagcctcg

SEQ ID NO: 3346 - DNA, 424 bp, Homo sapiens
  misc_feature 1..424: note = U/M: U (0.21:0.9) in Heart Fibroblasts
  misc_feature 1..424: note = source = chr10:34336290-34336713; Gene: LINC00838 (Intergenic)
  source 1..424: mol_type = genomic DNA
cgtcttagcttttccatctttcattggattctcagcactgctgccttgtttccatagaatcacagaagtcaaagctaaaaaagattttgcgtatttcccttcacacaaacccccaagggcaaaatgttaccaaactcctactcttagatccacaacagacttttctgctgggagccaggcgtaaacatggagtcacgcgtgattattgagttctgtcatccacaccagaaaacagcagtggcaggagaaggcggctgcgggaacattttctccttccaaaagagctttcatcactctacttagctttcatttctggctcaagcttagaagcctccagtttagtgtctttctaggcagtcttgtggtccactctatcaccaataatgcagcacctacaccaagccaaggaacactcagagagacg

SEQ ID NO: 3347 - DNA, 453 bp, Homo sapiens
  misc_feature 1..453: note = U/M: U (0.19:0.88) in Heart Fibroblasts
  misc_feature 1..453: note = source = chr6:81158936-81159388; Gene: BCKDHB (Intergenic)
  source 1..453: mol_type = genomic DNA
cgaaattgattttactgtagaatgccctaaactttgaagacagatgattacttcctaacttgtaaacaagtttggtgaggttaaaataacttgttattcatttgttcatttaatacatttgtgttgaaaacctagtatgttccaaacgtgataatagactgtgagaaaggagtgttggctcgtcagtacaaggccttgtgctgttggagcttatattccacagagaacatggataataaaaataaattctcaagtaagtaaaaataaataagaatagtaattaatacataaaaatgaggcaaggttatgtcgaggagacgttaacttgttctctattctccatatttcctataaatttaaagttagatctaaagacttgattagactcaagttaatcttttctgacaaaaaccctttatagatgttgtgtgaacttcaaattacatcatatcg

SEQ ID NO: 3348 - DNA, 43 bp, Homo sapiens
  misc_feature 1..43: note = U/M: U (0.19:0.87) in Heart Fibroblasts
  misc_feature 1..43: note = source = chr5:177813685-177813727; Gene: COL23A1 (intron)
  source 1..43: mol_type = genomic DNA
cgttatcagcgcagaagggtccccgccgcctacccctgccccg

SEQ ID NO: 3349 - DNA, 182 bp, Homo sapiens
  misc_feature 1..182: note = U/M: U (0.2:0.88) in Heart Fibroblasts
  misc_feature 1..182: note = source = chr2:237572975-237573156; Gene: CXCR7 (Intergenic)
  source 1..182: mol_type = genomic DNA
cggtgcaatcgtgtgagtgaagatcggtgcaatcatgcgagtgaagatcacggcaaacttgacaatggagaagaggatacagaagcatttcacacatccctgggttattattattattattattatttctaaatggtctacaaaaccatatggaatctcaatttaaatacaggaaaaggccg

SEQ ID NO: 3350 - DNA, 194 bp, Homo sapiens
  misc_feature 1..194: note = U/M: U (0.16:0.84) in Heart Fibroblasts
  misc_feature 1..194: note = source = chr12:15236157-15236350; Gene: PDE6H (Intergenic)
  source 1..194: mol_type = genomic DNA
cgtttaatcttttgtttgatagaacattgaaacaagttgcgttccaagtggtaccctttatctgtgagctaccacatgctctgtagaagagactcgtgcggcatcagggagtcacattccactgtcaaacatctctaatttttagttgtctgctctgtatccctgtcagcaccatgtattagactgatgtttcg

SEQ ID NO: 3351 - DNA, 254 bp, Homo sapiens
  misc_feature 1..254: note = U/M: U (0.23:0.91) in Heart Fibroblasts
  misc_feature 1..254: note = source = chr7:94647863-94648116; Gene: PPP1R9A (intron)
  source 1..254: mol_type = genomic DNA
cgctaacaggagggaggaactggatttgttttctgaccacgatagtaagcataatgtcttcaacttaggcaaagcctgggtagggttgctagcagccactgtgtaagagtgagtgtttgctaagtttatggttcctcagttgtgacactgacccgctgtgtgccagccttcatctgaccttgcttctgcatttccctgtgggcgttggtggttaaggaggaccaatgcaaacatgaagctcttactgcctgacg

SEQ ID NO: 3352 - DNA, 301 bp, Homo sapiens
  misc_feature 1..301: note = U/M: U (0.14:0.82) in Heart Fibroblasts
  misc_feature 1..301: note = source = chr10:60697460-60697760; Gene: FAM133CP (Intergenic)
  source 1..301: mol_type = genomic DNA
cggagttcctggtgcagtaacgcttctgccatattagattggtcaaagcagtcccagagcccactcagttgtaagaggaggagcaactcaacgaaaggaatgtcaaagaatttgaggttatctttattatgccccaaactagctctcccaaagctttaagtccagcttcaactggatgaagcagatcttcacatggtctatttgcctgtcagaaaaacaatttaatcttccaggaagaaatgttacttcatccagagacctctcctgtcaggggcaaattagcttcgttgtgctatctccg

SEQ ID NO: 3353 - DNA, 477 bp, Homo sapiens
  misc_feature 1..477: note = U/M: U (0.21:0.89) in Heart Fibroblasts
  misc_feature 1..477: note = source = chr18:19996170-19996646; Gene: CTAGE1 (exon)
  source 1..477: mol_type = genomic DNA
cggaggattccctgggcctctggagcctcttcctcctccccgtggaagcaaaggtgagagtctgagaggaccttccaacaaagttggaggatagagagaagctctcgtttcagatgaaggccaacccaatggtgagggaccatatggggaatgctgtctgccaaatgctgtatttggaacatcaagtccataaggatctttttctaaaagttttattttaaactctatttcagttaatttttgtctgttgtgagcattttctttccttaaatcattgaggtttctttcagcagtccaagctgccgaccaattatcatgtgcttttttctcatggagaataatcttcttttgataaaaatgaatagttttctcaaattctttaagatctttggctcgctttcggtaggtctccagctcttcagtggcatggctgatcatttcgtctactttagaaagtttctcttctttctctaaccg

SEQ ID NO: 3354 - DNA, 55 bp, Homo sapiens
  misc_feature 1..55: note = U/M: U (0.14:0.81) in Heart Fibroblasts
  misc_feature 1..55: note = source = chrX:118162635-118162689; Gene: LONRF3 (Intergenic)
  source 1..55: mol_type = genomic DNA
cgcagtggagggctgaagggctcctcaaacgccgctgaggccgaggaggtgcccg

SEQ ID NO: 3355 - DNA, 62 bp, Homo sapiens
  misc_feature 1..62: note = U/M: U (0.21:0.88) in Heart Fibroblasts
  misc_feature 1..62: note = source = chr8:1318016-1318077; Gene: LOC286083 (Intergenic)
  source 1..62: mol_type = genomic DNA
cgcgaggcgcaaggcacaagcctggcgggaagacgccgtcctggggcgtgcagaggcagccg

SEQ ID NO: 3356 - DNA, 114 bp, Homo sapiens
  misc_feature 1..114: note = U/M: U (0.21:0.88) in Heart Fibroblasts
  misc_feature 1..114: note = source = chr1:235158696-235158809; Gene: SNORA14B (Intergenic)
  source 1..114: mol_type = genomic DNA
cgtcgacagccctgtcatgaattagaatctttggacaaggtggcaagccaaccagatcctacagcagccgacaagcgaccaaggctacacagccttgcctgggacagcttcacg

SEQ ID NO: 3357 - DNA, 267 bp, Homo sapiens
  misc_feature 1..267: note = U/M: U (0.13:0.8) in Heart Fibroblasts
  misc_feature 1..267: note = source = chr4:4341969-4342235; Gene: NSG1 (Intergenic)
  source 1..267: mol_type = genomic DNA
cgctaagcctggcattgggtccctgttcatgcttacagatacaaatgtaccaggacaaaaggcagaagaatagccactccgagggacacagcctcagcctcacaaatggcctgcgttcatgctaagtgtgaacaggatggtggggggagctggaaagatacccggcagaggtccccgtcccctggccaaggttctggtttcaaaatacccgagagaggtcccagaaactgacacattgaccatgaggtccagctgttgacaaacacg

SEQ ID NO: 3358 - DNA, 226 bp, Homo sapiens
  misc_feature 1..226: note = U/M: U (0.26:0.92) in Heart Fibroblasts
  misc_feature 1..226: note = source = chr21:47349563-47349788; Gene: PCBP3 (intron)
  source 1..226: mol_type = genomic DNA
cggtctaggctggagctgccggggagccagggagagaagacagcggcttccggagctgccttctgcacgccgggcattggcctgctcacagcctggactccattggcttcccccaggccaagtccttgcgttctcttgcatctgccatgtgtccgcatggccctctttctatctatctgtgcaaagttctgttactgccgttttaatttggtgtgacttgtactcg

SEQ ID NO: 3359 - DNA, 439 bp, Homo sapiens
  misc_feature 1..439: note = U/M: U (0.25:0.91) in Heart Fibroblasts
  misc_feature 1..439: note = source = chr6:126381299-126381737; Gene: MIR5695 (Intergenic)
  source 1..439: mol_type = genomic DNA
cggggacttttcctcttcatgagcaggttctgttttattcttcctttcttcatgcggtggacctggttgcaggatttttattagactttttcaattcagaattttaggtcaagaactcaaatgtcaacattgaggattgttttctcgtaagtgatagctgctctattacagtctctaaaaataatgtttcgcctcagaatctgacatccgctgtttctttttaaattttatcttatcacgggctctctggctcaagctgtccaccagagaagtgaaaggccagaggggccttgcagtacccccacctctccttcaggcaactcagaccgagtgtagtctaagagccctgttgactctgccctctctccagagagaatagtccattcacgaatggctccatcactcagtgcgtatgtgacacaacgcagatcaaagggcg

SEQ ID NO: 3360 - DNA, 460 bp, Homo sapiens
  misc_feature 1..460: note = U/M: U (0.22:0.88) in Heart Fibroblasts
  misc_feature 1..460: note = source = chr3:99359629-99360088; Gene: COL8A1 (intron)
  source 1..460: mol_type = genomic DNA
cgaagtttcatgtagtcgcccccaaatctccccttctgcatgggatgtggatacttcacgtgagtctcctctttttgccattatatagctgcctcttgatcaagtccatgactatacccaaccaatgccattgaggcagacttgggaggacttcttaatgtttctcagaaaagataagatgagaagctgccgctttcactagagacacaagaagggagctctactgattttgagggcttgctgatcctacagaaatgtgcattttagatgttctactactgtcaaaattataaaatgatatccttttcatgatcagaaaacatatgccactttattcctatttatgaaataaaaatcaaggagaagaggattggggtgaaaagggacttgaaagagaagctggaggaatcacagaagtgccctaggagaaaagcaagattaggagctctgttacgaaacg

SEQ ID NO: 3361 - DNA, 148 bp, Homo sapiens
  misc_feature 1..148: note = U/M: U (0.25:0.9) in Heart Fibroblasts
  misc_feature 1..148: note = source = chr11:2001208-2001355; Gene: MRPL23-AS1 (Intergenic)
  source 1..148: mol_type = genomic DNA
cgtgactgatggggcagccggggtctccagcatggggaggggagccttgtctgtgccgggcgagcagctgtccccatccctcagcctgtgtcccgctcgcctcggctgctaaccagagacctctgatccccggctggaggtgggagcg

SEQ ID NO: 3362 - DNA, 178 bp, Homo sapiens
  misc_feature 1..178: note = U/M: U (0.24:0.89) in Heart Fibroblasts
  misc_feature 1..178: note = source = chr17:74365585-74365762; Gene: SPHK1 (Intergenic)
  source 1..178: mol_type = genomic DNA
cgcttgtattgagagggaagtgagccggtggtggtgctgcatgcctgtagtcccaactgcttgggaagtgaggcaggaagattgctttagccccaggagttagaggttacggtgaactaagactgcgccactgcactctagcctgggcgacacagcatgaactgctcttcaaaaggcg

SEQ ID NO: 3363 - DNA, 357 bp, Homo sapiens
  misc_feature 1..357: note = U/M: U (0.23:0.88) in Heart Fibroblasts
  misc_feature 1..357: note = source = chr2:107345065-107345421; Gene: ST6GAL2 (Intergenic)
  source 1..357: mol_type = genomic DNA
cggagagcgtttgactcggatgttagagatagtggataatttatgcttggaagaacattgaaaaggccatgagtagctccatttcattccttctctgaaagaaccagtccatttaataagaaagggcctgctccatccatgtgaggcaggacaatcttaagtagttagggatttttcaatacagagaagttttccaaatgagatctagttagcaattgttacgagtgatcctagacagcagaaatggctaaaccgttggggaccgccctgtcctagatgtgatagtggcctgaatgttcattccccatatctagtccctctctaaatcccctgacacagcacaactgggaaaggccg

SEQ ID NO: 3364 - DNA, 170 bp, Homo sapiens
  misc_feature 1..170: note = U/M: U (0.23:0.87) in Heart Fibroblasts
  misc_feature 1..170: note = source = chr11:78509223-78509392; Gene: TENM4 (intron)
  source 1..170: mol_type = genomic DNA
cgtaaataaaattgaatttagctctagtgcaactgctatgtttagagctttaattattttaacccggttgctactttaagcttatttttgttaaagcattgagtttattttgctgtcgattgtgacctaatttgataacagggcttttcagcgccatatccatctagtcg

SEQ ID NO: 3365 - DNA, 346 bp, Homo sapiens
  misc_feature 1..346: note = U/M: U (0.24:0.88) in Heart Fibroblasts
  misc_feature 1..346: note = source = chr10:45589779-45590124; Gene: RSU1P2 (Intergenic)
  source 1..346: mol_type = genomic DNA
cggagtggggagataagactctgttaggtaatggatccaaaatggatttcatcatcttactgtcgtagtaagaatagggggtccaggcaagattcggtgctcattgctggcatccctgaaggcccatccaggggctggctgcgaccatgagcagattaaaggcctcccttggtagttgctccagtgggagttgttggcttctgggtcttcggttcaagtgacccaaattcacaacaaaaaggggattgatgaacttgatgctaaacatttatgctgagaaacttaactgtggagattgggattctatttataacagccctatatagagacacttgccttgtaggcg

SEQ ID NO: 3366 - DNA, 385 bp, Homo sapiens
  misc_feature 1..385: note = U/M: U (0.25:0.89) in Heart Fibroblasts
  misc_feature 1..385: note = source = chr7:105659527-105659911; Gene: CDHR3 (intron)
  source 1..385: mol_type = genomic DNA
cgtgaaggcaaaatgaactctcagttagcagcaggcagccatagacaaagattggttcagagtcaggagaccgagttcatttttcaactttgatcccaattttccgagggagtctgagcaatgcttatctccgtgtccatatttctctatctcttaaacggagagtcacctgataaccccaatgcctgaatagtccgcttcctccgataacttgctttgaattaatgggatgatgtttttaatgatgtgcaaggtttggcattgctacccaaggaaagttggagataattgcagtgtttgttaggctgtttttttttttttttaaagaaaatgaatggactccactctgggggctaactagagtgaacatttcaatttattcccg

SEQ ID NO: 3367 - DNA, 164 bp, Homo sapiens
  misc_feature 1..164: note = U/M: U (0.25:0.88) in Heart Fibroblasts
  misc_feature 1..164: note = source = chr17:67893232-67893395; Gene: KCNJ16 (Intergenic)
  source 1..164: mol_type = genomic DNA
cggctcaagagtccaggcacggcttagccgagtctgctcagggtcttaccaggctgcaacccaagaggctggccaggctgcattttcatctggaggcgccaggggaaagaagccacttctttttttcttttttttattttttgagacagagtctcactctgtcg

SEQ ID NO: 3368 - DNA, 365 bp, Homo sapiens
  misc_feature 1..365: note = U/M: U (0.26:0.89) in Heart Fibroblasts
  misc_feature 1..365: note = source = chr4:79038448-79038812; Gene: FRAS1 (intron)
  source 1..365: mol_type = genomic DNA
cggacaattatgtgtcttggagttgctcttctcgaggaatatctttgtggcgttctctatatttcctacatttgaatgttggcctgccttgctagattgggtaagttctcttggataatatcctgcagagtgttttccaacttggttccgttctccctgtcactttcagatacaccaatcagacgtagatttggttttttcacatagtcccttatttcttggaggctttgttaatttctttttattctttttctctaaacttctcttctcgcttcatttcattcatttgctcttccgtcactgataccctttcttctagttgatcgaatcagctactgaggcttgcattcatcatgtagttctcg

SEQ ID NO: 3369 - DNA, 103 bp, Homo sapiens
  misc_feature 1..103: note = U/M: U (0.3:0.92) in Heart Fibroblasts
  misc_feature 1..103: note = source = chr2:66529058-66529160; Gene: MIR4778 (Intergenic)
  source 1..103: mol_type = genomic DNA
cgggtcatgggcatggtgtgtgtgtgcgccggcctgggagtcaggatgtctgataggggtttagggtccttccacggcagtttcagtgtgaccctccacctcg

SEQ ID NO: 3370 - DNA, 156 bp, Homo sapiens
  misc_feature 1..156: note = U/M: U (0.29:0.91) in Heart Fibroblasts
  misc_feature 1..156: note = source = chr17:2885214-2885369; Gene: RAP1GAP2 (intron)
  source 1..156: mol_type = genomic DNA
cgactgcgtcttcatgggccagcaggctctggagagggacaacggaagcagagctgtgcttctgagcttctgccgtgggtcacgctgcagcggctgaggcctgctgggaccggctctgtctatcctctgagtcccaactctgacaaccaggacccg

SEQ ID NO: 3371 - DNA, 201 bp, Homo sapiens
  misc_feature 1..201: note = U/M: U (0.23:0.85) in Heart Fibroblasts
  misc_feature 1..201: note = source = chr11:120701316-120701516; Gene: GRIK4 (intron)
  source 1..201: mol_type = genomic DNA
cgccatcccagtgtgtgaggccagttgctcgtccttcctacctccgattctcctctgtgctggggattataatactttatgggattgtcgtgaggacttacatgagataagccatgtaaaatgtttcgcacattaactggaacacaataagcatttgataaatgttgcccttatcattgcttttgggagcaaacgcctacg

SEQ ID NO: 3372 - DNA, 429 bp, Homo sapiens
  misc_feature 1..429: note = U/M: U (0.25:0.87) in Heart Fibroblasts
  misc_feature 1..429: note = source = chr5:142481323-142481751; Gene: ARHGAP26 (intron)
  source 1..429: mol_type = genomic DNA
cgacatttcaatttctgctgcatgttctacacaaaatttaactggacaagatagggagagaagctggagaagggaaagttcgtcatatgacataaaagctttttttttttttttcttccataatggcttagagtgtgccttccttaaaaagggggaagcagctactatggcaacaggttctattttccttaggggctgtggtggcgctgatagaactggagtctggagaacatgaaacaatagccaggagccccaggagcctgcagcatgttttttttgtagtaattactagccttttccatgattcaaaactatgtggtaagtggaactgggtaggttggtggtggttttgtttctgagtgatatagacagcaggaccgtgagtaagggaccctctctacatctcacagagaacccgtacagtgcgcg

SEQ ID NO: 3373 - DNA, 445 bp, Homo sapiens
  misc_feature 1..445: note = U/M: U (0.26:0.88) in Heart Fibroblasts
  misc_feature 1..445: note = source = chr6:145357601-145358045; Gene: LOC100507557 (Intergenic)
  source 1..445: mol_type = genomic DNA
cgcatacaaatatgctgcttgttcacacaggaagcagcaaaagcaagcatccctccagtgcacaaaatcccagatatgaaaacatgatggagccaacagaggacactgatcctgcttgccctgcactcaggagccatgctgcacatattctcctccgtttgatcaccgtcctgtggctcctcctccatgtcattagttctccgacagctgtttttcttctcctctttagaactgtcttgattctcactcccctctgctgtgccttggtgtctgtacttggttccttcttggcttgatcacaatgagagatgttaacttttctttaaactggagtcgcttttctccaaatttcagaggtggaggtgaatgtggaggtgaacgtgaaggtggagaacgactgaatgaagccacaatgttgcctttcctggctctatcaccatccacg

SEQ ID NO: 3374 - DNA, 455 bp, Homo sapiens
  misc_feature 1..455: note = U/M: U (0.29:0.91) in Heart Fibroblasts
  misc_feature 1..455: note = source = chr2:206052774-206053228; Gene: PARD3B (intron)
  source 1..455: mol_type = genomic DNA
cgtcctcttagagacagacacgcagataattaggatgcagccagctaagcattagatacaaaatgcaatgggagcctagaggaagaagccactaactttgcctggagttgtcaagtaagttttcacaggagagcagtgtttaagcagtttcttggaaaacggaagaaagctctctagacagagaagtggcgggaagggcaatttaggttaaggaaaccagggatgggaaagaatgcagagtgtgttcagtgtggctaaagcttgtggtatctcagggaagaatcaatgggaagggcattgtctgtcctgctccatgggtgccatgcttctccggagagcagtggagaagcattgaagcgctttgagcctggagatgacagtatcaggcagagcagtttcagtgatggagggtggagggaatggcagaagccgccatagacaaggaggctgctccg

SEQ ID NO: 3375 - DNA, 125 bp, Homo sapiens
  misc_feature 1..125: note = U/M: U (0.22:0.83) in Heart Fibroblasts
  misc_feature 1..125: note = source = chr12:104750358-104750482; Gene: EID3 (Intergenic)
  source 1..125: mol_type = genomic DNA
cgaggaaaggacgctccaggcagacccctggcaagcgaaagcatggatgtagtccaggttcggggcttggaggggcatggagacagaaagagaagcgctcaaacgcaggccaacgctgggcaccg

SEQ ID NO: 3376 - DNA, 204 bp, Homo sapiens
  misc_feature 1..204: note = U/M: U (0.22:0.83) in Heart Fibroblasts
  misc_feature 1..204: note = source = chr12:114652758-114652961; Gene: TBX5 (Intergenic)
  source 1..204: mol_type = genomic DNA
cgccaccatgcctggctaatttttgtattttcagtagagacagggtttcaccatgttggccaggctggtcttgaactactgacctcaggtgatccacccaccttggcctcccaaagtgtttggattacaggtgtgagccactgcacccggcgtttgcttaaactcgtgctacgcgaaatatggtccccagatgagcagcatccg

SEQ ID NO: 3377 - DNA, 275 bp, Homo sapiens
  misc_feature 1..275: note = U/M: U (0.23:0.84) in Heart Fibroblasts
  misc_feature 1..275: note = source = chr16:11760791-11761065; Gene: SNN (Intergenic)
  source 1..275: mol_type = genomic DNA
cgacagagcaagaccttctctctaaaaaaaagaaaaaaaattgcttcgtcaaatctgcccacattcatagatataggctgagtgggacgatggcttgagcccaggaaggagttggatggaggctgtagtgagctgtgattgcaccactgtactccagcctgagtgacagaccaagaccccgtctcaaaaacaaaacaaaaaaccccaagggagctactcttggctgggcgatcagggagggccctcctgaggaaggggcacttaagctgagatcg

SEQ ID NO: 3378 - DNA, 352 bp, Homo sapiens
  misc_feature 1..352: note = U/M: U (0.26:0.87) in Heart Fibroblasts
  misc_feature 1..352: note = source = chr3:150124366-150124717; Gene: TSC22D2 (Intergenic)
  source 1..352: mol_type = genomic DNA
cgatttaagagtatcataacgagtaatcaagaagtttatatgataagataatgtaaagggatgagcaggcatataatactcatttttccaaaagcaccaccatcaacactacccattataaccaccttaaacatctggtaaatcaatccaaaattaaattaagcttttataaattcatattgggtttaaccatttgatctaacttattgatggaaaactgcctctaacaattactgaaattacagacttagaaatgaaacattccattagctatctctgccacaatagcataacgttacattttgttccattactttcgcccagccccttaagaaatagggattttatgtcg

SEQ ID NO: 3379 - DNA, 408 bp, Homo sapiens
  misc_feature 1..408: note = U/M: U (0.23:0.84) in Heart Fibroblasts
  misc_feature 1..408: note = source = chr11:118041069-118041476; Gene: SCN2B (intron)
  source 1..408: mol_type = genomic DNA
cgagtcgagttcccaggcaagtgtactcccaggggccaagtcccagtggctggaaggagtttcgtgtgcctgaggcagagggagcagaatgaccgagggggtgcatggtgagacctgaggtccaagagttaggcagggaccagctcacaaaggctttgtgggctaggatatggaattaggagtttcctctttggagtgtgataggaggtccctgcagggttggggagtatgggggctgctgggaggctgtccagatgagcccgatagaggctgatgtgggaatcgcatagacaaggggatgagactagacttgggttcaatcccagctccagcatcagaagctggaagagtgggggctactcctttgtaaaacgcagttggtgacaccgatctcccagggttgtttcg

SEQ ID NO: 3380 - DNA, 88 bp, Homo sapiens
  misc_feature 1..88: note = U/M: U (0.32:0.92) in Heart Fibroblasts
  misc_feature 1..88: note = source = chr7:41487091-41487178; Gene: INHBA-AS1 (Intergenic)
  source 1..88: mol_type = genomic DNA
cgtgtccgtgtctttgtgcccctggtccacctccctgtctcacagcgatgtccgtatttcacagcctgggcggaatgagcgcctctcg

SEQ ID NO: 3381 - DNA, 104 bp, Homo sapiens
  misc_feature 1..104: note = U/M: U (0.29:0.89) in Heart Fibroblasts
  misc_feature 1..104: note = source = chr21:44566046-44566149; Gene: CRYAA (Intergenic)
  source 1..104: mol_type = genomic DNA
cgcgtgcgatgttgtttgtaacaagcacatgtggagatgtcccgggcccctcatgaggcggctgcttgtgtccgtttgtacctcttgccagctgtgcagtgtcg

SEQ ID NO: 3382 - DNA, 124 bp, Homo sapiens
  misc_feature 1..124: note = U/M: U (0.26:0.86) in Heart Fibroblasts
  misc_feature 1..124: note = source = chr1:92055516-92055639; Gene: CDC7 (Intergenic)
  source 1..124: mol_type = genomic DNA
cggtgaattttttttttttttcggagtctcgctctgtcaccaggctggagtgcagtgacacgaacttggctcactgcaacctctgcttcccaggttcaagggattctcctgcctcagcctcccg

SEQ ID NO: 3383 - DNA, 160 bp, Homo sapiens
  misc_feature 1..160: note = U/M: U (0.24:0.83) in Heart Fibroblasts
  misc_feature 1..160: note = source = chr2:174257623-174257782; Gene: CDCA7 (Intergenic)
  source 1..160: mol_type = genomic DNA
cgcccatgaatgcacacacgaatttccttccactctaatccatgaatatcactgcccttgtttcccagccccagcccctagggtttttgtgtgatacgccacgctttctatcaggagttagattctctgtcacaaaactccagtgctgtgggttggcacg

SEQ ID NO: 3384 - DNA, 184 bp, Homo sapiens
  misc_feature 1..184: note = U/M: U (0.32:0.91) in Heart Fibroblasts
  misc_feature 1..184: note = source = chr21:37819075-37819258; Gene: CLDN14 (Intergenic)
  source 1..184: mol_type = genomic DNA
cgcagggccgtgggggcttcgtgctgtttggccaagagcctcttcctcctgtctcgctggtctgcagcgggaagagtgtccgaatgagcccactcatgcctttggctcttctaggccagcagggatttcagggttgcagggagcccttcggaacttccttctcttcctgtggcgcccctcaccg

SEQ ID NO: 3385 - DNA, 144 bp, Homo sapiens
  misc_feature 1..144: note = U/M: U (0.28:0.86) in Heart Fibroblasts
  misc_feature 1..144: note = source = chr5:177955938-177956081; Gene: COL23A1 (intron)
  source 1..144: mol_type = genomic DNA
cggtgtatcagttacctatcacctcaaaacaacatgacccaaaattcagtggcctaaagcatcaatgtattgtttctcaggattctatggcctcgcagggctgggcggttctgctccgcagagctacggctgaggtccctcgcg

SEQ ID NO: 3386 - DNA, 237 bp, Homo sapiens
  misc_feature 1..237: note = U/M: U (0.3:0.88) in Heart Fibroblasts
  misc_feature 1..237: note = source = chr2:42140447-42140683; Gene: LOC388942 (Intergenic)
  source 1..237: mol_type = genomic DNA
cgagttcatctagagagaacagttgtatgccccactactaaatatttacgtaaaaaccctgcttaaaaataacactatttcagagaagaccacttgaaggacaagcagttcatctgttcttccagattttctaacaccgtccaaggatcccaccagagcaagggaaacacggatatctggagtacatcatatcggccccagaagaattactgttgctgaactgtttttggtgtgacg

SEQ ID NO: 3387 - DNA, 323 bp, Homo sapiens
  misc_feature 1..323: note = U/M: U (0.33:0.91) in Heart Fibroblasts
  misc_feature 1..323: note = source = chr12:111183872-111184194; Gene: PPP1CC (Intergenic)
  source 1..323: mol_type = genomic DNA
cgtgctggtgggtgcctgtaatcccagctactccagaagctgaggcatgagaatcgcttaagcccaggaggcggaggttgcagtgagctgagaccgtgccactgcactccagcctgggcgacagaatgagactccgtctcaaaaaaaaaaaaaaaagaaaagaaagaagtgttgagtgttggtgatgaagtttgcctgcaaatctagacctccctggatattccaggggttttatacaaaggagggaaccatggggaaaaaatacgggtgaatgctctttgacaacgtccacagttctatctctgcatcctgtagtgttaccg

SEQ ID NO: 3388 - DNA, 115 bp, Homo sapiens
  misc_feature 1..115: note = U/M: U (0.36:0.93) in Heart Fibroblasts
  misc_feature 1..115: note = source = chr11:126187044-126187158; Gene: DCPS (intron)
  source 1..115: mol_type = genomic DNA
cggggtttcaccatgttagccaggatggtctcgatctcctgacctcgtgatccaccctcctcggcctcccaaagtgctgggattacaggcgtgagccactgcacccggcctcccg

SEQ ID NO: 3389 - DNA, 483 bp, Homo sapiens
  misc_feature 1..483: note = U/M: U (0.3:0.87) in Heart Fibroblasts
  misc_feature 1..483: note = source = chr4:156416292-156416774; Gene: MAP9 (Intergenic)
  source 1..483: mol_type = genomic DNA
cgaatgctgtaaagatatgaagaggggaattgagaaatacttttctgatagcttcaattttttttttttttttttttttttttttgagacagagtcttgctctgtccccccaggctgaagtgccgtggtgagatctcggctcactgtaacctctgcctcctgggttcaagcagttctcctgtctcagcctcccgagtagctgggattacaggcacaggccaccatgcccagctaatttttgtatttttagtagagggttttcatcatcatggccacgctggtgtcgaactcctgacctcatgatccgcccaccttggcctctcaaagtgctggcattacaggcttgagccaccgagccagaccctgatagcttcaattttttcagtgacaggagaagaagtttctccactgagaccaacgatggaggaaagcactgaaagtttgcagagacgagacaagggaaggcgtccattgaggacagcg

SEQ ID NO: 3390 - DNA, 340 bp, Homo sapiens
  misc_feature 1..340: note = U/M: U (0.28:0.84) in Heart Fibroblasts
  misc_feature 1..340: note = source = chr10:30547931-30548270; Gene: MTPAP (Intergenic)
  source 1..340: mol_type = genomic DNA
cgagatcagcctggccaacatgatgaaaccctgtctctactaaaaatacaaaaattagccgggcatagtggcgtctgcctgtattcccagctactcaggagtctgaagcaggagaatcgattaaatccaggaggcagaggttgcagtgagctaagattgctccactgcattctagcctgggtgacagagtgagactccatctcaaaaaaaaaaaaaaaaaaaaaaggcatgcataaatctgttataatgaaactccagaacttctaagacaaacagaaagagtggggagctagaggagaagcagagctcttggaaagaactggcaatataactaaccacg

SEQ ID NO: 3391 - DNA, 310 bp, Homo sapiens
  misc_feature 1..310: note = U/M: U (0.3:0.85) in Heart Fibroblasts
  misc_feature 1..310: note = source = chr1:7009315-7009624; Gene: CAMTA1 (intron)
  source 1..310: mol_type = genomic DNA
cgaactgttggaatttcagagtttctagcagatagggctggggccagatcccacataggaactgcagccctttctgctgacatcatgggagatcccgctttgaacgccctcgagggcagacatatgcagggggtccccattctatagaccccgtgaatcatgctgtgggtgagaatctctgcaagacgatgttggcctctgtgactttcctttcctcttccactccaagagccaatattttcctccaagatcacagaactccggctgagcgctgacgaagctgtaaagtgctctagaaaggctgctggcg

SEQ ID NO: 3392 - DNA, 103 bp, Homo sapiens
  misc_feature 1..103: note = U/M: U (0.37:0.91) in Heart Fibroblasts
  misc_feature 1..103: note = source = chr18:2327465-2327567; Gene: METTL4 (Intergenic)
  source 1..103: mol_type = genomic DNA
cgcctcccgggttcaagcgattctcctgcctcagcctcctgagtagctgggattacaggtgcacaaccgcacccagctaatttttgtatttttagtaaagacg

SEQ ID NO: 3393 - DNA, 253 bp, Homo sapiens
  misc_feature 1..253: note = U/M: U (0.38:0.92) in Heart Fibroblasts
  misc_feature 1..253: note = source = chr13:109637815-109638067; Gene: MYO16 (intron)
  source 1..253: mol_type = genomic DNA
cgctttgacagcgtagcatgtagctgacgtgtcagcagacgtgggaggagaccagatataactcttaacgatcagtgaaaacactagtgggaaaaatacggcggtcagtgtatttaacttcatgaagaatgtattttcagttcttcctgaagttctgggccactcaaacatcttgctggtaatttgcttccttgctgatatctttctactgatagatgatgcttgagcttcttgtagtagccagagccaaccg

SEQ ID NO: 3394 - DNA, 241 bp, Homo sapiens
  misc_feature 1..241: note = U/M: U (0.35:0.88) in Heart Fibroblasts
  misc_feature 1..241: note = source = chr19:55638754-55638994; Gene: PPP1R12C (Intergenic)
  source 1..241: mol_type = genomic DNA
cgcttatgctgataaggtagctaaagaagcagctagctttccaacttctgcccctcacggccagtttttctccttcacatcggtcactcccacctactcccccactgaaactgccacctatcaatctcttcccacacaaggcaaatagtttttagaccaaggaaaatatctccttccagcctcacaggcccattctattctgtcgtcacttcatagcctcttccatgtaggttacaagccg

SEQ ID NO: 3395 - DNA, 102 bp, Homo sapiens
  misc_feature 1..102: note = U/M: U (0.19:0.9) in Heart Fibroblasts
  misc_feature 1..102: note = source = chr20:54316572-54316673; Gene: CBLN4 (Intergenic)
  source 1..102: mol_type = genomic DNA
cgtatgacagacgtgatccactatcgatgttgtccaaatggcaagttccgtcagtgaagactttcagggaacagaatgctgaggacccattggttcttagcg

SEQ ID NO: 3396 - DNA, 247 bp, Homo sapiens
  misc_feature 1..247: note = U/M: U (0.2:0.83) in Heart Fibroblasts
  misc_feature 1..247: note = source = chr3:89620409-89620655; Gene: EPHA3 (Intergenic)
  source 1..247: mol_type = genomic DNA
cggagtgggtagagctcctttctgcaggcaggttgtcgtgaggagtgcagccctcagcaaacaggagactcggagtgggtagagctcttttttctgcaaacacgtggtcggatgggttaaggagactcaaattgggtagctccctctcacagctggtagtcagttatctctgtgagtctgactgtgtctgggatttttatggtctcagaagggaggaactgcgtgctgattggtccgtgggcagccg

SEQ ID NO: 3397 - DNA, 189 bp, Homo sapiens
  misc_feature 1..189: note = U/M: U (0.05:0.9) in Heart Fibroblasts
  misc_feature 1..189: note = source = chr6:169567777-169567965; Gene: THBS2 (Intergenic)
  source 1..189: mol_type = genomic DNA
cgtggggccacggccttgggatccgggcgccaccccagcggttctgtgccgccagcaggccctgccgcatctccgggctggaggcttgactgtcagcagatgaggccacggggtcggggtgtctctcccaccagaacggcttcgtggggtgctcactatcccctggtcacgcttcggcacggctggcac

SEQ ID NO: 3398 - DNA, 182 bp, Homo sapiens
  misc_feature 1..182: note = U/M: U (0.09:0.93) in Heart Fibroblasts
  misc_feature 1..182: note = source = chr8:140847540-140847721; Gene: TRAPPC9 (intron)
  source 1..182: mol_type = genomic DNA
cgttgtgcacacattgcctttgattaataaatttctgaagtcactgagccaaggaacctggcaggtcctccggggctccgctgctctgcgactctgcagcaagcatcctcgccgccgtccagccttccctcctgcgccccattgtgtcactgtgatggcgcgcacgttcgcccgtgctgtgc

SEQ ID NO: 3399 - DNA, 281 bp, Homo sapiens
  misc_feature 1..281: note = U/M: U (0.06:0.89) in Heart Fibroblasts
  misc_feature 1..281: note = source = chr6:169568859-169569139; Gene: THBS2 (Intergenic)
  source 1..281: mol_type = genomic DNA
cgacgctaaacaaaataaggagacagagaaaagtgcggacagttctcacaggagtttccactggggctgcattcccagggcgctggccgggaaagctcagtccactgagcacaatatgctttctccatagcgtgagggctgccaccatctaccgagtggatcattaggcctgtctcccagagacagcaaaaaatgtgcagaactacgtacacatccgtgggccggaaagcactttccctatagattctggtgccctgcggctctcggatggggagatgcgc

SEQ ID NO: 3400 - DNA, 169 bp, Homo sapiens
  misc_feature 1..169: note = U/M: U (0.11:0.91) in Heart Fibroblasts
  misc_feature 1..169: note = source = chr20:11969797-11969965; Gene: BTBD3 (Intergenic)
  source 1..169: mol_type = genomic DNA
cggctgacgtcggctgagtccagctgatattgctgggatctctggtgggtttgttgtcagctgatggctctgctaaggaatgtctgatctaggtcagcctcagctggaacaattctgctgtcccccgccacatgtttcttataagcttctaatgggataaccaacgcac

SEQ ID NO: 3401 - DNA, 283 bp, Homo sapiens
  misc_feature 1..283: note = U/M: U (0.03:0.89) in Heart Fibroblasts
  misc_feature 1..283: note = source = chr5:177793999-177794281; Gene: COL23A1 (intron)
  source 1..283: mol_type = genomic DNA
cgtgtttgttgaaactgaattttacatggcagggatttcagactcttctctggttgggttttgggctgactgctgaacagtccatttgctatcagacaaaattcagttgcggtcacgtcagacatttcctttagccaaatcgttatctgagggtatcactggaatacacatcagcactagcttgatctgcttggaaaccaccaatggcatccgctccgagtcttccgatgatgtccagatgggagctgctgcgcttagtgcattttctatcattaagctgacg

SEQ ID NO: 3402 - DNA, 161 bp, Homo sapiens
  misc_feature 1..161: note = U/M: U (0.06:0.86) in Heart Fibroblasts
  misc_feature 1..161: note = source = chr14:35727869-35728029; Gene: KIAA0391 (intron)
  source 1..161: mol_type = genomic DNA
cggggcagagataccgtattttaggttaagcctgaggtattgggtactcaggaggtattagttctgggatcagtttggaattttagatgtgctctagaatgaaccgcgtattgtttattttgttgtgctatgtagtccagactccagaatgtatccttccg

SEQ ID NO: 3403 - DNA, 396 bp, Homo sapiens
  misc_feature 1..396: note = U/M: U (0.18:0.91) in Heart Fibroblasts
  misc_feature 1..396: note = source = chr9:78903902-78904297; Gene: PCSK5 (intron)
  source 1..396: mol_type = genomic DNA
cgatgttgaagcaggaggcaatgtctccatgggacagtgagttcgtgatgagtgacagtacagatgatccccaaagacacagtgggaaggtgacacaggggatcatgaagagctctcaagagagagcggactttgtagtccggcccaccccaccccatacaaatgagacaataaaaatgacttttctcaagacagaaagacggcatccccgtcctgacgaggcatctgctcgcatgttctccttaggaaagatatgagcagctggaagccagccactgtttctgaagacttttttccaaatgtgtgaggctctctctgaattctgactgaactttccccatctctccccaaaatatgctctctcagctcaaaagtttgacaaaatcaaatcacccg

SEQ ID NO: 3404 - DNA, 370 bp, Homo sapiens
  misc_feature 1..370: note = U/M: U (0.15:0.87) in Heart Fibroblasts
  misc_feature 1..370: note = source = chr7:140267969-140268338; Gene: DENND2A (intron)
  source 1..370: mol_type = genomic DNA
cgaccttgtgatccacccgcctcggcctcctaaagtgctgggattacaggcgtgagccaccaagcccggcccctggacttgctttctttggcttctccctggggtctgaaaaattgcagaaaactcactaaagccttggcctagactatttaattttagacccatagggaccaattatttcaacaacttcatcagacagatgaactagaggccctggatcttaagtgatttcctccagatcacacagtaatttgagcagaagtgggcagaagctccaggtctctggaggcttagggctgcagtgtcaagccttgaagtgtggaaaaccctcaggacatagggagaggcatgggagcaggggtcgctgccg

SEQ ID NO: 3405 - DNA, 237 bp, Homo sapiens
  misc_feature 1..237: note = U/M: U (0.2:0.89) in Heart Fibroblasts
  misc_feature 1..237: note = source = chr12:133008884-133009120; Gene: FBRSL1 (Intergenic)
  source 1..237: mol_type = genomic DNA
cgggtggcaggatcctcccctggagcctcggccccacgatgcctgactccagactcctggccccaggctgggagcacgcgttccgctgcgtttcgtcactagcgtgcagcagaggcctgtgagcattggccgctgcctgtcccgttccctcaagaacttgctactctagattctcagagggatggaaaagttaatttttaaattacaccgaaagaaaatcctcctgctgcaggcccg

SEQ ID NO: 3406 - DNA, 417 bp, Homo sapiens
  misc_feature 1..417: note = U/M: U (0.18:0.87) in Heart Fibroblasts
  misc_feature 1..417: note = source = chr6:14328472-14328888; Gene: CD83 (Intergenic)
  source 1..417: mol_type = genomic DNA
cgtgtattagtccattttcatgctgctgataaaggcatacccgacgttgggtaatttatgaagaaaagaggtttaattggatcacagttccacatggctggggaggtttcacaatcatgacgaaaggcaaggaggagcaagtcacattctccatggcggcagggaagagagaacttacgcaggggaactcctttttataaaaccatcggatctcatgagactcattcactatcatgaggacagcatggaaaagacccacccccatgattcaatcatctcccactttgtccctcccatgacgcatgggaattgtgggagctacaattcaggatgagatttgggtggagacagagccaaaccatatcagcctgcaacttaatcaacagttcagaaaagaaaattacatactgcttctcg

SEQ ID NO: 3407 - DNA, 211 bp, Homo sapiens
  misc_feature 1..211: note = U/M: U (0.21:0.84) in Heart Fibroblasts
  misc_feature 1..211: note = source = chr5:172704461-172704671; Gene: NKX2-5 (Intergenic)
  source 1..211: mol_type = genomic DNA
cgctgagtcatttacatttttccagtgctttttatctttctatgttggaattaagcgttatagacgccacgcctcctgggttcatggaagatgtagtctgtacatctgtttcttctgcttcttgtccttgtgagattgtcaaaaggaaaatctttattcccttatcttgagactggaagccctccaatgcatctctcattaggctgtgtcg

SEQ ID NO: 3408 - DNA, 150 bp, Homo sapiens
  misc_feature 1..150: note = U/M: M (0.92:0.16) in Heart Fibroblasts
  misc_feature 1..150: note = source = chr12:114836368-114836517; Gene: TBX5 (exon)
  source 1..150: mol_type = genomic DNA
cggtactcacatgcccaaatgggtccaggtggttgttggtgagcttgagtttctggaaggagacgagctgcctcatccaatgcgccccggtggcgggggagtctgggtgcacgtacaggcggccaggcatggcgggctcagctttgcccg

SEQ ID NO: 3409 - DNA, 330 bp, Homo sapiens
  misc_feature 1..330: note = U/M: M (0.91:0.15) in Heart Fibroblasts
  misc_feature 1..330: note = source = chr12:114836605-114836934; Gene: TBX5 (intron)
  source 1..330: mol_type = genomic DNA
cgcaccaggtgagggttgttgagtagtagctgggaataatctggaggctctcccgtctcccttaggtatctgcaatcccagctgccccagaatactttgtgcctgcgcccaggcaagcccctggcccagccctttcttcttacagcctctcgcatcccacaaaaaagtggcgggttctggaggtctggacgtgcaaaaagccttgaaaattccttgagggctttcaacgggggtttcatcgtcaggcccctgcactgctggcagccatgggaacgattctacccaagaaatgggcctctcctaactgtttaactcgaataccacgagtcg

SEQ ID NO: 3410 - DNA, 328 bp, Homo sapiens
  misc_feature 1..328: note = U/M: M (0.85:0.15) in Heart Fibroblasts
  misc_feature 1..328: note = source = chr12:114852442-114852769; Gene: TBX5-AS1 (Intergenic)
  source 1..328: mol_type = genomic DNA
cgcctcaaagggaggtgcaagggatccccactctctcacttccctcccttcggttccctccaccctcctccacctgtgtcctccctgcttcggagtcattcttttagtgcctgagtctttccacctccacgtagaatacattccctccgaggcaccctcaggtgatcctgcctcatctccaggatcctcggctaccccccagcccaggccacccccatgctagcagacatcaggctcaacgtttggggttcctcccagatttctcagcctgctctgctcactagcaacggctcccacaggagccccgcatcctggttcctggtccccg

SEQ ID NO: 3411 - DNA, 437 bp, Homo sapiens
  misc_feature 1..437: note = U/M: M (0.84:0.16) in Heart Fibroblasts
  misc_feature 1..437: note = source = chr4:54968046-54968482; Gene: GSX2 (TTS)
  source 1..437: mol_type = genomic DNA
cgccggcctcagccaacgatgacaaggagatttcccccttatgagggagggcctcctccctcacatcccccgctcctggcagaccaggcaacgccaaggcgtggggcacccaggggccagaatccttgctcattgcagtggtcccatctggagaagaaacgaacctggaagttctggaatggacaagccgggacctgacccttcgcgtctccttcttgacctgtttatctaggactccaacttgaagttacagatttttttaaaaaatgtaaataacctataattcaactcattcttgtcgtataacagaggaaaaacagggttggtttaagtttaacactgtatggggtttttgaaagcacatgtcagttccccatccctactctctttcagaactcgataagaacacaggatttattgattattttctgttgtcg

SEQ ID NO: 3412 - DNA, 288 bp, Homo sapiens
  misc_feature 1..288: note = U/M: M (0.62:0.1) in Heart Fibroblasts
  misc_feature 1..288: note = source = chr11:32459877-32460164; Gene: WT1-AS (exon)
  source 1..288: mol_type = genomic DNA
cgaggtcccagagaaaagcaggctgtggaaaactgggcgcccccttctttcacccaccttcttacccctgtcagcgccgagatctgtagcagaggttcctggtctgaaccaccgattggcaaagaaagctgcagattaaacttctcgttttacagagaaggaaactgaggcccagacagccgaaggagaggcagtctatggagcgcagcggtaaagagcaaggggttggtggccccagaatggaacctcagctctgccaggtaaccaacagctgtgtgaccctagacg

SEQ ID NO: 3413 - DNA, 122 bp, Homo sapiens
  misc_feature 1..122: note = U/M: M (0.63:0.12) in Heart Fibroblasts
  misc_feature 1..122: note = source = chr7:32109909-32110030; Gene: PDE1C (exon)
  source 1..122: mol_type = genomic DNA
cgcggagccgaagccagattttctcgatctgttccggttgcaggtatttcagagagttgctctcaaattcttcaatctccttggttggcgactccatagctgcaggtaggtgaccactggcg

SEQ ID NO: 3414 - DNA, 478 bp, Homo sapiens
  misc_feature 1..478: note = U/M: M (0.64:0.16) in Heart Fibroblasts
  misc_feature 1..478: note = source = chr6:85480636-85481113; Gene: TBX18 (Intergenic)
  source 1..478: mol_type = genomic DNA
cgcattttatagggttcacagtatgtattacatctgtagatttaatttttgaaatatatgttttttgagatatttgtggtttgagattctaagataaataacttatcttgttgtatttttaaaaatcaagaaaaaaaccctaacaaataaaaataaatatgtggagtggcaaacatttttcttttatttctcagcttgttatactgaaaaggacatcaggccatctattggcaaataattactcacaacacgggaggtacctgtcagcagggcgtgctgtatattgaattccctatacgaagaagcagagatatcaattgaggaaagccagcttggggatgatataaaaaccatcagattaagatctggaccatgcaaatgtcaaaaacacaccaattaaacttgcttttgagaaaaaattccaagtgcttgctgatttattttccatcaaaatattcaatttatttcatttaacacg

SEQ ID NO: 3415 - DNA, 137 bp, Homo sapiens
  misc_feature 1..137: note = U/M: M (0.9:0.14) in Heart Fibroblasts
  misc_feature 1..137: note = source = chr11:32449725-32449861; Gene: WT1 (intron)
  source 1..137: mol_type = genomic DNA
cggcgtgcagagcgaggccgtccagaatgcaagaagctaagcctctcactttgcattcccctagcagtcgctgcgctgtgcaccaaaaaggccctccggacattcatagacttagttggatggcgatgtccctaacg

SEQ ID NO: 3416 - DNA, 284 bp, Homo sapiens
  misc_feature 1..284: note = U/M: M (0.8:0.12) in Heart Fibroblasts
  misc_feature 1..284: note = source = chr11:32450215-32450498; Gene: WT1 (intron)
  source 1..284: mol_type = genomic DNA
cggggcagtgggtctgaaccagccacgggcggggggggtgtgcgctgaaccccgcattcggacccccagcggaggagaatccagccccacaagcctccaggactttcggcaggaagacggcccaagtccctggatgtgaccttgggacaggcttctccatccttttctgactaaaacccccacctcgctttttcccaatttatttatgccgcagtcttctacggtctctgccgcttctgcagcgaacccctggcaaattaagtataaaactcgttgcctgatcg

SEQ ID NO: 3417 - DNA, 169 bp, Homo sapiens
  misc_feature 1..169: note = U/M: M (0.84:0.1) in Heart Fibroblasts
  misc_feature 1..169: note = source = chr1:119527415-119527583; Gene: TBX15 (intron)
  source 1..169: mol_type = genomic DNA
cgaaatacatagtttcctctgtggagtgagtgcctacaacgcgcaggccggactgatcccccgttgctgcaggttggtgccccaagctgcgggtgctcgggcgccaactaaagccagctctgtccagacgcggaaagaaaaatgggctgtgaaaaagcaaaaggcctcg

SEQ ID NO: 3418 - DNA, 302 bp, Homo sapiens
  misc_feature 1..302: note = U/M: M (0.85:0.12) in Heart Fibroblasts
  misc_feature 1..302: note = source = chr8:25907076-25907377; Gene: EBF2 (Intergenic)
  source 1..302: mol_type = genomic DNA
cgggaggtgtgtgtgctgcggaacaggctgtctgtatagggaagtgattgatagcttccacgcgaacctggggacccgatttcccaggtgggaggggtgactttcacgtgaagcccctgctgggggccttgctggggtaaatcggctggccgattacagcccctttcagggaactgtgcacgaaggcggtggcatctgtcatcactatttacggtgcagcgatcagggcaagttgacccgcattaaaaggcctaatcatgctggtctccgtgaaacggaagaccaagaggaaggtactaacg

SEQ ID NO: 3419 - DNA, 117 bp, Homo sapiens
  misc_feature 1..117: note = U/M: M (0.83:0.11) in Heart Fibroblasts
  misc_feature 1..117: note = source = chr1:119527674-119527790; Gene: TBX15 (intron)
  source 1..117: mol_type = genomic DNA
cggtgctatgagagatggtgagaatactctaggcatgaacgtgtgcgtgtgtgtttgtgtgtgtgtgtgtgtttcattcttcccgcaaaacaattttttgtttttttcctattcccg

SEQ ID NO: 3420 - DNA, 88 bp, Homo sapiens
  misc_feature 1..88: note = U/M: M (0.85:0.17) in Heart Fibroblasts
  misc_feature 1..88: note = source = chr1:119531998-119532085; Gene: TBX15 (exon)
  source 1..88: mol_type = genomic DNA
cggtcgaggacggcaggagacccccgagtgcagagaaagctcaaaccggcagcgaagtcggtcctagccaagctgaaaaaacgtctcg

SEQ ID NO: 3421 - DNA, 133 bp, Homo sapiens
  misc_feature 1..133: note = U/M: M (0.85:0.17) in Heart Fibroblasts
  misc_feature 1..133: note = source = chr6:85476760-85476892; Gene: TBX18 (Intergenic)
  source 1..133: mol_type = genomic DNA
cgtctacatccacgatgtttctagaacgtggcccttagaaataattcaagtgtgagtagggcgccgaggacaggacaaggcgtttgccccctagtcctgctactggctaaggagaatcatagcagtagagccg

SEQ ID NO: 3422 - DNA, 78 bp, Homo sapiens
  misc_feature 1..78: note = U/M: M (0.73:0.1) in Heart Fibroblasts
  misc_feature 1..78: note = source = chr8:25906732-25906809; Gene: EBF2 (Intergenic)
  source 1..78: mol_type = genomic DNA
cggcaacagctgcagaaatactgagtcgtggaggaacgttttagagacacttgatgtcggttgtatccaggccagtcg

SEQ ID NO: 3423 - DNA, 156 bp, Homo sapiens
  misc_feature 1..156: note = U/M: M (0.74:0.12) in Heart Fibroblasts
  misc_feature 1..156: note = source = chr1:119526837-119526992; Gene: TBX15 (intron)
  source 1..156: mol_type = genomic DNA
cgatctgcctgcgtgtccttggatgtgcctgtctaggtgcccacccgcgcgcgccaccacatccccaggcctctggaacgcagctgctgtgtggcccggcccgaagtttctggaggaggaaatccctccacagaaggtttacattatttcgctccg

SEQ ID NO: 3424 - DNA, 129 bp, Homo sapiens
  misc_feature 1..129: note = U/M: M (0.8:0.2) in Heart Fibroblasts
  misc_feature 1..129: note = source = chr4:174452563-174452691; Gene: NBLA00301 (intron)
  source 1..129: mol_type = genomic DNA
cgggtggtaaatggcaggagctgaaatcaccccaggcttggccccaagccgagaggggaggctgatgtgtatatgcagattccacccgaaggagttcggtgtggaaaacggtgtcaacaggagcccgcg

SEQ ID NO: 3425 - DNA, 120 bp, Homo sapiens
  misc_feature 1..120: note = U/M: M (0.73:0.14) in Heart Fibroblasts
  misc_feature 1..120: note = source = chr1:119531832-119531951; Gene: TBX15 (intron)
  source 1..120: mol_type = genomic DNA
cgttacctcaagaccatggctttcccggccagctgatctcccccctggccgccccctgccttttgcgatctctaaggactgcattcaacatggatttctaaggaattaaaaaatccaacg

SEQ ID NO: 3426 - DNA, 98 bp, Homo sapiens
  misc_feature 1..98: note = U/M: M (0.78:0.2) in Heart Fibroblasts
  misc_feature 1..98: note = source = chr1:197890565-197890662; Gene: LHX9 (exon)
  source 1..98: mol_type = genomic DNA
cgggcgaccatttcggcatgaaggacagcctggtgtactgccgcgcccacttcgagaccctcttgcaaggagagtatccaccgcagctgagctacacg

SEQ ID NO: 3427 - DNA, 418 bp, Homo sapiens
  misc_feature 1..418: note = U/M: M (0.63:0.06) in Heart Fibroblasts
  misc_feature 1..418: note = source = chr1:119526993-119527410; Gene: TBX15 (intron)
  source 1..418: mol_type = genomic DNA
cgggagacccggcttcggcagcacttagcagaagattttggcgggaaaggcccaagccctagctgaggactccgggtggagcaggggctgaggtccgagcgcagatggcgccgccgagcgcctgaaatatacttgcaaggccgcagcaatatacttgcaaggccgcagccggagcagctgttccagccgatcctagctcgaaagttcctctgttgctctgggagagggcgggggagagcaggctcgagagccaggctcctccgaggctggtcttgaggcacttctctagtagcttctccaaaagactgagagtgccggcgtaggtatgacagtgagggtacctcacagacccttctccaaagtctggcgggccttggggtttttcggggccaccaggctcggtggaatttttgaaacg

SEQ ID NO: 3428 - DNA, 127 bp, Homo sapiens
  misc_feature 1..127: note = U/M: M (0.7:0.14) in Heart Fibroblasts
  misc_feature 1..127: note = source = chr4:174452381-174452507; Gene: NBLA00301 (intron)
  source 1..127: mol_type = genomic DNA
cgccagtttaagaggcaggccgggaggacggctcgtggatgttgagactgctggccttggtgatcttgaacgcattataacggaaaatggatctccacttgtaagtcaccgggccgcggggcacccg

SEQ ID NO: 3429 - DNA, 85 bp, Homo sapiens
  misc_feature 1..85: note = U/M: M (0.7:0.15) in Heart Fibroblasts
  misc_feature 1..85: note = source = chr1:119531625-119531709; Gene: TBX15 (intron)
  source 1..85: mol_type = genomic DNA
cgcggggtttagggcgagctcctcaggcgtattccagctgggccccctcacgccgcaaatactctctttccctacggcccgaacg

SEQ ID NO: 3430 - DNA, 448 bp, Homo sapiens
  misc_feature 1..448: note = U/M: M (0.66:0.13) in Heart Fibroblasts
  misc_feature 1..448: note = source = chr1:119521979-119522426; Gene: TBX15 (intron)
  source 1..448: mol_type = genomic DNA
cgtcacgatcccacaggatgactttcctttttaacagactagctacgatatatactgaccctagatttacccatttggaaatggttagggattaaaagttcttcaagccagcggattcttggtttctaattgctaatgtttgaagtcagtttgattcctcggaaatttgttctgcctgatgaaagcaaaagctcgaactcccctcagggcgcgaggtgtgagacccttgggttccatttgcatttctggtttgtcgttggcgggttcctgatttgtttttgttttgttttggtctgttctgttttttggggggtgtctttcaccagggccttcccggttagcccagggtccccacatttctccaggatgtaattagagctaagaacagccgccatccctcagggttccgggtcccgggtttccagggtcccgggtttccaaggccccg

SEQ ID NO: 3431 - DNA, 170 bp, Homo sapiens
  misc_feature 1..170: note = U/M: M (0.59:0.09) in Heart Fibroblasts
  misc_feature 1..170: note = source = chr15:51633704-51633873; Gene: GLDN (promoter-TSS)
  source 1..170: mol_type = genomic DNA
cgcctgtccctctgggctgctcgggcgccaccactactgtccccatcccgccccgccagctgggccaaagggtgacttgactcacgacgctgccaccagcccacggcttgcccgaggcgtataaaggctgccagggccgcaggctgccaagccctgccctgcccaaggcg

SEQ ID NO: 3432 - DNA, 89 bp, Homo sapiens
  misc_feature 1..89: note = U/M: M (0.57:0.13) in Heart Fibroblasts
  misc_feature 1..89: note = source = chr4:174452168-174452256; Gene: HAND2 (promoter-TSS)
  source 1..89: mol_type = genomic DNA
cgattccccgaatctgtagtgtggctggtatcggtgttcccctggtttaactagcctgtttggtaagtaactgaatattttttacggcg

SEQ ID NO: 3433 - DNA, 292 bp, Homo sapiens
  misc_feature 1..292: note = U/M: U (0.16:0.88) in Vascular Endothelial cells
  misc_feature 1..292: note = source = chr5:76014256-76014547; Gene: F2R (intron)
  source 1..292: mol_type = genomic DNA
cgccaccgctgtgatagagtttattgtccaggattaccagctctgtgtgccaagaggggcggtgaagccctcccagggctggccctgaccaccaagctgagccttcctccagcacttcccgactttttgttcccactcattttggcatttcctgccttgtcactttgtgtgtgtgtctcattctcccaactaagattataaagttttatttatccccatggtgactaaaacaaatgttcactcagcagatagttgttgagaaatgtgtaaattcatcaaccagtttacattc

SEQ ID NO: 3434 - DNA, 66 bp, Homo sapiens
  misc_feature 1..66: note = U/M: U (0.16:0.85) in Vascular Endothelial cells
  misc_feature 1..66: note = source = chr17:80804200-80804265; Gene: TBCD (intron)
  source 1..66: mol_type = genomic DNA
cgtgtcctctcgtccagccctctgctgccccctccatgcgctgtgtcccatgtgccgtgtcctctc

SEQ ID NO: 3435 - DNA, 155 bp, Homo sapiens
  misc_feature 1..155: note = U/M: U (0.19:0.87) in Vascular Endothelial cells
  misc_feature 1..155: note = source = chr17:8214564-8214718; Gene: ARHGEF15 (intron)
  source 1..155: mol_type = genomic DNA
cgcagcgccctggcccgactggtcctgtccttcggttcattctcccagccacctccccaggcctcttggcaagacccatggctgtgctgggcctctctctgtgaccagaccctagggcaggcggggatgatcagacgcaggacaggagagacctc

SEQ ID NO: 3436 - DNA, 385 bp, Homo sapiens
  misc_feature 1..385: note = U/M: U (0.24:0.91) in Vascular Endothelial cells
  misc_feature 1..385: note = source = chr5:77819955-77820339; Gene: LHFPL2 (intron)
  source 1..385: mol_type = genomic DNA
cgctccacacagaacccacacccagcctccttctcaggaaaacccgggccttgctcaccttgcgcccaggttatgctcctcggcctcacagccttttcccttgggctgctcagtgaggttttcgggcacactcactcatgggacccaataagcccaagacaccaagtttcacaattttagaatttcctactgacatctagcagagaatttatgtgtatacagcttctaagtgggaaccaaagaaaaaatgtctggcgtaattattcaaatgtcatgctctgttccaacaataatatcacaatggaggtataagaattgttagatatccggccaggcgcagtggctcatgcctgtaaacctagcactttgggaggccagggcaggc

SEQ ID NO: 3437 - DNA, 89 bp, Homo sapiens
  misc_feature 1..89: note = U/M: U (0.27:0.92) in Vascular Endothelial cells
  misc_feature 1..89: note = source = chr2:128416959-128417047; Gene: LIMS2 (intron)
  source 1..89: mol_type = genomic DNA
cggcacccagcggctggtcctcagtgctcccagctccctgctggtctccacggggcgagccaggcaggccaccaaggtggagcctggcc

SEQ ID NO: 3438 - DNA, 218 bp, Homo sapiens
  misc_feature 1..218: note = U/M: U (0.28:0.93) in Vascular Endothelial cells
  misc_feature 1..218: note = source = chr5:32098278-32098495; Gene: PDZD2 (intron)
  source 1..218: mol_type = genomic DNA
cgcttgaacccgggaggctgagattgcaccactgtactccagcctgggtgacacagcgagactccctctcaaaaaataaaaataaaaaaggaaggttcctttactacagatacgcagttagttactatctcccttttaccggaaatcgtaagtggatctggtttttgttcccttttcctttcctcatcccaggtccacagggtgttttctcagggggc

SEQ ID NO: 3439 - DNA, 394 bp, Homo sapiens
  misc_feature 1..394: note = U/M: U (0.21:0.86) in Vascular Endothelial cells
  misc_feature 1..394: note = source = chr16:1562267-1562660; Gene: IFT140 (intron)
  source 1..394: mol_type = genomic DNA
cgtggggacagaaatgttgccggtctccagcatcaggagggtgtgtgcgggctgtgctcagatgatggatgatggcgggaaagctgagcggatataggagctgtggcctgggtgaggtggtgcacgtgaccccgggtggcgctacagcagcagccagggagcgtgtgcctgggcattctcagtttagctgcgcttcccagtttcttttttcttttgtatctcgagttactaaattccacaggcttcaagcaaccatagagagaataaagaagttggcgaaatatttaaaatgtggatttcctgttaattttgaggatatagcagtctgggcatctctctactccaattttgcttttatacggaaaactatagttctcctagaaatagaaacccc

SEQ ID NO: 3440 - DNA, 255 bp, Homo sapiens
  misc_feature 1..255: note = U/M: U (0.18:0.83) in Vascular Endothelial cells
  misc_feature 1..255: note = source = chr5:71853664-71853918; Gene: ZNF366 (Intergenic)
  source 1..255: mol_type = genomic DNA
cgagccacacacgtatgaccaccctgccactggcttagacatgggaaaaatctcttttcctgtagttcaatgctgaaaggaagtcatttttcagagagacactttgctaggaaattatgaagtacaaaaacacaaaaccgtagaagcatccaatcagagcccacattcttgtgaggaactttagtaaaaggcagacgctagcaggcaaattttaggcaaccttggggctcaggtcatttttctcaactgaaccac

SEQ ID NO: 3441 - DNA, 209 bp, Homo sapiens
  misc_feature 1..209: note = U/M: U (0.27:0.91) in Vascular Endothelial cells
  misc_feature 1..209: note = source = chr19:11707038-11707246; Gene: ZNF627 (Intergenic,promoter-TSS)
  source 1..209: mol_type = genomic DNA
cgtatagatgttttttcagggaccggagggtatgggaggaagccttggcacgcctcatcccaaatgcccgtttcccggaacatcaggcccttcctcctcttcctgtcctccctggcctagcctgggctccctcccgttctgaggcaaggcgattgctccatgtcacagtgagtgtggagttccctgcacatactggtgaccttgtgtcc

SEQ ID NO: 3442 - DNA, 279 bp, Homo sapiens
  misc_feature 1..279: note = U/M: U (0.25:0.89) in Vascular Endothelial cells
  misc_feature 1..279: note = source = chr1:185336417-185336695; Gene: LOC100288079 (Intergenic)
  source 1..279: mol_type = genomic DNA
cggcacaaggacccttttaagagagagacagagggagattacacacatggaagaggaggaggcactgtgatcacagaggcagagcctggagtgacgcagtaacaaccaagggatgagggcagccaccggaaactggaaaaggaaatgaatggattctcccctacagcatgtggaaggaacacaggcggctttgctgacctcttgatttcagcccagtgaaactgacttcaaatttccgaatcatagttctgaattagaactgtgagaaagtgaatttcc

SEQ ID NO: 3443 - DNA, 87 bp, Homo sapiens
  misc_feature 1..87: note = U/M: U (0.29:0.92) in Vascular Endothelial cells
  misc_feature 1..87: note = source = chr20:3719956-3720042; Gene: HSPA12B (intron)
  source 1..87: mol_type = genomic DNA
cgggcaggtctctgtgcacaggatctgtgtacgggagtatagtctgcaggtgggcacgcatgcagagagttctgcgtgtgcatgtgc

SEQ ID NO: 3444 - DNA, 219 bp, Homo sapiens
  misc_feature 1..219: note = U/M: U (0.19:0.81) in Vascular Endothelial cells
  misc_feature 1..219: note = source = chr11:65379744-65379962; Gene: MAP3K11 (intron)
  source 1..219: mol_type = genomic DNA
cgtgtcgggggcttgaaatgatgggagatggagtctcccttagcccagcactcccatcccaagcactgatttcaggctaggccctcttggcgatccagccctcaaatgtccatctccatggctgaggacccgctgtgggttggggatcgcaggtcgggcttgcccaagctgttgagctgtttcactctccctttttacagattctgaaattgaggctcc

SEQ ID NO: 3445 - DNA, 322 bp, Homo sapiens
  misc_feature 1..322: note = U/M: U (0.29:0.91) in Vascular Endothelial cells
  misc_feature 1..322: note = source = chr2:160081735-160082056; Gene: TANC1 (intron)
  source 1..322: mol_type = genomic DNA
cgagagctcaggcaggggttagagaggttgtggccgagctgtagggtaggagagagaagccatgacatctcggagtacagcagatgacacagcacagggactgcgtgctgagaacacatgcctgcacggtggccgctgcaggaactgaggaggttatgctaaggcctcatttaattaattttccccacatcccacccggaagggaggaatgagttttcgctgctcggatgccttcgtttctcattacttttttcagtaaaataacaaggacagatttgagtgcccaggtcagtgggaaaggattagcaacagcctcgccggc

SEQ ID NO: 3446 - DNA, 368 bp, Homo sapiens
  misc_feature 1..368: note = U/M: U (0.26:0.88) in Vascular Endothelial cells
  misc_feature 1..368: note = source = chr6:113817584-113817951; Gene: MARCKS (Intergenic)
  source 1..368: mol_type = genomic DNA
cggaaactggaagtttcagggtataggatgtgaatactttttaagacaatggaagacaatagcaaagaagcacagacaacggaagaactatgggaagagatctgaaaaagaaaccaagaggcttcaagagataaaaacaaaatacgtcaaataattactactcactggataaaaacaacagaaagggaaaaattgagaggctgagcttttaactcaaaaaatgacagaagaaatgcagcagcatctgtggatgactaaatctaacatcctttgtttgagagatggtggagaacaaggaaataccggcgggggaagaatagtcctttttatcagcacgttgtctagctttatggacaagagaatttatc

SEQ ID NO: 3447 - DNA, 404 bp, Homo sapiens
  misc_feature 1..404: note = U/M: U (0.29:0.9) in Vascular Endothelial cells
  misc_feature 1..404: note = source = chr2:218848041-218848444; Gene: TNS1 (Intergenic)
  source 1..404: mol_type = genomic DNA
cgaaattacaaacccacgtatgcaccctcctgagccagtgaccctgtccaaccggagctccatggagccccaggagccctatctctgcccacgatgtcagcactgcccctgcacagcagggcccagtggtggcctgagagggagcagagagccccttagtgggaagggacccttagattactctgctggggtgaagaactgcacccccagcccttggccccagctcccaccccagctgggctgccggtactctgtcctggggttgcttcctgcctctcgggaacacaggaagccaacattgttgggatctaaatggccttttcctcctggacttgggtcggaaaatgagcacatagcctcagtgtgcacctgaccccggcgataaccactcgcatgcccggtcc

SEQ ID NO: 3448 - DNA, 96 bp, Homo sapiens
  misc_feature 1..96: note = U/M: U (0.28:0.89) in Vascular Endothelial cells
  misc_feature 1..96: note = source = chr12:50040684-50040779; Gene: FMNL3 (exon)
  source 1..96: mol_type = genomic DNA
cgatggtaccatccttcccctcataaacaggccggtgttccttggcctggcgccgcctcaactctgctattaactcctgctgttgccacttgttcc

SEQ ID NO: 3449 - DNA, 119 bp, Homo sapiens
  misc_feature 1..119: note = U/M: U (0.25:0.86) in Vascular Endothelial cells
  misc_feature 1..119: note = source = chr14:104326499-104326617; Gene: LINC00637 (Intergenic)
  source 1..119: mol_type = genomic DNA
cgctgattccgtcatctgtcatgtacgaaaaccccttcttgaagcttctcagatgcccctgcctttcctggccaggggtttctctcctagtccgtctgctgtggtctttctagagggcc

SEQ ID NO: 3450 - DNA, 206 bp, Homo sapiens
  misc_feature 1..206: note = U/M: U (0.25:0.86) in Vascular Endothelial cells
  misc_feature 1..206: note = source = chr3:129326756-129326961; Gene: PLXND1 (Intergenic)
  source 1..206: mol_type = genomic DNA
cgtgccagacactgtgccaagcacttgccatgtacgggctctctttttcctcacagattcccccgaggcgagcgctattggtaacccatcttccagatatggaaaccaaggctgaggggaagggactggcccaagatgcacagctcatgaggagcagagctacagtgtttgaaagcaaaagcccttcagctccgacctctcagaac

SEQ ID NO: 3451 - DNA, 93 bp, Homo sapiens
  misc_feature 1..93: note = U/M: U (0.26:0.86) in Vascular Endothelial cells
  misc_feature 1..93: note = source = chr16:87213128-87213220; Gene: C16orf95 (Intergenic)
  source 1..93: mol_type = genomic DNA
cgtgggtgcacgtgcaaagtccctaaggaagcctggcacatgcgtggtttgttttgttgtcacccgtattccagttgtcactttagggcaggc

SEQ ID NO: 3452 - DNA, 199 bp, Homo sapiens
  misc_feature 1..199: note = U/M: U (0.27:0.86) in Vascular Endothelial cells
  misc_feature 1..199: note = source = chr20:4101440-4101638; Gene: SMOX (Intergenic)
  source 1..199: mol_type = genomic DNA
cggttaatttttgtatttttagtagagatggagtttccctatgttgatcaggctggactcgaactcttgacctcagatgatccttgcacctcggcctcccaaagtgctgggattacaggggtgagccactgtgcctggccggaagcgccctttgaaacggagtctcccattctccattgtccctcagggtccagctagc

SEQ ID NO: 3453 - DNA, 346 bp, Homo sapiens
  misc_feature 1..346: note = U/M: U (0.28:0.87) in Vascular Endothelial cells
  misc_feature 1..346: note = source = chr11:109900473-109900818; Gene: ZC3H12C (Intergenic)
  source 1..346: mol_type = genomic DNA
cgaaggctgagaagctcactaattctggagacaactcatttatttttcgggcatctataactgctattgacttgtctttagagtgagccaaaatccacttcctgtcattgtactcttcagagaaaaacactctggaccacatgagaggtggcccagacaaaggacaaagctgcatgggctttaataagccataaagttatgagggcccttaaaggtcatctttgagcttcctttccactggatgtgtaaaaaataatctatgcgaggagaaaagacaaaaatactgaccttgtgaacaaaaggaaatggggtgaaagcgaaccaggcctccctgtgaacagggagc

SEQ ID NO: 3454 - DNA, 436 bp, Homo sapiens
  misc_feature 1..436: note = U/M: U (0.28:0.85) in Vascular Endothelial cells
  misc_feature 1..436: note = source = chr5:17170760-17171195; Gene: LOC285696 (intron)
  source 1..436: mol_type = genomic DNA
cggcctccttcataatactaatcacgccctattttcctttccttagccctaacaaactcagagtgctgaaacactggaagccagctacaggtctttttcctttctcttccagatggtatgcatcttgttcctctttcagacacaggtgaaaattgaagtttctagaaactggagtttccttctcatcttgttggcatcttcccctggggagaggggtaatacctccacaggtactgggagccactttttgggttataaggagggaagtttagttagccccacctctgccgtcttgtctattcctgtacagttttaggcaggaaatgtctccattggatatttgtgtttagtctttttttttttcttttgagacggagtctggctctgtttcctgggctggagtgcagtggcacgatctcagctcactgcagcctcc

SEQ ID NO: 3455 - DNA, 78 bp, Homo sapiens
  misc_feature 1..78: note = U/M: U (0.25:0.78) in Vascular Endothelial cells
  misc_feature 1..78: note = source = chr9:138903401-138903478; Gene: NACC2 (exon)
  source 1..78: mol_type = genomic DNA
cgcggccgccggcgtctggggcctgctggggccgcccccgccctgctcaaagggctgtggggggctctggccatcggc

SEQ ID NO: 3456 - DNA, 189 bp, Homo sapiens
  misc_feature 1..189: note = U/M: U (0.24:0.75) in Vascular Endothelial cells
  misc_feature 1..189: note = source = chr7:45197792-45197980; Gene: RAMP3 (intron)
  source 1..189: mol_type = genomic DNA
cgcctcagggtgggcgagaagaggtggaccaggtctggctctttaccccttatcccccagggtgggctgtctgtaaggtagtgagctctctgtcctggcattgagtgcctgcccaccactcacaggggcgtgggcgggtggactccggactgggtagctggtcctcccagggcccctcagtgtgtggac

SEQ ID NO: 3457 - DNA, 116 bp, Homo sapiens
  misc_feature 1..116: note = U/M: U (0.15:0.86) in Vascular Endothelial cells
  misc_feature 1..116: note = source = chr9:130613986-130614101; Gene: ENG (intron)
  source 1..116: mol_type = genomic DNA
cgtctctactaaaaatacaaaaattaggcgggtgtggggccggcgcctgtagtcccagctactcgagaggatgaggcaggagaactgcttgaacccgggagacggaggttgcagcg

SEQ ID NO: 3458 - DNA, 51 bp, Homo sapiens
  misc_feature 1..51: note = U/M: U (0.18:0.88) in Vascular Endothelial cells
  misc_feature 1..51: note = source = chr1:21605850-21605900; Gene: ECE1 (exon)
  source 1..51: mol_type = genomic DNA
cggggaagacgtgagccccgggccccgcttcccttggaggaaggggttccg

SEQ ID NO: 3459 - DNA, 479 bp, Homo sapiens
  misc_feature 1..479: note = U/M: U (0.2:0.89) in Vascular Endothelial cells
  misc_feature 1..479: note = source = chr16:1562673-1563151; Gene: IFT140 (intron)
  source 1..479: mol_type = genomic DNA
cgcggtgctgcacaccagccactcacgaggatcccttgaacccgggaggctgaggctgcagggagctgtgattgtgccaccgcactccagcctgggcgacagagcaagacctcgtctcaaaaccaaaccaagcaacaacaaaaaagaaaccttgttaggattagacttgagttgttttttccagcagcaaaaggggtcagtgaatggaagtggaacggcgcagaggggagtgagcaaccgggccaggaagtctgtgtctcacggagctgacctttcagccctgagggagagccactgccaaggagctttcctgtgaattctggaggctgcagcccagcgagcccgacacggtcgccagcatgtttcccaagctcatttctcgatactcagtttgtgagtcccgggaactatctaatagggcaacacaactggtgggtgcagaggccctgcaggcatcggcatagctgcagggtctgacg

SEQ ID NO: 3460 - DNA, 156 bp, Homo sapiens
  misc_feature 1..156: note = U/M: U (0.22:0.89) in Vascular Endothelial cells
  misc_feature 1..156: note = source = chr4:166687299-166687454; Gene: TLL1 (Intergenic)
  source 1..156: mol_type = genomic DNA
cgctaggtctgttcactgacttcaaatcacatgttatcagtgaaaccttcactgctgggtttcctttcattgtatctccaggctgaccgtttcctgtcaatgtccttagaacggagaatatactgaaaactagggtcagccactcagccgctagcg

SEQ ID NO: 3461 - DNA, 382 bp, Homo sapiens
  misc_feature 1..382: note = U/M: U (0.18:0.85) in Vascular Endothelial cells
  misc_feature 1..382: note = source = chr2:48613218-48613599; Gene: PPP1R21 (Intergenic)
  source 1..382: mol_type = genomic DNA
cggtagcggaggtaatctgcataaggccactctgctagcccaggcaatggcaggactgagagtggacaaaggaaatactccatttcctggagcttgttttaactgtgggaagcatggtcatgctaaaaaagaatgtagaaaaaatcagcaagtcaggccaccagataggggaaaaaagaaaactgctgagcctgaaatatgtccaaaatgtaaaaaaggaaaacattgggctagtcagtgtcattctaagtttgataaagaagggaacctgattttgggaaatgccatgaggggcccgtcccatgccctgttccaaaccggggcatttccggctcaggccatttcctcacccctgtacaatgtctgtcccctgacacagccg

SEQ ID NO: 3462 - DNA, 54 bp, Homo sapiens
  misc_feature 1..54: note = U/M: U (0.24:0.89) in Vascular Endothelial cells
  misc_feature 1..54: note = source = chr9:132339217-132339270; Gene: C9orf50 (Intergenic)
  source 1..54: mol_type = genomic DNA
cgccctgggggctcctgtgcggctgcctggctcctcaggcatccgggcgccccg

SEQ ID NO: 3463 - DNA, 101 bp, Homo sapiens
  misc_feature 1..101: note = U/M: U (0.21:0.85) in Vascular Endothelial cells
  misc_feature 1..101: note = source = chr21:44899070-44899170; Gene: LINC00313,LINC00313 (promoter-TSS,Intergenic)
  source 1..101: mol_type = genomic DNA
cggcccagggtccggccaggccctactgatgtgttctcaggggccaggacatcagtgcaacagggcagccgcttgcgacaggacccggccgactgtccccg

SEQ ID NO: 3464 - DNA, 152 bp, Homo sapiens
  misc_feature 1..152: note = U/M: U (0.29:0.93) in Vascular Endothelial cells
  misc_feature 1..152: note = source = chr1:51320582-51320733; Gene: FAF1 (intron)
  source 1..152: mol_type = genomic DNA
cgatggaacattttggatgatgtttgaaaggaaatgctcgatggaacattttggatgatgtttgaaaggaaatgctcgatggaacattttggatgatgtttgaaaggaaatcctcgattgaacattttggattttagatttttggattagcg

SEQ ID NO: 3465 - DNA, 186 bp, Homo sapiens
  misc_feature 1..186: note = U/M: U (0.23:0.87) in Vascular Endothelial cells
  misc_feature 1..186: note = source = chr1:185336511-185336696; Gene: LOC100288079 (Intergenic)
  source 1..186: mol_type = genomic DNA
cgcagtaacaaccaagggatgagggcagccaccggaaactggaaaaggaaatgaatggattctcccctacagcatgtggaaggaacacaggcggctttgctgacctcttgatttcagcccagtgaaactgacttcaaatttccgaatcatagttctgaattagaactgtgagaaagtgaatttccg

SEQ ID NO: 3466 - DNA, 383 bp, Homo sapiens
  misc_feature 1..383: note = U/M: U (0.2:0.84) in Vascular Endothelial cells
  misc_feature 1..383: note = source = chr9:130530761-130531143; Gene: SH2D3C (intron)
  source 1..383: mol_type = genomic DNA
cgacacagaacagcaatcagatcctcctaaaagttcgaggctgcagcaagctatgatcgagccgctgcactccagcctgggcaacagaataaagcccctgtctcaaaaaaacatcaaacacagaaaagattctcctaaaaagaggtcttttaacaacataagtcacagtggggcctgctgctgctcaaggccagcaatggctcccgttttgctcagagccaaagccaggtccttgctgggctcttccaggccctacgttatctgctcccatttccatcccagcctcccagcccacccctccctgtcctccccaccttgctctgccccggccacagtggtctctactgttccccaaacatgccacgtcagggcctttatacacg

SEQ ID NO: 3467 - DNA, 124 bp, Homo sapiens
  misc_feature 1..124: note = U/M: U (0.24:0.87) in Vascular Endothelial cells
  misc_feature 1..124: note = source = chr17:465503-465626; Gene: VPS53 (intron)
  source 1..124: mol_type = genomic DNA
cgagtccaccgtggtaagatttgcccacgtgggcagtcagtgtggacatttcctctgatggtcttgatcagctgtggaatgtcagagaggaaatagcttcaggccctcgggaactcaggaagcg

SEQ ID NO: 3468 - DNA, 184 bp, Homo sapiens
  misc_feature 1..184: note = U/M: U (0.22:0.85) in Vascular Endothelial cells
  misc_feature 1..184: note = source = chr10:30140200-30140383; Gene: KIAA1462 (Intergenic)
  source 1..184: mol_type = genomic DNA
cgggctccagttaatcagaaaggattttcataaaagagagacaggagttagatggaggaaggggccatgagccaaggaatacagccaagccctagaagctggaaaagtcgagaccacagaatcaccctgagaatcaccagaaataacgcagccaggctgacctattctcgacttcagagctccg

SEQ ID NO: 3469 - DNA, 403 bp, Homo sapiens
  misc_feature 1..403: note = U/M: U (0.24:0.87) in Vascular Endothelial cells
  misc_feature 1..403: note = source = chr7:139573546-139573948; Gene: TBXAS1 (intron)
  source 1..403: mol_type = genomic DNA
cggttattttttctcacattgggttttctcagaagccagatggcttattctgctaagtcacggggacactgactccagacccaacgccaggagccggaacaccctgcatgggaagaaccaccaagccaaacaaaggcaggaagactaaatttgggacaatcctgataatatcccttcaacatctctagaatttcccccatccctacctccggaaaggctggcccttggcactagatagaaaagaaagctgctctttctgtccttttctgcccccaccttctcaattatttcttttccattcctttctgtgtccatcaccttttccatgatttgtcattgttgtttctgtcttcctagcatttttaaacaccttctcctctcatctctctctctggggtgggcg

SEQ ID NO: 3470 - DNA, 430 bp, Homo sapiens
  misc_feature 1..430: note = U/M: U (0.23:0.86) in Vascular Endothelial cells
  misc_feature 1..430: note = source = chr11:86662732-86663161; Gene: FZD4 (exon)
  source 1..430: mol_type = genomic DNA
cggggatggcccaggctgcaatgtggaaataagagctgtgcatttcaatggcttcatgaccccatttgagtcctgctgccaaaaaccaagtgagtgtcagaataacccaccaaatggagctggccattccaaaaaagtacatcagcaagaaaattattgcacatcctgtgttcttaagtccttcttggatgagaacaggttctgctgcctcttcaaaatcacaggatatcctttcccggcctacagtcagcctgacaatataagcaatgctataaatattatagcacatactgagaaatatgatggggcgctcagggtaggaaaacctagaagaatcgatcaggaaggtcagtactgtgaaggcagtggagatgaaacacaggctggcccacacagccatccagatatcagtgaactccttggctgagcg

SEQ ID NO: 3471 - DNA, 490 bp, Homo sapiens
  misc_feature 1..490: note = U/M: U (0.25:0.88) in Vascular Endothelial cells
  misc_feature 1..490: note = source = chr11:75017440-75017929; Gene: ARRB1 (intron)
  source 1..490: mol_type = genomic DNA
cgcactgttcctccctgtgttctccatccccacctatgccagaggctggtgcgcaggaagcactcaatgcacatctcatggagagaggaagaaatcatgtaaatcccagaaagagaggaaaagcaaacttcctggtgagtcagatagaaagtcttaccccattttacagatgagagcccaaagattcagtggagtgaagaggccagcccagaagcagcgccaaagcagtggactgtgaggtggagggagcctgagctgggggctgcaggcagcagcagccaggccagggccagccccgcaggctcagctctccccagccccaagtgaggggttagttacaaagaaaaggaaaaggcgttcctgatacgcgtcctgtttcctctcctcctccgggcttctcgggccatggagggcggatgtccctgggctggcagcactctgcctgtacacagacgggcagggggtgagggtctccccaaggatggtgacg

SEQ ID NO: 3472 - DNA, 63 bp, Homo sapiens
  misc_feature 1..63: note = U/M: U (0.23:0.85) in Vascular Endothelial cells
  misc_feature 1..63: note = source = chr21:46729821-46729883; Gene: LOC642852 (Intergenic)
  source 1..63: mol_type = genomic DNA
cgccctggagagcccgggatccccagatactgtcgacgaaaggggcagggcctgtgagcgacg

SEQ ID NO: 3473 - DNA, 100 bp, Homo sapiens
  misc_feature 1..100: note = U/M: U (0.23:0.85) in Vascular Endothelial cells
  misc_feature 1..100: note = source = chr1:55097881-55097980; Gene: ACOT11 (intron)
  source 1..100: mol_type = genomic DNA
cgccatgaggggcccgtcccgggccccgctctaaaccggggcgtttctggctcaggccattccctcacccctgtacaatgtctgtcccctgccacagccg

SEQ ID NO: 3474 - DNA, 139 bp, Homo sapiens
  misc_feature 1..139: note = U/M: U (0.3:0.92) in Vascular Endothelial cells
  misc_feature 1..139: note = source = chr3:129214369-129214507; Gene: IFT122 (exon)
  source 1..139: mol_type = genomic DNA
cgccaaactgtacaagaggagtgggcacgagaacctcgcgcttgaaatgtacaccgacctctgcatgtttgagtatgccaaggtaacctaccctgtcccaggcccaagctccagcttggagcccactggtattctcacg

SEQ ID NO: 3475 - DNA, 152 bp, Homo sapiens
  misc_feature 1..152: note = U/M: U (0.25:0.87) in Vascular Endothelial cells
  misc_feature 1..152: note = source = chr15:74678214-74678365; Gene: CYP11A1 (Intergenic)
  source 1..152: mol_type = genomic DNA
cggaaacatgaggtcagatcctcaattgcttcctgagcccttcccagaggagcagggcgcttcccaactgggaaacagctgagctgctccataaaggaaaccggagaggcggggagggatggagaccattgctggcagaggaagcgacagcg

SEQ ID NO: 3476 - DNA, 189 bp, Homo sapiens
  misc_feature 1..189: note = U/M: U (0.25:0.87) in Vascular Endothelial cells
  misc_feature 1..189: note = source = chr13:114585785-114585973; Gene: LOC100506394 (Intergenic)
  source 1..189: mol_type = genomic DNA
cgtggtgtccccaggtctggactgtgccctgagctgccggcatcctccccacacccccgtctctcctgcaagggcgcggatcccggcatcatcatctgcgattcgcggccagttttggcgggaacacaacaccggagggggctctgcctgcacagaggacccgggtcagacggcctctctcgggtgccg

SEQ ID NO: 3477 - DNA, 279 bp, Homo sapiens
  misc_feature 1..279: note = U/M: U (0.22:0.84) in Vascular Endothelial cells
  misc_feature 1..279: note = source = chr2:46575075-46575353; Gene: EPAS1 (intron)
  source 1..279: mol_type = genomic DNA
cgggtgagcatgagggaggcactcagggagggaaggttcttttgtggttgtttttcagttttccggagtaagcctggtgccttggagacggtggactccgccatcctgttatgaagtggctattctgggaaagagggaatccagtgtgaggctgggaggccagaccagaatgtactattctggtccctgtagtacaggaaggatatgggggacagactttcagaaaataggacgacagctcagtgggcctggggttggagggctaggcctaaagaggcg

SEQ ID NO: 3478 - DNA, 483 bp, Homo sapiens
  misc_feature 1..483: note = U/M: U (0.24:0.86) in Vascular Endothelial cells
  misc_feature 1..483: note = source = chr15:41274883-41275365; Gene: INO80,INO80 (intron,exon)
  source 1..483: mol_type = genomic DNA
cgtcaggagggcaaggggtgagtcaacagtgcttattacaaagaagaagaaccccaattggggctctaggaagaaagctcccggcttcagggtttcctacatgttctacctgactgacagaatttctagactgtctctgaccagaacaaagtctgcagccaccctgggcttctgtacctttagacacgttgtacccgtatgcggcataggcagctgcagaggccgctgcagccccggctttggctcctgccattgcagcagcactgcctgccgtggactttcggctccggcccttccctgctcctttggctgtgcttcctgaacctttggggcggcctcggcttcgggctgagtgaccacgtcctgcagctggcatttcctgaatggaaattcctgtgggaacaaatgggccaaaagggaaagaaaaaaaaaaaaagtcaatctccaagatgttaacatcaccttctcctgacagggaaagcg

SEQ ID NO: 3479 - DNA, 85 bp, Homo sapiens
  misc_feature 1..85: note = U/M: U (0.29:0.9) in Vascular Endothelial cells
  misc_feature 1..85: note = source = chr17:80560634-80560718; Gene: FOXK2 (exon)
  source 1..85: mol_type = genomic DNA
cgcccggctcctcaggaagaaaaccgctggcccttcccgagtgtgccggccgagggccgagggccgtgcacatggggagagggcg

SEQ ID NO: 3480 - DNA, 178 bp, Homo sapiens
  misc_feature 1..178: note = U/M: U (0.22:0.83) in Vascular Endothelial cells
  misc_feature 1..178: note = source = chr17:30051202-30051379; Gene: COPRS (Intergenic)
  source 1..178: mol_type = genomic DNA
cgcatcatggaaagcaatgtgaaaaaataaaaccatttcctgtttagactttcatgaatggacattccgcgataaaccacaaatcatgggattattgtatctgctcccacaatgaggcctgtgaactctttgaggggtagagatgtcatcccctctgtccctggcgcctgcagcagcg

SEQ ID NO: 3481 - DNA, 221 bp, Homo sapiens
  misc_feature 1..221: note = U/M: U (0.24:0.85) in Vascular Endothelial cells
  misc_feature 1..221: note = source = chr17:7758473-7758693; Gene: TMEM88,KDM6B (promoter-TSS,TTS)
  source 1..221: mol_type = genomic DNA
cgctgttcttgtaacagcccagaatctgctggtggctgccttcaatcttctcctgctggtgctggtgctagggaccatcttgctacccgctgtcaccatgctgggcttcggcttcctctgccactctcaggtgagcgtgcgccccggggtgtgcgtgtgagtgtgagtgttggtgtgtggtgatgctggcggtggggtctatgggccacaacttcaacccg

SEQ ID NO: 3482 - DNA, 92 bp, Homo sapiens
  misc_feature 1..92: note = U/M: U (0.3:0.9) in Vascular Endothelial cells
  misc_feature 1..92: note = source = chr8:641451-641542; Gene: ERICH1 (intron)
  source 1..92: mol_type = genomic DNA
cgcggtacaacggggcgagagcgccaaccgcggacaacaggaagggcgtgagtgagggccaacgcacttccttcttggacagattaagtacg

SEQ ID NO: 3483 - DNA, 111 bp, Homo sapiens
  misc_feature 1..111: note = U/M: U (0.29:0.89) in Vascular Endothelial cells
  misc_feature 1..111: note = source = chr22:46913360-46913470; Gene: CELSR1 (intron)
  source 1..111: mol_type = genomic DNA
cggtatctggagggtagaaccacaatggctgatgtgcactgtcccggcgccccaggccggctcttgtcttggtacctctgtccacagtaaggtgcccctgcagacacgccg

SEQ ID NO: 3484 - DNA, 119 bp, Homo sapiens
  misc_feature 1..119: note = U/M: U (0.19:0.79) in Vascular Endothelial cells
  misc_feature 1..119: note = source = chr21:46739702-46739820; Gene: LOC642852 (Intergenic)
  source 1..119: mol_type = genomic DNA
cgccttataaggctctgtccaggctcaagatgctctctgagcgccagggtctgccctgacaatggcctgcagctggacgtggggccacacggccacctggctgctcctggcccgtttcg

SEQ ID NO: 3485 - DNA, 131 bp, Homo sapiens
  misc_feature 1..131: note = U/M: U (0.26:0.86) in Vascular Endothelial cells
  misc_feature 1..131: note = source = chr6:42096212-42096342; Gene: C6orf132 (intron)
  source 1..131: mol_type = genomic DNA
cgagctggcattcctaatcctagacttcctaccatgagcctcgaccatgcctccttccagtagccccccttcccgccgggtcagcatcaggaaggaaggggtggacagagggtgcagctgatgtccactcg

SEQ ID NO: 3486 - DNA, 158 bp, Homo sapiens
  misc_feature 1..158: note = U/M: U (0.27:0.87) in Vascular Endothelial cells
  misc_feature 1..158: note = source = chr7:47369132-47369289; Gene: TNS3 (intron)
  source 1..158: mol_type = genomic DNA
cgctccgcacatgggccaggaagatccctgggaccttcctcccaaaggtctgagtaggcatttcctccctggttgtttatgtgttgcagagcagcagctcctgcaaatgatgctgtcggaaatgcctgaccacggacagagcaggctcagcggaagcg

SEQ ID NO: 3487 - DNA, 164 bp, Homo sapiens
  misc_feature 1..164: note = U/M: U (0.25:0.85) in Vascular Endothelial cells
  misc_feature 1..164: note = source = chr5:149844479-149844642; Gene: RPS14 (Intergenic)
  source 1..164: mol_type = genomic DNA
cgctccccaaggctgatttgcaggagcctctaagaccgctgggaagccctaagcagcaccaacctgagaaagggagtctcaccccataggagtccttggccgagaaagcgggaagccgggaaggggaggctaaaaacccccagagctgggtgcggtggctcacg

SEQ ID NO: 3488 - DNA, 240 bp, Homo sapiens
  misc_feature 1..240: note = U/M: U (0.24:0.84) in Vascular Endothelial cells
  misc_feature 1..240: note = source = chr6:138126946-138127185; Gene: TNFAIP3 (Intergenic)
  source 1..240: mol_type = genomic DNA
cggcttctcaaaagcccagttcctggcgggcgttctttggccttcaggaatctcctgctttcctttcctttggcagaaggccagtctagcaagggtctggatggttatcatgatatggccctccaggaagtcgctgtgaaatctttcacttcttgcctgatttgctatatcttagtgggggaaatggcctggacctcaggcatgtactcaagagtatggctgacactcacatttgctacg

SEQ ID NO: 3489 - DNA, 262 bp, Homo sapiens
  misc_feature 1..262: note = U/M: U (0.29:0.89) in Vascular Endothelial cells
  misc_feature 1..262: note = source = chr10:31989512-31989773; Gene: ARHGAP12 (Intergenic)
  source 1..262: mol_type = genomic DNA
cggcatgcaaaccaattctgagcaacatacagaaatgcaacttctagaaacaatgaggcgtaggtaacgccggacctcgagcagcgatgggaggacagggtggctgcaggttccactgaaatagctttagggcctggggaaatctgcagtgaaaacatcgcatgttatttatagccataagttgaaatccgtgttatttagtatgatgtttataaaaaataaatggtaggcggcctttccttccttgcttctctggctgtcg

SEQ ID NO: 3490 - DNA, 297 bp, Homo sapiens
  misc_feature 1..297: note = U/M: U (0.26:0.86) in Vascular Endothelial cells
  misc_feature 1..297: note = source = chr10:30444665-30444961; Gene: KIAA1462 (Intergenic)
  source 1..297: mol_type = genomic DNA
cgaggaattcttttattttccacagtgagtgatccaaagatgacaagctctgcaggaaatcctgggtcctatatacctatatatatccccaccgctggtcctattcagtcctaatcaaggaccatatcatcaatgagcttatccacaatgacaaagaagaaaaacaaaacccaggttgcaaacccctgcacacaacttgcttttgacagcacatcccagcgttctccaggaaagaggaagctatggaaatgtttagtacaagtagcagcagggcagagagctgcgggaagcctggcg

SEQ ID NO: 3491 - DNA, 306 bp, Homo sapiens
  misc_feature 1..306: note = U/M: U (0.25:0.85) in Vascular Endothelial cells
  misc_feature 1..306: note = source = chr12:121527599-121527904; Gene: P2RX7 (Intergenic)
  source 1..306: mol_type = genomic DNA
cggaaacctgattcctactctctgcctctcgccagcttccaggatggaaaggcctgctttgtcacacagcatgatgaagacgcccgtccccagctcctgtcacagcttcaacaggaaggaactaccctctcttaagaaatgtcagcgatgtccatgcagggtcactccagccaggaccgtcccccctgctctttcccacttagaaggagcaggaaaatcataggactcaggggatgatgatgtcatgagtctcctgacattaaaaccctggaatctatcctccccaaccccaactcaccgggcccg

SEQ ID NO: 3492 - DNA, 353 bp, Homo sapiens
  misc_feature 1..353: note = U/M: U (0.27:0.87) in Vascular Endothelial cells
  misc_feature 1..353: note = source = chr3:12964529-12964881; Gene: IQSEC1 (intron)
  source 1..353: mol_type = genomic DNA
cgatgcagctgctcccaccctcctctgagcgctcaaggcctcctggggcaacagccttggaggtgacttcggagcagtggggagagggcaagcagggagcaggcagaggatttgctgagcagcaggagcagcggccctgcagatgcctggtgtggtggcccgggggagccagccacttcctgaggccactgctattttctgacctgaggaaaacaatgtgcggatttcctaaggaccagggaccggcttggagtggggagtcggggcagcataggaatggctgcaggggatgggggtgggagctgggcatttaccaaggagctcatgggctttcccctggacctttcctcacg

SEQ ID NO: 3493 - DNA, 458 bp, Homo sapiens
  misc_feature 1..458: note = U/M: U (0.26:0.86) in Vascular Endothelial cells
  misc_feature 1..458: note = source = chr3:129320831-129321288; Gene: PLXND1 (intron)
  source 1..458: mol_type = genomic DNA
cggcctcagcctctcagccactctccctcctccattgctccttctcaccagctacctaggggctttctaaaataataggtagaagaattgtagtcattgcaaacaggcgccaggtacataaatgatctcatttaatacccccaacagccctaagaggcaggtattcacgagcattccccttctgcagcggggagactcaggtgcctgctgagaccactccacttctctggctaaaacccttcatggctcccaggaccccaggataaagtccagactcccaaggacggtctccccaggcctccctggcccttgtgtcatgtgcttcccactctactcgcctggccacgcagaccccctcgagcctgctcacagccttcgcacaggctgctccctttgcctggatgcctttcctcttctccggcctcacctggcttcctcctgctcctccgccccctccg

SEQ ID NO: 3494 - DNA, 107 bp, Homo sapiens
  misc_feature 1..107: note = U/M: U (0.25:0.84) in Vascular Endothelial cells
  misc_feature 1..107: note = source = chr11:110268874-110268980; Gene: FDX1 (Intergenic)
  source 1..107: mol_type = genomic DNA
cgggaaatgccatgaggggtccgtcctgggccctgttctaaaccggggcatttccggctcaggccattcccttacccctgtacaatgtctgtcccctgccacagccg

SEQ ID NO: 3495 - DNA, 172 bp, Homo sapiens
  misc_feature 1..172: note = U/M: U (0.25:0.84) in Vascular Endothelial cells
  misc_feature 1..172: note = source = chr19:39190658-39190829; Gene: ACTN4 (intron)
  source 1..172: mol_type = genomic DNA
cgtgattggaacgtagcagcctgagctcctgcctgaggagagcagccacgggtcacggaagccagggtccagctggggcctttgggtctagctggcagatgaagggctggccttcatcaagaaaacaagccccatgagggcaggagcccgacctgttcattccacaccaccg

SEQ ID NO: 3496 - DNA, 218 bp, Homo sapiens
  misc_feature 1..218: note = U/M: U (0.29:0.88) in Vascular Endothelial cells
  misc_feature 1..218: note = source = chr9:138902846-138903063; Gene: NACC2 (exon)
  source 1..218: mol_type = genomic DNA
cgagtctccgaaagaaggaaaaacgaggagttaggccctggagcctgagccctgccccgtcgccccagagaggttccatggggaaggaaggaagggtcagtgacgcacagcccagccccctcgccacagaccaccgccggcccctgcttcgtcttccgggcaggaggagcaggaagggcagggaggaaggggcagggctgggcaccaggggcctggcg

SEQ ID NO: 3497 - DNA, 269 bp, Homo sapiens
  misc_feature 1..269: note = U/M: U (0.3:0.89) in Vascular Endothelial cells
  misc_feature 1..269: note = source = chr14:102817450-102817718; Gene: CINP (intron)
  source 1..269: mol_type = genomic DNA
cgcaccaggcctgactctctcttattaactgcctttatttacggaaacctccttgacttccttgtttataaaatggcaacacagaaagggagccctacacacttcacgcagaaaggaaggaaacgtggcaagctgccattgacggtccctcagtgtggaccaggctctgtcctaagccctgtaactgcatgatgtgtatggctacttgtgggagacactaaaccaaccccactgcacacaccaggcagcacagaataggggcaatggcg

SEQ ID NO: 3498 - DNA, 273 bp, Homo sapiens
  misc_feature 1..273: note = U/M: U (0.25:0.84) in Vascular Endothelial cells
  misc_feature 1..273: note = source = chr18:19510086-19510358; Gene: MIR1-2 (Intergenic)
  source 1..273: mol_type = genomic DNA
cgagattgcaccgttgcactccagcctgggtgacagatcaagattccatctcaaaaaaaaaaaaaaaaagaccaagatttctctgtgagagtaaacaagagtgctcaccatctatgcagcacagaagagaaagcaggggcctccttcccgccccccggtttaatgacatggaagaggagtagtggggcagaggccaagatgcagcgtttcctggagccccaaaccctcattggagcactttcttttcctgcaacgaaggccaacattcttccg

SEQ ID NO: 3499 - DNA, 346 bp, Homo sapiens
  misc_feature 1..346: note = U/M: U (0.29:0.88) in Vascular Endothelial cells
  misc_feature 1..346: note = source = chr8:131429260-131429605; Gene: ASAP1 (intron)
  source 1..346: mol_type = genomic DNA
cgcatatggacacacagaagtgcaacccatgtacaactgcatacacacatacacacatgcaaagtgcaacccatgtacaactgcacacatacacacagaagtgaaacccatgtacaactgcacacagaaatacaacccatgtacaactgcacacacacagaaaacaacccacgtacaactgcacacacacagaaaacaacccacgtacaactgcacacatacagacagacagatatacaacccaagtccaactgcatgcacacatacacacatacacaaatgcaatggactatgtgccgcagcagcagggctgttccctgtgggcccatggaaaggatgctgggcg

SEQ ID NO: 3500 - DNA, 70 bp, Homo sapiens
  misc_feature 1..70: note = U/M: U (0.26:0.84) in Vascular Endothelial cells
  misc_feature 1..70: note = source = chr7:131217619-131217688; Gene: PODXL (intron)
  source 1..70: mol_type = genomic DNA
cggtgaggtcacagcgtgaaggccctgtctacaagccaggaaacgccctcgccagaacctgaccatgccg

SEQ ID NO: 3501 - DNA, 124 bp, Homo sapiens
  misc_feature 1..124: note = U/M: U (0.26:0.84) in Vascular Endothelial cells
  misc_feature 1..124: note = source = chr1:46087002-46087125; Gene: CCDC17 (exon)
  source 1..124: mol_type = genomic DNA
cgggagcaggaggtgggggcaggcaaagggctgggggcaacgctgtggtccttcctgtatcccgtccatcgcgtgccaagccagtccttagttgcacccaaatccaggaagcctcaaggccccg

SEQ ID NO: 3502 - DNA, 135 bp, Homo sapiens
  misc_feature 1..135: note = U/M: U (0.23:0.81) in Vascular Endothelial cells
  misc_feature 1..135: note = source = chr19:6219883-6220017; Gene: MLLT1 (intron)
  source 1..135: mol_type = genomic DNA
cgcatcccctttccttccgcccaaatccaaggggcagggaggaaaagaatccggaaatggtctcagccagaagagccctaaggtggtgtgatcagaagggccaccggagcacgcccggggctcagagggagggcg

SEQ ID NO: 3503 - DNA, 156 bp, Homo sapiens
  misc_feature 1..156: note = U/M: U (0.23:0.81) in Vascular Endothelial cells
  misc_feature 1..156: note = source = chr7:100041870-100042025; Gene: PPP1R35 (Intergenic)
  source 1..156: mol_type = genomic DNA
cggcactccagcccgggcaaaaagcgagactgtctctaaacaaataaataaataaaaagccatttttttcacatatgaatggactcctgggaatgcaagcttggaaatggggaggccgaagcccttgcctctctgcctcctcgcagccctggcccg

SEQ ID NO: 3504 - DNA, 177 bp, Homo sapiens
  misc_feature 1..177: note = U/M: U (0.26:0.84) in Vascular Endothelial cells
  misc_feature 1..177: note = source = chr21:43445208-43445384; Gene: ZNF295-AS1 (TTS)
  source 1..177: mol_type = genomic DNA
cggcacgctggagacccaggaaagagctgcagtttgaataggaaggccatgggcgggagagttccttcctgttcaggggacctcagtctttctctagaagacctttggctgaccggatgaggctcatccacgctatggacacaaatcagctttactcaaagtctactgatttaaacg

SEQ ID NO: 3505 - DNA, 326 bp, Homo sapiens
  misc_feature 1..326: note = U/M: U (0.28:0.86) in Vascular Endothelial cells
  misc_feature 1..326: note = source = chr2:20773321-20773646; Gene: HS1BP3 (Intergenic)
  source 1..326: mol_type = genomic DNA
cgggctgggccaacagctctaaaggagtcgcagcctcccgggcctttgcttccagaggctccacaaatccacagctctcagctgatatctcattagggagctatgggcttccccttcctgttcagctactagtttaagttgttttcctccttctggtctgcaaggaacaaaaacaagtaattttctcataaaaataacaattagcaaagcccggaatccagacagcctccggtcaggaccattcatcggtgctgacctcgaggtaacttcagactccttgtgagacacaacaccgccatccccaccaggacaaggagggccaagcg

SEQ ID NO: 3506 - DNA, 344 bp, Homo sapiens
  misc_feature 1..344: note = U/M: U (0.26:0.84) in Vascular Endothelial cells
  misc_feature 1..344: note = source = chr12:19104640-19104983; Gene: PLEKHA5 (Intergenic)
  source 1..344: mol_type = genomic DNA
cgaaggaaggaaataatacgttctactttaaacaaaatcggaatttagagttgaaataattttgcttgtagcctctcagttaagtgttatttcctgctggagtgaaccctctaacctctgtgctatctttatcatgtcagcttcctagcatttaatttttttttcccttgggaggggtggaaaactaatgaataaaattacaggttgctatctctctcaggagactgcaaataaaccatggtagaaagaagtccataatttttggagctaaaaataattataccaattgtattggccgtatcacagttttgtgttgcatctctcagatctggaggactattacg

SEQ ID NO: 3507 - DNA, 349 bp, Homo sapiens
  misc_feature 1..349: note = U/M: U (0.27:0.85) in Vascular Endothelial cells
  misc_feature 1..349: note = source = chr8:82305505-82305853; Gene: PMP2 (Intergenic)
  source 1..349: mol_type = genomic DNA
cgtgacacagggcatgtttttctgaaccaaagggaagcaaatcaaagttttgttatctcgacttttgaaaaatggcccgtagtggatgcagtgattgaagctaaaagaatgattgcatattgaaatagctatgggctgttttctcaaaagtcatagaatagggatagggtagtcatcagatggaaatagagaaactgacttgtggtgttgctattaaaaaataaaataatttttttttgattcaacgacttcctgttgttactatagaatgaggtgactgaagggaatcttaaaaatacctaatagtgcataggaagtggaggcttcttttacacttcggaagttaacg

SEQ ID NO: 3508 - DNA, 433 bp, Homo sapiens
  misc_feature 1..433: note = U/M: U (0.28:0.86) in Vascular Endothelial cells
  misc_feature 1..433: note = source = chr8:26032468-26032900; Gene: PPP2R2A (Intergenic)
  source 1..433: mol_type = genomic DNA
cgggcctttgggggtctcccttggagacggctatggagcctcctgaggagaagaggccttttctagggttcaggaggtggatgcaaaacttgtgaagtcccagcaaaatcagctggaaattccaccccagggactggatttcctgctctgaatcacagcttcccagtagaagttttcttagatgtctctaaagctaattctcggctggagtttggacatattaatgccagctcagacctgttggactactgatgctttttatccctctgataatacaatcctgtcttgcccactcttcctccaacagagtgttctacccctggatttatcgccactgtccagccttagcatttgaagctgcattaaacagagataacatgatcttgggtacaagccatacatgtgacaacttctgtttctctaaaattacccg

SEQ ID NO: 3509 - DNA, 73 bp, Homo sapiens
  misc_feature 1..73: note = U/M: U (0.19:0.76) in Vascular Endothelial cells
  misc_feature 1..73: note = source = chr17:7758376-7758448; Gene: TMEM88 (promoter-TSS)
  source 1..73: mol_type = genomic DNA
cgggatccaggcgggccatggcggatgtccccggggcacagcgagcggttcctggtgacggcccagagccccg

SEQ ID NO: 3510 - DNA, 123 bp, Homo sapiens
  misc_feature 1..123: note = U/M: U (0.29:0.86) in Vascular Endothelial cells
  misc_feature 1..123: note = source = chr5:3303746-3303868; Gene: LOC285577 (Intergenic)
  source 1..123: mol_type = genomic DNA
cggatgtggtggcgggccctgtaatcccagctactcaggaggctgaggcgggagaattgcttcaaccagggaggcggaggttgcagtgagctgagatcgcgccactgcattccagcctgggcg

SEQ ID NO: 3511 - DNA, 152 bp, Homo sapiens
  misc_feature 1..152: note = U/M: U (0.26:0.83) in Vascular Endothelial cells
  misc_feature 1..152: note = source = chr9:124420223-124420374; Gene: DAB2IP (intron)
  source 1..152: mol_type = genomic DNA
cgtggttacctaaagatgttaacgagaaatccgggtctggaactcagatccctttgtatcctgtttcggtgttggtgtagtttgttgctttccctaagatgagcccagatagggaaactgaagtgcctgggctcctggttgggtcttctgcg

SEQ ID NO: 3512 - DNA, 320 bp, Homo sapiens
  misc_feature 1..320: note = U/M: U (0.28:0.85) in Vascular Endothelial cells
  misc_feature 1..320: note = source = chr12:50041247-50041566; Gene: FMNL3,FMNL3 (intron,exon)
  source 1..320: mol_type = genomic DNA
cgctaactccaggtggccaccctctggaggggcacttcctgccccaaacaatgacaggaaggtcctgggccccaccctgcccaccagttcacagctaagaggcctgtcaccagcttgcatcgctcccttcccaggactcggaggaggagtcggaaaaggcccatactttaagcccaggcttctctcccccagccagttttctcgcaaccaaacttcttaaaaagctctctgcagcttaccttgtaagaacgaatgaatcggacaaatactgggaagaatacagaaggaggtgtagtcttgggactctcgccaaagtagcg

SEQ ID NO: 3513 - DNA, 351 bp, Homo sapiens
  misc_feature 1..351: note = U/M: U (0.29:0.86) in Vascular Endothelial cells
  misc_feature 1..351: note = source = chr4:41052805-41053155; Gene: APBB2 (intron)
  source 1..351: mol_type = genomic DNA
cgttctctcatccacgtcaggatttttttccacaaaggtatcagctacttatcctggaacaacctgctgttccttctcagcccttcagctgggacctgcatttagaagcctccaagaagacatacctggccagggtcacatttctcagaaaggcggcagcaggaagagttgagcccggaggccaccaccaggaacagggtgtttccctcgacacaggatgcaagttcacaaagaaacaccaaggacctcctctatctccagctacagtctcctgctttcctcaacagaacttaagggcaggaaggaaagcggaagtcaggaatcagggccagggaagctaaaacaaaggcg

SEQ ID NO: 3514 - DNA, 95 bp, Homo sapiens
  misc_feature 1..95: note = U/M: U (0.3:0.86) in Vascular Endothelial cells
  misc_feature 1..95: note = source = chr20:62319997-62320091; Gene: RTEL1-TNFRSF6B (intron)
  source 1..95: mol_type = genomic DNA
cgtgcctcccctgcctctcacagcttccccaaggctgaccactggccctgaccatgggctccggcggctcccgctgcctcttcagggctcctgcg

SEQ ID NO: 3515 - DNA, 346 bp, Homo sapiens
  misc_feature 1..346: note = U/M: U (0.29:0.85) in Vascular Endothelial cells
  misc_feature 1..346: note = source = chr19:11364111-11364456; Gene: DOCK6 (intron)
  source 1..346: mol_type = genomic DNA
cggcagggagagtggccacaggaattggtgagactactaggaccaggacaggcactccctcccccgacactgctgggtccctctcggtttccccccaggacaggccacaggagggagggggtgggatagaacctaggccaaggaagcccctacctctgtctgagagagggcagagggctgggggcggaccccccaaatacttacccccagggagctgctgcagcgcctgctggagtggggggagccactgcgttcccgggacacctgcttccgcacctctgcggccaccgtcctggaaagatagggagggggccattggggacgggaaaactcaggcagcggagcg

SEQ ID NO: 3516 - DNA, 71 bp, Homo sapiens
  misc_feature 1..71: note = U/M: U (0.28:0.83) in Vascular Endothelial cells
  misc_feature 1..71: note = source = chr10:45631136-45631206; Gene: RSU1P2 (intron)
  source 1..71: mol_type = genomic DNA
cgctgattgcatttggatcttagcggttccaccggaaacacgcatacggctgcaatttgaaggtcaattcg

SEQ ID NO: 3517 - DNA, 80 bp, Homo sapiens
  misc_feature 1..80: note = U/M: U (0.33:0.88) in Vascular Endothelial cells
  misc_feature 1..80: note = source = chr10:30034810-30034889; Gene: SVIL (Intergenic)
  source 1..80: mol_type = genomic DNA
cgtgaatccgggaggcggagcttgcagtgagccgagatcgcgccactgcactccagcctgggcgacagagcgagactccg

SEQ ID NO: 3518 - DNA, 236 bp, Homo sapiens
  misc_feature 1..236: note = U/M: U (0.28:0.83) in Vascular Endothelial cells
  misc_feature 1..236: note = source = chr17:1075364-1075599; Gene: ABR (intron)
  source 1..236: mol_type = genomic DNA
cggtctagtgtgtgtggggaggaaggaagggcaggaggaggacacaggataaagcctggacaaaaaactgggcgagaggccccagtcaggtctcgacccggggacagagaacccgctgctccatccacaagtggccacggcctcagatggtcccgcctcaaagggctctttgccaaatgcccaggcaggggtgggattgggcattatcttcagcctccatacgggggtgccttccg

SEQ ID NO: 3519 - DNA, 251 bp, Homo sapiens
  misc_feature 1..251: note = U/M: U (0.25:0.8) in Vascular Endothelial cells
  misc_feature 1..251: note = source = chr9:140281552-140281802; Gene: EXD3 (intron)
  source 1..251: mol_type = genomic DNA
cggcccctactccttgtctgcctccctcagcgcctctgttccctgcctggccctcggcccccgctccctgcctggcccccggcccctgcccttctgcccctgtcgcttcactgtggcctcaacgctgagccccagggcagtgaccgcctgggtctccttccaggccatggccggtgcacgatggacactccacggtgcccgccccagccattccagggccagccgtgcacacatggtgctcacagcccacg

SEQ ID NO: 3520 - DNA, 322 bp, Homo sapiens
  misc_feature 1..322: note = U/M: U (0.24:0.79) in Vascular Endothelial cells
  misc_feature 1..322: note = source = chr6:33577711-33578032; Gene: ITPR3 (Intergenic)
  source 1..322: mol_type = genomic DNA
cgctgtaatttgctcttgactcccttgaatctgcccccttctctcctttcctgtttccctccccgacacccagccccagcacctgctgcctggaccctgtggcagcccctcccagcagtgctgcactcagagacagggagtgggcttcaaaacccagctaccagccagtcctcccaggcaaaagccctccatggcttctcattgcttaagacaaagaccaatcccttcctgtggctccaggtcctgcctggcctcagccccatctcttgccggggcccttcctgctccattacagctgcgctgcttgctccttcctggagcg

SEQ ID NO: 3521 - DNA, 437 bp, Homo sapiens
  misc_feature 1..437: note = U/M: U (0.3:0.85) in Vascular Endothelial cells
  misc_feature 1..437: note = source = chr11:76377013-76377449; Gene: LRRC32 (intron)
  source 1..437: mol_type = genomic DNA
cggagaggaaaggggaacactgtaagcccactggctccttcccactgccagcccccactcccacccattctgtgcctgccctcagggaaccccagagcacggctggagctggaataaagatgctttgagcagggcagagagccaggtgggaaatgggcctgcagcccatcatagtaggcctctcacccaggccaaggagccgcccattacccaggggaagcaagagttttaagcggcaggtgacttggtcagacgggggttttcaagagaccccacctggcggaagacagcctggaggggatgcacagaaggctgacagaccctaagggttaccctaggccatgctcagggccagggactgggggcatggagatgtagagggggtttggagggtgggcctctgactacatttccacccaggccacacaagtcctccg

SEQ ID NO: 3522 - DNA, 473 bp, Homo sapiens
  misc_feature 1..473: note = U/M: U (0.27:0.82) in Vascular Endothelial cells
  misc_feature 1..473: note = source = chr6:108773814-108774286; Gene: LACE1 (intron)
  source 1..473: mol_type = genomic DNA
cgagcctaaacctaaaataggtttgccttttattatttcataagtgctgacagaagacaacagagacctgggtcagagacacaggatcttattagccttggcacagatagcagtatgagcattagcatgttgtgtcagttccctccttgctccttagtcccatggagtggaggggagggtgttttgctgagggcctagataattcctgcaacaggcagtgaattgtgttacaggaaaatagctctgagcttgtgaaatctgccattttatagccagacataagcaagtctgctttttgtctcgagggagacattgtctcatctttcaaggttgctcactacacacacaaccttgagaaatggttagggcctcgcattcttggcatactcagcaagatgtgatggagagacccatggaggggcttgtctctcccaacagggggcatttaccggacattagaccttaaagaaccg

SEQ ID NO: 3523 - DNA, 490 bp, Homo sapiens
  misc_feature 1..490: note = U/M: U (0.29:0.84) in Vascular Endothelial cells
  misc_feature 1..490: note = source = chr11:74231820-74232309; Gene: LIPT2 (Intergenic)
  source 1..490: mol_type = genomic DNA
cgtagcaatgtggatatacttaatcccactgaactgtacacttaaaaaggttacaatgatacattttatgttgtgtatattttaccacaataaaaataaattaatacgctgaatgaaagatcttccctcattgtcccctgcccaaaaagggttcagcatggttccaggtacacagcagatgatccatatgtctgagcttccttcctcctcccttctggatttctctccacctgggttccagggccatggccaagaggcaggatgagggagagcaggacgggtgtcaggagcggaagtgattaaatgttgaacgaggatatggtgtttgtggggtcaaagccaggactgccctctggaaagcccaggcatgaggaggcgagctgcctccccgcctgaaaggaagaaggatgtccgggggtcagggatgacactggtgtttttggccatgagagagaagtaagatatctaaattaaggaggaaaggcaggcg

SEQ ID NO: 3524 - DNA, 58 bp, Homo sapiens
  misc_feature 1..58: note = U/M: U (0.28:0.82) in Vascular Endothelial cells
  misc_feature 1..58: note = source = chr18:77172345-77172402; Gene: NFATC1 (intron)
  source 1..58: mol_type = genomic DNA
cgtgacgtcagggctgccgctgtgtcctcaggaagaggcgtttgccacgcgcagcccg

SEQ ID NO: 3525 - DNA, 72 bp, Homo sapiens
  misc_feature 1..72: note = U/M: U (0.28:0.82) in Vascular Endothelial cells
  misc_feature 1..72: note = source = chr14:102526697-102526768; Gene: HSP90AA1 (Intergenic)
  source 1..72: mol_type = genomic DNA
cggaagccggaagcggggcctgcagcggaccctccttccgagcctgcagaggaaaccggccttgctgatgcg

SEQ ID NO: 3526 - DNA, 157 bp, Homo sapiens
  misc_feature 1..157: note = U/M: U (0.24:0.78) in Vascular Endothelial cells
  misc_feature 1..157: note = source = chr19:45383231-45383387; Gene: PVRL2 (intron)
  source 1..157: mol_type = genomic DNA
cgaggggcagtctctctctctcactcccccaccctctgaagccctccagaggatgccaggctgtggaacgggagcagtggagatccaacagtccagcgtcctctggaagcttcctcctcatctggagagtgaggccgatgcatgcgtgacccccacg

SEQ ID NO: 3527 - DNA, 193 bp, Homo sapiens
  misc_feature 1..193: note = U/M: U (0.27:0.81) in Vascular Endothelial cells
  misc_feature 1..193: note = source = chr6:170251667-170251859; Gene: LINC00242 (Intergenic)
  source 1..193: mol_type = genomic DNA
cggttctggagagcacaagtccagcctcagtttcactgggcaaagtcaaggtgctggtgggctggttcctgctggaggccccacagcagtgtgcgtttccttgttttccagcttccaggggcctggcccatttgtcttcaaagcccgtggctccagcctccgcttccgccaccgtggggccttccctctgacg

SEQ ID NO: 3528 - DNA, 198 bp, Homo sapiens
  misc_feature 1..198: note = U/M: U (0.23:0.77) in Vascular Endothelial cells
  misc_feature 1..198: note = source = chr19:419592-419789; Gene: SHC2 (intron)
  source 1..198: mol_type = genomic DNA
cggaaggaaccagccccggccacaccttgagttcggacttctggcctccagagctgtgagaatgaacctctgctgctttaagccacttcgtgtgtggtcatttggtttgcagctccaggaaacacacccctgaaatcctggagacacaggcctgaaaatctgaatcgccaaatcaaaatccagctgcatttttgaacg

SEQ ID NO: 3529 - DNA, 224 bp, Homo sapiens
  misc_feature 1..224: note = U/M: U (0.29:0.83) in Vascular Endothelial cells
  misc_feature 1..224: note = source = chr2:128394957-128395180; Gene: LIMS2 (TTS)
  source 1..224: mol_type = genomic DNA
cggggctccaaggccccagccctggccagcacctagcagcggatgctggcgtgtctgctcaggcgcccttcccgacctctagcctggcggcaccttcccaggccctctcaacccagggcctgtccttggcgggcagccttccatgctgccccccatacaaagcccactcagccccgcaggcggccccctctgtcctgggcgctgcccagggaggccaaaagacg

SEQ ID NO: 3530 - DNA, 252 bp, Homo sapiens
  misc_feature 1..252: note = U/M: U (0.29:0.83) in Vascular Endothelial cells
  misc_feature 1..252: note = source = chr7:739312-739563; Gene: PRKAR1B (intron)
  source 1..252: mol_type = genomic DNA
cggccagctgcaggaggggtggggaggaagttccaggtgacaggacagtgctggccggagcccgtgggtggccatgggctgcagtggagaggcaagcaggagccagaccccgtgaggcaggaaggagcttagatttgttaggagagcactggaaaggtttgggaaggttttaagaagggggagcagttcaatttgtgtttctggaagatggctccagctgtgactgatatggaaaatggagctcgaggcccg

SEQ ID NO: 3531 - DNA, 253 bp, Homo sapiens
  misc_feature 1..253: note = U/M: U (0.31:0.85) in Vascular Endothelial cells
  misc_feature 1..253: note = source = chr16:78704128-78704380; Gene: WWOX (intron)
  source 1..253: mol_type = genomic DNA
cgtgtgttgaatgccagccactcttctacccagggtcatatccttggatgtttttctgtgcatctgtcttttccgaccctcccgtgattctggaaggaaacacctttccaagctccccagtgaccctggttcatcccggaaatatgcaggaaaagcattatgagcattgcagtgccacatgctgcattggtgtgttacgttatgagaactattagggctgatctctgagaaacttaccagtggtgtgtgatcg

SEQ ID NO: 3532 - DNA, 323 bp, Homo sapiens
  misc_feature 1..323: note = U/M: U (0.3:0.84) in Vascular Endothelial cells
  misc_feature 1..323: note = source = chr7:158299886-158300208; Gene: PTPRN2 (intron)
  source 1..323: mol_type = genomic DNA
cgtccaggggacagccctgcactaggcaggaaattgcacacagagaggtcagtgaggactgtccaggggatagcgctgcagtgtgcaggagactgcacacaagaaggtcagtgaggaccatccaggggatagccctgcgctgggcaggaaatcacacacatggaggtcagtgaggaccatccaggggacagccccgcactaggcaggaaattgcacaaacagaggtcagtgaggaccatccaggggacagccctgtgctgggcaggaaatcacacacatgaaggtcagtgaggaacatccaggggacagccctgcgctgggcg

SEQ ID NO: 3533 - DNA, 218 bp, Homo sapiens
  misc_feature 1..218: note = U/M: U (0.31:0.84) in Vascular Endothelial cells
  misc_feature 1..218: note = source = chr21:41934629-41934846; Gene: DSCAM (intron)
  source 1..218: mol_type = genomic DNA
cgctctgctatgtgtatgagcctgggaaagccaaagccctgtatttcagtacccagtgctgctggaggtcactattgtggccctaaaagggaaagaggaaatgatccctggctgcaatgctcacaaaaactacttggatcctgccctagaaaaaggaccagagacagaaagggcagcaatacgtctgtcgcctgcacgacatgcactaaaagtcaacg

SEQ ID NO: 3534 - DNA, 347 bp, Homo sapiens
  misc_feature 1..347: note = U/M: U (0.27:0.8) in Vascular Endothelial cells
  misc_feature 1..347: note = source = chr2:127819304-127819650; Gene: BIN1 (intron)
  source 1..347: mol_type = genomic DNA
cggtgctatctccctgctctgagaggactgcacaccccggagtctttcagtcctgttcacaccccccagtccccaaagctgagcaggctgcccaccccaaccctggatgctcgtgctccacaatgagggggtcagccggctcagggacccgcggactccccagagtgctccttcctcgacgaacacagccagaggggcagggacattcgagacagagacctgccctcacctgcctccctgagcacagagaggccaagacaggaaggtccctagacccccaaggccaaacccatgggggaccagggagggcaccaacagggtcacaggaaggagccctgcccctgccg

SEQ ID NO: 3535 - DNA, 230 bp, Homo sapiens
  misc_feature 1..230: note = U/M: U (0.29:0.81) in Vascular Endothelial cells
  misc_feature 1..230: note = source = chr8:144286474-144286703; Gene: GPIHBP1 (Intergenic)
  source 1..230: mol_type = genomic DNA
cggaagccccatccttctctgtgatttcacaggaagtgtgtccgggacactggggtgcggaagccccatccttctctgtgatttgacaggaagtgtgcccgggacacaggggtgcggaagccccatccctctctgtgatttgacaggaagtgtgtccgggacactggggtgcggaagccccatccttctctgtgatttgacaggaagtgtgtccagtacacaggggtgcg

SEQ ID NO: 3536 - DNA, 254 bp, Homo sapiens
  misc_feature 1..254: note = U/M: U (0.34:0.86) in Vascular Endothelial cells
  misc_feature 1..254: note = source = chr19:42005720-42005973; Gene: LOC100505495 (intron)
  source 1..254: mol_type = genomic DNA
cgagtgtggagccctgaagtgcgcaggccactcggttgtccctcaggggcctgggaacctcgcggagtgtggagtctctagaacgcagtccactccgctggggaggtggatttcaggccagaaaccttcagggacctggagccccaacacatgctaaaaacaggggtagggacacagatctgaaagattttggagtacttggaaggcagaagggaaacttgaataagtcagggtggagcgctcagaagatggcg

SEQ ID NO: 3537 - DNA, 84 bp, Homo sapiens
  misc_feature 1..84: note = U/M: U (0.28:0.79) in Vascular Endothelial cells
  misc_feature 1..84: note = source = chr20:61509056-61509139; Gene: DIDO1 (TTS)
  source 1..84: mol_type = genomic DNA
cgcgttagaaaaaggctgatgaagacccgagacagaaacttcctgtagctgtttattctactgcgagtaacaaaacctaggtcg

SEQ ID NO: 3538 - DNA, 113 bp, Homo sapiens
  misc_feature 1..113: note = U/M: U (0.3:0.81) in Vascular Endothelial cells
  misc_feature 1..113: note = source = chr1:230673463-230673575; Gene: COG2 (Intergenic)
  source 1..113: mol_type = genomic DNA
cggtaagtaatccactgcttctgatatttcctgtgttttgttgcatcgtctcctctgtgtctcacctgaccgacacacctgaagctaacttctctccaggtcagcgttccccg

SEQ ID NO: 3539 - DNA, 167 bp, Homo sapiens
  misc_feature 1..167: note = U/M: U (0.32:0.83) in Vascular Endothelial cells
  misc_feature 1..167: note = source = chr14:103702488-103702654; Gene: LINC00605 (Intergenic)
  source 1..167: mol_type = genomic DNA
cggggacaataggattagttttaggaaggtctagtttaagtttaaaaggggacaaatacatacaggagtcattgattcaggttacgatggggaaattcaaactgttatatctacttctgttccctggaaaccagagccaggagagcgcatagcacggctcctgatcg

SEQ ID NO: 3540 - DNA, 230 bp, Homo sapiens
  misc_feature 1..230: note = U/M: U (0.3:0.81) in Vascular Endothelial cells
  misc_feature 1..230: note = source = chr9:139640201-139640430; Gene: LOC100128593 (promoter-TSS)
  source 1..230: mol_type = genomic DNA
cgggagcggagtcagccctccgtccctgcccgcagggggcctggggatgctgcagggaagaacggcctgggtgaggccgtggccgtcagactcacagggattctcaaacacccatccggagtttcgctttatcaggtccatgacactctggtcacaccctcccagcctggaaaagaaggggcctgtcacccactcagggtcaagaccccggggcccggtgagaggagacg

SEQ ID NO: 3541 - DNA, 94 bp, Homo sapiens
  misc_feature 1..94: note = U/M: U (0.35:0.85) in Vascular Endothelial cells
  misc_feature 1..94: note = source = chr9:140282141-140282234; Gene: EXD3 (intron)
  source 1..94: mol_type = genomic DNA
cgagaagggcgggtggggcttggagctgacaccgagggacctcccagacccgctctccggccccagaagccccagccagccctccctgaggtcg

SEQ ID NO: 3542 - DNA, 115 bp, Homo sapiens
  misc_feature 1..115: note = U/M: U (0.3:0.8) in Vascular Endothelial cells
  misc_feature 1..115: note = source = chr22:47559806-47559920; Gene: TBC1D22A (intron)
  source 1..115: mol_type = genomic DNA
cgtgtcacagagggtgtgcactggagcaggagcccctccccgcaggccgttctcatttgtacaggaaaaggcacacactctgccggctccttagacatgggcctctgtggcctcg

SEQ ID NO: 3543 - DNA, 133 bp, Homo sapiens
  misc_feature 1..133: note = U/M: U (0.24:0.74) in Vascular Endothelial cells
  misc_feature 1..133: note = source = chrX:7816429-7816561; Gene: VCX (Intergenic)
  source 1..133: mol_type = genomic DNA
cgcataccgattgtttttggccccacgtcagtgatacacacgacacagaattgctctcaaaaaacactctggaattgaaaaatgacaggggaagctcaacgcgatggctgggtgccagagggaaggccttccg

SEQ ID NO: 3544 - DNA, 178 bp, Homo sapiens
  misc_feature 1..178: note = U/M: U (0.34:0.84) in Vascular Endothelial cells
  misc_feature 1..178: note = source = chr3:197192159-197192336; Gene: BDH1 (Intergenic)
  source 1..178: mol_type = genomic DNA
cgggaaccgggtgtgcatgctggcccctgtcaggggtccagcctcaaaggccacagacaggaaaatgggatttgcgtgatgtcaagtattgttgacttgtaagggttcaggaaggtcaccactgcagcgtgctcccaaggaaggccaggaaacaggctccctgaaattgtttaaggcg

SEQ ID NO: 3545 - DNA, 237 bp, Homo sapiens
  misc_feature 1..237: note = U/M: U (0.31:0.81) in Vascular Endothelial cells
  misc_feature 1..237: note = source = chr17:41167472-41167708; Gene: IFI35,VAT1 (TTS,exon)
  source 1..237: mol_type = genomic DNA
cgccctgttggaagaggcagccttggttaagaatggcagaaaacctggagatggaagaagcccaattgtgcttaagaagttggggacagaggacgagattgggaactggtcaagcccagaggcgggcactggtcagcccaggctgaagggacactagggagagacaggtacatgctggactcacagagattggccccatatcctgagctgacgtttcaattctttggggaggtggcg

SEQ ID NO: 3546 - DNA, 97 bp, Homo sapiens
  misc_feature 1..97: note = U/M: U (0.28:0.76) in Vascular Endothelial cells
  misc_feature 1..97: note = source = chr4:39392193-39392289; Gene: KLB (Intergenic)
  source 1..97: mol_type = genomic DNA
cgttacctctctgtacttactgtctgccattcgctcattccactgcagccacaccgacctcttacttcctgaaggtgccggacgtgcttctacttcg

SEQ ID NO: 3547 - DNA, 96 bp, Homo sapiens
  misc_feature 1..96: note = U/M: U (0.35:0.81) in Vascular Endothelial cells
  misc_feature 1..96: note = source = chr14:103750028-103750123; Gene: EIF5 (Intergenic)
  source 1..96: mol_type = genomic DNA
cgctgcagcaactgtggtcaccggaagcttggacccttcgaggataaaggtctgagccatcccagaaaccaacagcctagcccagctgcgttgccg

SEQ ID NO: 3548 - DNA, 179 bp, Homo sapiens
  misc_feature 1..179: note = U/M: U (0.24:0.84) in Vascular Endothelial cells
  misc_feature 1..179: note = source = chr8:49595474-49595652; Gene: EFCAB1 (Intergenic)
  source 1..179: mol_type = genomic DNA
cggggtcaggcgccttgcgccgctatgttaagacaggctttcccgtctctacagctccttccggtcttttcttagcaggctctttagtccaccacgtcgcaaatgggacgctgcttcctttgggcctttcctgacccttccattgtggatcagtcttcgttttatgagctcctttaacg

SEQ ID NO: 3549 - DNA, 443 bp, Homo sapiens
  misc_feature 1..443: note = U/M: U (0.28:0.84) in Vascular Endothelial cells
  misc_feature 1..443: note = source = chr3:149333935-149334377; Gene: WWTR1 (intron)
  source 1..443: mol_type = genomic DNA
cggcattttttactgcctgtgggcttttcctgtctcatcgcagactcaattctcaaattctgttccctcaaatgtctcaggctttaaagcttccataagatctcatttttccccttaattgagaatgtccgcttcccaccctttctttctgcctatgaaaatttgaccctatctttaaaaattcagttcagggaacacccttctctgtaatcccatgtaatgaaatcccctggctagaactacgtatttcttcctctgtactttcctaataaaatggctgtcctctctctctctctctttttttttttttccgaggtggagtttcactcttgttgcccaggctggagtgcaatggcatgatctcggctcaccgcaacctctgcctcccaggttcaagcaattctcctgcctcagcctcctgagtagctgggattacagggacg

SEQ ID NO: 3550 - DNA, 182 bp, Homo sapiens
  misc_feature 1..182: note = U/M: U (0.3:0.83) in Vascular Endothelial cells
  misc_feature 1..182: note = source = chr3:50371010-50371191; Gene: RASSF1 (intron)
  source 1..182: mol_type = genomic DNA
cgattctcctgcctcagactcccgagtagctgggactacaggcgcgtgccacaacaacacccggctaatttttgtatttttagtagagatgggatttcaccacattggccaggttggtcttgaactcctgacctcaagtgatccgcctgccttcacctcccaaagtgctgggattacaggcg

SEQ ID NO: 3551 - DNA, 328 bp, Homo sapiens
  misc_feature 1..328: note = U/M: U (0.27:0.89) in Vascular Endothelial cells
  misc_feature 1..328: note = source = chr14:35883185-35883512; Gene: NFKBIA (Intergenic)
  source 1..328: mol_type = genomic DNA
cgaactcctgaactcaggcaacccaccctccttggcctcccaaagtgctgggattacaggcgcaagcctggcaaaaatgaattatttttaaagttgaaacagaataccttcctgtgattaaaaaaaaccaagcagtctaaaaatattacaattatacaattaaatctctcttttgtttctttttctttttttttttttttttgacttgttgcccaggctggagtgcaatggcgcgatctcggctcactgcaacctccgcctcctgggttcaagcaattctcctgcttcagcctcccaagtagctgggattacaggcatgtgccaccac

SEQ ID NO: 3552 - DNA, 444 bp, Homo sapiens
  misc_feature 1..444: note = U/M: U (0.2:0.89) in Vascular Endothelial cells
  misc_feature 1..444: note = source = chr9:116265681-116266124; Gene: RGS3 (intron)
  source 1..444: mol_type = genomic DNA
cgagctaggaggtgagcttgcctcccggcaccctctcctcttcccctccttcacactcccatctggcttggactgtggtctgggctggcacttcttaagctggtgcccaggagggtgaggggcccccagcccacagtcctgcttggatgtggggtctgggtgtgggaggaggaggctgttttcttggagcacactcctccccagaccccactctccagttactgccccataactggccatccagagcccagggtgctgggatgggttttctatgcagggggctttggccctggatggggtaggggtggggaagtgctggataggctttgggaccccagcttgtgcttgggttgagggttggcttgtgaggcccctaaaaaatccccgctggttccatggagggggccaggctcctggcgtcttccctggcctcaggcgggcccg

SEQ ID NO: 3553 - DNA, 354 bp, Homo sapiens
  misc_feature 1..354: note = U/M: U (0.27:0.91) in Vascular Endothelial cells
  misc_feature 1..354: note = source = chr22:22112353-22112706; Gene: YPEL1 (Intergenic)
  source 1..354: mol_type = genomic DNA
cgccactgcactccagcctgagcgacagagcaagactctatctcaaaaataaataaataaaaaaatataaaaaaaatcacaaagctactggacattggccttcttggcctgcgtacggctgaaagatgttttcctttctctcagggaccagcagctccaggcatttcctgaaaatggggactgccctgctgcagaccccgctcctggcttctggcgctacaaagtatttggcaggaactcagtgactactgaatggatctggagcagataagaaagccagtgtgaagtcccaaggaaacccacaggattggcactggcatcttccattgggtattttgtgactaaagctggacg

SEQ ID NO: 3554 - DNA, 58 bp, Homo sapiens
  misc_feature 1..58: note = U/M: U (0.25:0.82) in Vascular Endothelial cells
  misc_feature 1..58: note = source = chr22:32727342-32727399; Gene: RFPL3 (Intergenic)
  source 1..58: mol_type = genomic DNA
cgccgctggcgagatggcggcacgggggaaatggccgtgctctgcaaactccctcgcg

SEQ ID NO: 3555 - DNA, 317 bp, Homo sapiens
  misc_feature 1..317: note = U/M: U (0.28:0.85) in Vascular Endothelial cells
  misc_feature 1..317: note = source = chr22:41626840-41627156; Gene: L3MBTL2 (exon)
  source 1..317: mol_type = genomic DNA
cggcagctaagaagcagtgaccaggatgtggattttggcgacctgtgtggtggccttgagctgctttctgtgtttgtgaggactgactcccatttcctaaaggaaatgcccccggggaggacattgggaggaagatggcctgagtgtgcactttggctctgctacctgctcctgaagccccgctaaaaataattcatccaagattcctttgtagttaaagggtccagttctgactggagcctctagagagctgggcttgtatgttcttttggccttttgttcctacctaaatgaagaaaccatgcctggaggggccg

SEQ ID NO: 3556 - DNA, 339 bp, Homo sapiens
  misc_feature 1..339: note = U/M: U (0.28:0.84) in Vascular Endothelial cells
  misc_feature 1..339: note = source = chr20:38024079-38024417; Gene: LOC339568 (Intergenic)
  source 1..339: mol_type = genomic DNA
cgtggagtagcagcggtggggattccagttcctatgtgagctcaagaacccagagtgtaggaagttcattttgacagactggtgggatgaagccaggacatggggcgggaaaaggttaggaaaggaaagagtgaatcagaggcgggggttctgtgggtggacaggcagctggacaggcagcagcagaagcgatgtaggacgcagcttgggggacagctgaagggctttggggttacagcagcggaagtgacttgagcagaggagggactctggacatcatggacaatggggcactgggaagtgaggagctggcggcagggtgggcacaggatgatgacg

SEQ ID NO: 3557 - DNA, 273 bp, Homo sapiens
  misc_feature 1..273: note = U/M: U (0.29:0.84) in Vascular Endothelial cells
  misc_feature 1..273: note = source = chr14:54016534-54016806; Gene: DDHD1 (Intergenic)
  source 1..273: mol_type = genomic DNA
cgggtgaaatgaggtaagtcctgggctgtaattcaggcctctagatgaaaaccaggaggaagtggctctagttttgcgatttgtgtctcttttggtcctcagtgtcctcattacaaaagtgagatggtctaatcaaagctccattccaggcccgttcatctgtgactctcctcttagaagctcattgccgaaaaaagcgttgtgtggaaaaatggtgctcagaaagcagtaacctcttttcacttgtgggctgactgaggaaacagccagccg

SEQ ID NO: 3558 - DNA, 376 bp, Homo sapiens
  misc_feature 1..376: note = U/M: U (0.31:0.82) in Vascular Endothelial cells
  misc_feature 1..376: note = source = chr1:212415240-212415615; Gene: PPP2R5A (Intergenic)
  source 1..376: mol_type = genomic DNA
cgaggatatccttcacccctagctattccttagagataataagtttgatgaggaggcagaacaattaggtgatgagtgagaattcttaagaagtgaaaataaaaatcctgagagtgtggatgtgcctggccagggtcatccatttttacaatgttttgacatccagtgaaaaaataattgcagtgaatctctccctgacttggcccccaaagaggcagacctaggtattttaggacctgagtcaagtttgaagaactgtgctgtctcttcccaaccttctcttcagagaactaaaccacgggggtaacaatcctgtaattttggccgtatttataaatccctgatcctttatgtagcgcattttttctactctgcg

SEQ ID NO: 3559 - DNA, 251 bp, Homo sapiens
  misc_feature 1..251: note = U/M: U (0.29:0.79) in Vascular Endothelial cells
  misc_feature 1..251: note = source = chr20:36763521-36763771; Gene: TGM2 (intron)
  source 1..251: mol_type = genomic DNA
cggaacaatgctctcagggtcccgatggtgacttagaggtgagggctgactccacagaggcctgggaggaagtgattttggtgtgtctggcccaggcctggagttcacctcatgccactcattctaggacagacactttctccccttggagcagctctgagcacgagaaggagctggtgggtgtgcactgaaacgatgggactgggtctccaatgtcaagcccaagacttcaccactgctcaatatatccg

SEQ ID NO: 3560 - DNA, 133 bp, Homo sapiens
  misc_feature 1..133: note = U/M: M (0.8:0.2) in Vascular Endothelial cells
  misc_feature 1..133: note = source = chr15:41219177-41219309; Gene: DLL4 (Intergenic)
  source 1..133: mol_type = genomic DNA
cgcagcatgaccctctcctgctcagcaaatgtgggcaaagctcgaccgcagcgtgtgggagcgctcgtaggtacccagggccaagggtggcagtgtcctagcccgggaatgagcttctgggacagcgcctccg

SEQ ID NO: 3561 - DNA, 126 bp, Homo sapiens
  misc_feature 1..126: note = U/M: M (0.73:0.14) in Vascular Endothelial cells
  misc_feature 1..126: note = source = chr5:10288725-10288850; Gene: CMBL (intron)
  source 1..126: mol_type = genomic DNA
cgttggcgattctggctcagagaaaaggaaaagtagtgggtgtgaaggccaattttgatcgcagcaaagcagccacctggcaccgggccaagccctcttaggtttcacaaccgcaggtgcacagcg

SEQ ID NO: 3562 - DNA, 253 bp, Homo sapiens
  misc_feature 1..253: note = U/M: M (0.67:0.08) in Vascular Endothelial cells
  misc_feature 1..253: note = source = chr16:75142901-75143153; Gene: ZNRF1 (exon)
  source 1..253: mol_type = genomic DNA
cggaggctgcaaggatgtgggttcttccaggtgtgggcccagcccccctccttccagcctttgctccccatcccacgttccactcgccctgcctgttgttcagtttgcgtctcagtgctgactcacgggcatgcttcattgaggcccaggaagaggccctggtttggggctgtgccagctcagagcccttgaaccagaaccaactgctcaggctcacaaaagttggcaaaatgcgggctgggcaggcagctcg

SEQ ID NO: 3563 - DNA, 170 bp, Homo sapiens
  misc_feature 1..170: note = U/M: M (0.65:0.12) in Vascular Endothelial cells
  misc_feature 1..170: note = source = chr19:46094335-46094504; Gene: GPR4 (exon)
  source 1..170: mol_type = genomic DNA
cgcgctcctcgaagccgcagtcccaggggcggcccaggtagatggcgctgcgggacagcaagagcacgtgatagggcgcaaagcagaccagcacgatggcgatgaggctgagggccagccgcttgatcttggccttctcctggcgctcggtggacacgctgccccgcacg

SEQ ID NO: 3564 - DNA, 38 bp, Homo sapiens
  misc_feature 1..38: note = U/M: M (0.67:0.15) in Vascular Endothelial cells
  misc_feature 1..38: note = source = chr1:6535629-6535666; Gene: PLEKHG5 (intron)
  source 1..38: mol_type = genomic DNA
cgccagcgtgggcggcgagtgggcctgtggcctccccg

SEQ ID NO: 3565 - DNA, 241 bp, Homo sapiens
  misc_feature 1..241: note = U/M: M (0.68:0.16) in Vascular Endothelial cells
  misc_feature 1..241: note = source = chr19:8398351-8398591; Gene: KANK3,KANK3 (intron,exon)
  source 1..241: mol_type = genomic DNA
cgggagaacatggaacggggaaaggcaatgaacgcttgcccttggggagtccgggagtggggctggggccgggcctttttggggaaaccaaggaaagatcggcgctgtcctgggaaggagatcccttcggagagcctggggtcaggcgaggtgcctggcgggaagggatggaacccggtgtgctcccctaagtgggcgtcagaggtccttggaggctcccacgccactccctggtgctgcg

SEQ ID NO: 3566 - DNA, 194 bp, Homo sapiens
  misc_feature 1..194: note = U/M: M (0.63:0.13) in Vascular Endothelial cells
  misc_feature 1..194: note = source = chr15:90728654-90728847; Gene: SEMA4B (intron)
  source 1..194: mol_type = genomic DNA
cggaatggtcgtggatatgacctccgagttaggccctttgtcatggcttctttcttctcactgagcaccaaggtgctagaaggagaaggctagaaggagaaggaagttgaggttctgggcatgaagctgcagttgcggctactcgggagttattctggtctagcagaaaggcgaaggagccctgggtcatctcg

SEQ ID NO: 3567 - DNA, 148 bp, Homo sapiens
  misc_feature 1..148: note = U/M: M (0.61:0.13) in Vascular Endothelial cells
  misc_feature 1..148: note = source = chr3:129063124-129063271; Gene: H1FX (Intergenic)
  source 1..148: mol_type = genomic DNA
cgccagaccgcctgtcaggggctgccctggagcctggcaccttacccttgcaccctgtctgcccctcgggggccatgctgtccacgctgaccctgactcgagacattgggatgcctgtccacgcctccactcctgggccacttccccg

SEQ ID NO: 3568 - DNA, 168 bp, Homo sapiens
  misc_feature 1..168: note = U/M: M (0.7:0.23) in Vascular Endothelial cells
  misc_feature 1..168: note = source = chr19:8399168-8399335; Gene: KANK3,KANK3 (exon,intron)
  source 1..168: mol_type = genomic DNA
cggcagaagctgccacaggaggggaaaggcgctcactctccgttgaggaccccaacaaactgcaggctcttgggtccggagctgggttgggcaccaggtgtgccgtctctcttcttcatgatggatttgaggatgcctggcggggatgagatgagggcactgagttcg

SEQ ID NO: 3569 - DNA, 40 bp, Homo sapiens
  misc_feature 1..40: note = U/M: M (0.63:0.21) in Vascular Endothelial cells
  misc_feature 1..40: note = source = chr19:46094508-46094547; Gene: GPR4 (exon)
  source 1..40: mol_type = genomic DNA
cgcaggatgccccggtacgacagcagcatgagcgcccacg

SEQ ID NO: 3570 - DNA, 127 bp, Homo sapiens
  misc_feature 1..127: note = U/M: M (0.59:0.17) in Vascular Endothelial cells
  misc_feature 1..127: note = source = chr3:193922356-193922482; Gene: HES1 (Intergenic)
  source 1..127: mol_type = genomic DNA
cgcaaaataaaagccgtcccgcttcttgccccggcccccgccgcccctcccggctcccctgacttccaagcccctgtgggaacctgggagggacgctcttctctcaataaaaacgcttatgagcccg

SEQ ID NO: 3571 - DNA, 81 bp, Homo sapiens
  misc_feature 1..81: note = U/M: M (0.63:0.24) in Vascular Endothelial cells
  misc_feature 1..81: note = source = chr8:49782523-49782603; Gene: SNAI2 (Intergenic)
  source 1..81: mol_type = genomic DNA
cgtgtgctgcgtgtgaagatgaaggtgtgcacagagacgcatgcagagtgcacagggagcaagagtggccgtggggggccg

SEQ ID NO: 3572 - DNA, 119 bp, Homo sapiens
  misc_feature 1..119: note = U/M: M (0.58:0.2) in Vascular Endothelial cells
  misc_feature 1..119: note = source = chr17:65242623-65242741; Gene: HELZ (Intergenic)
  source 1..119: mol_type = genomic DNA
cgaattgtattcggtacaaaatgctgttgaacggctctacctttagaagaccgcagaagcactggcattaaaaccctctttcggtgcacggggagggcctggggccttggatctacccg

SEQ ID NO: 3573 - DNA, 168 bp, Homo sapiens
  misc_feature 1..168: note = U/M: M (0.61:0.23) in Vascular Endothelial cells
  misc_feature 1..168: note = source = chr1:24119962-24120129; Gene: LYPLA2 (intron)
  source 1..168: mol_type = genomic DNA
cgactacctgggaccccgtcacaccaagcgctgggctctgcttctccattactggcgctttgccccaaccacagcctccagccccacgtggcaggttgcctggcaacaccttaaacacaggccctgcctgctgggaggggccaccaggggcggcgcggccccactccg

SEQ ID NO: 3574 - DNA, 214 bp, Homo sapiens
  misc_feature 1..214: note = U/M: M (0.56:0.18) in Vascular Endothelial cells
  misc_feature 1..214: note = source = chr7:150598713-150598926; Gene: ABP1 (Intergenic)
  source 1..214: mol_type = genomic DNA
cgaggggaggggtctggcagaggtccaatgcatcagagtgagccaggcttggggaactgtggagggggtgttccaaccgagggcgacagcttgatcgaaggcacacagttgagaaacatcactgcattctgtgctgggagctgtaatagtccagggtgcctggagtaaaatgtgacaggtgggcagttgcctggctgagcctggagagggcccg

SEQ ID NO: 3575 - DNA, 234 bp, Homo sapiens
  misc_feature 1..234: note = U/M: M (0.59:0.22) in Vascular Endothelial cells
  misc_feature 1..234: note = source = chr2:10261227-10261460; Gene: RRM2 (Intergenic)
  source 1..234: mol_type = genomic DNA
cgatgaatggcgagttgctttaaacaaatcatggtacaccaaagttttagttgtggctttgtgtaaggaatgtgatgggcacttattcctgcaacacgagaatactatgatttacaagtccgtagtacttttaagaaatgagagaaacagacctaggtggggagggtacctgtcccaccccaccctctttaaagtatcttatctagaaaaggctttgtgaaaaaaaaagtcccg

SEQ ID NO: 3576 - DNA, 100 bp, Homo sapiens
  misc_feature 1..100: note = U/M: M (0.66:0.3) in Vascular Endothelial cells
  misc_feature 1..100: note = source = chr19:55997002-55997101; Gene: NAT14 (intron)
  source 1..100: mol_type = genomic DNA
cgctgacctacttatgttctcaccaggtgcacgacgccagctcccttctggggggccggggcctgggggttgccatggcccccagccacctgtcagtgcg

SEQ ID NO: 3577 - DNA, 138 bp, Homo sapiens
  misc_feature 1..138: note = U/M: M (0.62:0.27) in Vascular Endothelial cells
  misc_feature 1..138: note = source = chr2:241519290-241519427; Gene: CAPN10 (Intergenic)
  source 1..138: mol_type = genomic DNA
cgaaatgactctgtggtctgcgggtgactccactccacgtgcctacagccacgcccacagcgccacctccggacgctgctgagctgcgcacctgtgcctgacacctggctttgggaaactcagcagcagtgcccagcg

SEQ ID NO: 3578 - DNA, 174 bp, Homo sapiens
  misc_feature 1..174: note = U/M: M (0.57:0.22) in Vascular Endothelial cells
  misc_feature 1..174: note = source = chr17:37828205-37828378; Gene: PGAP3 (exon)
  source 1..174: mol_type = genomic DNA
cgttcccctaacccacgctaacacacccaccccctgcacacacacactttgaagccacacctcttccccgacaacacccgtctccacactgcgcacctaggcctgagctcacacacacccaggcccatgctcacggccctgtcacctatgcactcagcctggcccacactcccg

SEQ ID NO: 3579 - DNA, 106 bp, Homo sapiens
  misc_feature 1..106: note = U/M: M (0.59:0.26) in Vascular Endothelial cells
  misc_feature 1..106: note = source = chrX:149529520-149529625; Gene: MAMLD1 (Intergenic)
  source 1..106: mol_type = genomic DNA
cgaactgtgtacccccagcctcgccctgttgggctgggcgcatcctggcagcgctggggctgcgaagccacagcccctgcatgtgcctcgcggttgggcctggacg

SEQ ID NO: 3580 - DNA, 224 bp, Homo sapiens
  misc_feature 1..224: note = U/M: M (0.61:0.19) in Vascular Endothelial cells
  misc_feature 1..224: note = source = chr6:150276493-150276716; Gene: ULBP1 (Intergenic)
  source 1..224: mol_type = genomic DNA
cgctatagtggatgtttcaccatcctctgcccaagctgggtcatcacaatcacagacaagagtgtcgccagcattgccatccgtgacatgagacgctttaaaggtgcattaatttgcacaacaattctgtgtctggaaatctattctacacaattaagttgagattcatgcaagcacagtttctgcagcatttagtttttctaaaagtaactgactggagaccg

SEQ ID NO: 3581 - DNA, 142 bp, Homo sapiens
  misc_feature 1..142: note = U/M: M (0.68:0.1) in Vascular Endothelial cells
  misc_feature 1..142: note = source = chr19:8399343-8399484; Gene: KANK3 (exon)
  source 1..142: mol_type = genomic DNA
cgccgagtaagccagggcccagcgacggggtcgggactcacccgcgggcgccacggccctgtctccgtccatggatccgggcgagctctcctgagtcaaggagggcgcctctgccggggactcggtctgcgcggccttttcg

SEQ ID NO: 3582 - DNA, 57 bp, Homo sapiens
  misc_feature 1..57: note = U/M: M (0.69:0.24) in Vascular Endothelial cells
  misc_feature 1..57: note = source = chr6:6002647-6002703; Gene: NRN1 (exon)
  source 1..57: mol_type = genomic DNA
cgcccagcttgagcaaacagtccgaaaagcccttgaagaccgcatcgcacttgcccg

SEQ ID NO: 3583 - DNA, 162 bp, Homo sapiens
  misc_feature 1..162: note = U/M: M (0.64:0.19) in Vascular Endothelial cells
  misc_feature 1..162: note = source = chr17:47296997-47297158; Gene: ABI3,ABI3 (exon,intron)
  source 1..162: mol_type = genomic DNA
cgccgcgacgccaactagcctagccctgccccgcgcgaccctgaaactctcctcccccagcctcgccacccacccctggcgcccccgggtgctcaggccgtcatgctggatgcctggcgccaaacctccccctcggccacctgcccttcctgctcgcacccg

SEQ ID NO: 3584 - DNA, 165 bp, Homo sapiens
  misc_feature 1..165: note = U/M: M (0.62:0.3) in Vascular Endothelial cells
  misc_feature 1..165: note = source = chr22:24627294-24627458; Gene: GGT5,GGT5 (exon,intron)
  source 1..165: mol_type = genomic DNA
cgggggccgggggtgcgggggagggggtgggcgccagggctctgggcaggggctttacctcttagcacgttgaggataaagctgagaatggcaccccctgcaggcggcggtggtgagtacagggtatagtcccccaggggcacctccagggcatccaccacctcg

SEQ ID NO: 3585 - DNA, 203 bp, Homo sapiens
  misc_feature 1..203: note = U/M: U (0.03:0.95) in Blood B cells
  misc_feature 1..203: note = source = chr17:74419888-74420090; Gene: UBE2O (intron)
  source 1..203: mol_type = genomic DNA
cggcacagtgtccgcaaaggaaccagaacacaggagaggagacttcctctcttcacaccaggtggctctcagctacttccaggttgggttctttttttttttttttttttttttgagacggagtctcgctctgtcacccaggctgtagtgctagtgcagcggcgcgatcttggctcactgcaagctccacctcccaagttcac

SEQ ID NO: 3586 - DNA, 229 bp, Homo sapiens
  misc_feature 1..229: note = U/M: U (0.02:0.94) in Blood B cells
  misc_feature 1..229: note = source = chr15:91138717-91138945; Gene: CRTC3 (intron)
  source 1..229: mol_type = genomic DNA
cgggaggtggagcttgcggtgaaccgagatcgcgccactgcactccagcctgggcaacagagcgagactccgtctcaaaaaaaaaaaaaaaaaaccaatgtatattttttcagttctcagttccctctttttcctgtcagtgctctcatttctatatattagattaaacattatgctatatatacgtgtgtgtatgtatatgtggctatctcagatacttttgaagtac

SEQ ID NO: 3587 - DNA, 296 bp, Homo sapiens
  misc_feature 1..296: note = U/M: U (0.03:0.95) in Blood B cells
  misc_feature 1..296: note = source = chr19:16554452-16554747; Gene: EPS15L1 (intron)
  source 1..296: mol_type = genomic DNA
cggaggttgcagtgagccgagatcgtaccactgcactccagcctgggtgacaagagtgaaactctgtctcaaaaataaaaagaaaaaaataataatgcccggattatggtcagcgtctctgggggacgccaacacctgtgaatgtataaagaagtgaaagttgtaatcccaaacagcactttgggaggccgaggcaggcagatcacgaggtcaggagctcaagatcagtctggccaacatagtgaaaccccgtctctactaaaaatacagaaaattagtcaggtgtggtggtgtgc

SEQ ID NO: 3588 - DNA, 385 bp, Homo sapiens
  misc_feature 1..385: note = U/M: U (0.02:0.94) in Blood B cells
  misc_feature 1..385: note = source = chr15:50736822-50737206; Gene: USP8 (intron)
  source 1..385: mol_type = genomic DNA
cgctccctgcaaaggctcaggtaacttaggccattatttcatatgattcagtagttcatttcctgtttttcagtaaaaggatcattttcatttgctctgtccagaggatctcatctgcttctgtcttagaactgttttttgtttgttctgagacagaatctcacttccgtcacccaggttggagtgcggtgggcacagtcatggttcactgcagcctcgacttcctgggctcagctgattctctcacctcagcctccagagtagctgggagtacagacacgcaccaccacacctggctaattttttaatttttagtggaaacgaggtcttaccctgttgcccaggttagtcttgaactcctgggctcaggtggtctgcctgcctc

SEQ ID NO: 3589 - DNA, 279 bp, Homo sapiens
  misc_feature 1..279: note = U/M: U (0.01:0.91) in Blood B cells
  misc_feature 1..279: note = source = chr21:44800830-44801108; Gene: SIK1 (Intergenic)
  source 1..279: mol_type = genomic DNA
cggtgtggcctcctgcggtgtttcggttttgtgtaaatggggtccccgctgccccctcccatgctcctgcactgggccatgccgagcagtgtgtggtcagggctgtcccgcctgggtgggtgtttgggggtttccggtgtgggctgtgtgggccggagctgccgagagcgggcttctgatttctggttcacggatgtgctgccgggccccaagggtgtgttagttctgcgttagccaaagcaccaagacgatgatgtccccagccggactaagaagcac

SEQ ID NO: 3590 - DNA, 287 bp, Homo sapiens
  misc_feature 1..287: note = U/M: U (0.02:0.92) in Blood B cells
  misc_feature 1..287: note = source = chr16:29348723-29349009; Gene: SNX29P2 (intron)
  source 1..287: mol_type = genomic DNA
cgtgggtaccctgagccagtgctgcatgacctgggcagactccctataaaggcgaactcgcattctgcggcgatgctgcctctggaatgatgagtgcatgcgagctgcatggctggactctaccagcatctgcgcaagccacagcaggaagcagctttccatcgcggttctagaaccctcctctctcactcatgcgtgtgcacacacacagtcggaacaggtccacaggacaacaggctacagcgagaaggcagctttccattgtggttccagagccctcctccctc

SEQ ID NO: 3591 - DNA, 361 bp, Homo sapiens
  misc_feature 1..361: note = U/M: U (0.03:0.93) in Blood B cells
  misc_feature 1..361: note = source = chr11:45960244-45960604; Gene: PHF21A (intron)
  source 1..361: mol_type = genomic DNA
cgatatactgtaataaaagatgggaatgaggtctatcttcttttttctttctcaaaacatcttaatattttcagactgcagttgactatgcgtaactgaaacaataagaagtgaaacttcagataagggggagactagtgtattcttttttttttttttgagacagagtctcgctctgtcacccaggctggagtgcagtggcgcgatctcagctcactgcaagctccgcctcccaggttcacgccattctcctgcctcagcctccagagtagctgggaccacaggcacctgccaccacccccgactaattttttgtatttttagtagagacggggtttcacgtgttagccaggatggtctc

SEQ ID NO: 3592 - DNA, 131 bp, Homo sapiens
  misc_feature 1..131: note = U/M: U (0.02:0.91) in Blood B cells
  misc_feature 1..131: note = source = chr4:38764383-38764513; Gene: TLR10 (Intergenic)
  source 1..131: mol_type = genomic DNA
cgcgagctagaggggagtagactacggcagcatggggagaggagctgacaggaagctgtccggcacctgcgagaatctcaggttcgaatggaaatattcgtgtgcacgtttgcaggagggtgagaggcccc

SEQ ID NO: 3593 - DNA, 173 bp, Homo sapiens
  misc_feature 1..173: note = U/M: U (0.02:0.91) in Blood B cells
  misc_feature 1..173: note = source = chr12:65007600-65007772; Gene: RASSF3 (intron)
  source 1..173: mol_type = genomic DNA
cgcctgtagtcccagctactcgggagactgaggtgggagcattgcttaaggccgggaggcagaggttgcagtgagctgtgatcgcaccactgcactccagcctgggcaacagagcgagaccctgtctcaaaaacaaaactgtctaaaagatataaagggaacgaacatatgac

SEQ ID NO: 3594 - DNA, 89 bp, Homo sapiens
  misc_feature 1..89: note = U/M: U (0.06:0.95) in Blood B cells
  misc_feature 1..89: note = source = chr16:71762004-71762092; Gene: AP1G1 (TTS)
  source 1..89: mol_type = genomic DNA
cgcaccactgcactccagctgggtgacacagcgagactctgtcttaaaaaaagacaagccaggtgcggtggcttacgcctgtaatcccc

SEQ ID NO: 3595 - DNA, 162 bp, Homo sapiens
  misc_feature 1..162: note = U/M: U (0.04:0.92) in Blood B cells
  misc_feature 1..162: note = source = chr16:85944509-85944670; Gene: IRF8 (intron)
  source 1..162: mol_type = genomic DNA
cgtctcacactgataaacttcataaggtaagttgtcgactgaggaagcggcatgagaagggaaagagcagaggctggcccagcgtgcccctgtggacactgtgcacctttaggcggtttgtgattacggctggtgcccactgggcatcagtgagggtgctgc

SEQ ID NO: 3596 - DNA, 211 bp, Homo sapiens
  misc_feature 1..211: note = U/M: U (0.05:0.92) in Blood B cells
  misc_feature 1..211: note = source = chr7:97943968-97944178; Gene: BAIAP2L1 (intron)
  source 1..211: mol_type = genomic DNA
cgcatcactgagcccagctgtcctgatgcgcgtgaatgggggcccgtgggctggggcagagctgcccgtgacccccggacacggacccatgaagggagcatctcaaatcgcccaggtggggtagacctgggcccgctgggactcaccagcagccatggtgaagacactgatgctgaggacacatcagaaagggcctggggaaagctgactc

SEQ ID NO: 3597 - DNA, 343 bp, Homo sapiens
  misc_feature 1..343: note = U/M: U (0.09:0.96) in Blood B cells
  misc_feature 1..343: note = source = chr13:111328090-111328432; Gene: CARS2 (intron)
  source 1..343: mol_type = genomic DNA
cgcgtggttattcactaaggagatctgtaacactgaaacgctaggaacagtctaaacgcgcggctgggtaccctgctgcctgcagagggtcaggccacacaaaccagcaccacggtaacaaactaaccgtgggccaggcgcagtggctcacacctgtaatcccagcactttgggaggccaaggcgggcggattacctgaggtcaggagatcgagaccagcctgaccagcagggagaaatcccgtctctactaaaaatacaaaattagccggggtggtggcgcatgccagtaatcccagctactcaggaggatgaggcaggagaatcgcttgaacctgggaggc

SEQ ID NO: 3598 - DNA, 213 bp, Homo sapiens
  misc_feature 1..213: note = U/M: U (0.06:0.92) in Blood B cells
  misc_feature 1..213: note = source = chr11:82777661-82777873; Gene: RAB30 (intron)
  source 1..213: mol_type = genomic DNA
cggctcacagcagcttccgcctcctgggttgaagtgattctcctgcctcagcctcctgagtagctgggactacaggcatgcaccactacacccccgcctaattttgtatttttagtagagacggggtttcaccatgttggccacgctggccttgaactcctgacctcaggtgatccacccacctcagccacccaaagtgtggggattacaggc

SEQ ID NO: 3599 - DNA, 177 bp, Homo sapiens
  misc_feature 1..177: note = U/M: U (0.09:0.95) in Blood B cells
  misc_feature 1..177: note = source = chr16:21657961-21658137; Gene: IGSF6 (intron)
  source 1..177: mol_type = genomic DNA
cgagatggattggagtagttcttttgtttttctgagatggagtcttgctttgttgcccagactggagtgcagtagtgcgatctcggttcactgcaaccttcgcctcctgggttacaagcgattctcctgcctcaacctcccaagcagctgggactacaggtgcatgccaccatgcgc

SEQ ID NO: 3600 - DNA, 230 bp, Homo sapiens
  misc_feature 1..230: note = U/M: U (0.03:0.89) in Blood B cells
  misc_feature 1..230: note = source = chr1:101712282-101712511; Gene: S1PR1 (Intergenic)
  source 1..230: mol_type = genomic DNA
cggagtctcactctgtcgctcaggctggagtgcagtgatgcgatctcggctcactgcaacttctgcctctcaggttcaagcgattttcctgcctcagcctcatgagtagctgagattacaggcgtgtgccactacgccaggctaatttttctgtttttagtagagacggggtttcaccacgttggccaggctggtctcgaactcctgggctcaagcgacccacctgcctc

SEQ ID NO: 3601 - DNA, 185 bp, Homo sapiens
  misc_feature 1..185: note = U/M: U (0.1:0.95) in Blood B cells
  misc_feature 1..185: note = source = chr8:38134856-38135040; Gene: WHSC1L1 (intron)
  source 1..185: mol_type = genomic DNA
cgcgaccttggctcactgcaacctctgcctcccagtttcaagcgattcttctgcctcagcttcctgagtagctgagattacaggtgcgtgccaccacgcccagctaatttttgtatttttagtagagatggggtttcaccatgttggtcaggctggtcttaaaactcctgaccttgtgatccacc

SEQ ID NO: 3602 - DNA, 298 bp, Homo sapiens
  misc_feature 1..298: note = U/M: U (0.05:0.9) in Blood B cells
  misc_feature 1..298: note = source = chr12:131464806-131465103; Gene: GPR133 (intron)
  source 1..298: mol_type = genomic DNA
cgcctggctaattttttgtatttttagtagagacggggtttcaccatgttagtaaagatggtctcgatctcctgacctcatgatccacccgcctcggcctccctaagtgctgggattacaggcgtgagccaccatgcctggaccctcttttttttgagacagagtcttgctctgttgcccaggctggagtgcaatggcgtggtctcggctcactgcaacctctgcctccgtggttcaaacaattctcctgcctcagcctcctgagtagctgggactacaggtgcatgccaccacaccc

SEQ ID NO: 3603 - DNA, 147 bp, Homo sapiens
  misc_feature 1..147: note = U/M: U (0.09:0.93) in Blood B cells
  misc_feature 1..147: note = source = chr10:45390700-45390846; Gene: TMEM72-AS1 (intron)
  source 1..147: mol_type = genomic DNA
cgggcccagtgctgtgcccagcacccacatattccatcttcatttagcagtgactgcggacccagtacccgcacattccgacttcctttagcagatactggcaggtgccactcctgctttgcctgcagagatggtcctttgctttcc

SEQ ID NO: 3604 - DNA, 242 bp, Homo sapiens
  misc_feature 1..242: note = U/M: U (0.11:0.93) in Blood B cells
  misc_feature 1..242: note = source = chr6:64375368-64375609; Gene: PHF3 (intron)
  source 1..242: mol_type = genomic DNA
cgctttgtggtttttttttgttttttttttttttttttgagacagagtcttgctctgttgcccaggatggactgcagtggtgtgatcttggctcactgcaacctccgcctccggcttcaagcaattcttttgcctcagccacccaagcagctgggattacaggtgcctgccaccacacctggctaatattgttgtcttttttagtagagacggggcttcatcatgttggccaggctagtttc

SEQ ID NO: 3605 - DNA, 429 bp, Homo sapiens
  misc_feature 1..429: note = U/M: U (0.11:0.92) in Blood B cells
  misc_feature 1..429: note = source = chr3:42705063-42705491; Gene: ZBTB47 (intron)
  source 1..429: mol_type = genomic DNA
cgacccccattccccacctaagccttgggtgcttgtggcctctcctcttgtgcccatgtactgcccacccagatgcacctcggcttgccctcatgtccccatctccttgcccaggagcccctgagtgtgtccctccttggccctgtggccacaggggagctgttccctccacaaaggctgctcttctgctctgtgcctgggcctcacccccaaaccccacccccagaactgcaatgagcgcttccagtacaagtaccagctgcggtcacacatgagcatccacattggccacaagcagttcatgtgccaatggtgcggcaaggacttcaacatgaagcagtacttcgatgagcacatgaagacccacacaggtgcggctgcccctggggacggagctcggtgccgggcctgggaccccttctcagcccc

SEQ ID NO: 3606 - DNA, 420 bp, Homo sapiens
  misc_feature 1..420: note = U/M: U (0.12:0.92) in Blood B cells
  misc_feature 1..420: note = source = chr11:2414931-2415350; Gene: CD81 (intron)
  source 1..420: mol_type = genomic DNA
cgccaagtcccagaggctttgggagcgggtgaaggcggtgggtggcgggtggcaggtgcaggcggtgggtggtgggtgtggcaggtggcgggccccaccgcaggtgtcatccctgcgaagcacctgtcgccagcactcagagcgctcatgaggtgcccagtccccatgtggcctccttagtctccgtcctgtgtcatggaagaggtaactgaggcacagaaaactcaccaggccaggctgggatgtgaggtcccttgctgctcatccctggcagtcagcaaccctacatcttcccagctgggcggcccgtggtgggttcggcacccaggaccctccggggtcttgggctgtggcgagtgtgtaggcacccacctggtgtctctctccccgcaaggcatctacatcctcatcgctgtgggc

SEQ ID NO: 3607 - DNA, 321 bp, Homo sapiens
  misc_feature 1..321: note = U/M: U (0.16:0.94) in Blood B cells
  misc_feature 1..321: note = source = chr12:57681746-57682066; Gene: R3HDM2 (intron)
  source 1..321: mol_type = genomic DNA
cgtatgaaggacacactttaagtccattctaaggcagagaggtcccttaggtcttttttttttttttttttgagacagagtcttgctctgttgctcaggccggatggagtgcagtggcgtgatctcagctcactgcaacctccgcctcctgggttcaagcaattctctgcctcagcctcccgagaggcacccaccaccacgcctggctaatttttgtatttttagtagagacaaggtttcaccatcttggccaggctggtcttgaactcctgacctcgtgatccacccacctcggcctcccaatgtgctgggattacaggc

SEQ ID NO: 3608 - DNA, 355 bp, Homo sapiens
  misc_feature 1..355: note = U/M: U (0.02:0.94) in Blood B cells
  misc_feature 1..355: note = source = chr6:107096723-107097077; Gene: QRSL1 (exon)
  source 1..355: mol_type = genomic DNA
cgcaactgtcaattaatgaaagctacatctgaacaggcttcccacctttttcaattcaagctacagtgggttcttaaatgctcaatgagtgtcagaagcaaataatatactcagaagatgaaattttcacataaaatgaaagttttactaaggtatcttgcttcacttcgtcatcagatctgggagcacagatggtgtatttggaccagttaaaaacccctggagttattcaaaacaatatagagaaaagaggaagcagaatccccacagcgagaatgaagattcagactggctgataactggaggaagctcaggtgggagtgcagctgctgtatcggcgttcacatgctacgcg

SEQ ID NO: 3609 - DNA, 55 bp, Homo sapiens
  misc_feature 1..55: note = U/M: U (0.02:0.93) in Blood B cells
  misc_feature 1..55: note = source = chr19:1648937-1648991; Gene: TCF3 (intron)
  source 1..55: mol_type = genomic DNA
cgaggccccgggcctttacagcacccgtcagcggccggtaccccagggggctccg

SEQ ID NO: 3610 - DNA, 98 bp, Homo sapiens
  misc_feature 1..98: note = U/M: U (0.04:0.94) in Blood B cells
  misc_feature 1..98: note = source = chr2:198009875-198009972; Gene: ANKRD44 (intron)
  source 1..98: mol_type = genomic DNA
cgtggtggcacgcgcctgtggtcccagctactcggaaggctgaggcagaagaatcgcttgaacccaagaggcagaggttgcagtgagctgagatcacg

SEQ ID NO: 3611 - DNA, 87 bp, Homo sapiens
  misc_feature 1..87: note = U/M: U (0.02:0.91) in Blood B cells
  misc_feature 1..87: note = source = chr12:123305259-123305345; Gene: CCDC62 (intron)
  source 1..87: mol_type = genomic DNA
cgtgccgtaatcccagctactcgagaggctgaggcactagaatcgcttgaacccaggtggcggaggttgcagtgagccgagatcacg

SEQ ID NO: 3612 - DNA, 161 bp, Homo sapiens
  misc_feature 1..161: note = U/M: U (0.03:0.92) in Blood B cells
  misc_feature 1..161: note = source = chr21:34668541-34668701; Gene: IL10RB,IL10RB (intron,exon)
  source 1..161: mol_type = genomic DNA
cggatgagaatgatgtttttgacaagctaagtgtcattgcagaagactctgagagcggcaagcagaatcctggtgacagctgcagcctcgggaccccgcctgggcaggggccccaaagctaggctctgagaaggaaacacactcggctgggcacagtgacg

SEQ ID NO: 3613 - DNA, 340 bp, Homo sapiens
  misc_feature 1..340: note = U/M: U (0.02:0.91) in Blood B cells
  misc_feature 1..340: note = source = chr16:88079457-88079796; Gene: BANP (intron)
  source 1..340: mol_type = genomic DNA
cgtcttgggattggcagtgtcgcttcctcgtacttcagtgccctcttcactgcagtggggtggcagcagcacctgctcaggaagttggtgggcttcgctgggcgcacacggcccacctggcactcaccagcctccgggctgcccttggcaggtgccgtccacactccagcactcagggaggggcggtgcacatcctcaaaaactgaccacactggcactggtgcccaggtggtgagtaggcgggctgtggtctgcagacagaagctttaccctgtgcacatacgaggagtaactcatttgagtgacgtcactggactgcggcccttagagcctcctgacg

SEQ ID NO: 3614 - DNA, 355 bp, Homo sapiens
  misc_feature 1..355: note = U/M: U (0.03:0.92) in Blood B cells
  misc_feature 1..355: note = source = chr2:145319859-145320213; Gene: ZEB2 (Intergenic)
  source 1..355: mol_type = genomic DNA
cggtaaggttctgtggaacttctgttacaaaaatggagaaaccactgaaaactagtttggtttgagctcaagtatttttgtctcaatgagcttcaacttttgcttggtcctctgaagagtcagtgaaattttgagtttctaaatgataatagtgtatggtagttgcagccttagagcagagcacctgggagtggtggttttcttgtgcttcactcttcgaatctttcagaagagaagtgaaattgtataatcggagtctcattaatttacttagttttgacctgtattttttttttttttttttttttttgagacggagtctcgctctgttaccaggctggagtgcaatggctcg

SEQ ID NO: 3615 - DNA, 111 bp, Homo sapiens
  misc_feature 1..111: note = U/M: U (0.05:0.93) in Blood B cells
  misc_feature 1..111: note = source = chr19:38540408-38540518; Gene: SIPA1L3 (intron)
  source 1..111: mol_type = genomic DNA
cgcgttcccccgagagcacaggagggtcccgcttccccatacctctcgccactttgctgttgtcctgcttcccagtttcaccaatccgaagggtgtcaagtggggtctccg

SEQ ID NO: 3616 - DNA, 277 bp, Homo sapiens
  misc_feature 1..277: note = U/M: U (0.02:0.9) in Blood B cells
  misc_feature 1..277: note = source = chr12:132250981-132251257; Gene: SFSWAP (intron)
  source 1..277: mol_type = genomic DNA
cgacatggttgagtggcttttactctatagcagtgaatctaagagtttgccagcagtctcccccgtcagtgcacagtcacgccagcagcaaacactgcccgcgatttcaggggagcctctgcttcacggctgcccttatggggctggcaggagggcttggggagtgcctcccatgggtcctgctggggaaatgtggtggacacacttcactgaagccccgcctccgcagcagcaccagtattgcgctcacacgtggggcagaaatccttttgccacg

SEQ ID NO: 3617 - DNA, 293 bp, Homo sapiens
  misc_feature 1..293: note = U/M: U (0.03:0.91) in Blood B cells
  misc_feature 1..293: note = source = chr10:126289844-126290136; Gene: LHPP (intron)
  source 1..293: mol_type = genomic DNA
cgctgcagcgcagtgctgcccatggtttgtcggcccatattgtgggatctttcagattttctcaagaagccaggtttccagctcctaggtttgaaaagttctatgtgcgcttgaccggggggccttacgtacgtgaattgggtgagggcctgagacaggcgggtgagcacttgccccacactccagccaggattgggggttcaaggtaccgcatttgccacgtgagggagtctctggagaccaccaacccgctggtgggcggccaagcgtcaccaccagtccctctcagtgcg

SEQ ID NO: 3618 - DNA, 311 bp, Homo sapiens
  misc_feature 1..311: note = U/M: U (0.02:0.9) in Blood B cells
  misc_feature 1..311: note = source = chr19:2680895-2681205; Gene: GNG7 (intron)
  source 1..311: mol_type = genomic DNA
cgagctcgcatgagggtccccatgtcctacctccccgtgagcccttgtgattgtttgttgttctggttttttaattctagccatcttactgggcgtgaagtggtatctcaccatggctctgatttgcatttccctgaggactgacgcggagcatgttttgaagtgaaaccgacagtttttgtttctttgatcctcctgtgtaaccctcccaagtagctgggactacaggtgtgccccagcaggcctggctaatttttatttttattttttttgtagcaaccaactttttttattttattgtttttgagacg

SEQ ID NO: 3619 - DNA, 495 bp, Homo sapiens
  misc_feature 1..495: note = U/M: U (0.05:0.93) in Blood B cells
  misc_feature 1..495: note = source = chr6:99932478-99932972; Gene: USP45 (intron)
  source 1..495: mol_type = genomic DNA
cgcttgggcaacatagggagactccgtctctgcaaaaaaaatttaaaaattagccaagtgtagtggcacgtgcctgcagtccgagctactcaggaggctgaagtgggaggatcccttaagcccaggctgcaatgagccatgatggcaccactgcaccccagtgtgagtgacagaatgagactgtctccaaaaaaaaaaaaaaaagtgttttctcttctgctgtaaacttaaaactgctctaaaaaataaagtctatttttttttaaagtgttttctgccatgttaactgaaagttacctcaagggtcaaaagtaaaatctaaggtaattttaaacttcaagtaccaagttgcacttcccttttctcaatgaaaatattttttagacagaataaaaaaccttcagaatgagatgaggaaataaccttagttttaaaaagtacatttagacctggcgcagtggctcacgcctgtaatcctagcattttgggaggccg

SEQ ID NO: 3620 - DNA, 155 bp, Homo sapiens
  misc_feature 1..155: note = U/M: U (0.03:0.9) in Blood B cells
  misc_feature 1..155: note = source = chr12:113488772-113488926; Gene: DTX1 (Intergenic)
  source 1..155: mol_type = genomic DNA
cgcaccactgcactgaaacctgagcgatcgagcgagaccctgtctcttgaaaaagaagaagaatgtaataaacacctgtgaaaccactacccaaacaaaagctaggatcttgacagtgatttacatcttaccatatggccccccaacctgtggcg

SEQ ID NO: 3621 - DNA, 219 bp, Homo sapiens
  misc_feature 1..219: note = U/M: U (0.07:0.94) in Blood B cells
  misc_feature 1..219: note = source = chr1:185572197-185572415; Gene: HMCN1 (Intergenic)
  source 1..219: mol_type = genomic DNA
cggtggctcacatctgtaatcccagaacttctgggaggctgaggcggtggatcacttgagctcaggagttcaaaaccagcctgggcaacatggtaaaaccccatctttacaaaaatgcaaaaattagccaggtgtggtggtgcgtgccgtagtcccagctactctgtaggctaaggtgggaggatcgcttgagcccaaaaggctgcattgcagtgagcg

SEQ ID NO: 3622 - DNA, 304 bp, Homo sapiens
  misc_feature 1..304: note = U/M: U (0.06:0.93) in Blood B cells
  misc_feature 1..304: note = source = chr1:161675214-161675517; Gene: FCRLA (Intergenic)
  source 1..304: mol_type = genomic DNA
cgggcgtgatggcacgctcctgtagtctcagctactcgggaggctgaggcaggagaatggcttgaaccctggaggcagaggttgcagtgagccgagatcgcgctactgcactcaagcctgggcaacagagactccatctcaaaaaaaaaaaaaaattattaaggctagctaggcttttcttcctcttctgaggcttcacatcacatcagctgcaaggcttactgcctcactgccttccccagcacccatattcaaccacccctggactccctggggccacctgcacagaagcgtatgcctctcg

SEQ ID NO: 3623 - DNA, 167 bp, Homo sapiens
  misc_feature 1..167: note = U/M: U (0.03:0.89) in Blood B cells
  misc_feature 1..167: note = source = chr11:75535804-75535970; Gene: UVRAG (intron)
  source 1..167: mol_type = genomic DNA
cgcctcccgggttcacgccattctcctgcctcagcctccctagtagctgggactacaggcgcctgccaccacgcccggctaattttttgtatttttagtagagatggggtttcaccgtgttagccaggatggtctcgatctcctgacttcatgatacgcctgcctcg

SEQ ID NO: 3624 - DNA, 191 bp, Homo sapiens
  misc_feature 1..191: note = U/M: U (0.07:0.93) in Blood B cells
  misc_feature 1..191: note = source = chr17:76736048-76736238; Gene: CYTH1 (intron)
  source 1..191: mol_type = genomic DNA
cgctctgttgcccaggctgaagcgcagtggcgcgatctcggctcactgcaacctctgcctactgggttcaagcaattctcctgcctcagcctcccgagtggctgggattacaggtgcctgccaccatgctgagctaatttttgtatttttagtagaggcggggtttcaccatgttggccaggctggtctcg

SEQ ID NO: 3625 - DNA, 283 bp, Homo sapiens
  misc_feature 1..283: note = U/M: U (0.03:0.89) in Blood B cells
  misc_feature 1..283: note = source = chr8:28196033-28196315; Gene: PNOC (intron)
  source 1..283: mol_type = genomic DNA
cgcgggatgaaaaattaacaacacctaggtagatctttacatggtgaccttaaaataaacctgcagatttgactacatactttcacatccccaatttctttaacccatgtgacctcccacaagcctgaagagagaacaaaataaaattctttatgggtgacagtcatgagctgtgcttggctccaaaaacccgactaaagatgtaacaaggtgcggtgttgggcgcatttatcctgtgttaacttcctatgttaacgtgctgtgacaccagaggtaagttacg

SEQ ID NO: 3626 - DNA, 285 bp, Homo sapiens
  misc_feature 1..285: note = U/M: U (0.08:0.94) in Blood B cells
  misc_feature 1..285: note = source = chr12:112452758-112453042; Gene: ERP29 (intron)
  source 1..285: mol_type = genomic DNA
cgggtagatcacctgaggtcaggagtttgagaccagcctgaccaacaaggtgaaaccccgtccctactaaaaatacaaaaattagctgggcgtggtggtggacacctgtagtcccagctcctcgggaggcttagacaggagaattgcttgaacccaggaggcggaggttgcggtgagccaagatcacgccactgcactccagcctgggcgacagagcaaatactccgtctcaaaaaaaaaaaaaaaagtgtgggctgggtgcggtggctcatgcttgtaatcccg

SEQ ID NO: 3627 - DNA, 392 bp, Homo sapiens
  misc_feature 1..392: note = U/M: U (0.02:0.88) in Blood B cells
  misc_feature 1..392: note = source = chr17:62002915-62003306; Gene: GH1,CD79B (Intergenic,Intergenic)
  source 1..392: mol_type = genomic DNA
cgcacccggccctgagatggctttagaggcccctcagagaaacctcagccagaccagacacctactaagggacccaaatagccaccgttttttgcgttttgttttgtttttctctcgtttccaattctgctggaaaaacacccaaaaccttgggtcagatcaccccaaccctagcagcacctgcagcaagaggggaggaagtcaagctagaatggaggaggaacaagcctgtgcttcaaccagggtccctggggagctggctggattcccccagtgggcagtgaggcatgtgcccaccaggggcctcagagctgtgttctggggagggggcaggcagagggggcagctgtagagctggggtcctggagggatggcacagtggcttcctctcg

SEQ ID NO: 3628 - DNA, 141 bp, Homo sapiens
  misc_feature 1..141: note = U/M: U (0.02:0.87) in Blood B cells
  misc_feature 1..141: note = source = chr11:18251394-18251534; Gene: SAA4 (Intergenic)
  source 1..141: mol_type = genomic DNA
cggccaacatggtgaacccccttttttattaaaaacccaaaaattagccaggtgtggtggcccatgcctgtaatcccagctgctcggaagggtgaggtgaaaaaatcccctgaacccgggaggcggaggttgagtaacccg

SEQ ID NO: 3629 - DNA, 184 bp, Homo sapiens
  misc_feature 1..184: note = U/M: U (0.02:0.87) in Blood B cells
  misc_feature 1..184: note = source = chr21:44801137-44801320; Gene: SIK1 (Intergenic)
  source 1..184: mol_type = genomic DNA
cgtgcctgggcagagggctgtgctcgcccaaggacagcgacccgcgctccccacttcctctctggggactgggggtggaggtgccccagaggccccaccaaaggcagcctgaacgggcctcctgagccaatgcagggccccaggatactgctcggcagggccctggaatcgcttccccagcccg

SEQ ID NO: 3630 - DNA, 59 bp, Homo sapiens
  misc_feature 1..59: note = U/M: U (0.1:0.94) in Blood B cells
  misc_feature 1..59: note = source = chr2:128335752-128335810; Gene: MYO7B (exon)
  source 1..59: mol_type = genomic DNA
cgcccacatccgctcggccatgaagatcctccagttctccgactccgagagctgggacg

SEQ ID NO: 3631 - DNA, 103 bp, Homo sapiens
  misc_feature 1..103: note = U/M: U (0.04:0.88) in Blood B cells
  misc_feature 1..103: note = source = chr2:233989525-233989627; Gene: INPP5D (intron)
  source 1..103: mol_type = genomic DNA
cgcaaacgaggtcgcccagttgtcggctcgaaccagagcaatgcgacatgaggcccgcgcagtccaagaggtctgtttgggcccagggcctcttgaggcaccg

SEQ ID NO: 3632 - DNA, 183 bp, Homo sapiens
  misc_feature 1..183: note = U/M: U (0.05:0.89) in Blood B cells
  misc_feature 1..183: note = source = chr2:61691741-61691923; Gene: USP34 (intron)
  source 1..183: mol_type = genomic DNA
cgtacaccaggcgtggtggctcacgcctgtagtcccaggaggcggaggttgcagtgagcccaagatcgcaccactgcactccagcctgggcgaaagagcgagactccgtctcaaaaaaaaaaaaaaaaaaaaaaagaggtactatgtaattttcactctgctttcagagaaatttaccttacg

SEQ ID NO: 3633 - DNA, 297 bp, Homo sapiens
  misc_feature 1..297: note = U/M: U (0.09:0.93) in Blood B cells
  misc_feature 1..297: note = source = chr16:88079879-88080175; Gene: BANP (intron)
  source 1..297: mol_type = genomic DNA
cgtactcaaagcattagttaattaactaggaagtatcgtcttgtgaaaatgatgaccaggacggaaccttttaaagcaggtcatctgaacctcatcgctgtaaagcaatctgactacaaagttcattctttcacgtgaattaaacggtttggtaaagaaatactcagcataacgtggacgtgctctagtgatcttagggagctgtgagctcgtgcagtcttgggtgggagttggcattgtttatgttctttttttaattttttaaaaatgtttttaatttttattttttttgacacg

SEQ ID NO: 3634 - DNA, 169 bp, Homo sapiens
  misc_feature 1..169: note = U/M: U (0.04:0.87) in Blood B cells
  misc_feature 1..169: note = source = chr6:74013762-74013930; Gene: C6orf147 (intron)
  source 1..169: mol_type = genomic DNA
cgtggtggcaggcatctgtaatcccagctgctcgggaggctgatgcatgacaatcgcttgaacccaggaggcggaggttgcagtgagccaagatcatgccactgcacaccagcctaggtgacagagcaagactccatctcaaaaaaaaaagaaaaaaaattgttctacg

SEQ ID NO: 3635 - DNA, 171 bp, Homo sapiens
  misc_feature 1..171: note = U/M: U (0.05:0.88) in Blood B cells
  misc_feature 1..171: note = source = chr12:122447888-122448058; Gene: BCL7A (Intergenic)
  source 1..171: mol_type = genomic DNA
cgccacctggatgtgctgcagactgcaccacccccagcccaccggccagactggctgccctggagaaggcttagtgggtagtcccctgggcctggaccacggctgtccctgcacccgcgaggggatggggggagtggggcacatgcctcctggatgcgagggtggctgccg

SEQ ID NO: 3636 - DNA, 172 bp, Homo sapiens
  misc_feature 1..172: note = U/M: U (0.11:0.94) in Blood B cells
  misc_feature 1..172: note = source = chr11:35293206-35293377; Gene: SLC1A2 (intron)
  source 1..172: mol_type = genomic DNA
cggtgaaaccccatctctactaaaaatgcaaaaaattagccgggtgtggtgtcgtgcacctgtaatcccagctgctctggaggctgaggtgggagaatcgcttgggcctgagagacgaaggttgcagtgagccatgatagcgccactgcactccagcctgggcaacagagcg

SEQ ID NO: 3637 - DNA, 347 bp, Homo sapiens
  misc_feature 1..347: note = U/M: U (0.06:0.89) in Blood B cells
  misc_feature 1..347: note = source = chr9:136993737-136994083; Gene: WDR5 (Intergenic)
  source 1..347: mol_type = genomic DNA
cgtgggaggataccttgaggccaggagtttgagaccagcctgggcaacacagtaaaaccccatctctacaaaaaatttaaaaagttagccgggcatggtggtgcacacctgtagttccagctcgtcgagagactgaggcaggaggatcacctgcaccccgggggatcgaggctgcagtgaggtgtgaccgtgccactgcaccccagcttgggcaacagagtgagacttcatctccaataaacaaacccacaggcacttggggtccatcttttatttctgtcttagaaaccacggttgtgattcaaatgacctccacgctctggtagtccctgcctctctggtttccg

SEQ ID NO: 3638 - DNA, 408 bp, Homo sapiens
  misc_feature 1..408: note = U/M: U (0.08:0.91) in Blood B cells
  misc_feature 1..408: note = source = chr8:19467459-19467866; Gene: CSGALNACT1 (intron)
  source 1..408: mol_type = genomic DNA
cggtggctcacgcctgtaatcccagcagtttgggaggccgaggtgggtggatcacgaggtcaggagttcaagacgatcagcctggctaagatggtgaaaccccgtctctactaaaaatacaaaagttagccgggcgtggttgagggtgcctgtaaccccagctaaaaccccgtctctactaaaaatacaaaaattagccaggcgtggttgcgggtacctgtaaccccagctactcaggaggctgaggcaggagaattgcttgaaccaaggaggcggaggttccagtgagccaaaattgtgccactgaactccatcctgggcgacagagtacgactccgtctcaaaaaaaaaaaaaaaaaaaaaagatacagaagaggggaagggaagtgctgggtagaggtgaaggcg

SEQ ID NO: 3639 - DNA, 451 bp, Homo sapiens
  misc_feature 1..451: note = U/M: U (0.07:0.9) in Blood B cells
  misc_feature 1..451: note = source = chr3:66436552-66437002; Gene: LRIG1 (intron)
  source 1..451: mol_type = genomic DNA
cgtggacaaagttctccatgtctgcattggtcaggacttcattgtctttcttccaggcaaaggtcatgggggagctgctgctgctggctgctgagcatgtaaaccggatgtccttgcccaccatagccatggtggtttctggctgggtgatgatctgtggcttcaggaagtcatctggggagagaagggtcaactgtaaagcgctgggttcttggtacacagaggaaccagctgctgttcatgctaacagaaactgacacagacaccaagcaggaaccagagcttgaggtccctgtgcatcctcagccccaccaaccagatgccgtaagagttgcaccatggacatctgacctcatctaattagaagtctgtgagtactgatcacctttatgatcacactccttgattagaaattaacccaccacttctcagttctcaaaccagccagccg

SEQ ID NO: 3640 - DNA, 122 bp, Homo sapiens
  misc_feature 1..122: note = U/M: U (0.01:0.83) in Blood B cells
  misc_feature 1..122: note = source = chr16:87735396-87735517; Gene: KLHDC4 (Intergenic)
  source 1..122: mol_type = genomic DNA
cgtctgtgccccatgggacagaggcctccagctgcaccaccactgctcgttaacagctgccatccacaccgaggaagcctcttcgagcccagggagtggaggatggggctctgctgtgcacg

SEQ ID NO: 3641 - DNA, 157 bp, Homo sapiens
  misc_feature 1..157: note = U/M: U (0.11:0.93) in Blood B cells
  misc_feature 1..157: note = source = chr16:15101232-15101388; Gene: PDXDC1 (intron)
  source 1..157: mol_type = genomic DNA
cgtgttagccaggatggtgtcgatctcctggcctcgtgatctgcccacctcagcctcccaaagtgctgggattacaggtgtgagccactgcgcccagccgagcatgactatttttaaagttcatggtgcttctagcccaactgggaggactacatcg

SEQ ID NO: 3642 - DNA, 184 bp, Homo sapiens
  misc_feature 1..184: note = U/M: U (0.1:0.92) in Blood B cells
  misc_feature 1..184: note = source = chr3:16475405-16475588; Gene: RFTN1 (exon)
  source 1..184: mol_type = genomic DNA
cgtcttctcccgctcatgggtgggctgcacgaaggggtgcagggccgccagcgagaagccctgctggtacagctccaggagctgggcgggcaggtcacgcagggaggccagcctcactgctgaggacccagggagctccgctggagtggagagaggagaggctcatcaaagacccatcacaacg

SEQ ID NO: 3643 - DNA, 213 bp, Homo sapiens
  misc_feature 1..213: note = U/M: U (0.09:0.91) in Blood B cells
  misc_feature 1..213: note = source = chr16:68104804-68105016; Gene: DUS2L,DUS2L (intron,exon)
  source 1..213: mol_type = genomic DNA
cgtgatggggacacccctaaccctctggttgctttttagcggaggatctcatgaccacatccaacagtattcggacatagaggactttcgacaagccacggcagcctcttccgtgatggtggcccgagcagccatgtggaacccatctatcttcctcaaggagggtctgcggcccctggaggaggtcatgcagaaatacatcagatacgtacg

SEQ ID NO: 3644 - DNA, 222 bp, Homo sapiens
  misc_feature 1..222: note = U/M: U (0.11:0.93) in Blood B cells
  misc_feature 1..222: note = source = chr1:178574833-178575054; Gene: C1orf220 (Intergenic)
  source 1..222: mol_type = genomic DNA
cggagcttgcagtgagtcgagatcgcgccattgtactccagcctggcgacagagcaagactctgtctcaaaaaaaaaaaaaaaaaaaaaaaaaagcatctacacagcattattctgtgcaaaacacagcccacagcaggtttccagttgtcagaactgactccccagtgtgagctcctccactcctcacctgtcattaagggcgtcatttccatagagaacg

SEQ ID NO: 3645 - DNA, 303 bp, Homo sapiens
  misc_feature 1..303: note = U/M: U (0.12:0.94) in Blood B cells
  misc_feature 1..303: note = source = chr3:20168036-20168338; Gene: KAT2B (intron)
  source 1..303: mol_type = genomic DNA
cgggcatggtggctcatgcctgtaatcccagcattttgggaggctgaggtgggaggatcacctgaggttgagagtttgtgaccagcctgaccaacatggagaaaccccgtctctactaaaaatacaaaattagccaggcctggtgacacatgcctgtaatcacggctacttgggaggctgaggcaggagaattgcttgaacccaggaggcggaggttgtggtgagccgagaccgtgccattgcactccagcctgggcaacagagcgaaactccatttcaaaaaaaaaaaaaaaaaaacccacg

SEQ ID NO: 3646 - DNA, 147 bp, Homo sapiens
  misc_feature 1..147: note = U/M: U (0.1:0.91) in Blood B cells
  misc_feature 1..147: note = source = chr6:132005035-132005181; Gene: ENPP3 (intron)
  source 1..147: mol_type = genomic DNA
cgcccaccaccacgcctggctaatttttttgtatttttagtagcgatggggtttcaccgtgttagcccggttagtctcaatctcctgactttgtgatccgcccacctcggcctcccaaagtgctgggattacaggagtgcgccaccg

SEQ ID NO: 3647 - DNA, 164 bp, Homo sapiens
  misc_feature 1..164: note = U/M: U (0.09:0.9) in Blood B cells
  misc_feature 1..164: note = source = chr6:43352107-43352270; Gene: ZNF318 (Intergenic)
  source 1..164: mol_type = genomic DNA
cgtgccgccatgcctggctaatttttttggggttttttttgtattttttagtagagacggggtttcaccatgctaggcaggatgatctcgatctcctgacctcgtgatccacctgcctcggcctcccaaagtgctgggattacaggcatgagccaccgggcccg

SEQ ID NO: 3648 - DNA, 168 bp, Homo sapiens
  misc_feature 1..168: note = U/M: U (0.08:0.89) in Blood B cells
  misc_feature 1..168: note = source = chr7:403585-403752; Gene: LOC442497 (Intergenic)
  source 1..168: mol_type = genomic DNA
cgagtaacggttctgtaacatccactcaggctccgaagccacgtgcgactgcccagcaggcccctgggacacaccagaggctgagttcatgcacctgcccaggacacgcacgagcacccacgtctgcaatactggtgaccgcaagaagctggagaccatgcaaacgcg

SEQ ID NO: 3649 - DNA, 170 bp, Homo sapiens
  misc_feature 1..170: note = U/M: U (0.09:0.9) in Blood B cells
  misc_feature 1..170: note = source = chr13:100082003-100082172; Gene: MIR548AN (Intergenic)
  source 1..170: mol_type = genomic DNA
cgcttcattttctcattaaaaatgagtgattttcagccaggggtggtggcatgtgccagtagtcccagctacttgggaggctgagcggggaggatcgtttgagctcaggagtttgaagctgcagcgaaccgtgatcgtgatcgctccactgcacttcagcctgggcgacg

SEQ ID NO: 3650 - DNA, 200 bp, Homo sapiens
  misc_feature 1..200: note = U/M: U (0.09:0.9) in Blood B cells
  misc_feature 1..200: note = source = chr17:37706849-37707048; Gene: NEUROD2 (Intergenic)
  source 1..200: mol_type = genomic DNA
cggaggagaagggcagggttcagaggtatttctgtatgttttgacataaaataagtgccatggagattacatgcaaaatggcatgcaaatgaggcctggtgccttttggggtatgaatcgtagaaccttgcttttgcaagaaagggaacttggccaggtgcggtggctcacgcctataatcccagcactttgggaggccg

SEQ ID NO: 3651 - DNA, 201 bp, Homo sapiens
  misc_feature 1..201: note = U/M: U (0.07:0.88) in Blood B cells
  misc_feature 1..201: note = source = chr3:13127967-13128167; Gene: IQSEC1 (Intergenic)
  source 1..201: mol_type = genomic DNA
cgggcgtctttttcctgggagggtcagggcctttcttcaccctggttggagccactgcctatttctgtattgcggtgtatcgtggtaaatgcaaatcagacccatcccgccagcttcccactgcactcagaaccgaaagcctggttctgccccacagttctgccaccccgcacctgcctgctcccttccatgagagcctcg

SEQ ID NO: 3652 - DNA, 251 bp, Homo sapiens
  misc_feature 1..251: note = U/M: U (0.11:0.92) in Blood B cells
  misc_feature 1..251: note = source = chr2:3258229-3258479; Gene: TSSC1 (intron)
  source 1..251: mol_type = genomic DNA
cgtggtgcgtcatgccatgggatatcccgccgcagcaaagaggaaccagccactgaccagcacgcatggtggctggaacccaaacttgaaaatgaagcagcaactcaacctccagggaatcaagccgagtaaagaacatcagttattaaaggttacactgtgggtgattccatttatagaaccttctccaaataacaatacagagatagagtacagattcggggtggccaggggctaaggccttggaggcg

SEQ ID NO: 3653 - DNA, 322 bp, Homo sapiens
  misc_feature 1..322: note = U/M: U (0.07:0.88) in Blood B cells
  misc_feature 1..322: note = source = chr10:1618865-1619186; Gene: ADARB2 (intron)
  source 1..322: mol_type = genomic DNA
cggaggggcgctgtgcaccctccagttggagatggagcagctgtgtttcctgaagctttgagccctgaaacccacatccccagggtctctcaaggaaaggcccttggggacaatggctgcaaaacacattgaaggtggaggatgaggaggggcgtgtggacttcgtcaagtgcgattcagtctgctgtgtggccctggggcagcagctgcttgccctctccaagcctcagttccccttctggtcttggaggcagtgaggtgtctccaaggggctggggctgggtgacagcgggcctcaggctctgggtaggttgctggcccg

SEQ ID NO: 3654 - DNA, 356 bp, Homo sapiens
  misc_feature 1..356: note = U/M: U (0.07:0.88) in Blood B cells
  misc_feature 1..356: note = source = chr12:56769221-56769576; Gene: APOF (Intergenic)
  source 1..356: mol_type = genomic DNA
cgcctctactaaaaatacaaaagttagccaggtgtgatggcaggcacctgtaatctcagctactgcggaggctgaggcagggagaattgcttgagcccgagaggtggaggttgcagtgagctgagattgtaccactgcactccagcctgggtgacagcaagactctgtcaaaaaaaaaaaaaaagaaagaaagaaaaaaagaaatggttatgatgataaattttgttatgtgttttttttttcttttcttttgagacagggtctttgtcacccaggctggagtgcagtggggtgatcatggttcactgcagtctcgacatcctagactcaggtgatcctcccaccctagcctcccg

SEQ ID NO: 3655 - DNA, 371 bp, Homo sapiens
  misc_feature 1..371: note = U/M: U (0.05:0.86) in Blood B cells
  misc_feature 1..371: note = source = chr8:28195582-28195952; Gene: PNOC (intron)
  source 1..371: mol_type = genomic DNA
cgctatgatgaggagctctgcctactgactcacagcagtaaggtcaggttgaagtggggtttccagccggctaaggccagaaacctggactgaaattaggggtgaagccaaaacagcaaataggaagaaaagctgggggcagaggcttccaggagacccaatcagaaccaagaacgtgggaggtggggggccaaggtcagaaccagccaagaggggctggagaaacatcgtggtccagctggtggctagaagtcagggttggcaggagaggcagagcagagtgttcctaggagccgagcgggtctgctgggctctggtctgatgatggcatctctccccacacctggaactggatcacaggttcagccccg

SEQ ID NO: 3656 - DNA, 383 bp, Homo sapiens
  misc_feature 1..383: note = U/M: U (0.09:0.9) in Blood B cells
  misc_feature 1..383: note = source = chr5:157986713-157987095; Gene: EBF1 (Intergenic)
  source 1..383: mol_type = genomic DNA
cgtaaagaagagagtaaattatctgagaatatgagaatatacaggatgtaccagagcctgaatttgaacctaggcattccggcaccagagctgccttctgctttttttttttttagacagagtcttgctctgctctgttgcccaggctgcttgctggagcgcagcggtgcaatctcggctcactgcaacttttgcctcccgggttcaagcgatcctcctgcctcaacctcccaagtagctggttaagctgctttcttatagaaggaaaagttgagaaattaagggacttgcctatcatcacagaatatggaaatggcagagccatgattcaaaaccaggtctgtttggttttacattatgggaaaaccattatgggaaagtcg

SEQ ID NO: 3657 - DNA, 395 bp, Homo sapiens
  misc_feature 1..395: note = U/M: U (0.08:0.89) in Blood B cells
  misc_feature 1..395: note = source = chr4:15786449-15786843; Gene: CD38 (intron)
  source 1..395: mol_type = genomic DNA
cgtgggtggatgacgaggtcaggggattgagaccatcctggcaaacatggtgaaaccccgtctctactaaaaatacaaaaattagccgggtgtggttgcgtgcacctgtagtcccagctactcaggaggctgaggcaggagaatcgcttgaacctgggaggcggaggttgcaatgagctgagctcacgccactacactccagcctgggtgacagagcaagactctgtcttaaaaaaaaaaaatctcaggtgcacctgagacagattgaatgtggaaggggaagtgaaacaggccttccaggtgtggggcctgggtgctgctatagttacaaatggggaagtgagactataggtctcagttacctgtggaaggaagggtagagtggagtacttacg

SEQ ID NO: 3658 - DNA, 405 bp, Homo sapiens
  misc_feature 1..405: note = U/M: U (0.12:0.93) in Blood B cells
  misc_feature 1..405: note = source = chr15:85999841-86000245; Gene: AKAP13 (intron)
  source 1..405: mol_type = genomic DNA
cgcaatcttggctcactgcaaactgtggcctcccgggttcacaccattcttctgcctcagcctcccgagtagctgggactacaggcgcccgccaccacgcttggctaattttttatatttttagtagagatggggtttcaccgtgttagccaggatggtcttgatccactttctatttccttatagctcatgttgacagcttttctctccaacatgggtctactcatctcatgtaaaattattactatacgttcttgttgagatcatgaaccttctctaaaaatttcatgaggttgtggatttggagaagtattcctcagtccattcaatacaataacagtaatgactatagtttattatctactgtgagtcaggcaccaactgtagcgagacattctagttacg

SEQ ID NO: 3659 - DNA, 490 bp, Homo sapiens
  misc_feature 1..490: note = U/M: U (0.14:0.95) in Blood B cells
  misc_feature 1..490: note = source = chr11:70283519-70284008; Gene: CTTN (Intergenic)
  source 1..490: mol_type = genomic DNA
cgaagggagggggccatgcagaaagggcccccgctggcccactgtctgcccagtcggtgtgtgcctgtgccgcctgcggatgagcatggcaggggctcaacaggagcgggacacatcttgagtgggtctgtgtttctgttctattggtggccaagcgtggcctggcagcttgagtgcctggagccaaccacctgaatcttagccgctttctttttagatgtggttggggttttttgtttctgtttcttgagaaagggtcttgctctttcgcccaggctggagtacagtggcgtgatctccgctcctgcaacctgtgcacccagggctcaagcaatcctcccacctcagcctcccaagtagctgggactacaggtgcatgccaccacacctggctactttttgtatttttagtagggacgtggtttcaccatgttgcccaggctggtctagaacttctgacctcaagtgatctacctgcctcggccccccg

SEQ ID NO: 3660 - DNA, 95 bp, Homo sapiens
  misc_feature 1..95: note = U/M: U (0.02:0.82) in Blood B cells
  misc_feature 1..95: note = source = chr8:11351835-11351929; Gene: BLK (exon)
  source 1..95: mol_type = genomic DNA
cggctggagggcggggcccctgttgcacttgctcactggggactggggaggctctgatcgcagaccgggggtgctgccacctctgtctgctgccg

SEQ ID NO: 3661 - DNA, 295 bp, Homo sapiens
  misc_feature 1..295: note = U/M: U (0.12:0.92) in Blood B cells
  misc_feature 1..295: note = source = chr17:3493609-3493903; Gene: TRPV1 (exon)
  source 1..295: mol_type = genomic DNA
cgtctgctccgttctccaccaggagggtcaccagggccatgttgcgtctctcgatggcgatgtgcagtgctgtctggcctacagaggacgcgcacggttggcttcgtggtcacggtcctgtggggctgccgggacaggtgctggggaagggctctgggcaggcagcagctgctgcaggaggaactgggcagaaagtgcctggaggacccccccactgcaggaggccaggccagggtcccccaaggggtcccagcaaggtcctgagacaggagacccctgggaacaggaaataacg

SEQ ID NO: 3662 - DNA, 309 bp, Homo sapiens
  misc_feature 1..309: note = U/M: U (0.11:0.91) in Blood B cells
  misc_feature 1..309: note = source = chr19:11548895-11549203; Gene: PRKCSH (intron)
  source 1..309: mol_type = genomic DNA
cgatggaacagacgagtacaacagcggcgtcatctgtgagaacacctgcaagtacgtgggtgacagtacccctcccatcaccccaccccaagactttgcctggctccacccagtgaatcgggcccactctctcttctgcttttctgtatcgggttctctgtctgtgccaggtgccttgtgaatcctaatccccacctttccctctagtctggaagcaggtaggattgtttcccgattcaacagatgggggaactcaagtttagaaagggaaatgacttccccagggtcacataggagatagcagagccg

SEQ ID NO: 3663 - DNA, 350 bp, Homo sapiens
  misc_feature 1..350: note = U/M: U (0.11:0.91) in Blood B cells
  misc_feature 1..350: note = source = chr21:46419673-46420022; Gene: LINC00162 (intron)
  source 1..350: mol_type = genomic DNA
cgggaggatgccccggggacctcacagctgttgttgcacccctaaaactccctctgcccagagtccttagggagtccgtgctgcgcaggtgctggggccgctgtgcggtgctgtccgagtcactgtgtggagcttagctcagcgctttgctttgagatcagccaggcaggaatatttacaccacagtaactggcaaacactgcacatgggcagccgggtgtcagatgggcaccctggcgctggagatttcactggccagacccccacccccaattccacaggaaacccaagagggacggtgctcaccgtcctcccctggtgggctctcagtccattcctgggtcacagcg

SEQ ID NO: 3664 - DNA, 492 bp, Homo sapiens
  misc_feature 1..492: note = U/M: U (0.12:0.92) in Blood B cells
  misc_feature 1..492: note = source = chr20:49427147-49427638; Gene: BCAS4 (intron)
  source 1..492: mol_type = genomic DNA
cggagtcgtctcgctctgtcgcccaggctggagtgcagtggcgcgatctcggctcactgcaagctccgcttcctgggttcacgccgttttcctggcgcagcctcccgagtagctgggactacagccgcccgcaacaacgcccggctaattttttgtatttttagtagagacggggtttcaccatgttggccaggatggtctcgatctcctgactttgtgatctgtccgcctcggcccctcaaagtgctgggattacaggtgtgagccaccatgcccggccatgaaaaaaatagttatgttagatggtgataaatgctaaagggaaaagtaaattggggcaggaggaccgggagtaggggagctatagggtcagggaaagcctcacctggaagaaatatttgagcaaaagctagaaggaagtgagagacaactttcaccagtaaagggaacagcaggtgcaaaggccctgcggtgaggctgtgggtggggacg

SEQ ID NO: 3665 - DNA, 89 bp, Homo sapiens
  misc_feature 1..89: note = U/M: U (0.11:0.9) in Blood B cells
  misc_feature 1..89: note = source = chr15:100055770-100055858; Gene: MEF2A (Intergenic)
  source 1..89: mol_type = genomic DNA
cgtgtctcagcctctcgagtagctgggactacaggcaggtgccaccacgcccggctaatttttgtatttttagtagagacggggtttcg

SEQ ID NO: 3666 - DNA, 115 bp, Homo sapiens
  misc_feature 1..115: note = U/M: U (0.04:0.83) in Blood B cells
  misc_feature 1..115: note = source = chr16:1530823-1530937; Gene: CLCN7 (Intergenic)
  source 1..115: mol_type = genomic DNA
cgcaacctctgcctcccaggttcaagcgattctcctgcctcagcctcccgagtagctgggattataggtgcgtgtcaccaagcctggctaattttttgtattttcggtagagacg

SEQ ID NO: 3667 - DNA, 150 bp, Homo sapiens
  misc_feature 1..150: note = U/M: U (0.06:0.85) in Blood B cells
  misc_feature 1..150: note = source = chr14:106285075-106285224; Gene: KIAA0125 (Intergenic)
  source 1..150: mol_type = genomic DNA
cgcacatggctcaggcagaggcctgagcggctgcctccgttggccagcaggctctgagagcactcgcccggcctgactgttcatccatcctttcacccggaggccagctgtggctgtctgtgctctcagaggggaggcgatggcaaggcg

SEQ ID NO: 3668 - DNA, 256 bp, Homo sapiens
  misc_feature 1..256: note = U/M: U (0.12:0.91) in Blood B cells
  misc_feature 1..256: note = source = chr5:132439040-132439295; Gene: HSPA4 (intron)
  source 1..256: mol_type = genomic DNA
cgcctagcccgaaaggccttcttcttcttttttttttttgagatgtagtctcgctctgttgcccaggctggagtgcagtggtgtgatctcggctcactgcaagctccgcctcctgggttcacgtcaaaggccttcttttaaaaatagtattcattatagttttggttccgaactagcatgctgaaacttcagctctcatatctaatgtaatttttttgcattgtgaaattatcttcctaagattttgtataaatcg

SEQ ID NO: 3669 - DNA, 313 bp, Homo sapiens
  misc_feature 1..313: note = U/M: U (0.11:0.9) in Blood B cells
  misc_feature 1..313: note = source = chr9:136826772-136827084; Gene: VAV2 (intron)
  source 1..313: mol_type = genomic DNA
cgcataagcctcagccagttttacttcccattgcaaacccctagccggtttgcctgcgaactcccaagccagctgcagaaaagacacaggacacaaccacggcccagtggctcagggagaagacccgggcttgcatgatgtacaccagggagcccacaggagcagagtggcccctcgttctggtggccacgcaggcctaggctgggaacagggagaccctcaccgtgagcctcatccacccagagggtgcccccaccctgactcctcaccccacggtggcccctgccagaacccagcatcatcccccatgccg

SEQ ID NO: 3670 - DNA, 92 bp, Homo sapiens
  misc_feature 1..92: note = U/M: U (0.06:0.84) in Blood B cells
  misc_feature 1..92: note = source = chr20:62702729-62702820; Gene: TCEA2 (intron)
  source 1..92: mol_type = genomic DNA
cgaggcggccgctgcacctggcagatgggactcgtgaggggctgcaaggacagcctttccttcccctcgaaggctgcatggggcctgggtcg

SEQ ID NO: 3671 - DNA, 240 bp, Homo sapiens
  misc_feature 1..240: note = U/M: U (0.05:0.83) in Blood B cells
  misc_feature 1..240: note = source = chr2:89305601-89305840; Gene: MIR4436A (Intergenic)
  source 1..240: mol_type = genomic DNA
cgagatggcgccattgcactccagcctggcagcagagtgagagaccgtcttaaaaaaaaaaaagaaccatcaaccagaaaaccacagccctgagaaaacagaaatagagtatttcaagctgttcagttggcgttaacaatggtaagtctacagctcattttcaagatatatatattctgtttaagggagtaaaagcacccatcacggttaatgtttcagagcctccaccacttctgatcg

SEQ ID NO: 3672 - DNA, 260 bp, Homo sapiens
  misc_feature 1..260: note = U/M: U (0.12:0.9) in Blood B cells
  misc_feature 1..260: note = source = chr1:25911759-25912018; Gene: MAN1C1 (Intergenic)
  source 1..260: mol_type = genomic DNA
cgattcacctgagagcacgcagcaggtgtgtggggaagccgggttttttgttttttattttttgttttttttttttgagacggagtctcactctgtcgcccaggctggagtgcagtggcacgacctcggctcactgcaagctccacctcctgggttcacgtcattctcctgcctcagcctcctgagtagctgggactacaggtgcctgccaccacgcctggctaactttttgtatttttagtagagacagggtttcaccg

SEQ ID NO: 3673 - DNA, 401 bp, Homo sapiens
  misc_feature 1..401: note = U/M: U (0.12:0.9) in Blood B cells
  misc_feature 1..401: note = source = chr3:169564165-169564565; Gene: LRRC31 (intron)
  source 1..401: mol_type = genomic DNA
cggtggctcacgcctgtaatcccagcattttgggaagcctaggcgggtggatcacctgaggtcaggtgtttgagaccagcctggccaacagggcgaaaccccgtctctaccaaaaatacaaaaattagccaggcgtggtggcatgcctctaatcccagctactcaggaggctgaggcaggagaatctgttgaacatggcaggcggaggttgcagtgagccaagatcatgctacttcattccagcctgggtgacagagtgaaactctgtctaaaaaaaaaaagaaagaaaatgcagacatgcacacacctcatgaggacaacaaccctcatctctccacacaccctctttccaccaatggaagtgtggacaggccacttctacaaacttcaggtctttctcg

SEQ ID NO: 3674 - DNA, 424 bp, Homo sapiens
  misc_feature 1..424: note = U/M: U (0.15:0.93) in Blood B cells
  misc_feature 1..424: note = source = chr1:181101405-181101828; Gene: IER5 (Intergenic)
  source 1..424: mol_type = genomic DNA
cgtaatctcgactcactgcaagctctgcctcctgggttcacaccattctcctgcctcagcctcccgagtagctgggattacaggcgcctgccaccacgcccaggtaatttttgtattttttttttgagacagagtcttgctctgttgcccaggctggagtgcagtggctcggctcactgcaagctgcgcctcccgggttcacgccattctcctgcctcagcctccccggcagctgggactacaggcacacgctgccacgcccggctaatttttgtatttttagtagagacggggtttcactgtgttagccagatggtctcgatctcctgaccttgtgatctgcctgccttggcctcccaaagtgctgggattacaggtgtgagccactgcgcccagcctaatttttgtatttttagtagagacg

SEQ ID NO: 3675 - DNA, 456 bp, Homo sapiens
  misc_feature 1..456: note = U/M: U (0.1:0.88) in Blood B cells
  misc_feature 1..456: note = source = chr19:35814453-35814908; Gene: CD22 (Intergenic)
  source 1..456: mol_type = genomic DNA
cggtatcttgtcatgggtttcaatttgcatttcactaatggctggtgatgtgagacatcttttcatgtgcttatttgccttctatataccttcttcagggaaaggtgtcatcatgtcttttgcctattttctaactggactgttttttatttatttatttatttatttatttatttatttatttatttagagacagagtctcactctgtcgcccaggctggagtgcagtggtgggatctcagctcactgcaacctccgcctcctgggctcaggtgactctcctgcctcagcttcctgagcagctgggattataggcgcacaccaccatgcctgctaatttttgtatttttagtagagatggggttttgccatgttggccaggctggtcttgaactcctgacctcaggtgatccactttgcttcccaaagtgctgggattacaggtgtgagccatcg

SEQ ID NO: 3676 - DNA, 466 bp, Homo sapiens
  misc_feature 1..466: note = U/M: U (0.13:0.91) in Blood B cells
  misc_feature 1..466: note = source = chr6:138241334-138241799; Gene: LOC100130476 (Intergenic)
  source 1..466: mol_type = genomic DNA
cgcactgggcagcaaattccaagcaacaaaggcaaccatgtgttcatcaatagagttctgtttttttgagtgtttgtgaaacactggactctctaaagtgcagtgcctagatgactctgacactaaaaaaatacataccatcagtaacctaaatcaccaaaggcctcctgctcagagatgtctatgaaggtggcaaatacccaatgctggcagagcatcagattcacctggggagcttttcgatgctacagacattcaacttctccagttcctcttcatcagatctctaggggtaggggctcaagcataaaaatcagtgtgaggttggaagccaaggttacagaggctacttgaaagcagtagttacagaaggccacccaaccgtgtgttctatttggacacctgtgagtgacagaagcgcatgtcatgtgctgcccttggtgggacaccacgcagacaacaaacg

SEQ ID NO: 3677 - DNA, 138 bp, Homo sapiens
  misc_feature 1..138: note = U/M: U (0.12:0.89) in Blood B cells
  misc_feature 1..138: note = source = chr2:45922768-45922905; Gene: PRKCE (intron)
  source 1..138: mol_type = genomic DNA
cgggtgtgatggtatgtgcttgtaatcccagctaatcaggaggctgaggcaggagaattcttgaacccggaggcggaggttgcagtgagctgagatcacgccactgaactccagcctgggcaatggagtgagactccg

SEQ ID NO: 3678 - DNA, 157 bp, Homo sapiens
  misc_feature 1..157: note = U/M: U (0.15:0.92) in Blood B cells
  misc_feature 1..157: note = source = chr9:645656-645812; Gene: KANK1 (intron)
  source 1..157: mol_type = genomic DNA
cggatcacctgagatcaggagttcgaaaccagcctggccaacgtggtgaaaccccatttctactaaaaatacggaaattagccgggtgtggtggtggcatgcacctgtaatcctgaccagccagctgagatcgtgccactgcacttcagcttgggcg

SEQ ID NO: 3679 - DNA, 286 bp, Homo sapiens
  misc_feature 1..286: note = U/M: U (0.13:0.9) in Blood B cells
  misc_feature 1..286: note = source = chr18:361310-361595; Gene: COLEC12 (intron)
  source 1..286: mol_type = genomic DNA
cgatctctccactaggccatggtccctctctctagtcatcgtttcctctccatttcccctgccaccaccctagtgtgagatcttttcatctcagtggaagcttcctcttccattcccactggaatctagcctcaccctttattaaaataccactgtcctcatgacatttgctaaaaaggaaaaaaacaaaacaacaagctttcaagaaggcactcttaactaaaggatgcgcgcatgaacacacacacccacactctccccagcccaccacacacacggaccagcg

SEQ ID NO: 3680 - DNA, 355 bp, Homo sapiens
  misc_feature 1..355: note = U/M: U (0.16:0.93) in Blood B cells
  misc_feature 1..355: note = source = chr12:122443613-122443967; Gene: BCL7A (Intergenic)
  source 1..355: mol_type = genomic DNA
cgatctcagctcactgcaacctccgcctcttgggttcaagcaatttttgtgcctcagcctcctaagtagctgggattacaggcatgtgccaccagccaccatgcctggctaatttttttttttttttttttttttgagacagagtctcgctctgtcgcacaggctggagtgcagtggtgcagtctcggctcactgcaaccttcaccagagaaactagcatctgagataactcagattatgtcccaggttcaagtgattctcctgcctcagcctcccaggatacagctgggattacaggcacacaccaccatgcctggctaatttttctattttcagtagagatgggatttcaccg

SEQ ID NO: 3681 - DNA, 114 bp, Homo sapiens
  misc_feature 1..114: note = U/M: U (0.12:0.88) in Blood B cells
  misc_feature 1..114: note = source = chr15:44886044-44886157; Gene: SPG11 (intron)
  source 1..114: mol_type = genomic DNA
cgggttcaagtgattctcgtgcctcagcttcccaagcagctgggtttacaggtgcatcctgccacgcccggcttttttcttttcttttttttttttgtatttttagtagagacg

SEQ ID NO: 3682 - DNA, 128 bp, Homo sapiens
  misc_feature 1..128: note = U/M: U (0.17:0.93) in Blood B cells
  misc_feature 1..128: note = source = chr9:136993014-136993141; Gene: WDR5 (Intergenic)
  source 1..128: mol_type = genomic DNA
cgctctgtcgcccaggctgcaatgcagtggcacgatctcggctcactacaacctccgcctcccaggttcaaacaattctcatgcctcagcctcccgagtagttgggagtacaggcccctgccaccacg

SEQ ID NO: 3683 - DNA, 211 bp, Homo sapiens
  misc_feature 1..211: note = U/M: U (0.18:0.94) in Blood B cells
  misc_feature 1..211: note = source = chr2:89159064-89159274; Gene: MIR4436A (Intergenic)
  source 1..211: mol_type = genomic DNA
cgcccattacgtttctgttctctttcccttagtggcattatttgtatcactgtgcatcaggaaagctggctacggcagcatcaatcgggcagacacagggtggccacggccactagcggcaaggcggctgccccaagagcgcggtggcatggccaccaaagccactcaatcgagaaagaccgcggctctgtctacagctcgcggtgccacg

SEQ ID NO: 3684 - DNA, 473 bp, Homo sapiens
  misc_feature 1..473: note = U/M: U (0.13:0.89) in Blood B cells
  misc_feature 1..473: note = source = chr4:1014995-1015467; Gene: FGFRL1 (intron)
  source 1..473: mol_type = genomic DNA
cggggacccaggcaggggatggggtgggttcctttctgccaggaaaggaggcctctgccaggaaaggagggctcggcttctccacatagggtgggatggtgcaggtggccatgtggagccgcagcctttctgctcctgtgggtttcacaggtggtgggaggacatactggctgccccccagacaggagcggcagtgcccgtggtcagcccgagctacgtctctccagaggcttgctctctgaccccagggccttggggtcatgccccctcaaggctaaggtgcctggcagggtacggcccttgggggtgggcagacagacctgggcatctgtggtccctgaactcaggtctgatattgacacagacgtgggtgctgcacagactctcatccacacattgcacaggctcaggcagcccgccgtgctcggttgcttgtggatagctgtggggtcgctggcccatgcccaggcccg

SEQ ID NO: 3685 - DNA, 354 bp, Homo sapiens
  misc_feature 1..354: note = U/M: U (0.12:0.87) in Blood B cells
  misc_feature 1..354: note = source = chr14:103383229-103383582; Gene: AMN (Intergenic)
  source 1..354: mol_type = genomic DNA
cgccagccatagcggagacagacacagggaccaagagactgagacagcctctagatgctgaagcctgcgctgaagcagttgggccgtgagaggttcttcttactggaggaaactccggggctttgcatttctccacgtccctgctgaggttctgagccatttgcaagtttgtgccctcatgtgtgcctgagggccgggggcacctgtgcatatgctcaagggctttctgtgcacacatggcacctgcagtgcggtcgcagccattcctcagctcacatctttgcatgtgagtggttctggtaccgcttgtctgcccagcgccctggtgcctatctgctgcctcatgtgagctcg

SEQ ID NO: 3686 - DNA, 414 bp, Homo sapiens
  misc_feature 1..414: note = U/M: U (0.16:0.91) in Blood B cells
  misc_feature 1..414: note = source = chr13:99090437-99090850; Gene: FARP1 (intron)
  source 1..414: mol_type = genomic DNA
cgggaggcagaggtgccttggacacatctgcctctcactcctttatcctcaacgcagttactgctcattgagaagcagggttttcaatcatggagaagcttcctccagccacagtgctcccatgtggcctctcggtcctcaagggtcccttgctgccactttttatagcctctttcttctttgagaactgcttggggtccttctgatctccctcaccgtggggagccctggggatcctggggttacacacatggtcctcagagaggcccgggcactcttgaacccgaccgtccgtatcctttgttgggggagctgctggtggtacctgccctgtaccttcctggggaggagacagatgatccctagagagggtttagcacagcacctggggcagagcaatggtgcagtgaatcg

SEQ ID NO: 3687 - DNA, 204 bp, Homo sapiens
  misc_feature 1..204: note = U/M: U (0.08:0.82) in Blood B cells
  misc_feature 1..204: note = source = chr1:3496959-3497162; Gene: MEGF6 (intron)
  source 1..204: mol_type = genomic DNA
cggcccaggccagtcagaccccagggaggggaggaggaaaggtcccggcaggtggggagccaagtgttgacagcggctgccctggggctccccagggaaagcgaggccagggtgtgagggtggaggaggccacagctggacctgagaggcaaggcaggggctctggagagagaggggcgccttgtggcttggcaggcagccccg

SEQ ID NO: 3688 - DNA, 213 bp, Homo sapiens
  misc_feature 1..213: note = U/M: U (0.19:0.93) in Blood B cells
  misc_feature 1..213: note = source = chr1:101713983-101714195; Gene: S1PR1 (Intergenic)
  source 1..213: mol_type = genomic DNA
cgagatgagcagatcacgaggtcagcggttcgagactagcctgaccaacttggtgaaaactcatctttactaaaaatacaaaaattagccaggggtggtggtatgtgcctgaaatcccagctacttgggaggctgaggcaagagaatcacttgaacccgggaggtggaggttgcagtgagccgagattgtgccactgcacgccagcctgggcg

SEQ ID NO: 3689 - DNA, 317 bp, Homo sapiens
  misc_feature 1..317: note = U/M: U (0.15:0.89) in Blood B cells
  misc_feature 1..317: note = source = chr11:36595278-36595594; Gene: RAG1 (exon)
  source 1..317: mol_type = genomic DNA
cgaaagaaggaaaagagagctacttcctggccggacctcattgccaaggttttccggatcgatgtgaaggcagatgttgactcgatccaccccactgagttctgccataactgctggagcatcatgcacaggaagtttagcagtgccccatgtgaggtttacttcccgaggaacgtgaccatggagtggcacccccacacaccatcctgtgacatctgcaacactgcccgtcggggactcaagaggaagagtcttcagccaaacttgcagctcagcaaaaaactcaaaactgtgcttgaccaagcaagacaagcccg

SEQ ID NO: 3690 - DNA, 185 bp, Homo sapiens
  misc_feature 1..185: note = U/M: U (0.19:0.92) in Blood B cells
  misc_feature 1..185: note = source = chr11:66565836-66566020; Gene: C11orf80 (intron)
  source 1..185: mol_type = genomic DNA
cgacttgggcggattgcttgagctcaggagttccagaccagcctgggcaagatggtgaaactctgtctctactaaaaatacaaaaattagtcgggtgtggttccatgcacctgtggtcccatctacttgaggggctgaggcaggagaatcgcttgaacccaggaggttgaggctgcagtgaaccg

SEQ ID NO: 3691 - DNA, 117 bp, Homo sapiens
  misc_feature 1..117: note = U/M: U (0.1:0.82) in Blood B cells
  misc_feature 1..117: note = source = chr4:42333872-42333988; Gene: SHISA3 (Intergenic)
  source 1..117: mol_type = genomic DNA
cgcctgtaaccccagcctcttgggagtctgaggcatgagaaatcgcttgaacccaggaggcagagattgcagcgagctgagatcgcaccactgcactccagcctgggcaacagagcg

SEQ ID NO: 3692 - DNA, 223 bp, Homo sapiens
  misc_feature 1..223: note = U/M: U (0.15:0.87) in Blood B cells
  misc_feature 1..223: note = source = chr19:14688402-14688624; Gene: CLEC17A (Intergenic)
  source 1..223: mol_type = genomic DNA
cggctcactgcaatctcggcctccagggttcaagcaattctcctgcctcagccccctgagtagctgggattacaggcgcccgccaccactcctggctaatttttgtatttttagtagagatgggatttcaccatgttggccaggctgatctcgaactcctgacctcaggtgatcttcccgcctcggcctcccaaagtggtgggattacaggcatgagccaccg

SEQ ID NO: 3693 - DNA, 228 bp, Homo sapiens
  misc_feature 1..228: note = U/M: U (0.23:0.95) in Blood B cells
  misc_feature 1..228: note = source = chr2:3257930-3258157; Gene: TSSC1 (intron)
  source 1..228: mol_type = genomic DNA
cgacgttcccccaaatcaaattccctatctaatcataacactttcacaccatggaagacacttaaaagaacacgcatgatgacaccaaatgctggggaggacgcagagaggaggagccctcacgctctgtcatggcatcacacgtgcagcagctccacacaaaactaactgagccgagagaaataaaacttcctgttcatacaaaaacctgttcattaatacttaccg

SEQ ID NO: 3694 - DNA, 174 bp, Homo sapiens
  misc_feature 1..174: note = U/M: U (0.19:0.9) in Blood B cells
  misc_feature 1..174: note = source = chr15:28510556-28510729; Gene: HERC2 (intron)
  source 1..174: mol_type = genomic DNA
cggcggcagctgctaaccagctgagaggcctcaggcaaacaagcccagtaaccacccgggcctcttccccaatgccactgagccccacacccactgggcgacagggtgggtggcctcgtgaggcccactgtactcatctcacttcctccagggaagctgccatgcgtgtcctcg

SEQ ID NO: 3695 - DNA, 216 bp, Homo sapiens
  misc_feature 1..216: note = U/M: U (0.18:0.87) in Blood B cells
  misc_feature 1..216: note = source = chr10:80953658-80953873; Gene: ZMIZ1 (intron)
  source 1..216: mol_type = genomic DNA
cgaaaaggatcccaactgatgctgacatgtgcaggttggcaggtcattgctgagcccagggctcatgaagtttgtccctttgggagtctaaggctgatgaaggggctgtctgggatgtcctctggacccctaggctttcccttctggctgtgtcttggaacgcagcctctgctcgcgggctgtaggcagagctgcccactcctgccactggcaccg

SEQ ID NO: 3696 - DNA, 222 bp, Homo sapiens
  misc_feature 1..222: note = U/M: U (0.23:0.92) in Blood B cells
  misc_feature 1..222: note = source = chr8:123929295-123929516; Gene: ZHX2 (intron)
  source 1..222: mol_type = genomic DNA
cgtcctccctgtcatccagcgcattcatcccacgcagtgttataattatgacctgcgtttctcagggctcccagccttgggctccaagttgggtcactgtgcaggaggttttgtctccacctactgtggcgtggcctccaagcggatcacagtcagccccctaactatttctgggagtcctcagggagcattgcaggtgttcttcactctaaaaaggcaccg

SEQ ID NO: 3697 - DNA, 383 bp, Homo sapiens
  misc_feature 1..383: note = U/M: U (0.27:0.95) in Blood B cells
  misc_feature 1..383: note = source = chr5:130983529-130983911; Gene: FNIP1 (intron)
  source 1..383: mol_type = genomic DNA
cgtcactactatccatttccaaaacttttttcactatgtttttatttcaaatttgataaatataaaatttttataaattaatacttttcaaatgtatttacataggaaaggatgtattctcctgtggagaataaaaaacagtttgcaaaagttcacaaagaatgctatgtggttccccaatttctaagctgaaagactgaaaattaaaacacatctgggcatggtggctcatacttgtaatcgcaacattctgggaggtggaggcaggaggatcatctgaggccaggagttcgagatcagcctgggcaacacagtgagactctgtctctacaaaaattaaaaaaaaaaaaaaaaaaaaagaattagccgagcatggtggcacg

SEQ ID NO: 3698 - DNA, 240 bp, Homo sapiens
  misc_feature 1..240: note = U/M: U (0.26:0.92) in Blood B cells
  misc_feature 1..240: note = source = chr2:109810720-109810959; Gene: SH3RF3 (intron)
  source 1..240: mol_type = genomic DNA
cgtaacacagatgccggtcttgtgtttcttacctgcaggggactttcgaaagcttgggctgcggtgtccccagctgtgccctgttcccctgatctgtgtgtctgctgccacccctgcttcccagtgggctgggcctcaacccctgccatccacagtcttcagctgcgctctcggctggctgatggcagctgtgttgaggctctgtagaatggagaagtcctctgacaggtgggtggtgcg

SEQ ID NO: 3699 - DNA, 297 bp, Homo sapiens
  misc_feature 1..297: note = U/M: U (0.32:0.95) in Blood B cells
  misc_feature 1..297: note = source = chr17:55081324-55081620; Gene: SCPEP1 (intron)
  source 1..297: mol_type = genomic DNA
cgaaggcaggtggatcacctgaggtcaggagtatgagaccagcttggctaacatggagaaaccctatctttactaaaaatacaaaaattagctgggcatgatggtgggcacctgtaatcccagctactcaggaggctgaggcaggagaatcgcttgaacctgggaggcagaggttgcagtgagccaagatagtgccattgcatccagctggcgagatagcgccactgcactccagcctgggcaacagagtgagactctgtctcaaaaaagaacaaaaatcaactgggcgcggtggcg

SEQ ID NO: 3700 - DNA, 463 bp, Homo sapiens
  misc_feature 1..463: note = U/M: U (0.28:0.91) in Blood B cells
  misc_feature 1..463: note = source = chr12:132255459-132255921; Gene: SFSWAP (intron)
  source 1..463: mol_type = genomic DNA
cgcatgtgtgtgggattctgcagtgtctgtgcttctgtgcctggctgacttcacctagcgtggtatcctctgggtccagccatgcagcagccgcattggacccccttcctttttacagttgaatggtgctcggtcgtgtgcatctaccccgtttgtttccgaacactttgggaggccaagtgaatccttgaggggaaaaactcaattcgattcatgtatgtggaggtgtaaaacctcataggggatcataccctacatatttttctgacaacttttttcacttacagtagagatccttctgttatcaatgcttacagtagtgtttggtgtgttacaggcactcggtaggtatttagtgaccgaatgactttaagtagtttacctgtaaatcaccccctctgtgtgtgcccctcccctgctgtgggaaatgtgagctgtgggtctgtctttgtgaacgatgccg

SEQ ID NO: 3701 - DNA, 361 bp, Homo sapiens
  misc_feature 1..361: note = U/M: U (0.29:0.9) in Blood B cells
  misc_feature 1..361: note = source = chr12:56772333-56772693; Gene: APOF (Intergenic)
  source 1..361: mol_type = genomic DNA
cgagaccatcctggctaacacggtgaaaccctgtctctactaaaaatacaaaaaattagccgggcgtggtggcgggcgcctgtagtcccagctactcaggaggctgaggcaggagaatggcgtgcacctgggaggcggggcttgcagtgaacggagattgtgccactgcactccagcctgggcgacagagcgagactccgtctcaaaaaaaaaaaaaaaagaaagaaaaagtacatctgatcttctatatataggcattgcaaagttctttttttttttttattctttagagtttgtttattgaaaatttgaagcagaaaatgaaaaataaatatttttaggccgggcatggtggctcacg

SEQ ID NO: 3702 - DNA, 221 bp, Homo sapiens
  misc_feature 1..221: note = U/M: U (0.17:0.95) in Blood B cells
  misc_feature 1..221: note = source = chr13:43562634-43562854; Gene: EPSTI1 (intron)
  source 1..221: mol_type = genomic DNA
cgaggcaggcagatcacaaggtcaggagtttgagaccggcctggccaatgtggcgaaaccccgtctctactaaaaatacgaaaattagccaggcatggtggcatgtgcctgtggtaccagctgctcaggaggctgaggcagaggagtcgcttgaacacgggaggcagaggttgtggtgagctgagattgcgctgttgcactccagcctgagcgacagagcg

SEQ ID NO: 3703 - DNA, 266 bp, Homo sapiens
  misc_feature 1..266: note = U/M: U (0.02:0.94) in Blood B cells
  misc_feature 1..266: note = source = chr20:16373028-16373293; Gene: KIF16B (intron)
  source 1..266: mol_type = genomic DNA
cgtctatagtgggtggcccaagaaggggctggtttaaggaaagaaacactgtgcacatttgtgggtagagggaacagagaacagagaagggaaacttgaagatgcaaaagagattcataaaaggcaccgcagttcctctgccatgacgatacactgttgaagtgaagagctttgcaagtccacctgacacatgtgtacgcctctgagatcgcacatgtgaaagacaacatgccgatacgcctaaccaggcaatgctgaaaatgtgc

SEQ ID NO: 3704 - DNA, 293 bp, Homo sapiens
  misc_feature 1..293: note = U/M: U (0.06:0.95) in Blood B cells
  misc_feature 1..293: note = source = chr6:14254953-14255245; Gene: CD83 (Intergenic)
  source 1..293: mol_type = genomic DNA
cgccttatttgaaaagggtttgagcatttggccacctgtgattggccgagaaactcagcgattggcatgagagtaggttacagtctgtttacacattcgggtaggttacagttcactgtgcatgaagaaacctttaggctgaacttaaaatatgtaaggaggcatctttaagctaaacttaaatttaacaccccacgtaccctctcgggtgactttgttcttgcatcttcctccttcactcaggcgataagcatgacatatcgagctacttctagaataaaggggagggacac

SEQ ID NO: 3705 - DNA, 148 bp, Homo sapiens
  misc_feature 1..148: note = U/M: U (0.05:0.9) in Blood B cells
  misc_feature 1..148: note = source = chr22:42332019-42332166; Gene: TNFRSF13C (Intergenic)
  source 1..148: mol_type = genomic DNA
cgcatggcaccatgctcggctaattttgtatttttagtaaaggcggggtttcaccgtgttactcaggctggtctcgaactcctgacctcaagtgatctgcccaccgtggcctcccaaagtgttgggattacaggcgtgagccactgcg

SEQ ID NO: 3706 - DNA, 124 bp, Homo sapiens
  misc_feature 1..124: note = U/M: U (0.02:0.86) in Blood B cells
  misc_feature 1..124: note = source = chr22:42752683-42752806; Gene: NFAM1 (Intergenic)
  source 1..124: mol_type = genomic DNA
cgcacattatagttataataacgacatgcatgaatgtgtgtgtcccagctgcctgcctttccgaggccgtgtggtttgccgctttataagcacaaagtcattgaatccccgagagaatactacg

SEQ ID NO: 3707 - DNA, 146 bp, Homo sapiens
  misc_feature 1..146: note = U/M: U (0.01:0.85) in Blood B cells
  misc_feature 1..146: note = source = chr22:39469570-39469715; Gene: APOBEC3G (Intergenic)
  source 1..146: mol_type = genomic DNA
cgaggtcaggagatggagcccagtctggccaacatagtgaaaccgcgtctctactaaaaatacacaaaaagttagccgggcgtggtggtgtgcacctgtaaactcagctagtcagggggctgaggcaggagaatcgcgtgaacccg

SEQ ID NO: 3708 - DNA, 378 bp, Homo sapiens
  misc_feature 1..378: note = U/M: U (0.1:0.92) in Blood B cells
  misc_feature 1..378: note = source = chr22:33964527-33964904; Gene: LARGE (intron)
  source 1..378: mol_type = genomic DNA
cggatcccctgaggttgggagttcgagaccagcctgaacaacagggagaaatgccatctctactaaaaatacaaaattagccgggtgtggtggtgcatgtctgtaatcccagctactcgggaggctgaggcaggagaatcacttgaacctaggaagcggaagttgcggtgagcagagatcgcaccattgcactccagcctgggcaacaaaagcgaaactcagtctcaaaaaaaaaaaaaaaaaaataagcacaatgccttgtatataataggtacaaaacacatatctggaacagatggatggatggatggatgaatgcatggatggatggatggatggatggatgatggatggcaggcaggcataggaaggcgggcg

SEQ ID NO: 3709 - DNA, 281 bp, Homo sapiens
  misc_feature 1..281: note = U/M: U (0.14:0.95) in Blood B cells
  misc_feature 1..281: note = source = chr9:37189397-37189677; Gene: ZCCHC7 (intron)
  source 1..281: mol_type = genomic DNA
cgctgagactgagttttgcacttgttgcccaggctggagtgcaacagcgtggtctcggctcactgcaacctctgcttcctgggctcaagcgattctcctgcgtcagtctcccaagtagctaggattacaggtgcacactaccacacccagctaattttttctatttttagtagagacgcggtttcaccatgttgaccaggctggtctcgaactcctgacctcaggtgatctgcctgccttggcctcccaaagtgctgggattacaggcatgagccaccacg

SEQ ID NO: 3710 - DNA, 442 bp, Homo sapiens
  misc_feature 1..442: note = U/M: U (0.12:0.93) in Blood B cells
  misc_feature 1..442: note = source = chr22:24095077-24095518; Gene: VPREB3,VPREB3 (TTS,intron)
  source 1..442: mol_type = genomic DNA
cgtagccaacagagcagtagtaatccgcgtcgtcttcaggctgcacgggactaatggtgaggacacaggcattgtgggcctcatccttggctgccgagaatcgatcggggatgtcagcaggccggtggtgatcctcctccgagcggtagtagaggagatatcgaggggcactgcctgcccgctgctggtaccaggacacaccgtagtccctgatggtgacgtgctgggggctgagcgtgcaggagagttgagccacttggcctgggaagaccagcagtgcatccagctgggccaggactgtctgggaaactgcgagacacaaacccactcagcctgagccccttccctcccacccctgccctgtgaaggcttggttggactccatggagactcccagtcccaaagggctcatagcccagtgctatgggattagcaatgaacg

SEQ ID NO: 3711 - DNA, 261 bp, Homo sapiens
  misc_feature 1..261: note = U/M: U (0.18:0.91) in Blood B cells
  misc_feature 1..261: note = source = chr22:41379242-41379502; Gene: RBX1 (Intergenic)
  source 1..261: mol_type = genomic DNA
cgcctacacctgcaggtggactaagaagccccaaggggatacagcgcaggggaccaacagctcctgcaaccaccacggcctctccgccgccttactcctgcgtactcctgcatgcttaaagcttctactgcctcaacttctacttttagctgtcatctctgtggatctctgggtttctgtgtctctgctgcacaaatctccacgtaagccttgcgtttcatctgtccacaagaaacaggtgattgggcaggactgttcacg

SEQ ID NO: 3712 - DNA, 276 bp, Homo sapiens
  misc_feature 1..276: note = U/M: U (0.18:0.87) in Blood B cells
  misc_feature 1..276: note = source = chr22:30775765-30776040; Gene: RNF215,RNF215 (exon,intron)
  source 1..276: mol_type = genomic DNA
cggtgaaactcgtgcttacagggcagcacccggagccactacaggggtgggggaggaagggctcaggtcaccgaagcaggactccacgtgggggtgcctggtcccatgcccctcgcctcagctggggaactgaaacctcacggcttcccccacccccctgaaattctgctctgtggccctgggggctgaaggagaagggcctggtggtggtggttccaaggtcccaggagtaaggtgggaggcatcacaggtgagctgatggctggtctctacccg

SEQ ID NO: 3713 - DNA, 75 bp, Homo sapiens
  misc_feature 1..75: note = U/M: M (0.72:0.07) in Blood B cells
  misc_feature 1..75: note = source = chr11:67071719-67071793; Gene: SSH3 (intron)
  source 1..75: mol_type = genomic DNA
cggaggacgcgcagcgaagcccactgccaaatttgtggggcagcgttcccggtggggccggctggtgggctcgcg

SEQ ID NO: 3714 - DNA, 151 bp, Homo sapiens
  misc_feature 1..151: note = U/M: M (0.85:0.21) in Blood B cells
  misc_feature 1..151: note = source = chr16:81602029-81602179; Gene: CMIP (intron)
  source 1..151: mol_type = genomic DNA
cgtgggccgtgtgtctcccatctcattgtggctggggccccgggcaagggcaccgtgcctcgggagtgagtcactctctctctgtgccaggcaggagctccagggactaggggtgacccaagagtgaaggcctgatggggaggaggacccg

SEQ ID NO: 3715 - DNA, 295 bp, Homo sapiens
  misc_feature 1..295: note = U/M: M (0.73:0.1) in Blood B cells
  misc_feature 1..295: note = source = chr19:801276-801570; Gene: PTBP1 (intron)
  source 1..295: mol_type = genomic DNA
cgtgtctcctggttgctgccctgtggagcctcggagcctccaggtgtcccttccgttctgctggggcgccgttgagctgagccaagccggcctgtgccgcctgggcaggcatggagtttgctgccgcagacagttgtgggcaatgccaggccacttgcccatgggaatgagattagggcttcaggcaggcggccaagaggaccgctcagaggaagcggccccgcccaccactccagtcaaagacagggtccaagatgccctttttaaggtttgtgcagccagcacatgggagccg

SEQ ID NO: 3716 - DNA, 250 bp, Homo sapiens
  misc_feature 1..250: note = U/M: M (0.77:0.15) in Blood B cells
  misc_feature 1..250: note = source = chr11:118781778-118782027; Gene: BCL9L (promoter-TSS)
  source 1..250: mol_type = genomic DNA
cgaagaaagttgagcctggtagtcacaaagaaacacgcacagggccatagatacagcaacagacttacacaaacacagaggcctcacccaaccgcccccagccctggctcccccctcgcctcccctacccgccctccagcagccctccagcagccgatcccggtcaaaggggaggagtcttgggcccaggagcttcgtcccggtgacaggcccggccagacaccggtgcacactcctgatgctccctgcg

SEQ ID NO: 3717 - DNA, 348 bp, Homo sapiens
  misc_feature 1..348: note = U/M: M (0.71:0.09) in Blood B cells
  misc_feature 1..348: note = source = chr5:158407204-158407551; Gene: EBF1 (intron)
  source 1..348: mol_type = genomic DNA
cgtctgactcacttcacgtctcatatgtcaacagagaagaaagtcctcaccctgaacgtgtgcttgccttttgttctttggagagacttctccagctttgttgggaatgctagcagccctgtttccaaacacttcccgatttcttcctaataactgctggcacgctctctatcaaaatctgccactttcctccctgcacaaaagctgtgcttccaccacgtgatcgcaagccgtgcccagctctgaggccagatccgcagccaagactcctctctctgtctccatggcgtgaacaggaattggaaaccagcacactcaaccccaatatagtctttttttaagaagtcg

SEQ ID NO: 3718 - DNA, 290 bp, Homo sapiens
  misc_feature 1..290: note = U/M: M (0.75:0.14) in Blood B cells
  misc_feature 1..290: note = source = chr5:125839477-125839766; Gene: GRAMD3 (Intergenic)
  source 1..290: mol_type = genomic DNA
cggttaagactggcaaagtcccattcaagggttaagctcatctatagaaaattaagtcatttcttgctaaactgagaagaacaacagtcatgtgataatgctgggactctgacacagttgatctgggtaacgctgcgtggaggatgtgatgtgctgtcagctttacagacaagcatattgtgacccaatttgtttgccaggcagttgttccagagaagtagtttactgatagaagaaaattgacggcagagtactgattgcacaatcaaagccaagtggctgctgaaccg

SEQ ID NO: 3719 - DNA, 205 bp, Homo sapiens
  misc_feature 1..205: note = U/M: M (0.64:0.1) in Blood B cells
  misc_feature 1..205: note = source = chr7:99868422-99868626; Gene: GATS (intron)
  source 1..205: mol_type = genomic DNA
cgtattcattcattttgcagtgagggagagccaccaccgccccaaaccgcgaaaaaccaaccagtaacaactttatcattcctttttaacagtcacaatcgtgggcaaatgagacttaagttacagcagctagctggcactcacactcccctcggctcagggtccttaaacaacaacaacaaaaccctaatgcaagcacccaccg

SEQ ID NO: 3720 - DNA, 80 bp, Homo sapiens
  misc_feature 1..80: note = U/M: M (0.63:0.1) in Blood B cells
  misc_feature 1..80: note = source = chr11:118781633-118781712; Gene: MIR4492,BCL9L (promoter-TSS,promoter-TSS)
  source 1..80: mol_type = genomic DNA
cgcgccgaggccagggaagcgccgccggagcgggaggcgcggagacagcctggggcacgcgcagacaccggggctgcccg

SEQ ID NO: 3721 - DNA, 99 bp, Homo sapiens
  misc_feature 1..99: note = U/M: M (0.58:0.06) in Blood B cells
  misc_feature 1..99: note = source = chr12:131322949-131323047; Gene: STX2 (intron)
  source 1..99: mol_type = genomic DNA
cggctgctgggcgcgtaaggtgcgttcagagtcaacacacggtcccagtttccaaagcaaactactgggagatcagacacaagctgctgttcgcgctcg

SEQ ID NO: 3722 - DNA, 288 bp, Homo sapiens
  misc_feature 1..288: note = U/M: M (0.66:0.14) in Blood B cells
  misc_feature 1..288: note = source = chr11:316098-316385; Gene: IFITM1 (TTS)
  source 1..288: mol_type = genomic DNA
cgcggactcctcgggtgcccgtggacagcagcccgtgccaggcccgcagcggccttgggcctctcctcctctgcaggggagactccggccgcgggctctggaaaagggcaagaccaggcacggcgcaggtgctctctgtcgggagaatgcggccacgcgcggtgcgttcacagcgggagaaaccctcctgggagggacgggtaggacgccgagcccaaggcgggaggcgccggaggacacacgtgccctacgcggggtgccgggggaccggccaggctgaccccggcg

SEQ ID NO: 3723 - DNA, 116 bp, Homo sapiens
  misc_feature 1..116: note = U/M: M (0.69:0.18) in Blood B cells
  misc_feature 1..116: note = source = chr18:24327182-24327297; Gene: LOC728606 (Intergenic)
  source 1..116: mol_type = genomic DNA
cgatctgattcatgcaacatttatttaagcatgttaactttgtgtgtatttacttatgaagcctcagggctgatgagcaacacgggggcggggcggggcacggtgcggggggggcg

SEQ ID NO: 3724 - DNA, 262 bp, Homo sapiens
  misc_feature 1..262: note = U/M: M (0.64:0.13) in Blood B cells
  misc_feature 1..262: note = source = chr7:101447905-101448166; Gene: CUX1 (Intergenic)
  source 1..262: mol_type = genomic DNA
cgctagcggataaacggagcttgtgtaaactaatcccacctcccactcacaagtcagtattaaatttaggaatgagagagtctaagataccgacttggaattacttacaattgtttcactaaactgctcgccttggactgtgtaatagcacattcatgaccccaccctcccagccatagctgccagaatgggattgttaatcagatacttccccagacagtccatgaaaccagactcccctaaagtgaagatagagcccacg

SEQ ID NO: 3725 - DNA, 266 bp, Homo sapiens
  misc_feature 1..266: note = U/M: M (0.61:0.11) in Blood B cells
  misc_feature 1..266: note = source = chr12:24103577-24103842; Gene: SOX5 (exon)
  source 1..266: mol_type = genomic DNA
cgcccccctggctgtggatctctttaatttcctctgcccaggcagccacagataacaaggtggacaaactatggctttacagattctaagctggctggcaaggcacagcctccatagcagttccaattatctagataaaaatctggcagccgagaaaggtaatcaggtaatgtacctttgacacgaaatgacagaggcacatacacacagagagagagacacttacacagacatgcatgcagagatggtggctgccccgtgcaccg

SEQ ID NO: 3726 - DNA, 298 bp, Homo sapiens
  misc_feature 1..298: note = U/M: M (0.6:0.11) in Blood B cells
  misc_feature 1..298: note = source = chr9:134283110-134283407; Gene: PRRC2B (Intergenic)
  source 1..298: mol_type = genomic DNA
cggctgagttgatgaacgtctctatagcagcaaacacccgagggcgtgtggcccagttctgagaagctgtggtagagtgaggagggcactgtgtgaccctggttctcacttcacctctgagcctctgttcccttatctgcaaatagggggtgatagtaaggacagccaccttagtggcggttaggaggatgctctctgcagctgtaatgtttattcgggcagcccgatggagtatttcctcaccggggtaacgggaggcattgcatccaggttggagtggttgctgaggagtccttcg

SEQ ID NO: 3727 - DNA, 140 bp, Homo sapiens
  misc_feature 1..140: note = U/M: M (0.63:0.16) in Blood B cells
  misc_feature 1..140: note = source = chr5:14582816-14582955; Gene: FAM105A (intron)
  source 1..140: mol_type = genomic DNA
cggaaggctgaggccggagaattgcttgaacccggcgggcggaggttgcagtgagccgagattgcaccactgcactctcagccagggagacagagccttgctctgtccaaaaaaaaaaaaaaaaaaaaaaaaatcacccg

SEQ ID NO: 3728 - DNA, 347 bp, Homo sapiens
  misc_feature 1..347: note = U/M: M (0.61:0.16) in Blood B cells
  misc_feature 1..347: note = source = chr7:1498024-1498370; Gene: MICALL2 (intron)
  source 1..347: mol_type = genomic DNA
cgttgagggccccccttcctgagcgtctggcccccagccccgacacacagatctctgtcccagcaagcctggtcccagtcatttagccaaagagcgtttgctgagtgaataaacaatggagcaggtccaggctcgggccaagattcagcaacgggcagggccagctgcccagctacacacgccaagaccctcctggggagagacagcctagtcctcaacccctgccacctcctgctgctcccagagatgggggctgttctccatctcgggccctatcacccggggcctcagaggcccggctggcagcagcacctggggtctgggggcttcctgccctgcactggccg

SEQ ID NO: 3729 - DNA, 337 bp, Homo sapiens
  misc_feature 1..337: note = U/M: M (0.59:0.15) in Blood B cells
  misc_feature 1..337: note = source = chr19:56037380-56037716; Gene: SBK2 (Intergenic)
  source 1..337: mol_type = genomic DNA
cgccagcaatcaacacctcgtgcccccctgccccctgcccagtctccactcccacccagcatgccgcatcccagccacctccagctttttgggacacattcttggcctaacagctcaggctatttcagattcacagataaaggggcaggaagtcttgatatattccacccccaccccccaccccccgcgttgttgactcccctcttctccccaatgatccctactccaggaagctcacccggattgtccaggtcagaggccccaactctatggcttgaacctggattcgaaggctccttggggtcactccacaggagcacacctgctgtcagccccg

SEQ ID NO: 3730 - DNA, 110 bp, Homo sapiens
  misc_feature 1..110: note = U/M: M (0.54:0.15) in Blood B cells
  misc_feature 1..110: note = source = chr7:36192083-36192192; Gene: EEPD1 (promoter-TSS)
  source 1..110: mol_type = genomic DNA
cgaaagtggggacagaaattaagacgatcccattcagtctcctctggaacgttctgcaaaattccgtgagaccctggacctacagcgatgcactctcagggactgccccg

SEQ ID NO: 3731 - DNA, 230 bp, Homo sapiens
  misc_feature 1..230: note = U/M: M (0.54:0.15) in Blood B cells
  misc_feature 1..230: note = source = chr7:101448278-101448507; Gene: CUX1 (Intergenic)
  source 1..230: mol_type = genomic DNA
cgacgtctctcatttgcaatcaatgtctcattcaagaccaaggtcaagttatcaatcttgattatagatgccctggaccggggtgtctggagcctccaccgccgcagagagatgtctggagacaaagcctctacggggaaggattgctggcaagcaggttgctgcaaggtaagatgaaagaatccttcctgggcaggtaatacccaggacttcctgaaggggggatatcg

SEQ ID NO: 3732 - DNA, 75 bp, Homo sapiens
  misc_feature 1..75: note = U/M: M (0.53:0.16) in Blood B cells
  misc_feature 1..75: note = source = chr15:70877381-70877455; Gene: UACA (Intergenic)
  source 1..75: mol_type = genomic DNA
cgcgaggacttgggggctgctcgggtcagagcccctcggcccccgtcacagaccccgggggtctggggaggggcg

SEQ ID NO: 3733 - DNA, 106 bp, Homo sapiens
  misc_feature 1..106: note = U/M: M (0.54:0.19) in Blood B cells
  misc_feature 1..106: note = source = chr22:50312817-50312922; Gene: CRELD2,ALG12 (promoter-TSS,promoter-TSS)
  source 1..106: mol_type = genomic DNA
cgcccccaccctggacccgggtcaggtggtaccaagcactatgggcactgtctcctcgcaggggatggtggacaccgcaaagaagaactttggcggcgggaacacg

SEQ ID NO: 3734 - DNA, 125 bp, Homo sapiens
  misc_feature 1..125: note = U/M: M (0.71:0.11) in Blood B cells
  misc_feature 1..125: note = source = chr3:4909705-4909829; Gene: BHLHE40-AS1 (Intergenic)
  source 1..125: mol_type = genomic DNA
cgagagcaaaggcatgactgggcacctaaatacccactaggcaggcagtgactgcgacagtaactctcttctttttggccactctcaggccgcaagtcctccagaaaacggaaaactgaggcgcg

SEQ ID NO: 3735 - DNA, 191 bp, Homo sapiens
  misc_feature 1..191: note = U/M: M (0.65:0.08) in Blood B cells
  misc_feature 1..191: note = source = chr9:36985835-36986025; Gene: PAX5 (intron)
  source 1..191: mol_type = genomic DNA
cggtgcaagagacaaaaaagtttatgtcagggcatcatccagcaagatcagaacccccactcaggctcggggacagagggaagaaagagtggcagtcgcacccaggaggacctgcctgtccaacatcaaggaatgatcaagaactcccatcccggttccacgctgcgcgtccgccatccgaaccggcctcg

SEQ ID NO: 3736 - DNA, 212 bp, Homo sapiens
  misc_feature 1..212: note = U/M: M (0.58:0.13) in Blood B cells
  misc_feature 1..212: note = source = chr19:45281302-45281513; Gene: CBLC,CBLC (promoter-TSS,exon)
  source 1..212: mol_type = genomic DNA
cgtgagtcccccttcgctgcgggacctgctgccccgcacagcgcagctgcttcgagaggtggcccattctcggcgggcggccggcggaggcggccccgggggtcccggcggctctggggactttctactcatctacctggccaatctggaggccaagagcaggcaggtggccgcgctgctgcctccccggggccgaaggagtgccaacgacg

SEQ ID NO: 3737 - DNA, 31 bp, Homo sapiens
  misc_feature 1..31: note = U/M: M (0.58:0.24) in Blood B cells
  misc_feature 1..31: note = source = chr20:36514658-36514688; Gene: VSTM2L (Intergenic)
  source 1..31: mol_type = genomic DNA
cgaaacgagctgcggagggctggggccggcg

SEQ ID NO: 3738 - DNA, 93 bp, Homo sapiens
  misc_feature 1..93: note = U/M: U (0.02:0.95) in Blood Granulocytes
  misc_feature 1..93: note = source = chr5:1475254-1475346; Gene: LPCAT1 (intron)
  source 1..93: mol_type = genomic DNA
cgggctgtgccctcactcccagagctgctctgaccgtgccgtgtgtgctcaggtgatgagaaatcggtgcctctctagtcctagttgagagcc

SEQ ID NO: 3739 - DNA, 170 bp, Homo sapiens
  misc_feature 1..170: note = U/M: U (0.02:0.94) in Blood Granulocytes
  misc_feature 1..170: note = source = chr19:19295400-19295569; Gene: MEF2BNB-MEF2B (intron)
  source 1..170: mol_type = genomic DNA
cgcgcccggtctgttttttgtttttttgagacaggatcttgttctgttgcccaggctggagtgcagtggtgcaatctccactcactgcagcctcaacctcccaggcttaagcaatcctcccacctcagcatcccgagtagctgggactagaggtgtgtgccaccaggctc

SEQ ID NO: 3740 - DNA, 470 bp, Homo sapiens
  misc_feature 1..470: note = U/M: U (0.01:0.92) in Blood Granulocytes
  misc_feature 1..470: note = source = chr2:8926362-8926831; Gene: KIDINS220 (intron)
  source 1..470: mol_type = genomic DNA
cgaaaaagcctggttgccaaaaagccaaactctctttcacaagcatccgagagggttgcaatcatttcagccagagaagtttctccacctacactggacagtctattgtaatctgtaaacaaaaaccttgaagaaaagaacaaatcaaacattactttattatctaaagtaacaaataacttcaatgtatgtcatctttgcatcacttaccctttattttctttttgtctctttcaaaatattgttttttaaattccaaggagggaaaagaatttgtaattaggtagcttccacttctaaaatcttacatacttttcttaggaaaaaacagtaacaaaagtgaaatgtgcagggccatataaagtaattctgactaaggacaggcgggggaaagttacgccagaacttagatgtggagtatcaagacaccccaacagatctcacgacatagtggttaaaaggtgacacac

SEQ ID NO: 3741 - DNA, 237 bp, Homo sapiens
  misc_feature 1..237: note = U/M: U (0.05:0.95) in Blood Granulocytes
  misc_feature 1..237: note = source = chr12:57894060-57894296; Gene: MARS (exon)
  source 1..237: mol_type = genomic DNA
cgtcttctgactgtctcttcctgatccctggcccacctcaccagaatcacccaggacattttccagcagttgctgaaacgaggttttgtgctgcaagatactgtggagcaactgcgatgtgagcactgtgctcgcttcctggctgaccgcttcgtggagggcgtgtgtcccttctgtggctatgaggaggctcggggtgaccagtgtgacaagtgtggcaagctcatcaatgctgtc

SEQ ID NO: 3742 - DNA, 358 bp, Homo sapiens
  misc_feature 1..358: note = U/M: U (0.04:0.94) in Blood Granulocytes
  misc_feature 1..358: note = source = chr3:150286079-150286436; Gene: EIF2A (intron)
  source 1..358: mol_type = genomic DNA
cgtgagtattccagcagtcttcctttgattagaaacaatgatagtaaaaaatactatgccataaagatgatataatctaaattcttgatcaaaagatagaattcatatgccttaataacctttaagataaaatttttcttaattaagaaacttaaaaatcatcctccaacataccttattttggcagaatacaattagttatttgagttacgccatcgttttagaagtgaacttcctgagtaaggtaattccattgtagtagctcttttggaacttacttagctaattatgacggcaaattgcttaatactgtctttagaattgttagtaatatgcaagaggccaggcatggtggctc

SEQ ID NO: 3743 - DNA, 463 bp, Homo sapiens
  misc_feature 1..463: note = U/M: U (0.05:0.95) in Blood Granulocytes
  misc_feature 1..463: note = source = chr2:9035989-9036451; Gene: MBOAT2 (intron)
  source 1..463: mol_type = genomic DNA
cgaaggcaagtaatagcaagatggctgtcacaggacctagaaaggggagaagccatgttgcccaactccagaggttggtataagagttgtgaaagggagccgggcacggtggctcatgcctgtaatcccagcactttgggaggccgaggcgggcggatcacgaggtcagaagatcgagaccatcctggctaacatggtgaaatcccatctctactaaaaatgcaaaaaaaattatccaggcgtggtggcaggcacctgtagtcccagctactcaggaggctgaggcagaagaatggcgtgaacccgggaggtggagcttgcagtgagccgagatcgagccattgctctccagcctgggtgacagagtgagactccgtctcaaaaaaaaaaaaaaaaaaaaagagttgtgaaaggtgttgtctgattgcagaagccttttcccgtaaaggccgggtggcatctc

SEQ ID NO: 3744 - DNA, 122 bp, Homo sapiens
  misc_feature 1..122: note = U/M: U (0.02:0.91) in Blood Granulocytes
  misc_feature 1..122: note = source = chr16:46661322-46661443; Gene: SHCBP1 (Intergenic)
  source 1..122: mol_type = genomic DNA
cggcctggccaacatgatgaaaccccatctctcctaaacataaaaaaattagcggggactggtggcgtgcacctgtggtcccagctactcaggaagctgaggcaagagaatcgcttgaaccc

SEQ ID NO: 3745 - DNA, 159 bp, Homo sapiens
  misc_feature 1..159: note = U/M: U (0.01:0.89) in Blood Granulocytes
  misc_feature 1..159: note = source = chr7:100028821-100028979; Gene: MEPCE (exon)
  source 1..159: mol_type = genomic DNA
cgccaccaccaccaccacccactgcctgcagcaggcttcaaaaagcaacagcgcaagttccagtatgggaattattgcaaatactatgggtaccgcaatccttcctgtgaggatgggcgccttcgggtgttgaagcctgagtggtttcggggccgggac

SEQ ID NO: 3746 - DNA, 477 bp, Homo sapiens
  misc_feature 1..477: note = U/M: U (0.02:0.9) in Blood Granulocytes
  misc_feature 1..477: note = source = chr16:15053620-15054096; Gene: PDXDC1 (Intergenic)
  source 1..477: mol_type = genomic DNA
cggcctctcaaagtgctgggattacaggcgtgagccaccatgcccggccaacacgcaacatgtttaagaccaaaaggactgttttgcaatgaagcagatgaatcaaccagtaaggccaacccctcaaaaaatgtagcactgaagtttcttcaacatctgcctctgagacttgttcatatgtgcagacacagagcaggaaactaaagcaactgccttcctctttgtcacctgaaatgagaatggagagaggctggcaaggaaatgatatgtaatcttccctccttcctgattttcttttctatccttttttttttgagttggagtctcgctctgtcacccaggctggagtgcagtggcacaatcccagcactttgggaggctgacgggggtagattacttgaggccaggagtttgataccagcctggccaacatggtgaaaccccatctctactaaaaatacaaaaaattagccaggc

SEQ ID NO: 3747 - DNA, 266 bp, Homo sapiens
  misc_feature 1..266: note = U/M: U (0.07:0.94) in Blood Granulocytes
  misc_feature 1..266: note = source = chr12:133242506-133242771; Gene: POLE (intron)
  source 1..266: mol_type = genomic DNA
cgagacagtcactacacttttggtgcttatttgatgagggagacagatgaacaagtaatttagcagttgcttaattaaaataaagtgagatagtaaggcagctccttaaaaggtaaatgtagaattagcatatgacccaacaactctactgctgggtacatatccaaaatcaccaaaagcagagacctgaagacgcacttgcagcccatgttgaaaccaggattgctcgcgacagccaaaaggtggaagcaacccaagtgcacgtc

SEQ ID NO: 3748 - DNA, 286 bp, Homo sapiens
  misc_feature 1..286: note = U/M: U (0.06:0.92) in Blood Granulocytes
  misc_feature 1..286: note = source = chr7:105274407-105274692; Gene: ATXN7L1 (intron)
  source 1..286: mol_type = genomic DNA
cgcatcatttcctttttgggctcatttccctcagggtgcatgcagcctcctggaggtgatatagtggtggatgctttcaggaccttttagctctgattgctgcactccagggtgatacctggtgggaaggagttcactggaaccagcttgggtctcggaaaagctgaggagtgatagggaatggggcaatgagccacaggaaggtgttgacacagtcacgcaagtttgtttagttgccgttcactgtttccccctccgtactacatcacccgtcccctgtctgccc

SEQ ID NO: 3749 - DNA, 129 bp, Homo sapiens
  misc_feature 1..129: note = U/M: U (0:0.86) in Blood Granulocytes
  misc_feature 1..129: note = source = chr16:67755255-67755383; Gene: GFOD2 (Intergenic)
  source 1..129: mol_type = genomic DNA
cggagaaagaggttaactttccatgttaacacagtaaacggtgcgaggattttgaaacaagctcttgctcctcaggcaagagacaggaagctaatttcaatacccgtcaggctgggtgccgtggctcac

SEQ ID NO: 3750 - DNA, 224 bp, Homo sapiens
  misc_feature 1..224: note = U/M: U (0.09:0.94) in Blood Granulocytes
  misc_feature 1..224: note = source = chr3:38322197-38322420; Gene: SLC22A13 (Intergenic)
  source 1..224: mol_type = genomic DNA
cgcaacttctgcctcctgggttcaagcgattctcttgcctcagcttcccgagtaactgggattacaggtgtgcgccactgcgccaggctaatttttgtatttttagtagagacagggttttgccatgttggccaggctggtcttgaactcctgacctcaggtgatccgtctgcctcagcctcccaaagtgctgggattacaggcgtgagccaccatgcccagcc

SEQ ID NO: 3751 - DNA, 101 bp, Homo sapiens
  misc_feature 1..101: note = U/M: U (0.08:0.91) in Blood Granulocytes
  misc_feature 1..101: note = source = chr10:134400435-134400535; Gene: INPP5A (intron)
  source 1..101: mol_type = genomic DNA
cgagtcggagtcggagctggagctagtttttcatcatctgtcggcttctgcagaccaatgtcatcattccccgtcccctgggtggcccctcccccgccatc

SEQ ID NO: 3752 - DNA, 302 bp, Homo sapiens
  misc_feature 1..302: note = U/M: U (0.1:0.93) in Blood Granulocytes
  misc_feature 1..302: note = source = chr12:76934829-76935130; Gene: OSBPL8 (intron)
  source 1..302: mol_type = genomic DNA
cggctactatccctagtgccccagcttctctaagacacataacgcaagaagatggcacaattccttacaccataatggtaaatctacagtagcaatagaaagtatttgtaataaataagtatttgcaatttaaaaattatttagatgtggtcaggcgcggtggctcatgtctgtaatcccagcactttaggaggccgaggcaggtggatcacataaggccagcagtttgagaccagcctggccaatactgtgaaccccatctccactaaaaacacaaaaattagtcaggtgtggtggtgcac

SEQ ID NO: 3753 - DNA, 182 bp, Homo sapiens
  misc_feature 1..182: note = U/M: U (0.11:0.94) in Blood Granulocytes
  misc_feature 1..182: note = source = chr7:105082754-105082935; Gene: SRPK2 (Intergenic)
  source 1..182: mol_type = genomic DNA
cgcaccataccgtgctaattttcttactttttttttttttttaaatctttttttggaggaagtcttgctctgtagcgcaggctggagtgcagtggcgcaatctcggctcaccgcaacctccatttcctgggttcaagtgagtctcctgcctcagcctcatgagtagctgggattacaggcac

SEQ ID NO: 3754 - DNA, 213 bp, Homo sapiens
  misc_feature 1..213: note = U/M: U (0.13:0.94) in Blood Granulocytes
  misc_feature 1..213: note = source = chr11:113641630-113641842; Gene: ZW10 (intron)
  source 1..213: mol_type = genomic DNA
cgttgcacacaggctcattaacgtcagtctgtacttcctcaagtcggggacttgaggatgctattttttttttttttttttttgagacagagtctcactccgtcgcccaggctggactgcagtggtggagcaatctcacctcactgcaatttccacttcccgggttcaagcgattcttctgcctcagcctccagagtagctgggattacaggc

SEQ ID NO: 3755 - DNA, 178 bp, Homo sapiens
  misc_feature 1..178: note = U/M: U (0.09:0.88) in Blood Granulocytes
  misc_feature 1..178: note = source = chr1:3563696-3563873; Gene: WRAP73 (intron)
  source 1..178: mol_type = genomic DNA
cgacttcttaggacttcctgaaacacaccacatccgcgtggctagattgctgtcaacacctccgtttctcaactatattgcttagaaattaagactacgttggagtttccttagtttaaatgttcttaaactttagagaacgttataatttcaaaagaaaactggctttgagctgcac

SEQ ID NO: 3756 - DNA, 242 bp, Homo sapiens
  misc_feature 1..242: note = U/M: U (0.19:0.96) in Blood Granulocytes
  misc_feature 1..242: note = source = chr16:4678631-4678872; Gene: MGRN1 (intron)
  source 1..242: mol_type = genomic DNA
cgcctcctgggttcaagcaattctcctgtttcagcctcctgagtagcttggattacaggtgcgcaccaccacgcccggctaatttttaaatttttggtacagatgaggtttcaccatattggccagtctggtctcgagctcctgacctcaggtgatctgcctgccttggcctcccaaagtgctaggattacaggtgtgagccactatgcccagccttttctgtttttttttgagacagtctc

SEQ ID NO: 3757 - DNA, 83 bp, Homo sapiens
  misc_feature 1..83: note = U/M: U (0.2:0.96) in Blood Granulocytes
  misc_feature 1..83: note = source = chr12:133257773-133257855; Gene: POLE (intron)
  source 1..83: mol_type = genomic DNA
cgctcaaaaccaaaccgcaaatccatcttatccgtccactgactccgttccaggcgcttgagtgccgaaactgaggaagtggc

SEQ ID NO: 3758 - DNA, 177 bp, Homo sapiens
  misc_feature 1..177: note = U/M: U (0.17:0.93) in Blood Granulocytes
  misc_feature 1..177: note = source = chr12:6705822-6705998; Gene: CHD4 (intron)
  source 1..177: mol_type = genomic DNA
cgggcatggtggcaggtgcctgtaatcccagctactcgggaagctgaagcaggagaattgcttgaacccgggcggcggaggttgcagcaagctgagattgcgccactgcactccagcctgggcgacagaacgagactccatttcaaaaaaaaaaattaggcaggcgtggtggcacac

SEQ ID NO: 3759 - DNA, 83 bp, Homo sapiens
  misc_feature 1..83: note = U/M: U (0.02:0.95) in Blood Granulocytes
  misc_feature 1..83: note = source = chr7:65214762-65214844; Gene: LOC441242 (intron)
  source 1..83: mol_type = genomic DNA
cggcctcccaaagtgtcgggattacagtcgtgagccaccgtgccccggctcctagttgtgtaattcttacgaagaacatcacg

SEQ ID NO: 3760 - DNA, 137 bp, Homo sapiens
  misc_feature 1..137: note = U/M: U (0.01:0.94) in Blood Granulocytes
  misc_feature 1..137: note = source = chr12:113770034-113770170; Gene: SLC24A6 (intron)
  source 1..137: mol_type = genomic DNA
cggggcacttagcacatcgccacctgaaatgtatatgcttacttctcttttttttgttgttgagacagagtcttgcttcgccgcccaggctggagtgcagtggtacaatcctggctcactgcaacatccacctcacg

SEQ ID NO: 3761 - DNA, 209 bp, Homo sapiens
  misc_feature 1..209: note = U/M: U (0.01:0.94) in Blood Granulocytes
  misc_feature 1..209: note = source = chr10:3815120-3815328; Gene: KLF6 (Intergenic)
  source 1..209: mol_type = genomic DNA
cgcctggctctggagtgagttaactgataatgtcagtgcatgtcattaactatcttgcacatctggaagcagatcttgcagaaccaaatgaaatgtggtaacgcgaaacttaagaaatcaaggggagcggcgctgtgcttggttgatacctgcaagtcacccataaatgtgcctgtcgtcaacaaagggcaaatcttggaaaaatggcg

SEQ ID NO: 3762 - DNA, 252 bp, Homo sapiens
  misc_feature 1..252: note = U/M: U (0.02:0.95) in Blood Granulocytes
  misc_feature 1..252: note = source = chrX:44780151-44780402; Gene: KDM6A (intron)
  source 1..252: mol_type = genomic DNA
cgctctgtcgccaggctggagtgcagtggtgtgatttcggctcgctgcaacctccgcctctcgggttcaagcaattctcttgcctcagcctccccagtagctgggactacaggcgtgcaccaccatgctcagctaatttttgtatttttagtagagacagggtttcaccatgttggccaggctgttctcaaactcctaaccttgtgatctgcctgcctcggcctcccaaaatgctaggattacttacaggcg

SEQ ID NO: 3763 - DNA, 66 bp, Homo sapiens
  misc_feature 1..66: note = U/M: U (0.02:0.94) in Blood Granulocytes
  misc_feature 1..66: note = source = chr15:50266301-50266366; Gene: ATP8B4 (intron)
  source 1..66: mol_type = genomic DNA
cggagttccgctcttgttgcctaagctggagtgcaacggcgcaatctcggctcactgcaacttccg

SEQ ID NO: 3764 - DNA, 165 bp, Homo sapiens
  misc_feature 1..165: note = U/M: U (0.01:0.93) in Blood Granulocytes
  misc_feature 1..165: note = source = chr2:30935561-30935725; Gene: CAPN13 (Intergenic)
  source 1..165: mol_type = genomic DNA
cggtggtgcgatctcggctcactgcaacctctgcctcctggtttcaagcaattctcttgcctcagcttcccaagtagctgggattacaagctatgttgccacacctagataattttcatattttagtagagacggggtttcaccatgttggtcaggctggtctcg

SEQ ID NO: 3765 - DNA, 89 bp, Homo sapiens
  misc_feature 1..89: note = U/M: U (0.01:0.92) in Blood Granulocytes
  misc_feature 1..89: note = source = chr15:63180784-63180872; Gene: MIR190A (Intergenic)
  source 1..89: mol_type = genomic DNA
cgtgagccaccacacccggcctcattgacgttgtataaaaacctttcgctaaacattgagaaacttcctaaggagtgagagactgaacg

SEQ ID NO: 3766 - DNA, 164 bp, Homo sapiens
  misc_feature 1..164: note = U/M: U (0.01:0.92) in Blood Granulocytes
  misc_feature 1..164: note = source = chr20:61582887-61583050; Gene: SLC17A9,SLC17A9 (Intergenic,promoter-TSS)
  source 1..164: mol_type = genomic DNA
cggtaggaaatcaccatcacagagtgaatggaagcgaatcacctcaaagagggtgctgttgacagcgatacgtttagcaacagtttccaaacttcctggctatgggctagggctgtttggggcaataaacctctctctgccaccatcttttcacctaccctacg

SEQ ID NO: 3767 - DNA, 213 bp, Homo sapiens
  misc_feature 1..213: note = U/M: U (0.02:0.93) in Blood Granulocytes
  misc_feature 1..213: note = source = chr8:131000351-131000563; Gene: FAM49B (intron)
  source 1..213: mol_type = genomic DNA
cgtcagccccaagtgaggacggaacaaaggtttcatagtctcctgtaacaggaagtctcctagtcgtacgaaactgctacgtgatacccggatggcctctttctcgatcttcaggggtacgtatcttccggccagggcaggtgtcttccggccggctctcttcctgattccgctatcttgcttcggcacgctgctgacgcaagtagccttgcg

SEQ ID NO: 3768 - DNA, 340 bp, Homo sapiens
  misc_feature 1..340: note = U/M: U (0.01:0.92) in Blood Granulocytes
  misc_feature 1..340: note = source = chr1:10211350-10211689; Gene: UBE4B (exon)
  source 1..340: mol_type = genomic DNA
cggtctctttcttgctcttcttgcctctgttcagatactctccccaggcgctttatgagccctgtactcaggatattgtgatgttccttgttgtgatgttgtgcaaccagaactacatccgaaacccatatttggtggccaaactggtagaagtcatgtttatgaccaaccctgctgttcagccacgaacccagaagttttttgaaatgattgagaaccatcctctctccaccaagttgttggtaccttccctgatgaagttttatacaggtaggttgctggaacacagtgtagcacatggcaggccaacttaggtaaggtcatctaaagctagtggacg

SEQ ID NO: 3769 - DNA, 428 bp, Homo sapiens
  misc_feature 1..428: note = U/M: U (0.02:0.93) in Blood Granulocytes
  misc_feature 1..428: note = source = chr2:64234846-64235273; Gene: VPS54 (intron)
  source 1..428: mol_type = genomic DNA
cgaagaagagagctaatgaaagctctgaagaaggggtagggcaaatatgtttagaggaaaagacaaaggcaatcagaaataccatccttacacagggaagatgtgtcaggaagtaaagtgcgaacagtaagtagcatcaacatgctgcaaagagatcaaggagattactaactttagaaaggatactggattaagaacagtttcaggacagtggttagggaagaagcaatcccactgaggttaagaggtaagtgatgaagtaataaaggcaacaatatcaacatctctttggtggtaaaaggaaaaaaaaaaaaagaacaagagttgagcaagaatcttttaggctatcggagacctgaccatatttgtaggcaaacagcaagaagccaattgaagggtgagattaaagaggaacaagaggccgggcg

SEQ ID NO: 3770 - DNA, 120 bp, Homo sapiens
  misc_feature 1..120: note = U/M: U (0.01:0.91) in Blood Granulocytes
  misc_feature 1..120: note = source = chr1:6035727-6035846; Gene: NPHP4 (intron)
  source 1..120: mol_type = genomic DNA
cgaaaagccaccagctcctagtctccctaacacatctgaattgtgaactgcacaggcagcatgacacgcagctgccaggatgtggtgaaatgcaagtgctgcccaacttccgccgcaacg

SEQ ID NO: 3771 - DNA, 169 bp, Homo sapiens
  misc_feature 1..169: note = U/M: U (0.01:0.91) in Blood Granulocytes
  misc_feature 1..169: note = source = chr19:4464265-4464433; Gene: UBXN6 (Intergenic)
  source 1..169: mol_type = genomic DNA
cgtgcccagccattaaccacttttacgtgtacagttcggtggcctcaagtacattcgcattgttgtgcaaccattacagcaatcgttacatttcatctagtgaaacgtaaattctgcctaattaagtaataactacccccaaccctgataacctctagtctacttttcg

SEQ ID NO: 3772 - DNA, 202 bp, Homo sapiens
  misc_feature 1..202: note = U/M: U (0.02:0.92) in Blood Granulocytes
  misc_feature 1..202: note = source = chr4:140852379-140852580; Gene: MAML3 (intron)
  source 1..202: mol_type = genomic DNA
cgccacacagcctcgctcttctgcagttcagctcttccttttacgttcctcttctggctacctcatttatccttccgtaaaccttcactgatgagagatgtggtaacccaagcaagtctatcgttcttgcaactaaaatgaaccagcacacttaggacacgacagggttcctgctgtcatttcttcctcttaccttgtaccg

SEQ ID NO: 3773 - DNA, 216 bp, Homo sapiens
  misc_feature 1..216: note = U/M: U (0.01:0.91) in Blood Granulocytes
  misc_feature 1..216: note = source = chr16:89365093-89365308; Gene: ANKRD11 (intron)
  source 1..216: mol_type = genomic DNA
cggcctaagtgcacttctgaggggtgtcagggaagcctttgctgcggcttggggattacagaattttaaacagcaagaaccttccctttgctagtccaagcttccctttgtatgagaaactgcttacgtctagagaggaaaaatggttgagaaataggaggaccagagaccaatcacgcggagttcttaatcatgtgaaaatattttattttgacg

SEQ ID NO: 3774 - DNA, 324 bp, Homo sapiens
  misc_feature 1..324: note = U/M: U (0.01:0.91) in Blood Granulocytes
  misc_feature 1..324: note = source = chr2:98429359-98429682; Gene: TMEM131 (intron)
  source 1..324: mol_type = genomic DNA
cggaaggctgagctcaggcaggagaatcgcttgaacccgcaagccaagattgcaccactgcactccagcttgggaaacacagcgagactccatctaaaaaaaaaaaaaattacagttctatgctttcctatgcttttgtatatatgcataaaaccacacatttatacgacatagttgagggctttgtatgacgaaagtcttttgagtaatcagaaatgaaaacagccatggcttctgctgagttgctattcttcctctgagggcacatgaaagaggcaggaagctaaactactaagagaggtttagtggaaccctaggggatcg

SEQ ID NO: 3775 - DNA, 347 bp, Homo sapiens
  misc_feature 1..347: note = U/M: U (0.02:0.92) in Blood Granulocytes
  misc_feature 1..347: note = source = chr2:64642834-64643180; Gene: LGALSL (Intergenic)
  source 1..347: mol_type = genomic DNA
cgaggctgcagtgagccatgttcgcgctacggcactccagcttgggcaagtggtaagccactacctatgtggtctttgtaacaccttgataggaaatgaatacagaggacatgttgcatgattctgttgcaattgcaaaacaggggattgtattttattttttatttttttttccatctacttcccttaggggtaaggatttacttctcttaatgcatacatatgttcttcttgcttcccgtctcccatcctcttaatatgattatatttggctatatcagtcctcagggttggtgttattatgactccataacatgggaagtaacctggctgtattgttcctggcg

SEQ ID NO: 3776 - DNA, 96 bp, Homo sapiens
  misc_feature 1..96: note = U/M: U (0.04:0.93) in Blood Granulocytes
  misc_feature 1..96: note = source = chr10:6374510-6374605; Gene: LOC399715 (intron)
  source 1..96: mol_type = genomic DNA
cgacaatgcacaggacagcctctgacaacaaactattatcccgtctaaatgtcgataatgttgaggttgagaaactcccatacgcaagatctctcg

SEQ ID NO: 3777 - DNA, 173 bp, Homo sapiens
  misc_feature 1..173: note = U/M: U (0.05:0.94) in Blood Granulocytes
  misc_feature 1..173: note = source = chr11:47734458-47734630; Gene: AGBL2 (intron)
  source 1..173: mol_type = genomic DNA
cgcctgtaatcccagctacctgggtacttgggaggctgaggcaggaaaatcgcttgaccccgcgaggtggaagttgcagcaagcctagattgcaccactgcactccagcctgggcaacaagagcataactccgtctcaagaataaaaaaaacactgggcgcggtaagctcacg

SEQ ID NO: 3778 - DNA, 188 bp, Homo sapiens
  misc_feature 1..188: note = U/M: U (0.01:0.9) in Blood Granulocytes
  misc_feature 1..188: note = source = chr14:90440873-90441060; Gene: TDP1 (intron)
  source 1..188: mol_type = genomic DNA
cgcccattactgcccccagcaaagtttcacccatgtcatgtggtaaggaggctggggtaggtagtggggagaggttgcagtagtgattgccacgattatagagtgcctattgcatgcaggcccccgttgctcagcattttacatatgtgatctcgttcctgacaactctggatctcagaatggtaccg

SEQ ID NO: 3779 - DNA, 218 bp, Homo sapiens
  misc_feature 1..218: note = U/M: U (0.02:0.91) in Blood Granulocytes
  misc_feature 1..218: note = source = chr17:2203353-2203570; Gene: SMG6 (exon)
  source 1..218: mol_type = genomic DNA
cgtcgtgggtttccctcaccccctccccttttcccatcctctttcctttttctccttttgcagcccctactctcccaccacctgggctcttttctatctcagccctgtctggtttattcgcaacttcctccttcgcaacatttcccctacactcatcttcctctactctcagttgttctacctggttgaggacttcttcctcctccacccgactggcg

SEQ ID NO: 3780 - DNA, 301 bp, Homo sapiens
  misc_feature 1..301: note = U/M: U (0.02:0.91) in Blood Granulocytes
  misc_feature 1..301: note = source = chr2:99760705-99761005; Gene: C2orf15 (intron)
  source 1..301: mol_type = genomic DNA
cgatctcctgacctcatgacctgcccgcctcggcctcccaaagtgctgggattacaggcatgagccaccgcgcccggcctgtgttccgttttttaaatcagagagtttcctccttatgccgaggcctgaaagttccaggcaatgtccattcatagggctcactttatttcctgtttctcaaggatcactctcccgaactgcctgttgtccaatatctaaaagccattgcttcatgtgttttgtgttttgatgctgaaagcaggcggggcacggtggctcatgcctgtaatccagctactcg

SEQ ID NO: 3781 - DNA, 323 bp, Homo sapiens
  misc_feature 1..323: note = U/M: U (0.01:0.9) in Blood Granulocytes
  misc_feature 1..323: note = source = chr3:183662759-183663081; Gene: ABCC5 (intron)
  source 1..323: mol_type = genomic DNA
cgtgacagtgagttctcaggagatctggttgtttgaaagtgtgtggcacttcccccttctctctctctcctgctctgccatgggaagatgtgcttgtttccccttcacctttcgctatgattgtaagtttcctgaggcctcccagccatgcgtcctgttaagccttcggaactgtgagtgacttaaacctctttcttcataaattacccaatctcaggtagttctttacagcagtgtgaaatggattaagacatccctgtaggaaattgtttaagagtgccagttaggacagcagcaagatgcctgccacccacggcaagacg

SEQ ID NO: 3782 - DNA, 331 bp, Homo sapiens
  misc_feature 1..331: note = U/M: U (0.03:0.92) in Blood Granulocytes
  misc_feature 1..331: note = source = chr3:128710307-128710637; Gene: KIAA1257 (intron)
  source 1..331: mol_type = genomic DNA
cgtaaggtcacttacgtcagcagcgtgcaccagcaaaatagcagaagcaggaggagagccggctggaatacacctaccctggccggaagacatgaagatgagaaagaggccatccgggtacagcgtagcagttacgccagactaggacacttcctgtttacaggagactataaaacctttgccccgtcctcacttggggctgacgccattttaggcctcagccggcctgcaccaaggcgttcattgaaacagcatgttgctccacaccgcctcgtgttgtctgttggtgcgctctcggggttccaacccatacaagaaacttacaccatcg

SEQ ID NO: 3783 - DNA, 83 bp, Homo sapiens
  misc_feature 1..83: note = U/M: U (0.03:0.91) in Blood Granulocytes
  misc_feature 1..83: note = source = chr1:109712081-109712163; Gene: KIAA1324 (intron)
  source 1..83: mol_type = genomic DNA
cgatggtctcgaactcctcacctcaggtgatccacccgcctcagcctcccaaagtgctgcgattacaggcatgagccaccacg

SEQ ID NO: 3784 - DNA, 144 bp, Homo sapiens
  misc_feature 1..144: note = U/M: U (0.03:0.91) in Blood Granulocytes
  misc_feature 1..144: note = source = chr2:30666895-30667038; Gene: LCLAT1 (Intergenic)
  source 1..144: mol_type = genomic DNA
cgggaggataaggcaggagaattgcttgaacccgggaggccgaggttgtggtgagctaggatggtgccattgcactccagcctgggcaacaacagcgaaactctgtctcaacaacaacaacaaaaaagatgggggtggggaacg

SEQ ID NO: 3785 - DNA, 163 bp, Homo sapiens
  misc_feature 1..163: note = U/M: U (0.01:0.89) in Blood Granulocytes
  misc_feature 1..163: note = source = chr15:78291531-78291693; Gene: TBC1D2B (intron)
  source 1..163: mol_type = genomic DNA
cgcttccctgtcaaccaaaggcccaacagactcaccagccccaggaaaagctgtgatgaaacagaaatgccccgaaggacttcctgcctgtccccatcagagcaggccatttgctcctgctgccgtcggctgcgtgggctccttttaacacaaggcacacacg

SEQ ID NO: 3786 - DNA, 232 bp, Homo sapiens
  misc_feature 1..232: note = U/M: U (0.03:0.91) in Blood Granulocytes
  misc_feature 1..232: note = source = chr8:61496608-61496839; Gene: RAB2A (intron)
  source 1..232: mol_type = genomic DNA
cggtgttttgtaactttttcctaagactggtgaagttaagttttcttgtctctctttatgcactccttccctacctgctcttattctgtatatgaataatatgaaaatgtagaggacattgtattaaaggaaactctccaaccttttttttcgttacaggcagggcaagaatcctttcgttccatcacaaggtcgtattacagaggtgcagcaggagctttactagtttacg

SEQ ID NO: 3787 - DNA, 90 bp, Homo sapiens
  misc_feature 1..90: note = U/M: U (0.01:0.88) in Blood Granulocytes
  misc_feature 1..90: note = source = chr3:5131788-5131877; Gene: ARL8B (Intergenic)
  source 1..90: mol_type = genomic DNA
cggaggttgctgtgagccgagattgtgccattgcactctagcttgggtaacaaagccgagtctgtcgcaaaaaaaaaaaaaagagtcacg

SEQ ID NO: 3788 - DNA, 124 bp, Homo sapiens
  misc_feature 1..124: note = U/M: U (0.01:0.88) in Blood Granulocytes
  misc_feature 1..124: note = source = chr16:89566941-89567064; Gene: SPG7 (Intergenic)
  source 1..124: mol_type = genomic DNA
cgtggagtaacggtgttgcttagcccatatcctcctggacaagtgctttggttcttccctttaccggtaaagtgttgcaaacgtagtctatcgagtttgttctatttcatctgttctgtttacg

SEQ ID NO: 3789 - DNA, 129 bp, Homo sapiens
  misc_feature 1..129: note = U/M: U (0.03:0.9) in Blood Granulocytes
  misc_feature 1..129: note = source = chr9:139806556-139806684; Gene: TRAF2 (intron)
  source 1..129: mol_type = genomic DNA
cggctcccaaagtgctgggattacaggcgtgagccactgcgtctggccctttttttttttttttttttttttttttggagacagagtctcactctgtcgtcaggctggaagtgcagtggcgcaatctcg

SEQ ID NO: 3790 - DNA, 146 bp, Homo sapiens
  misc_feature 1..146: note = U/M: U (0.01:0.88) in Blood Granulocytes
  misc_feature 1..146: note = source = chr17:64421921-64422066; Gene: PRKCA (intron)
  source 1..146: mol_type = genomic DNA
cggcattaaattgtggaagcaggaatggtgttaaaaggattcttagaggtggtgccggttaggaggaggaaggaagccgttgcatgccaggtatggtgtcaccacacatatttcgtcctggtagtgatcctgtgaattaccctccg

SEQ ID NO: 3791 - DNA, 198 bp, Homo sapiens
  misc_feature 1..198: note = U/M: U (0.06:0.93) in Blood Granulocytes
  misc_feature 1..198: note = source = chr2:9136659-9136856; Gene: MBOAT2 (intron)
  source 1..198: mol_type = genomic DNA
cgagaggcaggggcatgctctcccggccgcagccctcactcaggttcgctgtaggctggctgcgtccttcaactggaggccatagctcttcctcccctgctgtgaagcagcccctgctccacagccactatcttggggttctgctccttccttccctcttgaccctccacatctagtgcagctggctcgggaacttcg

SEQ ID NO: 3792 - DNA, 200 bp, Homo sapiens
  misc_feature 1..200: note = U/M: U (0.02:0.89) in Blood Granulocytes
  misc_feature 1..200: note = source = chr19:41238916-41239115; Gene: ITPKC (intron)
  source 1..200: mol_type = genomic DNA
cgtgtgtgtctttgtggactctgttgtattctgtgcattgatttgcccattcttgtgccacactgtggctttatgtcttaatatcaggaagggtaagccctccagtttgttctacataatttcctttgtcacatcctctgtgtgctcaggacctatctggaagaggagctagtgaaggcacgggaacgtccccgtccccg

SEQ ID NO: 3793 - DNA, 269 bp, Homo sapiens
  misc_feature 1..269: note = U/M: U (0.07:0.94) in Blood Granulocytes
  misc_feature 1..269: note = source = chr15:70096332-70096600; Gene: LINC00593 (Intergenic)
  source 1..269: mol_type = genomic DNA
cggatgagaataccaaggcctggtagctttcaatgttcatgccttcaccgctgccgtctctgattgtgaaagtccaagtgggtgccgaaactcatgggctctcagcttgcatatcctgagcggtggccaagcaggggcctagttttccttccttagtgagaagttttaaagattccctggtcactcattgttttgagctagatgtcttgtgaattagtagttggcacacacttattgcttacccctccctcacattcatttcttcatcg

SEQ ID NO: 3794 - DNA, 343 bp, Homo sapiens
  misc_feature 1..343: note = U/M: U (0.01:0.88) in Blood Granulocytes
  misc_feature 1..343: note = source = chr7:23327214-23327556; Gene: MALSU1 (Intergenic)
  source 1..343: mol_type = genomic DNA
cgttcatatgaggatttaagttttgccctaaatccttccttaccttgtaatgcgcctagagcaagaggagacaggtgttgcaacaaaggcccggggccctgtgctggggatcatgccctgtatatgatgcaccttgctgtgtgtggcaaggctgaaaagggcctatagtccctcttcatctgtgccaccctccctctccaccctcaagccccaccacttcctgtctgaaccctgtcatctggccatttggttgattcactctgtcttgcaccacacatgtccccttcctgcctccagtctcggggctctctctgttctctccatgctcctcctttcccgcccg

SEQ ID NO: 3795 - DNA, 55 bp, Homo sapiens
  misc_feature 1..55: note = U/M: U (0.09:0.95) in Blood Granulocytes
  misc_feature 1..55: note = source = chr4:146708334-146708388; Gene: ZNF827 (intron)
  source 1..55: mol_type = genomic DNA
cggccgggcgcagtggctcaggcctgtaatcccggcactttgggaggccgaggcg

SEQ ID NO: 3796 - DNA, 126 bp, Homo sapiens
  misc_feature 1..126: note = U/M: U (0.05:0.91) in Blood Granulocytes
  misc_feature 1..126: note = source = chr15:99074273-99074398; Gene: FAM169B (Intergenic)
  source 1..126: mol_type = genomic DNA
cgcatgttacaacatggatgaactttgaggacattacgctaagtgaaataagccagttacgaaaggacacgtgctgaatgattccacttatatgaggtacctaaaataggcaaattcatagagacg

SEQ ID NO: 3797 - DNA, 145 bp, Homo sapiens
  misc_feature 1..145: note = U/M: U (0.07:0.93) in Blood Granulocytes
  misc_feature 1..145: note = source = chr12:124341627-124341771; Gene: DNAH10 (exon)
  source 1..145: mol_type = genomic DNA
cgagacatgaacttgcccaaatttgtgtttgaagatgttcctcttttccttggtttgatttcggatctgtttcctgggctggactgccctcgcgtccgctaccctgacttcaacgatgcggtagagcaggtcctggaggagaacg

SEQ ID NO: 3798 - DNA, 159 bp, Homo sapiens
  misc_feature 1..159: note = U/M: U (0.01:0.87) in Blood Granulocytes
  misc_feature 1..159: note = source = chr15:65585965-65586123; Gene: PARP16 (Intergenic)
  source 1..159: mol_type = genomic DNA
cgcctgtaatctcagcactttggaggatgaggttgtgggattgcttaagaccaggatttcgagaccagcctgggcaacataggaaacctggtctctaaaaacaaaacaagcagtggctcaagcccgtaatcctagcactttggaaggcggaggtggtcg

SEQ ID NO: 3799 - DNA, 242 bp, Homo sapiens
  misc_feature 1..242: note = U/M: U (0.07:0.93) in Blood Granulocytes
  misc_feature 1..242: note = source = chr9:139812189-139812430; Gene: TRAF2 (intron)
  source 1..242: mol_type = genomic DNA
cgtggctgcttccattttctttgtctgcgttggatagtcttctgctgtccgtgttcttgtctgtttcctgctctgacgtggcatctgccatctctaggaagcccaggcttcccgtgcgggaggttgcgtagtgaccacccgggcctcagtggtgcttgctgccgccaccgtgctccttgtttctgggcctcttggtgttgagaaatgagagagaacacagcgtgagtctgtggcgatgctcg

SEQ ID NO: 3800 - DNA, 265 bp, Homo sapiens
  misc_feature 1..265: note = U/M: U (0.04:0.9) in Blood Granulocytes
  misc_feature 1..265: note = source = chr17:4053478-4053742; Gene: CYB5D2 (intron)
  source 1..265: mol_type = genomic DNA
cgcccagaaggagatggatgggcacctgcttcccccactcttagtcttgggagaggattactaagctgcttgctttggcctcagtttcgccatagccagtggttgcttgcaccatccttgaacaaccagctccagaagggcagcttccctgtctcactgtgttcgatgcatctggcttcagcacacagccagaagggcttgaagcctgaatttgtgtttcgacaaatccccttttatttggtcctctaggaggagacaaacttcg

SEQ ID NO: 3801 - DNA, 384 bp, Homo sapiens
  misc_feature 1..384: note = U/M: U (0.06:0.92) in Blood Granulocytes
  misc_feature 1..384: note = source = chr17:33319549-33319932; Gene: LIG3 (intron)
  source 1..384: mol_type = genomic DNA
cgcccttgaccccaatgcctatgaagccttcaaagcctcgcgcaacctgcaggatgtggtggagcgggtccttcacaacgcgcaggaggtggagaaggagccgggccagagacgagctctgagcgtccaggcctcgctgatgacacctgtgcagcccatgttggtgaggagtgctcccctgcctctgctttccagcctctccaagctccacatcctttgggctgagatcagatagggtatgagtgttgagagcacttgcaaattgactggagaagtttagggaaggaagagggaggtgcaagggggtatttctctgtaggaggcgaaggcaaaggagaagacagaggatctagtggaaagacctgagttgtaggcccagctacg

SEQ ID NO: 3802 - DNA, 403 bp, Homo sapiens
  misc_feature 1..403: note = U/M: U (0.09:0.95) in Blood Granulocytes
  misc_feature 1..403: note = source = chr1:213066546-213066948; Gene: FLVCR1 (intron)
  source 1..403: mol_type = genomic DNA
cgccaccacgcccggctaattttttgtattttttgtagagacggggtttcaccatgttagccaggatggttttgatttcctgaccttgtgatctgcctgcctcggcctcccaaagtgctgggattacaggtgtcagccactgcgcctggctgggttgcttcttatggataagcaaagaaagtgttttcttgagttggaatctactagtaaagatgctgtaaatgttgaaatgacaacaaaggatttagaatattatataaacttagctgatgaagcagtggcagggtttgagaggatcaactcctgttttgaggaagttttgtgggtaaaatgttatcaaacaagtattgcacacagagagatctttcatgaaaggaagagttgattaatacggcaaacttcg

SEQ ID NO: 3803 - DNA, 59 bp, Homo sapiens
  misc_feature 1..59: note = U/M: U (0.07:0.92) in Blood Granulocytes
  misc_feature 1..59: note = source = chr19:2303624-2303682; Gene: LINGO3 (intron)
  source 1..59: mol_type = genomic DNA
cgagatctgggttgcagttggaaggcgcgtccagctctgcgtggtccgaccccaggtcg

SEQ ID NO: 3804 - DNA, 66 bp, Homo sapiens
  misc_feature 1..66: note = U/M: U (0.07:0.92) in Blood Granulocytes
  misc_feature 1..66: note = source = chr7:99745687-99745752; Gene: LAMTOR4 (promoter-TSS)
  source 1..66: mol_type = genomic DNA
cggaagttgtattgagccagagatcgcgccattgcactgcaacctgggcgaccgagtgagactccg

SEQ ID NO: 3805 - DNA, 94 bp, Homo sapiens
  misc_feature 1..94: note = U/M: U (0.11:0.96) in Blood Granulocytes
  misc_feature 1..94: note = source = chr16:3663807-3663900; Gene: SLX4 (Intergenic)
  source 1..94: mol_type = genomic DNA
cgcagtggtgtgtgcaacctccacttccctggttcaagcgattctcctgcctcagcctccggagtagctgggattacaggcgcccgcaaccgcg

SEQ ID NO: 3806 - DNA, 172 bp, Homo sapiens
  misc_feature 1..172: note = U/M: U (0.01:0.86) in Blood Granulocytes
  misc_feature 1..172: note = source = chr18:9704835-9705006; Gene: RAB31 (Intergenic)
  source 1..172: mol_type = genomic DNA
cgatggagacgatgaggaggcgagcccccaccctccccatctcccatctaagatgtcaccacactttccacatgaagacatctggaattgcaaaggaggctgtgcagtttctatccgcttacctaatagcccctccaccgagcagccaccttccttggggttctcagggacg

SEQ ID NO: 3807 - DNA, 60 bp, Homo sapiens
  misc_feature 1..60: note = U/M: U (0.09:0.93) in Blood Granulocytes
  misc_feature 1..60: note = source = chr13:21045259-21045318; Gene: CRYL1 (intron)
  source 1..60: mol_type = genomic DNA
cgggggtggttgtgtgtgttagcgtaaattcacgtgaaagagtatgacgtggctattacg

SEQ ID NO: 3808 - DNA, 120 bp, Homo sapiens
  misc_feature 1..120: note = U/M: U (0.09:0.93) in Blood Granulocytes
  misc_feature 1..120: note = source = chr17:4081029-4081148; Gene: ANKFY1 (intron)
  source 1..120: mol_type = genomic DNA
cggcctgacccgagcagtcaaacaaagggttgagaaacgtggagaaagtttcctcttactgagctacgctctatacacaatgcgggagggagccaacagcagggcccgggctttgctccg

SEQ ID NO: 3809 - DNA, 174 bp, Homo sapiens
  misc_feature 1..174: note = U/M: U (0.1:0.94) in Blood Granulocytes
  misc_feature 1..174: note = source = chr7:2185546-2185719; Gene: MAD1L1 (intron)
  source 1..174: mol_type = genomic DNA
cggacgtggacatgtgtcatgttggtgaaaggaacaccaagtcaccaagacagcgactgtgggaagggcgctctgttccgcacatcagatcagcagagaaggaaagttacacaacacccaggaagtgcatcaagactgcgtggtgtaggctgctcacagcggcacactacgccg

SEQ ID NO: 3810 - DNA, 195 bp, Homo sapiens
  misc_feature 1..195: note = U/M: U (0.11:0.95) in Blood Granulocytes
  misc_feature 1..195: note = source = chr1:21786129-21786323; Gene: NBPF3 (intron)
  source 1..195: mol_type = genomic DNA
cggttgaggggaaggaacaaaggaggtcagtactgggaacgctgaagatgggaggccatttcataacatttcttgttgatgaaactgccatggacagcttctttgctcatcagcaggcccagtgtcttggcaatcatggtgacagtgacattgaaggtgggggctccaccgatgctcttcgtttgaagatgcacg

SEQ ID NO: 3811 - DNA, 309 bp, Homo sapiens
  misc_feature 1..309: note = U/M: U (0.03:0.87) in Blood Granulocytes
  misc_feature 1..309: note = source = chr11:33720840-33721148; Gene: C11orf91 (intron)
  source 1..309: mol_type = genomic DNA
cggacctaagcatttaggttatttcatacttcccttctctgtgtggcaggggaagccaacttaagccgttatatacgatagttggaatgatctttttagaactatctgcccttctccagtggtcaaggacaagccttagccaaaacaagtgatgggaaagacaaagtctgcaggacaacctaccgctactgaaagttctactttgcaataggtccttcttggagtacaaggcatttaacaactttaccctccaacagggaggagtcattcagctcgtaggctgagggatcctgcccgcatcagcacacg

SEQ ID NO: 3812 - DNA, 445 bp, Homo sapiens
  misc_feature 1..445: note = U/M: U (0.08:0.92) in Blood Granulocytes
  misc_feature 1..445: note = source = chr15:91488251-91488695; Gene: UNC45A (intron)
  source 1..445: mol_type = genomic DNA
cggagagggagaatttccacagactttgtgaaaactacatcaagtaaggaagtctgtttcacctcccgttgccagggattctagcgaaaaagttctgactccttgaggaggggcagaaatgaaaggtttccagcagaaacagtaatcttggggaggactagttggaggctgaacaaagggaaagtggccccaaggcccacttcctgctccaaagtggcctccgcagggaggttctttctcaagtcaatgttccaataatgcaacaaacgccatcaagcacgtactgggtttaccaaacacttcctacgcttctgttcccacacagatgaaacatgacagtcctttttttttttttcttgagacagagtttcactcttgttgctcaggctggagtgcaatggcatgatctcaggtcaccacaaccttcgcctctagggttcaagcg

SEQ ID NO: 3813 - DNA, 354 bp, Homo sapiens
  misc_feature 1..354: note = U/M: U (0.1:0.93) in Blood Granulocytes
  misc_feature 1..354: note = source = chr9:132286031-132286384; Gene: LOC100506190 (Intergenic)
  source 1..354: mol_type = genomic DNA
cggaggttgcagtgagcggaggttgcagtgagcggaggttgcagtgagcggaggttgcagtgagccgagattgcgccacttcactccagcctgtctcaaaaaaaaagaaaaaaagaaactggtagaattatttctcatactatttgtatttaacccaatagatccaaaatattatcactttgacaggtaattaatatttaaaattattaatgagatatttacttttttttccatactaagtctttgcatttgtgtgcatttcacactcaaggcacacagcagttcaggctagccacattttgagtgccctgcgtgcaggacagtgcagccctggcctccgctgtgtcaccaccg

SEQ ID NO: 3814 - DNA, 91 bp, Homo sapiens
  misc_feature 1..91: note = U/M: U (0.11:0.93) in Blood Granulocytes
  misc_feature 1..91: note = source = chr5:78498499-78498589; Gene: JMY (Intergenic)
  source 1..91: mol_type = genomic DNA
cgcccaggttggagtgcagtggtgcaatctcgattggctcactgcaacctccgcctcccgggttcaagcaattctctgcctcaccctcccg

SEQ ID NO: 3815 - DNA, 118 bp, Homo sapiens
  misc_feature 1..118: note = U/M: U (0.12:0.94) in Blood Granulocytes
  misc_feature 1..118: note = source = chr11:3953224-3953341; Gene: STIM1 (intron)
  source 1..118: mol_type = genomic DNA
cgctgtttacaagcggttgcgattttcctgcccggcctgttgctcctgggctgtgtggttttcctgtccagcctgctgcgactggactgtatgtaaggcagataccttgttcagcccg

SEQ ID NO: 3816 - DNA, 134 bp, Homo sapiens
  misc_feature 1..134: note = U/M: U (0.11:0.93) in Blood Granulocytes
  misc_feature 1..134: note = source = chr10:105092700-105092833; Gene: PCGF6 (intron)
  source 1..134: mol_type = genomic DNA
cgtctctactaaaaatgcaaaattagctgggcgtggtggtgcatgcctgtaatcctagctattcaggaggctgaggctgggttcaagaattgcttgaacccagacggcggaagttgcagtgagccaagattgcg

SEQ ID NO: 3817 - DNA, 182 bp, Homo sapiens
  misc_feature 1..182: note = U/M: U (0.12:0.94) in Blood Granulocytes
  misc_feature 1..182: note = source = chr10:70826761-70826942; Gene: SRGN (Intergenic)
  source 1..182: mol_type = genomic DNA
cgggaggcagaggttgcagtaagctgagactgcgcgccattgcactccagactgagtgacaagatcaaaactctgtctcaaaaaaaaaaaaaaaaaaaaaaaaaaaaaaaagaaaagaagaaaacctggaaggcaaaggcaaatggaaatgattgtgttagtgagattacgggcagcgaccg

SEQ ID NO: 3818 - DNA, 115 bp, Homo sapiens
  misc_feature 1..115: note = U/M: U (0.1:0.91) in Blood Granulocytes
  misc_feature 1..115: note = source = chr17:47810066-47810180; Gene: FAM117A (intron)
  source 1..115: mol_type = genomic DNA
cgagcatgggacgctggctgcaagagaacacagcccgcacgccttgccatcagcatggaggaaggagacgtggcaatcaccttcctcttctaagagatgtggcctgcctgccccg

SEQ ID NO: 3819 - DNA, 159 bp, Homo sapiens
  misc_feature 1..159: note = U/M: U (0.11:0.92) in Blood Granulocytes
  misc_feature 1..159: note = source = chr9:126185525-126185683; Gene: DENND1A (intron)
  source 1..159: mol_type = genomic DNA
cggtaagagtcccctggaaaggcaactcaccggccccttttgcaagccaaagtgaatctgcataattaggaaatctctccctcccccagccagccctcttcctgtaggtacaacccattacgtcctgcaactcggcgctcatcagccttctgcttggcg

SEQ ID NO: 3820 - DNA, 194 bp, Homo sapiens
  misc_feature 1..194: note = U/M: U (0.11:0.92) in Blood Granulocytes
  misc_feature 1..194: note = source = chr1:172769019-172769212; Gene: FASLG (Intergenic)
  source 1..194: mol_type = genomic DNA
cgcaactcttctgatcagcagggtctagggactgttgtgggttcttgggcaagaggtgtttctgctgctgtgtcggtgagctcaactattccaatcagcagagtccagggaccattgtgggttcttgggcaagaggtgtttctgttgctgcgtcggttagcgcaactattctgatcagcagggtccagggaccg

SEQ ID NO: 3821 - DNA, 286 bp, Homo sapiens
  misc_feature 1..286: note = U/M: U (0.14:0.95) in Blood Granulocytes
  misc_feature 1..286: note = source = chr1:202711580-202711865; Gene: KDM5B (exon)
  source 1..286: mol_type = genomic DNA
cggagctcattcactgtcaactgattttgggatttccctccaccagatcgatatctgtaaagacaaaggcccaaggaagccatataagaatacatacatgtccaccacacccaggtggtcacagaaattcaagacaggagtcacaacaggtttccaaacataggtgccaaagaatccaaactcacgcagtcagaagcgcatacctagtttgccttttgccattaagcaactgctgcgcaacagaggcacacttctctgcatcctgtgtgactaggcgaaggtgtcg

SEQ ID NO: 3822 - DNA, 136 bp, Homo sapiens
  misc_feature 1..136: note = U/M: U (0.07:0.87) in Blood Granulocytes
  misc_feature 1..136: note = source = chr10:69962050-69962185; Gene: MYPN (intron)
  source 1..136: mol_type = genomic DNA
cgtggtagcaggtgcctgtagtcccagctactcgggaggctgaggcaggagaatggcgtgaacctgggaggcggaacttgcagtgagctgagattgcgccacgggactccagcctgggtgacagagtgagactccg

SEQ ID NO: 3823 - DNA, 163 bp, Homo sapiens
  misc_feature 1..163: note = U/M: U (0.14:0.94) in Blood Granulocytes
  misc_feature 1..163: note = source = chr2:95779443-95779605; Gene: MRPS5 (intron)
  source 1..163: mol_type = genomic DNA
cgttgttgctacacaaatgacctactaggagacttccaaattaaagtgagctgtatccatacaatgaaatactctatggtcataacgtcgcactgcagaagtccacggaaaaatgcaatatattacattaaaaaaagcagaaggccaggcacggtggctcacg

SEQ ID NO: 3824 - DNA, 168 bp, Homo sapiens
  misc_feature 1..168: note = U/M: U (0.15:0.95) in Blood Granulocytes
  misc_feature 1..168: note = source = chr5:145560642-145560809; Gene: LARS (intron)
  source 1..168: mol_type = genomic DNA
cgccatggctcacgcctgtaatcccagcactttgggaggccgaggcgggcagatcacgaggtcaggaaattgagtccatcctggccaatgtggtgaaaccctgtctctactaaaatacaaaaaatttaactgggcatggtggcgcgcgcctgtagtcccagctactcg

SEQ ID NO: 3825 - DNA, 209 bp, Homo sapiens
  misc_feature 1..209: note = U/M: U (0.13:0.93) in Blood Granulocytes
  misc_feature 1..209: note = source = chr18:12025394-12025602; Gene: IMPA2 (intron)
  source 1..209: mol_type = genomic DNA
cgattgctggacggtatggtaagagtatgtttagatttgtaggaaactgccaagctatcctccaaagcagatgcaccattttgcatttccaccagccatgcatgcgagttcctgttgctccacatcctggctggcacttgttgtagttagtgttgtttctccattctaacagatgtgtagaggtgtctcgttattgttgttttgagacg

SEQ ID NO: 3826 - DNA, 296 bp, Homo sapiens
  misc_feature 1..296: note = U/M: U (0.13:0.93) in Blood Granulocytes
  misc_feature 1..296: note = source = chr19:1423535-1423830; Gene: DAZAP1 (intron)
  source 1..296: mol_type = genomic DNA
cgcttcctcagtggtgatgtcgcctcttgacagccgcattcctagacagcgctcagggcgcctcccccaggacccagcgcctcttgcactgtgcccggaccaggcgagccctgtggtttcagacactcctgcagtttgcgaaaatgtctacttctaaatacgttgtttcatcaccgatgctgtgttccaatactgcctctgatcttgggaaacttgagcgcgcgggaatctgagggttgcttctagatcctcccggtccccctccggctgcccagagctggcgccccttctcctcg

SEQ ID NO: 3827 - DNA, 314 bp, Homo sapiens
  misc_feature 1..314: note = U/M: U (0.1:0.9) in Blood Granulocytes
  misc_feature 1..314: note = source = chr12:132358250-132358563; Gene: ULK1 (Intergenic)
  source 1..314: mol_type = genomic DNA
cgttgccgttgccggctcgaatgcctgggtttgtatcccgatcattgtccctccccctgtgctctcaggtgatagatgattggctatttctttacttcctattttagcctaattagcattttagtgagctctctttactacctgacggggtgggtgtgagctaagttgcaagccccgtgtttaaaggtggatgcggtcaccttcccagctaagcttaggggttcttagtcggcctaggaaatccagctagtcctatctctcagtcccccctctcaacaggaaaacccaagtgctgttggggaggttggccgacg

SEQ ID NO: 3828 - DNA, 361 bp, Homo sapiens
  misc_feature 1..361: note = U/M: U (0.11:0.91) in Blood Granulocytes
  misc_feature 1..361: note = source = chr19:19292201-19292561; Gene: MEF2BNB (TTS)
  source 1..361: mol_type = genomic DNA
cgtctgcaactcactcacacaagactgggcacttcaaacccacagggcttacaaagagaggtgtcagcagcaactcaagctgctactaatatctttcaggagtgtgttgcgtttttgaaacagcaggcacaaacagggcatatgaaagcatttttggaaaccctgagttgacagtaagagctatggcttttcagtgaagtctagatccaactgccaatgccaacccatggcagagaagccagatgccgctcctcttcagatgcaagagagcccagataaacccttcatgctaccgtttgagggaagattgctacactcccattcttacacatacactcaagtcttgtttctgcaattttcg

SEQ ID NO: 3829 - DNA, 77 bp, Homo sapiens
  misc_feature 1..77: note = U/M: U (0.11:0.9) in Blood Granulocytes
  misc_feature 1..77: note = source = chr9:130511864-130511940; Gene: SH2D3C (exon)
  source 1..77: mol_type = genomic DNA
cgtgagcacatagtcgcccaggctggtgagtgagtcccggatgaggaagtcgccgttgcgttgtaccaaggtctccg

SEQ ID NO: 3830 - DNA, 145 bp, Homo sapiens
  misc_feature 1..145: note = U/M: U (0.12:0.91) in Blood Granulocytes
  misc_feature 1..145: note = source = chr10:323625-323769; Gene: DIP2C (intron)
  source 1..145: mol_type = genomic DNA
cgacagtctcctccggcctctccacgtcctccgtctgccgcccactaatcgttccccatacagacttcctggcgacagcacctgtcggtgtttcctaccagccttctctctcggtggcttctgcgactgtttcaccatcttcccg

SEQ ID NO: 3831 - DNA, 218 bp, Homo sapiens
  misc_feature 1..218: note = U/M: U (0.15:0.93) in Blood Granulocytes
  misc_feature 1..218: note = source = chr16:69047468-69047685; Gene: TANGO6 (intron)
  source 1..218: mol_type = genomic DNA
cgtgattacaccactgcactccaacctgggcgacagaacaagaccctgtctccaaaaaaaaaaaaaaaaggcggggttgccttaagttccttttttttttttttttttccgagaccaggtctcactctgtcacacaggccagagtgcagtggcacaatcttggctcactgcaacctccacctcctgggctcaagcaattctcgtgcctcagcctcccg

SEQ ID NO: 3832 - DNA, 66 bp, Homo sapiens
  misc_feature 1..66: note = U/M: U (0.15:0.92) in Blood Granulocytes
  misc_feature 1..66: note = source = chr7:2874556-2874621; Gene: GNA12 (intron)
  source 1..66: mol_type = genomic DNA
cgggatcccagtcgttaagcaatgcgtgactatgcatcgcgatgcatgactatacattgcgatgcg

SEQ ID NO: 3833 - DNA, 273 bp, Homo sapiens
  misc_feature 1..273: note = U/M: U (0.16:0.93) in Blood Granulocytes
  misc_feature 1..273: note = source = chr12:99020727-99020999; Gene: IKBIP (intron)
  source 1..273: mol_type = genomic DNA
cgttaaccctgcattgttttatttatttatttattttttagacggaatctcaccctgtcacccaggatggagtgcagtggagcaacctcagctcactgcaacctccgcctcccaggttcaacgtattctcttgcctcagcttcctgagtagctgggattacaggtacgcgccactatgcctagctaatttttgtatttttcgtagagatggggtttcaccatgctggccaggctggtcttgaactgttgacctttagtgatccgtctgcctcg

SEQ ID NO: 3834 - DNA, 122 bp, Homo sapiens
  misc_feature 1..122: note = U/M: U (0.11:0.87) in Blood Granulocytes
  misc_feature 1..122: note = source = chr1:6100977-6101098; Gene: KCNAB2 (intron)
  source 1..122: mol_type = genomic DNA
cgaaatatctcgtttgaggttaacagagcggccggacagtgagtgcacggccaaccccggcatcctgttcctcccactttatacatcgcagcccctgtggccctgccagtttctcctgagcg

SEQ ID NO: 3835 - DNA, 297 bp, Homo sapiens
  misc_feature 1..297: note = U/M: U (0.01:0.77) in Blood Granulocytes
  misc_feature 1..297: note = source = chr17:47312993-47313289; Gene: PHOSPHO1 (Intergenic)
  source 1..297: mol_type = genomic DNA
cgctcagttcccaggctggagtgcagtggggtgatctcagctccctatatacctttataatctgcatgtgtatccctggaatctaaaataaaagctgaaagacaaaaacaaacaaacaaaaaacaaagaaagcgtcttgcccaagggctccgtgtggcaagtggtggtcaggctggatggtgggtgcaggtctgcactgctctatctgccccccaaaagcagaaggacagggccctcagtgatctgaggactgatgagggtgggctcaggaggaagaggccaccgagggtgtcctcg

SEQ ID NO: 3836 - DNA, 212 bp, Homo sapiens
  misc_feature 1..212: note = U/M: U (0.19:0.92) in Blood Granulocytes
  misc_feature 1..212: note = source = chr10:120801913-120802124; Gene: EIF3A (exon)
  source 1..212: mol_type = genomic DNA
cgtcttggtcctctgtcctcatcagctgttcgccagcttcctctgtcctcatccagtcctcgtctaggtggtctgtcatcatccgcatgacgccagtttcccctgtcttcatcggcaattcgtctgggaggcctgtcatcatctgtgttacgccaggaaggccggtcatcgtctgccccacgacgagagaacctatcttcctcaggaccacg

SEQ ID NO: 3837 - DNA, 300 bp, Homo sapiens
  misc_feature 1..300: note = U/M: U (0.21:0.94) in Blood Granulocytes
  misc_feature 1..300: note = source = chr16:75632204-75632503; Gene: ADAT1,ADAT1 (exon,Intergenic)
  source 1..300: mol_type = genomic DNA
cgtcgtgatctgcccacctcggcctcctaaagtgttgggattacaggcgtgagccactgcacccggccaggaatacatttctgttgtcttaagccacccagcttgtggtacttcgttaagaaacagctctaggaaactattacaggcacaaaatttgtgatgaaaatgttctaaaattgatggttgcacaactctgtggatatactaaaaaaattttttttttttttttttgagacaggatctcactctgtcacccaggctggagtgcaatggcatgatcttgactcactgcaacctccg

SEQ ID NO: 3838 - DNA, 137 bp, Homo sapiens
  misc_feature 1..137: note = U/M: U (0.24:0.96) in Blood Granulocytes
  misc_feature 1..137: note = source = chr18:77489211-77489347; Gene: CTDP1 (intron)
  source 1..137: mol_type = genomic DNA
cgagcacttgtgtttttcacgcaacttcctattcaaggagacctagaacagcattaagcaatgtgtccgcagtgtgtggcatgagaacacgtggaagttgtggcttaggattcgtgcctgcgtcttcaccaggaccg

SEQ ID NO: 3839 - DNA, 119 bp, Homo sapiens
  misc_feature 1..119: note = U/M: U (0.2:0.91) in Blood Granulocytes
  misc_feature 1..119: note = source = chr11:63919718-63919836; Gene: MACROD1,MACROD1 (exon,intron)
  source 1..119: mol_type = genomic DNA
cgggtctggagcctgcccaccagggcctcccccgagcagggcctacctttcgccatctccttccatgtcgggatcttcttcagcctgacaaagtccttgcagaagtaatgttcctcccg

SEQ ID NO: 3840 - DNA, 239 bp, Homo sapiens
  misc_feature 1..239: note = U/M: U (0.19:0.9) in Blood Granulocytes
  misc_feature 1..239: note = source = chr9:124224459-124224697; Gene: GGTA1P (intron)
  source 1..239: mol_type = genomic DNA
cgggcgtggtggcaggtgcctataatcccagctactcaagaggctgaggcgggaggattgcttgaacccaggagaaggaggttgccgtgagccaagatggcaccactgcactccagcctgggcaacagagcaagactccgtctcagaaaattaaaaaaaaataaaaagaaaagaaagaaaagaaaaggtgggtgccttctggaggatggggaaagaggaaagtccgatggacaaatacg

SEQ ID NO: 3841 - DNA, 259 bp, Homo sapiens
  misc_feature 1..259: note = U/M: U (0.22:0.93) in Blood Granulocytes
  misc_feature 1..259: note = source = chr12:11937527-11937785; Gene: ETV6 (intron)
  source 1..259: mol_type = genomic DNA
cgcgaggaagcaaatgtgtctaaagtgattggcaagtgaggaagagcggagttcggaaacaggagtggggcaagaggacttgggaggaggctgtaggccactgtaaagatactgtgttttttgtcattttctgagacaggctcttgcctcggctggagtgcagtggtgtaatcatagctcactgcagccgcaaactcttgggctcatgatccttccgccgcagcctccagagtagctggaactacaagtgtgcaccccg

SEQ ID NO: 3842 - DNA, 317 bp, Homo sapiens
  misc_feature 1..317: note = U/M: U (0.22:0.93) in Blood Granulocytes
  misc_feature 1..317: note = source = chr11:68529887-68530203; Gene: CPT1A (intron)
  source 1..317: mol_type = genomic DNA
cgtctctgtccttgtccctacctttaccttttaatattttaataccttctgtacccttgaaaggggcagaggaaagaagctgaattgagcacccctaaagaagaaggtacaggaatgatgagatcagagaagctggagtgatggcctccagaagccttttagggaagtgtgacaagcacgttgtgtcctcagcctgatggcacattaccgtctgggccgggtccaccatggcccgcacgaagtcgcatgactcagtggtgcaggagcgcacggtctccgtcctcccctctcggaagagccgggtcatggaggcctcg

SEQ ID NO: 3843 - DNA, 230 bp, Homo sapiens
  misc_feature 1..230: note = U/M: U (0.2:0.9) in Blood Granulocytes
  misc_feature 1..230: note = source = chr16:4686197-4686426; Gene: MGRN1 (intron)
  source 1..230: mol_type = genomic DNA
cggcccccagaggccccctattgtccccttctgaacaacctgcctcccccttcttccctgggaaccacccccctgacttcctccctgggtgacttctgcttgggtttgagcttgaaagaactggaaggaggcgctcttcttgctccacctcaggatgagatgggatgcaatggccgggcggggtttgtgagcagtgagtgatctggcgtctgctgtgggaccttccagcg

SEQ ID NO: 3844 - DNA, 344 bp, Homo sapiens
  misc_feature 1..344: note = U/M: U (0.23:0.93) in Blood Granulocytes
  misc_feature 1..344: note = source = chr11:73553706-73554049; Gene: MRPL48 (intron)
  source 1..344: mol_type = genomic DNA
cggggtttcaccatattggctaggctggtctcgaactcctgacctcatcatccacctgcctcggcctcccaaagtgctgggattacagacgtgagccaccgcgcccggccccttatttctttttacagctgcataatttacttaataagtctccctccttttctgttttgaaacaggatctcactctgttgcccaagctagagtgcagttgcgtgaccacggctcactgcagcctcaacccctcagactcaagccatcatctcacctgagcctcctgagtagctgggattacaggcacttgccacaatgcccagctaattaagaaaattttttttgtagagtcg

SEQ ID NO: 3845 - DNA, 427 bp, Homo sapiens
  misc_feature 1..427: note = U/M: U (0.23:0.92) in Blood Granulocytes
  misc_feature 1..427: note = source = chr8:74870779-74871205; Gene: TCEB1 (intron)
  source 1..427: mol_type = genomic DNA
cgggaggagccataaagatgtaagtagcttctaaattacagactattcaagcatatagatttttagcagtttttgccaacctcaaaaaagaaaaataaaaatggttattatttcaatttatgcttctaatatttttggcaacagaaaacattgtatgtttgtcaggagagtttcaaatttcttaaggtaaaattactcactaaaaatcacaaattggggttagcacgatattattactgatctgcctgtcgggaatatatagtcatgcattgcttaacgatggagataccttccaagacaagaaatgcatcattaggcaatcttatcatgatgcaaacatcctaagagtgtacttactaaatctagagtgtatttacacctaggctatatggtgtaacctactgctcctaggctacaaacctgtacg

SEQ ID NO: 3846 - DNA, 446 bp, Homo sapiens
  misc_feature 1..446: note = U/M: U (0.19:0.88) in Blood Granulocytes
  misc_feature 1..446: note = source = chr8:28203960-28204405; Gene: ZNF395 (exon)
  source 1..446: mol_type = genomic DNA
cgccagtgccaaggaggagagggggcacaagcgcaggcagggaaggtggcaccaaaacctagtaagaacaaagcaaaaccaccgtggtttccacactgctctctccctttattcctctctttcctgccctgtataccaacggcataagaagcctgcacaaagagaaaaatccgtatatccagttatatctacacggtccaaactgggggcggggggaattcaaacagctttctaaagacgagacggcagtgaaaactctgagggagaggggaaggggaggccctcctgagcgaagttcccatgtgtcaagaacgtgccctcccctccccatgaggacctgaagctgggggttgtcttgggaagtgaggggggttgggaaacaccatcagcagctgccagctcttaattctcaaggagatcgaagggacaggaaggagagccctgcg

SEQ ID NO: 3847 - DNA, 247 bp, Homo sapiens
  misc_feature 1..247: note = U/M: U (0.28:0.96) in Blood Granulocytes
  misc_feature 1..247: note = source = chr2:234166507-234166753; Gene: ATG16L1 (intron)
  source 1..247: mol_type = genomic DNA
cgggcatggtggcgggcgcctgtaatcccagctacccgggaggttgagacagaattgcttgaacctgggaggcggaagttgcagtgagccaagattacaccactgcactccagcctgggtgacagagcgagactccgtctcaaaaaaaaaaaaaaaatatctatatatctatatatctatatatctatatctatctcttggtgtgtattgatagaatatttcatgaaatacatatttgttcatggcg

SEQ ID NO: 3848 - DNA, 427 bp, Homo sapiens
  misc_feature 1..427: note = U/M: U (0.25:0.93) in Blood Granulocytes
  misc_feature 1..427: note = source = chr8:121553241-121553667; Gene: SNTB1 (intron)
  source 1..427: mol_type = genomic DNA
cgaaatcaaaggcctctttgaagttctacatttgacagcttaaatgagatgctatgttttcctgaaatgccaaggatgacacttgctagagagcataagaatgtgcaattctcacccttctgtgcaagtgaagtcatatactttttcattatggcaggcagaaaccatctcaggaaattatgaatttcaacacatggactacttgcattgagacgagacgtatgttactttaacggataaatttgctaattttgttgcatattgtttgacgtcagttccatgcttctgtgccctcctctggccctctctccactccagtggagttgatcagtttcttttcattttcctgctgcccttttgctctgctcctcatctggcccctcctgtctctttgctctctgtcctctcctcggagacttccctgacg

SEQ ID NO: 3849 - DNA, 331 bp, Homo sapiens
  misc_feature 1..331: note = U/M: U (0.26:0.93) in Blood Granulocytes
  misc_feature 1..331: note = source = chr12:6790100-6790430; Gene: ZNF384 (intron)
  source 1..331: mol_type = genomic DNA
cggctgggcatggtagctcacgcctgtaatcctagcactttgggaggccaagacaggcggatcccctgaggtcaggagctcgagaccagcctggccaacatggtgaaaccccatctctactaaaagtacaagaaattagccggggcatggtggcgcatgcctgtaatcccagctacttgggaggctgaggcaagagaattgcttgaacccaggaggcggaggttgcagtgagccaagattgcgccattgcctgggcaacaagagtgaaacgccatctcaaaaaaaaaaaaaaaaaactttctgagaaacaagaagaaaagtaacccctccg

SEQ ID NO: 3850 - DNA, 469 bp, Homo sapiens
  misc_feature 1..469: note = U/M: U (0.04:0.91) in Blood Granulocytes
  misc_feature 1..469: note = source = chr14:102676909-102677377; Gene: WDR20 (TTS)
  source 1..469: mol_type = genomic DNA
cgtacctcactcagagcctgacagttcgtgggaactgcgggccgaggacgccaacagcattgcagaagtgcctcttgccacataagcgaagaccttttcttcagatgcactttgcttgtgtgttttcccaacaagggaaaaggagttttttggttttttgccgggggcggggaggtgcggtgggggagggggattgggtcagaaaggcacgtgactcctccgcgctttgtttcgtaaagcctgagactccccgagtcttccgacttctccctgacatggccctcgtttgggcttcgtcccccgcagaggaagcggaagtgcaggtttcccctctccttgttcttggatggcagctgtggttccgggattactcttgggatgctgacgctggccatgtgcgtaggcttcgtcctcagtggctcccaccctagcgcctcagcccaggacctggtggcctgtggcttcctcg

SEQ ID NO: 3851 - DNA, 463 bp, Homo sapiens
  misc_feature 1..463: note = U/M: U (0.04:0.9) in Blood Granulocytes
  misc_feature 1..463: note = source = chr8:68262826-68263288; Gene: ARFGEF1 (Intergenic)
  source 1..463: mol_type = genomic DNA
cgtcacatatttctaaatatccgtttgagatgacttctcaccagtattgtgccataattattttaaggcaggaccacattgtctctttcttttgaaactaccctcaacagttagtacactgaaaataattttaagtgttaatgaataagtggacattaatctttctaatgaggtcaggttttccaaaatttttttaatgggaatttttttattaaaagcctgccttttgagggaggtgggggggtcagccccccgcccggccagccgccccgtccgggaggtgaggggtgcctctgcccggccgcccctactgggaagtgaggagcccctctgccaggccaccaccctgtctgggaggtgtacccaacagctcattgagaacgggccatgatgacaatggcggttttgtggaatagaaaggggggaaaggtggggaaaagattgagaaatcggatggttgccg

SEQ ID NO: 3852 - DNA, 369 bp, Homo sapiens
  misc_feature 1..369: note = U/M: U (0.01:0.93) in Blood Granulocytes
  misc_feature 1..369: note = source = chr20:48270862-48271230; Gene: B4GALT5 (intron)
  source 1..369: mol_type = genomic DNA
cgagtgagaatgtgtgtgcggattgtgcaaaacctaccaccacatgcaagacggaaactgcagggtttcctctcccaggtatggttcagagctcaggtaacttgacccagtgcgaccacaatttgtctaaaaagctctgaaatgtcattcacttgttctttgccaacaagaaagtatcaaaagtttatcagtttgctaactacagtcctctgttgctaaagtggacggcaaaggaaactgataaattaggatgtggtcaattcttttaaggagaggcaattcttttaagagaggcaatgttttctcttgattttctaagcgccacagaataattcgcatttgcaacatttgcaaagcaatttcacattc

SEQ ID NO: 3853 - DNA, 69 bp, Homo sapiens
  misc_feature 1..69: note = U/M: U (0:0.89) in Blood Granulocytes
  misc_feature 1..69: note = source = chr21:46335363-46335431; Gene: ITGB2 (intron)
  source 1..69: mol_type = genomic DNA
cgctgtcctagaggagaggcactcgcatcaaagtgactcggaggtgcgcgggaagtgatggacgatgcc

SEQ ID NO: 3854 - DNA, 410 bp, Homo sapiens
  misc_feature 1..410: note = U/M: U (0.11:0.95) in Blood Granulocytes
  misc_feature 1..410: note = source = chr20:33197229-33197638; Gene: PIGU (intron)
  source 1..410: mol_type = genomic DNA
cgcaatctcggctcactgcaacctccaccttccgcgttcaagcaattctcttgcctcagcctcctgagtagctaggactgcaggcacatgtcaccatgcctagctaatttttgtacttttagtagagacgcggtttcactatgttggccaggcttgtctcgaactcctaacctcaggtgatccacccaccttggcctcccaaagtgctgggattacagacatgagccattacacctggctcctccttcatatttaaacagatggttttgtttcctggatgtgactacactgatcttcaaataccctaccatgacccacaaggcccaggtgatataatttggctgtgtccccattcaaatctcatcttgaattgttgttcccataatcccctcatgtcatgagagggaccc

SEQ ID NO: 3855 - DNA, 104 bp, Homo sapiens
  misc_feature 1..104: note = U/M: U (0.23:0.96) in Blood Granulocytes
  misc_feature 1..104: note = source = chr7:8046949-8047052; Gene: GLCCI1 (intron)
  source 1..104: mol_type = genomic DNA
cgttatgtaatatgtactacgtacgtagtacatcgttatgtaatatgtacgtagtacgtattaagcgtgaggacagtgaacccagacctggctgattctaaagc

SEQ ID NO: 3856 - DNA, 261 bp, Homo sapiens
  misc_feature 1..261: note = U/M: U (0.02:0.9) in Blood Granulocytes
  misc_feature 1..261: note = source = chr9:101592971-101593231; Gene: GALNT12 (intron)
  source 1..261: mol_type = genomic DNA
cggatgttggtggatacctagtatgcaacttcctcaatttggggaactcacagatctaagaccctgtctcacgcaacctgttctgaacagtgcaatttcccgatagttgtaattcttaccccagagtggtatttctaatatcccctctgactttctggtgtcattctaaggacaccgaaagctcaagtctggttgatctctgttgcactgtcctgtgtggcaggactcttaggatttttaggtctcaaattccagacaacg

SEQ ID NO: 3857 - DNA, 119 bp, Homo sapiens
  misc_feature 1..119: note = U/M: U (0.06:0.93) in Blood Granulocytes
  misc_feature 1..119: note = source = chr20:47779597-47779715; Gene: STAU1 (intron)
  source 1..119: mol_type = genomic DNA
cgtgtgcctatagtcccagctactcaggaggctgaggcaggagaattgcttgaacccgggaggaggaagttgcagtgagccaagattgtgccactgcactctagcccggcgacagagcg

SEQ ID NO: 3858 - DNA, 165 bp, Homo sapiens
  misc_feature 1..165: note = U/M: U (0.03:0.9) in Blood Granulocytes
  misc_feature 1..165: note = source = chr9:92271825-92271989; Gene: UNQ6494 (intron)
  source 1..165: mol_type = genomic DNA
cgctcgccccttgccttccgcgatgaccgaaagcttcctgaggcctccccatgcttcctgtgcagcccgtggaaccatgaaccaattcaacctcctctctttatcaattacctagtcttgggtgtttctttatagccgtgtgagaatgaactaatacagaggacg

SEQ ID NO: 3859 - DNA, 360 bp, Homo sapiens
  misc_feature 1..360: note = U/M: U (0.06:0.93) in Blood Granulocytes
  misc_feature 1..360: note = source = chr9:84254232-84254591; Gene: TLE1 (intron)
  source 1..360: mol_type = genomic DNA
cggccttccaaagtgctagattacaagcgtaagctaccatagctggcctgcatctgtactctctaaccaaaacctgcccgtcatttggaaaactgcaagatgtttttttcaacatgacaggaaggatgaggaaatttattcttctatctaggcattagtttacagtaattaggaaatttgcttaaaagtcaaaatgcttgtagatttatacaacatagaacacacatgcaaaagtttgtaaagtgattagtaaaagttgttttttttttttgttttttttttttttgagacagtctcgctctgtcgcccaggctggagtgcagtggtgcaatctcggctcactgcaacctccacctcccg

SEQ ID NO: 3860 - DNA, 416 bp, Homo sapiens
  misc_feature 1..416: note = U/M: U (0.09:0.92) in Blood Granulocytes
  misc_feature 1..416: note = source = chr9:37131440-37131855; Gene: ZCCHC7 (intron)
  source 1..416: mol_type = genomic DNA
cgagaccagcctggccaacatggtgaaaccccgtctctactaaaaatgcaaaattagccgggcattctggcaagcatctgtaatcccagctacttgggaggctgaggaaggagaattgcttcaacctgggaggcggaggttgcagtgagccgagattgtgcaactgcactcaagcctaggcgacagagtgagactcttgtctcaaaaagaaaaagaaaaaaaagaaaatgggcgtacacatttgttttgctctactgacagttaataccacaactcagaggcatttttttttcctttctattcttcttctaaatgttcaacacttttctgattttgtgatttgaggttgttgattagcttcctgaggctccattgagactgtatatacgtgacacttaacagtctagccttcctcg

SEQ ID NO: 3861 - DNA, 141 bp, Homo sapiens
  misc_feature 1..141: note = U/M: U (0.1:0.92) in Blood Granulocytes
  misc_feature 1..141: note = source = chr9:88899143-88899283; Gene: ISCA1 (Intergenic)
  source 1..141: mol_type = genomic DNA
cgtctctactaaaaatacaaaaattagccgggcgtgtttgcgggcacctgtaatcccagctacccaggaggcggaggttgcagtgagccaagattgcgccactgcaccccagcctgggtgacagagcgagactgcatctcg

SEQ ID NO: 3862 - DNA, 163 bp, Homo sapiens
  misc_feature 1..163: note = U/M: U (0.12:0.93) in Blood Granulocytes
  misc_feature 1..163: note = source = chr6:14827822-14827984; Gene: JARID2 (Intergenic)
  source 1..163: mol_type = genomic DNA
cgcttaggttccacgacaagaggctgggctttctgcactcaaatggccgctcctctctagacaccttattgcatttccacaatcgctacgtctcttcccatctggggaaataagtccaccacggccttctcccgcctcatcgggtcctaggtggatcctctcg

SEQ ID NO: 3863 - DNA, 246 bp, Homo sapiens
  misc_feature 1..246: note = U/M: M (0.66:0.12) in Blood Granulocytes
  misc_feature 1..246: note = source = chr19:17185295-17185540; Gene: HAUS8,HAUS8 (intron,promoter-TSS)
  source 1..246: mol_type = genomic DNA
cgtcgctgcaaaacaaagacgcacaggttttacataggtcacccccggggcagtctcacagccagaaagagacaagagcacagactccctctggggactgtgctagggctgtggcctcaaaccgaatgggctcctgggtgaacctgctgcgacctgaggggggtccctacaacctgtgcgagcctcagctactgcacctgtacctgggaggtgctactgtcaatctatcggttacggcaaggggcg

SEQ ID NO: 3864 - DNA, 220 bp, Homo sapiens
  misc_feature 1..220: note = U/M: M (0.67:0.14) in Blood Granulocytes
  misc_feature 1..220: note = source = chr1:25253237-25253456; Gene: RUNX3 (intron)
  source 1..220: mol_type = genomic DNA
cgggcctggtgcttgggaagggcgactcccacttcagccacttctcgtaggcaggctggtcttaaagggccagtggaccctcaggcctccgttccacaggggcagggtttccaggactttcccatccaggagttaagtgatgatgggtttcaggtcccagaagcctcccattcaacagccccccacccccgtcccgccttccttctgctgctcaaggtcg

SEQ ID NO: 3865 - DNA, 184 bp, Homo sapiens
  misc_feature 1..184: note = U/M: M (0.57:0.06) in Blood Granulocytes
  misc_feature 1..184: note = source = chr12:117096360-117096543; Gene: C12orf49 (Intergenic)
  source 1..184: mol_type = genomic DNA
cggctcccatcccctctccgcggaataagctggtaccaaagccagcccctggtgccgctcaaccagatggcaggggaagcaaaacaaaagtgaccttgttagcagaatgtgtcttccccgggagaagctatttttgttgtggttgtgaactgaagtcgtctcagctgaattctccttccctgcg

SEQ ID NO: 3866 - DNA, 272 bp, Homo sapiens
  misc_feature 1..272: note = U/M: M (0.65:0.14) in Blood Granulocytes
  misc_feature 1..272: note = source = chr18:44701530-44701801; Gene: IER3IP1 (intron)
  source 1..272: mol_type = genomic DNA
cgtttcagtgattcaaacgggcatacttggtacacaacgtgaggtcctggaaggtataacttgtgttttcatttttgaatttctaaattctagcagagtttttggcacactctatgcacccaataagctatctgaataaacttttcttggaacatgagtgtctgaatgtcctgataactccaacacgttcccttcctgtaattcctaaagcccaggaacacttattgccttccatcagttagtgaactactgatgctccaaaatgggtcacg

SEQ ID NO: 3867 - DNA, 240 bp, Homo sapiens
  misc_feature 1..240: note = U/M: M (0.62:0.12) in Blood Granulocytes
  misc_feature 1..240: note = source = chr10:15209430-15209669; Gene: NMT2 (intron)
  source 1..240: mol_type = genomic DNA
cgaactgagtaaaccatctgtgactcaggcctccctatcatgttttttaagctgacccacttctccatcactcaccatggttcgaaaaatctcacttctaagggtgtagcaagaaccgctctgtgccagcgcatagtttgaatccaatagggtaaaagggtaatgtaaacagcactttaaaaggacaccagtttttatttaaaatgacccactgcctctaaaaagagagcatcaacaccg

SEQ ID NO: 3868 - DNA, 134 bp, Homo sapiens
  misc_feature 1..134: note = U/M: M (0.65:0.17) in Blood Granulocytes
  misc_feature 1..134: note = source = chr17:80339122-80339255; Gene: UTS2R (Intergenic)
  source 1..134: mol_type = genomic DNA
cgtgagcagtggaggattttgtgtatcttcagagaatagcaaagctccgttccaaagtgtccttaatgatccaaggcatgacggccaatgaggaaagctggaaagtgaaaccgagtgacttaatccaggtttcg

SEQ ID NO: 3869 - DNA, 27 bp, Homo sapiens
  misc_feature 1..27: note = U/M: M (0.69:0.22) in Blood Granulocytes
  misc_feature 1..27: note = source = chr19:2503973-2503999; Gene: GADD45B (Intergenic)
  source 1..27: mol_type = genomic DNA
cgccggctccgtgagcttgcggggtcg

SEQ ID NO: 3870 - DNA, 237 bp, Homo sapiens
  misc_feature 1..237: note = U/M: M (0.61:0.14) in Blood Granulocytes
  misc_feature 1..237: note = source = chr13:108866962-108867198; Gene: LIG4 (promoter-TSS)
  source 1..237: mol_type = genomic DNA
cggggttgccatgagaaagaatcaacatgtacgcaggtaaagcaggcaatacagttccagggagtcaaaaacgggagaaatcgtcccacgacctggggcttgggtctagatgaagagcacagcatcaggaggccaggcttctaatgcggcgcagtctacagcgctgtggactcggcaactcccatcacctgccgctgcacaaacaccctgcttgctgcccccatagaccgacccccg

SEQ ID NO: 3871 - DNA, 207 bp, Homo sapiens
  misc_feature 1..207: note = U/M: M (0.62:0.16) in Blood Granulocytes
  misc_feature 1..207: note = source = chr19:39339082-39339288; Gene: HNRNPL (intron)
  source 1..207: mol_type = genomic DNA
cgactgctccttcctaagagaagtatcttacacccaccgacaaaagcctctggtcatcaggagaaagattaactctcttccgcctctcctgggctctggggccggccccctgtctgagaatcactgggcagaagtgcgtggaaggtgggtagaattggattctatttcaggagcgatccacgcgaaccacagggtgaggcactcccg

SEQ ID NO: 3872 - DNA, 170 bp, Homo sapiens
  misc_feature 1..170: note = U/M: M (0.61:0.16) in Blood Granulocytes
  misc_feature 1..170: note = source = chr6:38670144-38670313; Gene: GLO1 (intron)
  source 1..170: mol_type = genomic DNA
cgagagggtaagagaaggaatttctaagattcctttcagatccaaactctatgattctgtaatctctcctgggccccacgaagatgaggaaggcaagaagggctgttgtgacccacagcaaaggccaagcaagcaaaagtgaaattctgggcgcggttaaacttagagcg

SEQ ID NO: 3873 - DNA, 213 bp, Homo sapiens
  misc_feature 1..213: note = U/M: M (0.54:0.09) in Blood Granulocytes
  misc_feature 1..213: note = source = chr21:35446809-35447021; Gene: MRPS6 (intron)
  source 1..213: mol_type = genomic DNA
cgaaccagcggcccctttcaggtgacggcgtggccaaggacaggggcccgcggcccggaggcagctcacttcgtcctctgtcctgggtcatgtactcctcaagtcgtcgccgaaatccccattctcccgtgaattcggaattcggtaacgtagtttggtgttatgtttttttttctccaccaggtgtaataaaacaaaaatcattgtaccacg

SEQ ID NO: 3874 - DNA, 296 bp, Homo sapiens
  misc_feature 1..296: note = U/M: M (0.62:0.17) in Blood Granulocytes
  misc_feature 1..296: note = source = chr16:21059351-21059646; Gene: DNAH3 (intron)
  source 1..296: mol_type = genomic DNA
cgttctcagatctccagctgcttgctgtgagaaccactcctctcttcaaagctgtcagacagggacatttaagtctgcagaggttactgctgtctttttgtttgtctgtgccctgcccccagaggtggagcctgcagaggcaggcaggcctccttgagctgtggtgggctccacccagttcgagcttccaggctgctttgtttacctaatcaagcctgggcaatggcgggcgcccctcccccagccaggctgccgtcttgcagtttgatctcagactgctgtgctagcaatcagcg

SEQ ID NO: 3875 - DNA, 278 bp, Homo sapiens
  misc_feature 1..278: note = U/M: M (0.57:0.13) in Blood Granulocytes
  misc_feature 1..278: note = source = chr11:72392383-72392660; Gene: PDE2A (Intergenic)
  source 1..278: mol_type = genomic DNA
cgcagggaggtggcagggcgacagggaggcagagagagctggggaggcagacgggcagggggaggagggcatgctagtcacaaagggaggagggcgtcccaggctgacaagtggtgagaggcaccgtccagcccatctctttggtctcagcatttggaagtgggtggtggtgggaggacagggtggaggaggagcaggagggaaggggagcaattttcctagagagctgtgtgtgggtgggtgttcatccacgtgccgtgtgtgtgtgctcatccacg

SEQ ID NO: 3876 - DNA, 233 bp, Homo sapiens
  misc_feature 1..233: note = U/M: M (0.61:0.18) in Blood Granulocytes
  misc_feature 1..233: note = source = chr8:55013175-55013407; Gene: LYPLA1 (intron)
  source 1..233: mol_type = genomic DNA
cgtccctactaacattccacggatctctggtatccaatacccaaagcaactaatgaggaatttgaaattttaatatgttccagaaaccagagttaaaaaatcaataaactcacgatgataaggggaaaattctgagggttttcaaaacataaaatcaccgcactgtaagatacattaactggcaatcttaaaataccattttagcgcccttaaacattaaacctttgaacgcg

SEQ ID NO: 3877 - DNA, 83 bp, Homo sapiens
  misc_feature 1..83: note = U/M: M (0.54:0.14) in Blood Granulocytes
  misc_feature 1..83: note = source = chr20:2450253-2450335; Gene: SNRPB (intron)
  source 1..83: mol_type = genomic DNA
cgcttgaacccgggaggtggagtttgcagtgaaccctgatcgatccaccgcactccagcctgggcaacaaaagcaaaactccg

SEQ ID NO: 3878 - DNA, 212 bp, Homo sapiens
  misc_feature 1..212: note = U/M: M (0.54:0.14) in Blood Granulocytes
  misc_feature 1..212: note = source = chr4:6718724-6718935; Gene: BLOC1S4 (exon)
  source 1..212: mol_type = genomic DNA
cgtagtatattcatgattcagtgtagaatgtatagactttatgtcttccaagtttaaaaaaagagacagggtcttggtatgttgcccagactgttcggaaactcctgggctcaagtgatccttccacctcagcctccccagtagctgggactacggggtcgccactgcacccagcctgtgtcttccagctctaatcagaaagctgcttgtcg

SEQ ID NO: 3879 - DNA, 193 bp, Homo sapiens
  misc_feature 1..193: note = U/M: M (0.61:0.23) in Blood Granulocytes
  misc_feature 1..193: note = source = chr1:247093815-247094007; Gene: AHCTF1 (intron)
  source 1..193: mol_type = genomic DNA
cgaaataagtaaaccactctaatttcttctctcctaagagactctatcagtgaaagctcacaaaaaaacagtttaaaaaaaaaaaagggggggtctcgccatgttgctcaggctggtctcaaactcctgggttcaagcgatcctcccgcctcagcctctcaaagtgctgggattacagacaggagccactgcg

SEQ ID NO: 3880 - DNA, 69 bp, Homo sapiens
  misc_feature 1..69: note = U/M: M (0.6:0.24) in Blood Granulocytes
  misc_feature 1..69: note = source = chr22:46938036-46938104; Gene: CELSR1 (Intergenic)
  source 1..69: mol_type = genomic DNA
cgcctcgtgaagcctcctcctgggagctcggcgccctcaggtgctccctgagatgccagcacctgaacg

SEQ ID NO: 3881 - DNA, 120 bp, Homo sapiens
  misc_feature 1..120: note = U/M: M (0.54:0.18) in Blood Granulocytes
  misc_feature 1..120: note = source = chr18:60985262-60985381; Gene: BCL2,BCL2 (TTS,exon)
  source 1..120: mol_type = genomic DNA
cgcatctcggacctgtggcctcagcccagactcacatcaccaagtgcacctacccagcctccgttatcctggatccaggtgtgcaggtgccggttcaggtactcagtcatccacagggcg

SEQ ID NO: 3882 - DNA, 70 bp, Homo sapiens
  misc_feature 1..70: note = U/M: M (0.64:0.29) in Blood Granulocytes
  misc_feature 1..70: note = source = chr5:180611773-180611842; Gene: TRIM7 (Intergenic)
  source 1..70: mol_type = genomic DNA
cgggcgtggtggcgggcgcctctagtcccagctactcgggaggctgaggcaggagaatggcgtgaacccg

SEQ ID NO: 3883 - DNA, 135 bp, Homo sapiens
  misc_feature 1..135: note = U/M: M (0.55:0.2) in Blood Granulocytes
  misc_feature 1..135: note = source = chr19:32329465-32329599; Gene: THEG5 (Intergenic)
  source 1..135: mol_type = genomic DNA
cgcaggcaaacctttgtgtgaaacttcttctggcaagagcaagggcttaagagagagagaccgtggtgagttgcaggcgatactttctttgttcctccagagtgcctgtgggttgcaagttggcctcgattcccg

SEQ ID NO: 3884 - DNA, 26 bp, Homo sapiens
  misc_feature 1..26: note = U/M: M (0.65:0.35) in Blood Granulocytes
  misc_feature 1..26: note = source = chr19:55877489-55877514; Gene: IL11 (exon)
  source 1..26: mol_type = genomic DNA
cgccagcgggggcgccggcgggtccg

SEQ ID NO: 3885 - DNA, 151 bp, Homo sapiens
  misc_feature 1..151: note = U/M: M (0.67:0.15) in Blood Granulocytes
  misc_feature 1..151: note = source = chr7:3067894-3068044; Gene: CARD11 (intron)
  source 1..151: mol_type = genomic DNA
cgggccaccttttgactcaagcaagctttctggcacctctcaaatcagtccctgtgggtggccaccccctctcccatggaatggctcgccgggaacgggttaacacctcaaacacctaaacacagcgttcagctctgtccagacactctcg

SEQ ID NO: 3886 - DNA, 246 bp, Homo sapiens
  misc_feature 1..246: note = U/M: M (0.57:0.11) in Blood Granulocytes
  misc_feature 1..246: note = source = chr22:39919480-39919725; Gene: ATF4 (TTS)
  source 1..246: mol_type = genomic DNA
cgggtaggtctgcccttcctcttgtgtccttcgggattagcctcgttttccgtctgtggaaggtggtgtagaccgggtgtgcctggggaatggctgggaggagagtgagagtgagtgcagcccaggcactgctgtaactgagcacagcacatgtgttctttcacccagtccccgcagcacacccgtgaggcagacgccacacccaggaggaattttttttttttgagatggagtctggctctgtcg

SEQ ID NO: 3887 - DNA, 269 bp, Homo sapiens
  misc_feature 1..269: note = U/M: U (0.12:0.94) in Blood Monocytes + Macrophages
  misc_feature 1..269: note = source = chr11:73733661-73733929; Gene: UCP3 (Intergenic)
  source 1..269: mol_type = genomic DNA
cgttctcatcgtcaacctctctcctcccctgtatggaagttgataaaactagtttgtccatcagcagctgagcaagcagaatcacaaaaaacttttaacaaaatcaggaagctgtcccagtaaagagttacttcatcacaagagggaagagaaagcaggggcagcggaacttgattgatttataatgaatttggaactgcaaatggatcgctgtgctgcagtcctgctaaaccagccatcgttctcaccccttttctttttgcagaggc

SEQ ID NO: 3888 - DNA, 348 bp, Homo sapiens
  misc_feature 1..348: note = U/M: U (0.11:0.92) in Blood Monocytes + Macrophages
  misc_feature 1..348: note = source = chr1:60046062-60046409; Gene: FGGY (intron)
  source 1..348: mol_type = genomic DNA
cgccttgttacaccccagccccaagtgagcctgttagaatcctgtgcatcctctcagactccagtttcatacaacctcctctgtgacaccgcgtgagtcagatttaattcctctttccccagaactcaaagttttcagttttattttgctttaatcaagtttgtacccttaaccactacattgtgtgtctttcagactcttgttctttcttgattttaaggctttagagatgacaaattcagcaaccgcaggtccttctcatgttgtagaattgtaaagtagctgttttttaactgcatgcaactgtatgaatcctaaacctagaattttcaatccctctattctacc

SEQ ID NO: 3889 - DNA, 332 bp, Homo sapiens
  misc_feature 1..332: note = U/M: U (0.12:0.92) in Blood Monocytes + Macrophages
  misc_feature 1..332: note = source = chr16:29184910-29185241; Gene: RRN3P2 (Intergenic)
  source 1..332: mol_type = genomic DNA
cgtgatgaggaaaattgctgtgaaaagtggatccgaaacctctttgtcccctggcctggggacgtgatgaggaaaattgctgtgaaaagtggatccgaaacctctttgccccctggcctggggacgtgatgaggaaaattgctgtgaaaagtggatccgaaacctctttgccccctggcctggggacgtgatgaagaaaattgctgtgaaaagtggatctgaaacctttttgtcccctggcctggggacatgatgaggaaaattgctgtctgtccaggctttgagtagaggaaagaagtttcccgtaagaaatagaatctccagaccttctc

SEQ ID NO: 3890 - DNA, 183 bp, Homo sapiens
  misc_feature 1..183: note = U/M: U (0.13:0.92) in Blood Monocytes + Macrophages
  misc_feature 1..183: note = source = chr11:33219522-33219704; Gene: CSTF3-AS1 (Intergenic)
  source 1..183: mol_type = genomic DNA
cgcgtgccaccacgcccagataatttttgtatttttagtagagatggggtttcatcatgttggtcaggctggtctcgaattcctgacctcgtgatccgcctgcctcagcctcacaaagtgctgggtttacaggcgtgagccacctcacccggccaaaactctatacctattaaacacctctcc

SEQ ID NO: 3891 - DNA, 183 bp, Homo sapiens
  misc_feature 1..183: note = U/M: U (0.15:0.94) in Blood Monocytes + Macrophages
  misc_feature 1..183: note = source = chr2:234151559-234151741; Gene: ATG16L1 (Intergenic)
  source 1..183: mol_type = genomic DNA
cggctcactgcaacctccgcctcccgggttcaagcaattctcctgcctcagcctcccaagtagctgggattacaggcacccaccaccatgcccagctaatttttgtatttttagtagagacagggtttcgccatgttggccacgctggtcttgaactcctgacctcaagtgatcgcctgcccc

SEQ ID NO: 3892 - DNA, 213 bp, Homo sapiens
  misc_feature 1..213: note = U/M: U (0.16:0.94) in Blood Monocytes + Macrophages
  misc_feature 1..213: note = source = chr7:106668694-106668906; Gene: PRKAR2B (Intergenic)
  source 1..213: mol_type = genomic DNA
cgcctataaccccagctactcaggaggccaatgagggaggatcgctggagctcaggagtttgagaccagcctgagcaacacagcaagactctgtctctgacaaaaaaaaaaaaaaaaaaaaaaaaaaaaaaaaaaagaagtagaaagtggaaagagggtagatgcggcagggcgcagtggctcacgcctgtaatcccagcactttcggaagcc

SEQ ID NO: 3893 - DNA, 114 bp, Homo sapiens
  misc_feature 1..114: note = U/M: U (0.16:0.93) in Blood Monocytes + Macrophages
  misc_feature 1..114: note = source = chr2:64981299-64981412; Gene: SERTAD2 (Intergenic)
  source 1..114: mol_type = genomic DNA
cggcctcccttagtgctgtgattacaggcatgaaccaccgcgcccggcctatattttctacctctcatttttgtgctcacttccccttctacactgcttgcacacaggccttgc

SEQ ID NO: 3894 - DNA, 159 bp, Homo sapiens
  misc_feature 1..159: note = U/M: U (0.16:0.92) in Blood Monocytes + Macrophages
  misc_feature 1..159: note = source = chr12:25120044-25120202; Gene: BCAT1 (Intergenic)
  source 1..159: mol_type = genomic DNA
cgggtgtggtgtcctctttaagcgaaggtctctccgcagttggggcatcttcgcttcctcaaggcaaaacggcagatgaacccaaaggggaacaggatgatgaccaagaaaatgcccagggagctgaagcagtcctccagcacccccgaccctgcagac

SEQ ID NO: 3895 - DNA, 306 bp, Homo sapiens
  misc_feature 1..306: note = U/M: U (0.11:0.87) in Blood Monocytes + Macrophages
  misc_feature 1..306: note = source = chr2:122044859-122045164; Gene: TFCP2L1 (Intergenic)
  source 1..306: mol_type = genomic DNA
cgtagaggctgccctgggaacacagaggaggactctggagctccgaagaggctccagcatgaagtgatatctcctgatggatgggtgagtggaagtgaaaccaatctgtggagatggagggaggtttccggcccagtagacgctcctgcaaaggcctggaggaagggcagtcaatattattagatggttcagacctgggtttactacttagctccatctgaatctatgaccttgggtggagtaaattgacctcatgctgcttctcccatcaagaggtggtgtctgtttccctcccctcccccttcc

SEQ ID NO: 3896 - DNA, 99 bp, Homo sapiens
  misc_feature 1..99: note = U/M: U (0.16:0.91) in Blood Monocytes + Macrophages
  misc_feature 1..99: note = source = chr21:47852040-47852138; Gene: PCNT (exon)
  source 1..99: mol_type = genomic DNA
cgcaaggctgcgaggaggagcgcggaggccaggcagagcccagcggctgcggagcagtggaggaagtggcagagagacaaggagaagctggtgagagcc

SEQ ID NO: 3897 - DNA, 189 bp, Homo sapiens
  misc_feature 1..189: note = U/M: U (0.14:0.89) in Blood Monocytes + Macrophages
  misc_feature 1..189: note = source = chr19:52314719-52314907; Gene: FPR3 (intron)
  source 1..189: mol_type = genomic DNA
cgctgacctcatgtgcgctgccagctgactcatcccagggtccccatttgcgttgtcaatttcagttcctctattccaggagatcttcttcattcacatcctcatagtcccgtgttcagactgtcgcctgtttgagtgccacttgtagagcccctgattctgtcgctgttcggggcaccactatgtaac

SEQ ID NO: 3898 - DNA, 227 bp, Homo sapiens
  misc_feature 1..227: note = U/M: U (0.2:0.93) in Blood Monocytes + Macrophages
  misc_feature 1..227: note = source = chr12:1032818-1033044; Gene: RAD52 (intron)
  source 1..227: mol_type = genomic DNA
cgggtgcagggtcttagttctgcagatcaatttcacaacaatgggaatacacttaacactactcgaccacacactaaaaatagttaaaatgtgatgtgttttactacaatttaaaaaaagaaaaggccgggtgcggtggctcacgcctgtcatcccaaaactttcggaggccgaggcaggcggattacttgaggtcaggagttcaagaccagcctggccaacaggac

SEQ ID NO: 3899 - DNA, 167 bp, Homo sapiens
  misc_feature 1..167: note = U/M: U (0.19:0.91) in Blood Monocytes + Macrophages
  misc_feature 1..167: note = source = chr14:103657270-103657436; Gene: LINC00605 (Intergenic)
  source 1..167: mol_type = genomic DNA
cgggtctgatgctggagtcgtgtccacagggtaggccacgaggaagggaacttcaggagcagctgccgccccgagaagacagactgaaacccatatcagttcctgttccttctgaccttgggtgctagggtattctacaaaagttagtttagttttgtttttgagac

SEQ ID NO: 3900 - DNA, 97 bp, Homo sapiens
  misc_feature 1..97: note = U/M: U (0.21:0.91) in Blood Monocytes + Macrophages
  misc_feature 1..97: note = source = chr19:52327634-52327730; Gene: FPR3 (exon)
  source 1..97: mol_type = genomic DNA
cgtgcctatgtccatcatcacagtctgctatgggatcatcgctgccaaaattcacagaaaccacatgattaaatccagccgtcccttacgtgtcttc

SEQ ID NO: 3901 - DNA, 120 bp, Homo sapiens
  misc_feature 1..120: note = U/M: U (0.23:0.93) in Blood Monocytes + Macrophages
  misc_feature 1..120: note = source = chr12:14405611-14405730; Gene: ATF7IP (Intergenic)
  source 1..120: mol_type = genomic DNA
cgcatgcctgtaatcccagctactcgggaggctgaggcaggagaatctcttgaacgccagaggcggaggttgtggtgagctgagatcgtgccattgcactccagcctgggcaacaggagc

SEQ ID NO: 3902 - DNA, 466 bp, Homo sapiens
  misc_feature 1..466: note = U/M: U (0.24:0.93) in Blood Monocytes + Macrophages
  misc_feature 1..466: note = source = chr14:103909521-103909986; Gene: MARK3 (intron)
  source 1..466: mol_type = genomic DNA
cgatacacatcagtaacaacagaagttgagaaagtagttaacatattgccaaacctggaattcatgattgaattctttgagatctactgtgagtacatactctgcctctgttcagctgttccagaacttaagaagaggaacttccaaattcttttctcaaattcagaaacaatgctattgaaatatattggaaacaggaacgaaaactacagttcagtttcacttataatatccattctaaaattgggaattaaaaatactagcatataggactaaatactggtacatttatctttgtttccccaaagattcactaaatgatggtaacggaattaaaaaggaggggaaaagagtccaggaattgagtactgaggcattctcaggaagagcaccaagagagggaggagatacccagcggtcacagtggaagtcgtctttgagacttagagcgtttgaggaaggggtc

SEQ ID NO: 3903 - DNA, 147 bp, Homo sapiens
  misc_feature 1..147: note = U/M: U (0.18:0.87) in Blood Monocytes + Macrophages
  misc_feature 1..147: note = source = chr3:13620469-13620615; Gene: FBLN2 (intron)
  source 1..147: mol_type = genomic DNA
cgcttgaacctaggaggcggaggttgtggtgagccacgatcacgcctttgcactccagcctgggcagcaagagtgaaactccgtctcaaaaaaaagagaactatcagactgttttccagagcgactgcaccattttacattcccacc

SEQ ID NO: 3904 - DNA, 81 bp, Homo sapiens
  misc_feature 1..81: note = U/M: U (0.25:0.93) in Blood Monocytes + Macrophages
  misc_feature 1..81: note = source = chr10:134264798-134264878; Gene: C10orf91 (Intergenic)
  source 1..81: mol_type = genomic DNA
cgctttggttctacagttcgcagataggggaactgaatcctggaaacaggcagggcgaggggtgggcccgccaagcactgc

SEQ ID NO: 3905 - DNA, 84 bp, Homo sapiens
  misc_feature 1..84: note = U/M: U (0.24:0.9) in Blood Monocytes + Macrophages
  misc_feature 1..84: note = source = chr2:152905911-152905994; Gene: CACNB4 (intron)
  source 1..84: mol_type = genomic DNA
cgcctcagcctcccaaagagctgggattacaggcgtgagccactgcacccggcctgcattctctttccctctcgtttcacaacc

SEQ ID NO: 3906 - DNA, 299 bp, Homo sapiens
  misc_feature 1..299: note = U/M: U (0.28:0.94) in Blood Monocytes + Macrophages
  misc_feature 1..299: note = source = chr19:19238724-19239022; Gene: TMEM161A (intron)
  source 1..299: mol_type = genomic DNA
cggtgacagagtgagatcctgtctcaaaaaaagaaaaaaaaattctaacacctgctacaacatggatatgccttgaggacattgtgctaactgaaatgagcacgtcacaaaaggacaaatactgtatgatgccacttatatgaggaacccagagtggtcacattcacagagacaggacgtaaaatggtgggtgtcaggggctgcaagaaggaggaacagggagttagtgtttgatgggctggagtttcagttttgcaagagcaaagagttgtggagatggacggtggtgatggttgcac

SEQ ID NO: 3907 - DNA, 130 bp, Homo sapiens
  misc_feature 1..130: note = U/M: U (0.3:0.94) in Blood Monocytes + Macrophages
  misc_feature 1..130: note = source = chr7:2284482-2284611; Gene: NUDT1 (intron)
  source 1..130: mol_type = genomic DNA
cgtgagcctcagtgtcttcatctcagaatgaagaacagtccgcagcccttcggactcttgtgaagataaaatgaggaaatgaactcgaaggacttagaacggtgcgcggtgtgcggtgcgtgctgagtgc

SEQ ID NO: 3908 - DNA, 244 bp, Homo sapiens
  misc_feature 1..244: note = U/M: U (0.36:0.94) in Blood Monocytes + Macrophages
  misc_feature 1..244: note = source = chr10:114911613-114911856; Gene: TCF7L2 (intron)
  source 1..244: mol_type = genomic DNA
cgcggccatcaaccagatccttgggcggagggtaggtgacgcccttctcagggagaagcggggggcgggtggtgagggaccagagtgcagcaggtcaggtggcagaatgtctctgtccccatttctttggagaattcttgcccttcagccacattctgaatccttgaatggccttcactgagtcaggactagttattctgcactcagcgttcagaacagccacagccatgctcttcccctaccc

SEQ ID NO: 3909 - DNA, 463 bp, Homo sapiens
  misc_feature 1..463: note = U/M: U (0.36:0.93) in Blood Monocytes + Macrophages
  misc_feature 1..463: note = source = chr1:46483872-46484334; Gene: MAST2 (intron)
  source 1..463: mol_type = genomic DNA
cggcatgcctggtctcccctttctctttcctccactctctctctgatgtcttgccacctgctcccatgtcttcagttgtcatctctacgctgaggactcccacatgtggctgccactcttactgttctcctgagcttcagatcagtgcacccagctgcctgctggactcctccactttgacttccctatattggttcttattctttggttgcacgtaatagaaactgattcagaatagtttaaacagtaaagggaaacattataagagtaaaaggagtaggtcttagagaattgaagcgagggatataaccaggccttaagaaggaaccagaactagaaaccagaagctccaggaagctcaggaagtcttcattcttcctttttctgtatgcatcttttcctctatttccatggtaggtatgcatctcttttcacagttcttaaacggttctgccacactgac

SEQ ID NO: 3910 - DNA, 178 bp, Homo sapiens
  misc_feature 1..178: note = U/M: U (0.1:0.92) in Blood Monocytes + Macrophages
  misc_feature 1..178: note = source = chr19:10236782-10236959; Gene: EIF3G (Intergenic)
  source 1..178: mol_type = genomic DNA
cgagatcctgccattgcagtccagcctgggcaacgagaaggtaactctgtttcaaaagaaaaaaaaaaaaaacagctgggcgtggtggtgcgtgcctgtaatcccagctactaaggaggctgaggcaggagaatcacttgaacccaggaggcggaggttgcagcgaaccaagattgcg

SEQ ID NO: 3911 - DNA, 171 bp, Homo sapiens
  misc_feature 1..171: note = U/M: U (0.14:0.94) in Blood Monocytes + Macrophages
  misc_feature 1..171: note = source = chr12:112326273-112326443; Gene: MAPKAPK5 (exon)
  source 1..171: mol_type = genomic DNA
cggcagtgtttgcattcaggcagtggttgcaggaatccagcaggctcacgcggaacagttggccaacatgagaatccaggatctgaaagtcagcctcaaacccctgcactcagtgaacaaccccattctgcggaagaggaagttacttgggtaactgagcttatttcttcg

SEQ ID NO: 3912 - DNA, 98 bp, Homo sapiens
  misc_feature 1..98: note = U/M: U (0.13:0.92) in Blood Monocytes + Macrophages
  misc_feature 1..98: note = source = chr2:102138126-102138223; Gene: RFX8 (Intergenic)
  source 1..98: mol_type = genomic DNA
cgcagtatcgctgttccgcatacaccaacatagctttcagttcctcagccccatcccacatgaaccacgtattactgcagaaccagatgatgtccccg

SEQ ID NO: 3913 - DNA, 246 bp, Homo sapiens
  misc_feature 1..246: note = U/M: U (0.15:0.94) in Blood Monocytes + Macrophages
  misc_feature 1..246: note = source = chr6:134696479-134696724; Gene: LOC154092 (Intergenic)
  source 1..246: mol_type = genomic DNA
cgggaagctcatgacagtgatttcgtactactgtgctaggtctaaagggcagaaggaatggggaagccaagagggctccaggctccatgcaactaatgaaaccatagcagctctacttgctagacttttatcattattcactttctttctttcttccttttttttttttgagacagagtttcactcttgttgcccatgctggagtgcaatggtgcaatctcggctcatcgcaaactctgtctcccg

SEQ ID NO: 3914 - DNA, 241 bp, Homo sapiens
  misc_feature 1..241: note = U/M: U (0.09:0.87) in Blood Monocytes + Macrophages
  misc_feature 1..241: note = source = chr17:64434250-64434490; Gene: PRKCA (intron)
  source 1..241: mol_type = genomic DNA
cgggtcccccttctccctgcccttcatcttgtgtgactgcggttgagaaagacctgcaggattaaaggatctggtgaccttgggaccccgcacttgcttggcagtgacagtcctgaggaactgtattctttcagttcctctatcagcaaagcagctcagtaggtaaagggcgaattccggcatttcagtgtctcttgccatgggtagctctcatatttccagttgatgatgtctggacacg

SEQ ID NO: 3915 - DNA, 91 bp, Homo sapiens
  misc_feature 1..91: note = U/M: U (0.15:0.91) in Blood Monocytes + Macrophages
  misc_feature 1..91: note = source = chr8:27248671-27248761; Gene: PTK2B (intron)
  source 1..91: mol_type = genomic DNA
cggtgcaatctcggctcactgcaagctccgtctcccgggttcaagggattcttttgtctcagcctcccgagtagctgggattacaggcacg

SEQ ID NO: 3916 - DNA, 55 bp, Homo sapiens
  misc_feature 1..55: note = U/M: U (0.14:0.89) in Blood Monocytes + Macrophages
  misc_feature 1..55: note = source = chr3:196302048-196302102; Gene: FBXO45 (intron)
  source 1..55: mol_type = genomic DNA
cgggcgtggtggctcacgcctgtaatcccagcacttgcggaggccaaggcaggcg

SEQ ID NO: 3917 - DNA, 74 bp, Homo sapiens
  misc_feature 1..74: note = U/M: U (0.19:0.94) in Blood Monocytes + Macrophages
  misc_feature 1..74: note = source = chr7:140194671-140194744; Gene: MKRN1 (Intergenic)
  source 1..74: mol_type = genomic DNA
cgcttgaacccagaggcggaggttgtggctagccgagattgcgccattgcactccagcctgggcaacaagagcg

SEQ ID NO: 3918 - DNA, 78 bp, Homo sapiens
  misc_feature 1..78: note = U/M: U (0.14:0.89) in Blood Monocytes + Macrophages
  misc_feature 1..78: note = source = chr17:79300342-79300419; Gene: TMEM105 (intron)
  source 1..78: mol_type = genomic DNA
cggctcattgcaacctctgcctcccgggttcaagcgattctcctgcctcagcctcccgagtagctgggactacaggcg

SEQ ID NO: 3919 - DNA, 319 bp, Homo sapiens
  misc_feature 1..319: note = U/M: U (0.17:0.92) in Blood Monocytes + Macrophages
  misc_feature 1..319: note = source = chr20:52313293-52313611; Gene: ZNF217 (Intergenic)
  source 1..319: mol_type = genomic DNA
cggctaattttttgtatttttagtagagacggggtttcaccatgttggtcaggatggtctcgatctcatgaccttgtgatctgcccgcctcggcctcccaaagtgctgggattacaggcgtgagccaccgcgcccacctaaaacatttcaaaataagatacgcaagctctatgtggaagcgaaagggggaagcagggaattcaagatctacaaaaggagttttaggaagtgaaatgggtattctcaagagtgggttggctgggtgcagtggctcatgcctgtaatctcagcactttgggaggccgaggcttgggaatcg

SEQ ID NO: 3920 - DNA, 96 bp, Homo sapiens
  misc_feature 1..96: note = U/M: U (0.17:0.91) in Blood Monocytes + Macrophages
  misc_feature 1..96: note = source = chr17:78186771-78186866; Gene: SGSH (intron)
  source 1..96: mol_type = genomic DNA
cgaggtcaggagttcaagaccagcctggccaatgtggtgaaaccccgtctctactaaaaatataaaaattagctgggcatggtggcgtgcggtgcg

SEQ ID NO: 3921 - DNA, 162 bp, Homo sapiens
  misc_feature 1..162: note = U/M: U (0.14:0.88) in Blood Monocytes + Macrophages
  misc_feature 1..162: note = source = chr8:28961290-28961451; Gene: KIF13B (intron)
  source 1..162: mol_type = genomic DNA
cgaaccactttcctctcgcctcccacgtcctcactaagttactcggggaccccaaggaaccaagaacgaaaagtaggaaggtccagaagcgttaacacaactgtgagacatcacagttacttgcctaatacgatttgtcttgctaatccccagccctgcacg

SEQ ID NO: 3922 - DNA, 175 bp, Homo sapiens
  misc_feature 1..175: note = U/M: U (0.18:0.92) in Blood Monocytes + Macrophages
  misc_feature 1..175: note = source = chr2:219564598-219564772; Gene: STK36 (intron)
  source 1..175: mol_type = genomic DNA
cgtactcttaaccactactttatccttcctcttctgcgcaactttctttttccttttttttttttctgagacagagtttcactcgtactgcccaggccggagtgcatggcatgatctcggctcaccacaacttctgcctcccgggttcaagcagttctcctgccttagcctcccg

SEQ ID NO: 3923 - DNA, 177 bp, Homo sapiens
  misc_feature 1..177: note = U/M: U (0.11:0.85) in Blood Monocytes + Macrophages
  misc_feature 1..177: note = source = chr1:40499816-40499992; Gene: CAP1 (Intergenic)
  source 1..177: mol_type = genomic DNA
cgccaagccagttaagtatctacatgttgtattgaattttcttctcctttcatttccctttctcccatgaatatatatagggtgtggcacgttatagtggttaactttaaagttcagtccacatggtggcacacgcctgtaattccagctactcgggaggctgaggcaggagaatcg

SEQ ID NO: 3924 - DNA, 282 bp, Homo sapiens
  misc_feature 1..282: note = U/M: U (0.12:0.86) in Blood Monocytes + Macrophages
  misc_feature 1..282: note = source = chr19:46396750-46397031; Gene: MYPOP (intron)
  source 1..282: mol_type = genomic DNA
cgggaggcagaagttgcagtgagctgagattgcatcattgcactccagcctgggcaacaagagcgaaactccgtctcaaaaaaaaaaaaaaaaaaaaggcaaatctatagaaacagaaagtagatgagtggctgccgggggctgggggaagacagggaagatgggagattggggatggctaagaggtgcagggtttctttctggagtgatgaaaatgttctaaaattgatcgtggtgatggttgcataactctgaatatactaaaagccattgaattgtacg

SEQ ID NO: 3925 - DNA, 101 bp, Homo sapiens
  misc_feature 1..101: note = U/M: U (0.22:0.95) in Blood Monocytes + Macrophages
  misc_feature 1..101: note = source = chr12:1032945-1033045; Gene: RAD52 (intron)
  source 1..101: mol_type = genomic DNA
cgggtgcggtggctcacgcctgtcatcccaaaactttcggaggccgaggcaggcggattacttgaggtcaggagttcaagaccagcctggccaacaggacg

SEQ ID NO: 3926 - DNA, 108 bp, Homo sapiens
  misc_feature 1..108: note = U/M: U (0.16:0.89) in Blood Monocytes + Macrophages
  misc_feature 1..108: note = source = chr1:184886535-184886642; Gene: FAM129A (intron)
  source 1..108: mol_type = genomic DNA
cggggtttcaccatgttagccaggaaggtcttgatctgacctcgtgatccgcccgcctcggcctcccaaagtgctgggattacaggcgtgagccaccctgcccggccg

SEQ ID NO: 3927 - DNA, 192 bp, Homo sapiens
  misc_feature 1..192: note = U/M: U (0.11:0.84) in Blood Monocytes + Macrophages
  misc_feature 1..192: note = source = chr2:100402240-100402431; Gene: AFF3 (intron)
  source 1..192: mol_type = genomic DNA
cgccctgtcacccaggctggagtgcaatggcgcaatctcagctcactgcaacctcagcctcccgggttcaagcgattctgctgcctcagcctcccgggtagctgggattacaggcacgtgtcaccatgcctggctaattttttgtatttttagtacagatggggtttcaccatgttggccaggctggtctcg

SEQ ID NO: 3928 - DNA, 51 bp, Homo sapiens
  misc_feature 1..51: note = U/M: U (0.17:0.89) in Blood Monocytes + Macrophages
  misc_feature 1..51: note = source = chr1:6116351-6116401; Gene: KCNAB2 (intron)
  source 1..51: mol_type = genomic DNA
cgcctcggcctcccaaagtgctgggattacaggcgtgagccaccgcgcccg

SEQ ID NO: 3929 - DNA, 160 bp, Homo sapiens
  misc_feature 1..160: note = U/M: U (0.2:0.92) in Blood Monocytes + Macrophages
  misc_feature 1..160: note = source = chr1:179919826-179919985; Gene: CEP350 (Intergenic)
  source 1..160: mol_type = genomic DNA
cgtctctacaaaaatacaaaaattcgtagggcatgatggcggatagcatgtaatcccagctactcaggaagctgaagcggaagaatcgcttgaacctggggggcagaagttgcagtgagctgagatcatgccattgcactccagcctgggcgacagagcg

SEQ ID NO: 3930 - DNA, 257 bp, Homo sapiens
  misc_feature 1..257: note = U/M: U (0.17:0.89) in Blood Monocytes + Macrophages
  misc_feature 1..257: note = source = chr16:16035816-16036072; Gene: ABCC1 (Intergenic)
  source 1..257: mol_type = genomic DNA
cgtggtggtgccaacccgtaatcccagctgctcgggaagctaaggtgggaggaagcaccatgcccggcctgcttccactttttggctactgtgaataatgctgttgtgaacatgggtgtacaaatatctgttcaaacccctgctttcactacttctttttttttttttttgagacggagtttcactcttgatgcccaggctggagtgcaatggtgcaatcttggctcaccacaacctctgcctcctgggttcaagcg

SEQ ID NO: 3931 - DNA, 98 bp, Homo sapiens
  misc_feature 1..98: note = U/M: U (0.14:0.85) in Blood Monocytes + Macrophages
  misc_feature 1..98: note = source = chrX:44305596-44305693; Gene: FUNDC1 (Intergenic)
  source 1..98: mol_type = genomic DNA
cgggggaagtggaagtgaaaggattgcttaagtctaggaggtcgaggctgcagtgaaccgagatcacgccactgcaccacaacctgcatggcagagcg

SEQ ID NO: 3932 - DNA, 140 bp, Homo sapiens
  misc_feature 1..140: note = U/M: U (0.17:0.88) in Blood Monocytes + Macrophages
  misc_feature 1..140: note = source = chr19:54349022-54349161; Gene: NLRP12 (Intergenic)
  source 1..140: mol_type = genomic DNA
cggccaactaatttttgtatttttagtagagatggggtttcaccatatcggtcaggctgggtctggaaatcctgaccttgtgatccgcccgcctcggcctcccaaagtgctgggattgcaggcgtgagccactgcgcccg

SEQ ID NO: 3933 - DNA, 174 bp, Homo sapiens
  misc_feature 1..174: note = U/M: U (0.16:0.87) in Blood Monocytes + Macrophages
  misc_feature 1..174: note = source = chr3:185367216-185367389; Gene: IGF2BP2 (intron)
  source 1..174: mol_type = genomic DNA
cggccagctgtggaagagggcactctgatatgcgcttccagcttcacttcttctttggggttaaagaagttttcctctttcagtttcccaaagatccgtccctgggcctgagagagcaagacatgactaatgactctcagtcagccagcagccggccacttcatcagtgctgcg

SEQ ID NO: 3934 - DNA, 245 bp, Homo sapiens
  misc_feature 1..245: note = U/M: U (0.24:0.95) in Blood Monocytes + Macrophages
  misc_feature 1..245: note = source = chr17:19826637-19826881; Gene: AKAP10 (intron)
  source 1..245: mol_type = genomic DNA
cgtctcggcctcccaaagtggtgggattacaggcgtgagccaccgtgcccggccttgtccgttattttctaaaagaagaactaaaaatcactacacaaagctgacacagctgaaaaagctggctttccaaatacaatgtggtcaaacaaaccttttacttccttcaagtactttctaggctcctcagtctcccaataccactgttactttctttttttttgagacaagagtctcgctccactgcg

SEQ ID NO: 3935 - DNA, 287 bp, Homo sapiens
  misc_feature 1..287: note = U/M: U (0.2:0.91) in Blood Monocytes + Macrophages
  misc_feature 1..287: note = source = chr12:124426212-124426498; Gene: CCDC92 (intron)
  source 1..287: mol_type = genomic DNA
cgccttgccccggcacgcctgcgcagggctgagcgagccctggaccatagtgcatgctcttccttatttggaaactctcctgaccctctcatgactagcttcctcttttctttgtcctctttcccttttgcctatttaggaaagtttcaagctgttagccaatcgggtcaagcttagaatgtgaggtcccattccagtcaatggaaactggacacagtcatagggcaattgcatcaggttatgaagattataaatgtcctcgtctcctttgtttgagtgtgctctcg

SEQ ID NO: 3936 - DNA, 333 bp, Homo sapiens
  misc_feature 1..333: note = U/M: U (0.23:0.94) in Blood Monocytes + Macrophages
  misc_feature 1..333: note = source = chr16:53838299-53838631; Gene: FTO (intron)
  source 1..333: mol_type = genomic DNA
cgagtttgcttccgatgtggtaccgcatcgaggaagtgaaagagtctccattcaaaattctactttcgcctccaaatccagtttacttttactgtgccatattttcatggagagggaagtttttcgtaggacaaggaatgctaaatttgttgaaatggttgaaatactttttttcttcttatctaaagcaaatatggtatatgtgaaatatttacacttttttggtttagctacttcttattgatcttttttttttttttttttgagaaagaaccatgctgtgtcaccatgcagcggtgactcactgcaacctccatctgccaggttcaagcg

SEQ ID NO: 3937 - DNA, 342 bp, Homo sapiens
  misc_feature 1..342: note = U/M: U (0.18:0.89) in Blood Monocytes + Macrophages
  misc_feature 1..342: note = source = chr13:41355868-41356209; Gene: SLC25A15 (Intergenic)
  source 1..342: mol_type = genomic DNA
cgtggaagtctcctgtgggcctcccctgaaaccttctattccatccctcatctatgcccccctgggatgccctcgctacccacacgcctctcgccgcatgcccccctggattataattgcttgtttcttcctcctccgcttgggccatgatttctttcaagctagccgttgactctttcacttctgcatttccagcagttagtttgggttgacaccatccaacacaggataggtactaaagggaagtttgttactgataggaaggaatgctccaatttgctttccgagaaccaggaatcagaaacaggtgctatgaggtgactgcgtctaacatagatctcg

SEQ ID NO: 3938 - DNA, 408 bp, Homo sapiens
  misc_feature 1..408: note = U/M: U (0.16:0.87) in Blood Monocytes + Macrophages
  misc_feature 1..408: note = source = chr3:143717052-143717459; Gene: C3orf58 (Intergenic)
  source 1..408: mol_type = genomic DNA
cgaaagaactaataacatccacttactttcctccttgatttagaataagaaacggatgtaggaattaagaagctagggaatatcgtctatgctgttgttaaagctgttattgtggtttatatccaaggtaacgatagttttcttaatactgtgtcccagaattaatcgtctccacttttgtcagagtggggaaaccacagaccttctgccattggcaatctccccttgagaaatatacatgaagaagcagagaatttgtgattcatgagacagtcatcctaaaagggaagcgaaagtgaccgactgcatgtgcccagttcctttcctcaaattcacccattagataagtcattggtgaaagggaaaatacagattgggagtcctacttgtaggaagtccttccactcg

SEQ ID NO: 3939 - DNA, 140 bp, Homo sapiens
  misc_feature 1..140: note = U/M: U (0.21:0.91) in Blood Monocytes + Macrophages
  misc_feature 1..140: note = source = chr20:52314857-52314996; Gene: ZNF217 (Intergenic)
  source 1..140: mol_type = genomic DNA
cggagtctcgctctgtggcccaggcttcagagcagtggcgagatctcagctcactgtaacctctacctcctgggttcaagcaattctcctgcctcagcctcctgagtagctgggattacaggcgcgtgccactacgcccg

SEQ ID NO: 3940 - DNA, 184 bp, Homo sapiens
  misc_feature 1..184: note = U/M: U (0.18:0.88) in Blood Monocytes + Macrophages
  misc_feature 1..184: note = source = chr1:117269817-117270000; Gene: CD2 (Intergenic)
  source 1..184: mol_type = genomic DNA
cgcacacaattttgagaacacatccatcgcacaaagcattatgcaacaatataaggataaatgccatggatcgcatgcaaaaaagaggaaaataatagaggaagcgcagttaattaatgcagtaggaactgaaacactacaggagcagatgaacatgcactcccagaatatgatacaataagcg

SEQ ID NO: 3941 - DNA, 184 bp, Homo sapiens
  misc_feature 1..184: note = U/M: U (0.17:0.87) in Blood Monocytes + Macrophages
  misc_feature 1..184: note = source = chr21:47852152-47852335; Gene: PCNT (intron)
  source 1..184: mol_type = genomic DNA
cgtccacacctaaaaacgataagcaattggagttaggatggttcacgtgggggacgcgagatttatgtctggccctctgacctggtctgctctggtctgtgtgccctgacgctggcaccacactgctgttactgtagctttctagaaagtattgaaatcaggaagtgtgagttctccaacttcg

SEQ ID NO: 3942 - DNA, 188 bp, Homo sapiens
  misc_feature 1..188: note = U/M: U (0.18:0.88) in Blood Monocytes + Macrophages
  misc_feature 1..188: note = source = chr16:4038109-4038296; Gene: ADCY9 (intron)
  source 1..188: mol_type = genomic DNA
cgaatccagaaccacacacggaaagattccaaaatggggcacacacggagaaggaagtgtatgaagggaagtacaatccagtctgcagtcggggagagcttcttggaggaagtgggattgggtgatgggctgagaagtcaagtacaaggggttaaggcggtgggggcgggagagggaacatggagccg

SEQ ID NO: 3943 - DNA, 216 bp, Homo sapiens
  misc_feature 1..216: note = U/M: U (0.22:0.92) in Blood Monocytes + Macrophages
  misc_feature 1..216: note = source = chr5:142544963-142545178; Gene: ARHGAP26 (intron)
  source 1..216: mol_type = genomic DNA
cggtgcataatgtgaatcctcgtccatgtcacctcatgcgggcttcggtaagaaccactccctcattcttcagtcttccacagtattaagagcttgggttctgggggcagatttactgaagagttcacatcccaactttattagttgttttacaatgatcacttcctttttaaaatttattttagattcaggaagtacatgtgtaggtttgttacg

SEQ ID NO: 3944 - DNA, 260 bp, Homo sapiens
  misc_feature 1..260: note = U/M: U (0.19:0.89) in Blood Monocytes + Macrophages
  misc_feature 1..260: note = source = chr12:117495495-117495754; Gene: TESC (intron)
  source 1..260: mol_type = genomic DNA
cgtaaagcagaaacaacccaaacatctgtcaactcataattggagaaataaaatgtggcccatgcaatggagtttttttgtttgtttgttttttgagatggagtctcgctctgccgcccaggctggagtgcagtggtgcaatcctggctcactgcaaccacaatggagtattttttagccataaaaaggaaccaagtactgatagatgctacaacacaaatgaatctaaaaaacatgatgctaagtgagcccgggcgccg

SEQ ID NO: 3945 - DNA, 432 bp, Homo sapiens
  misc_feature 1..432: note = U/M: U (0.18:0.88) in Blood Monocytes + Macrophages
  misc_feature 1..432: note = source = chr17:25740818-25741249; Gene: TBC1D3P5 (Intergenic)
  source 1..432: mol_type = genomic DNA
cgatagatctctaggcccttcttccaaattcactgagtatctacagccaacctatccaatacctgagatcacaccaaggtatggtgtggccatgttccatgcaaaaatgttctttgccttctactccaagacattcacttgtccacacccgtaactgtgctgctccatactagaagtctgaaattgtaatactccactcttggcccatgacttcctttttcagttcctcttctctgtcatttctacttaggaactcatcaagacatccagactcttttttgttgttgttgttttctctttttttcttctaatgcatgtatctcatttaagatgtccagactcttgaacttctcacatctcctcccaatttatcagccgctctcttgcttcctgcttccctttcctagctagcccaaatctcacggtgaagcg

SEQ ID NO: 3946 - DNA, 75 bp, Homo sapiens
  misc_feature 1..75: note = U/M: U (0.18:0.87) in Blood Monocytes + Macrophages
  misc_feature 1..75: note = source = chr1:113425936-113426010; Gene: AKR7A2P1 (Intergenic)
  source 1..75: mol_type = genomic DNA
cggcgtgaacccaggaggcggagcttgcagtgagccaagatctcgccactgcacttcagcctgggtgacacagcg

SEQ ID NO: 3947 - DNA, 75 bp, Homo sapiens
  misc_feature 1..75: note = U/M: U (0.17:0.86) in Blood Monocytes + Macrophages
  misc_feature 1..75: note = source = chr19:6686504-6686578; Gene: C3,C3 (intron,exon)
  source 1..75: mol_type = genomic DNA
cgcatttgttgaataaatgacgcaacaaactttctcgtgtggtttacaatgaggacctgcgaaaacttagagccg

SEQ ID NO: 3948 - DNA, 99 bp, Homo sapiens
  misc_feature 1..99: note = U/M: U (0.22:0.91) in Blood Monocytes + Macrophages
  misc_feature 1..99: note = source = chr19:7608727-7608825; Gene: PNPLA6 (intron)
  source 1..99: mol_type = genomic DNA
cgctctgtcacccaggctggagtgctgcagtggcgtgacggtggctcactgcaagctccgcctcccgggttcacgccattctcctgcctcagcctcccg

SEQ ID NO: 3949 - DNA, 188 bp, Homo sapiens
  misc_feature 1..188: note = U/M: U (0.21:0.9) in Blood Monocytes + Macrophages
  misc_feature 1..188: note = source = chr15:72756712-72756899; Gene: ARIH1 (Intergenic)
  source 1..188: mol_type = genomic DNA
cgggaagcagaggttgtggtgagctgagatcgcgccattgccctccagcctggacaacagcgaaactgaaacttcacctcaaaataacaaaaaaaaaaggaacttggtatgctgctccagcaatttaaatgtgtcaatccacgtatccaatgttaaattatcttttccagaaagcaaaatgtgaagcg

SEQ ID NO: 3950 - DNA, 227 bp, Homo sapiens
  misc_feature 1..227: note = U/M: U (0.16:0.85) in Blood Monocytes + Macrophages
  misc_feature 1..227: note = source = chr12:133058610-133058836; Gene: FBRSL1 (Intergenic)
  source 1..227: mol_type = genomic DNA
cgcgactcagcccgaggccacaggcgtgagacccggggctgccagtgcgagtcctagagcccaaaggctggggcgcctgcagttctgtctgagggcaggagaggaagcgtgcatcccagctgccgtggggagagacacattccccttttctgtttctgttctctccagaccccagctggaaggtgccacccacactgagggcaggtcatcttcacctccgccactcg

SEQ ID NO: 3951 - DNA, 270 bp, Homo sapiens
  misc_feature 1..270: note = U/M: U (0.23:0.92) in Blood Monocytes + Macrophages
  misc_feature 1..270: note = source = chr4:1327181-1327450; Gene: MAEA (intron)
  source 1..270: mol_type = genomic DNA
cgttcagccggggcccagcttccttgcctgtccccctggttctcctttctctacagcccctgagtcaggagttaggctgcaccgtcttccgtggttctttctcttgctgacgctttgtattttatctgtaaatattggagcctccgactctccgcggtcactggggtagggttgggggttctgccatcactaaccaggcaccctgtgctcagacctggccccaacccagcagctggctgctcctgggtgagtggctccactctgcacccg

SEQ ID NO: 3952 - DNA, 136 bp, Homo sapiens
  misc_feature 1..136: note = U/M: U (0.22:0.9) in Blood Monocytes + Macrophages
  misc_feature 1..136: note = source = chr2:8417289-8417424; Gene: LINC00299 (intron)
  source 1..136: mol_type = genomic DNA
cgaggaagctaagctatacgtataaaaagaagagattgaaggatctgaaagtggccacgttgcctcactgcccaccctgcctccccagcacacacccagactgtctcccatctccatcgctaacttttgagaaccg

SEQ ID NO: 3953 - DNA, 145 bp, Homo sapiens
  misc_feature 1..145: note = U/M: U (0.12:0.8) in Blood Monocytes + Macrophages
  misc_feature 1..145: note = source = chr12:111624255-111624399; Gene: CUX2 (intron)
  source 1..145: mol_type = genomic DNA
cggggaacaggggagcgggaagggcacacgcgcaggtcctgaggtcgggtggggaagagggaactgagcacattctggccacacccggccaccaggacccatggttgctgagagagagaagggcgactctgtggcgtgaggctcg

SEQ ID NO: 3954 - DNA, 153 bp, Homo sapiens
  misc_feature 1..153: note = U/M: U (0.23:0.91) in Blood Monocytes + Macrophages
  misc_feature 1..153: note = source = chr10:134987822-134987974; Gene: KNDC1 (intron)
  source 1..153: mol_type = genomic DNA
cggaaggaagggcggtgaagatggggaacttccaacacggaaggaagggcggtgaagatggggaacttccaacacggaaggaagggcggtgaagatggggaacttccaacacagaaggaagggcggtgagtgggaaggttgctgataccaccg

SEQ ID NO: 3955 - DNA, 236 bp, Homo sapiens
  misc_feature 1..236: note = U/M: U (0.24:0.92) in Blood Monocytes + Macrophages
  misc_feature 1..236: note = source = chr11:63401540-63401775; Gene: ATL3 (intron)
  source 1..236: mol_type = genomic DNA
cgggtgtggtggcttacgcctgtaatcccagcactttgagaggctgaggtgggaggatcacttgagtccaagaattcaacaccagcctgctcaacacagctagatcctgtttctatttaaaaaaaaaaaaaaaaaagaagaagaagaaaaaaaagggggctgggcgcggtgactcacgcctgtaatcccagcactttgggaggctgaggcgggcagatcacgaggtcaggagatcg

SEQ ID NO: 3956 - DNA, 241 bp, Homo sapiens
  misc_feature 1..241: note = U/M: U (0.24:0.92) in Blood Monocytes + Macrophages
  misc_feature 1..241: note = source = chr1:42157705-42157945; Gene: HIVEP3 (intron)
  source 1..241: mol_type = genomic DNA
cggtttcaccatgttggccaggctggtcttgaactcctgacctcaagtgatccacctgtctcagcctcccaaagtgctgggattacaggcgcgagccactgcgcccagtgtggtgaaaattttgagttgcctaatgtgcgtgttcccagatgaggctgaatgaggcgaccttctgccttctagtttcagatcccatatggtaaacaagtgtccacgaaaaggacactatggacagttttcg

SEQ ID NO: 3957 - DNA, 270 bp, Homo sapiens
  misc_feature 1..270: note = U/M: U (0.12:0.8) in Blood Monocytes + Macrophages
  misc_feature 1..270: note = source = chr10:50493567-50493836; Gene: C10orf71 (Intergenic)
  source 1..270: mol_type = genomic DNA
cggatacagagtttcagttttgcaaggtgaagagttctgcacagcaatgagaatgtacctaacactacagaactgtatacttaaaaatggttaagggccaggtgcagtggctcacgcctgtaatcccagcactttgggaggccgaggtggtggatcatgtgaggtcaggagttcaagaccagtctggccaacatgatgaaaccccatctctgctaaaaatacaaaacttagctgggcgtggtggcaggcgcctgtaatcccagctactcg

SEQ ID NO: 3958 - DNA, 480 bp, Homo sapiens
  misc_feature 1..480: note = U/M: U (0.24:0.92) in Blood Monocytes + Macrophages
  misc_feature 1..480: note = source = chr15:81011275-81011754; Gene: FAM108C1 (intron)
  source 1..480: mol_type = genomic DNA
cgacatacagggtagtaactccctcttctatttttttaaagaaggaatgcctttggggtattaatggagaatatgccttgataagtacagtaagatgtgttattaggtattaggatataccagccttccagtgagaagacttagtaataaatgagtagcattttaatgataacatttaatgtttctacttaaataatatatgcagacaatgtaacgagtcaaacagaaaagatcacgaagaaaagcaagagccatccctcttcctcttgactcctaataaccaggaacaactttagacagttatttgttgactttctgcaaagaagtgagaatttttcttggttaaccaattttgcggacttccttttactatttccagtgttttatagttatttttggttcttcattgagagtgtttgtaatttttaggtaatgtccatgagctttatttcttcttctgtccccttgcatgagcacccg

SEQ ID NO: 3959 - DNA, 209 bp, Homo sapiens
  misc_feature 1..209: note = U/M: U (0.22:0.89) in Blood Monocytes + Macrophages
  misc_feature 1..209: note = source = chr7:139692528-139692736; Gene: TBXAS1 (intron)
  source 1..209: mol_type = genomic DNA
cggttcttggcatggggagtgattagctctgcacaaacctggtagtttcacgagaagccatgtaaggtagagaagtcgctgaaggcatctccctctcagagttaaaaggaaacagaaagactggatcttgtgtctcttcctctttttaaaaagggaattaggcctggtgcagtggctcacgcctataataccagcactttgggaggccg

SEQ ID NO: 3960 - DNA, 155 bp, Homo sapiens
  misc_feature 1..155: note = U/M: U (0.21:0.87) in Blood Monocytes + Macrophages
  misc_feature 1..155: note = source = chr10:105225247-105225401; Gene: CALHM1 (Intergenic)
  source 1..155: mol_type = genomic DNA
cgttcctggggagcggttactcgtgttgtgctctccccgagctccccggtcggatcatgctctggttgcccacggtagtaactggctggcggctctacccttggttggctttcttccctctccagtatcacttctgttccttgcagggttccccg

SEQ ID NO: 3961 - DNA, 186 bp, Homo sapiens
  misc_feature 1..186: note = U/M: U (0.19:0.85) in Blood Monocytes + Macrophages
  misc_feature 1..186: note = source = chr19:47328399-47328584; Gene: SNAR-E (Intergenic)
  source 1..186: mol_type = genomic DNA
cgccttccatccctctcccatctctttcctgcatcttccggtttccccttgtctgttgcatcatccccatcagcataaaactgatgatttgagctgagcgcggtggctcacacttgtaatcacagcactttgggaggctgaggcgggcggatcacttgaggtcaggagtttgagaccagcctgacg

SEQ ID NO: 3962 - DNA, 205 bp, Homo sapiens
  misc_feature 1..205: note = U/M: U (0.21:0.87) in Blood Monocytes + Macrophages
  misc_feature 1..205: note = source = chr8:26290788-26290992; Gene: BNIP3L (Intergenic)
  source 1..205: mol_type = genomic DNA
cgtaggacctgtgtgagaatccctgttcgttgggagggggcagtagcgggagttgtgagggataaaggggaagtgaaaaagaaaggagagtgtattcgttcattttcatactgctataaagaaatgcttgggactgtgtaatttataaaggaaagaggtttaattgactcacagttccgcatggctggggaggccttaggaaacg

SEQ ID NO: 3963 - DNA, 228 bp, Homo sapiens
  misc_feature 1..228: note = U/M: U (0.2:0.86) in Blood Monocytes + Macrophages
  misc_feature 1..228: note = source = chr1:6116603-6116830; Gene: KCNAB2 (intron)
  source 1..228: mol_type = genomic DNA
cgggcccacactgtgctgactggacaccagccctcagttcagctgtgttttcctctgctccccatggtgctgggagtgaacccaaactccccgcaaggctctacgtggccctagcctgcctccttggtttcaactcggacccctctccctcccgctcaggaggctctggacgccgccccttccttctgtatccccaaaggggaactcattccatccacagggtcatcg

SEQ ID NO: 3964 - DNA, 322 bp, Homo sapiens
  misc_feature 1..322: note = U/M: U (0.23:0.89) in Blood Monocytes + Macrophages
  misc_feature 1..322: note = source = chr12:111129103-111129424; Gene: HVCN1 (Intergenic)
  source 1..322: mol_type = genomic DNA
cgtgctccgtcctcctcggcctcccaaagtgctgggattacaggcgtgagccaccgcgtctggccagaaggctttcttaaaaacattttggtcagatctcctgacttctcagtcatgtattattacaacagccccatgccagtttctaaggcatagtctggtccattttcaacttcaacttccttatattttattaaaaattctcctcctcccccagggccagctagacagagtggagaggatgtggggactgctcccaacagcccctcctctgtgttcactcccctctggttgaggaagggaaaagggaacaagtaccccg

SEQ ID NO: 3965 - DNA, 423 bp, Homo sapiens
  misc_feature 1..423: note = U/M: U (0.23:0.88) in Blood Monocytes + Macrophages
  misc_feature 1..423: note = source = chr2:148400250-148400672; Gene: ACVR2A (Intergenic)
  source 1..423: mol_type = genomic DNA
cgtagggttagttactgacacgggtgcaggggcactgtacaattgggaaacactgtgggccctgggccatattttagccacagaaaacctagaagtaccaggccctcctttgcaaaactctttttgtaggaggttcccctatattcaagttcaacagcggcttgaatgattaacctcagtaaacagctgtgtttggtatcataaagcacctaaagctacagttattaactactagaatgaaattgttaagcaattgtgttcatttcctagggttgccataataaattaccacaaacttggaagctaaaaataacaaatgtatttcctcacagaaatacattctgtgaggccaaaagtccgaaatcaaggtgccagcagggttagttccttctggagactctaagagagaatctgaccatgacg

SEQ ID NO: 3966 - DNA, 227 bp, Homo sapiens
  misc_feature 1..227: note = U/M: U (0.26:0.9) in Blood Monocytes + Macrophages
  misc_feature 1..227: note = source = chr7:1955684-1955910; Gene: MAD1L1 (intron)
  source 1..227: mol_type = genomic DNA
cgtcggtgcccatcatcctcacctgtgaggaagtgcaggcatccccacacactccgcacccaccagtggggctgtggtcagaaagagagatgccaccaacaccgggagggtgtggggcccctggagcctcacgtgggacatgcaaacgggtgaagccgcctcggaaaccgtaaggcagctcctctcctccctagaatgtggaaattcccctcccgtctggaggaacg

SEQ ID NO: 3967 - DNA, 298 bp, Homo sapiens
  misc_feature 1..298: note = U/M: U (0.27:0.91) in Blood Monocytes + Macrophages
  misc_feature 1..298: note = source = chr15:75447339-75447636; Gene: C15orf39 (Intergenic)
  source 1..298: mol_type = genomic DNA
cggagtccttgggctggcctgggcagccaggtgcctgtcctccccatctcctgcccttagcccttttgggagaggaagccagaagtgctgaagcctggggcggctgggactgcgagatcggtataaggatgggggacctccaccctcaaggaactgaaaaccatgtggaaggaacagaatggtctgcccgcaggggaaaccaagcaaaccaggcctttgattgggaccaaagacagatgtgaaacccaggactctgagctgaccttgactccaccgagctctgccctggggatcaccg

SEQ ID NO: 3968 - DNA, 89 bp, Homo sapiens
  misc_feature 1..89: note = U/M: U (0.28:0.91) in Blood Monocytes + Macrophages
  misc_feature 1..89: note = source = chr16:75605929-75606017; Gene: GABARAPL2 (intron)
  source 1..89: mol_type = genomic DNA
cggtcgccggtaatcccagctactcgggggctgaggcaggagaatcgcttgaagctgggaggaggaggttgtggtgagccaagatcacg

SEQ ID NO: 3969 - DNA, 116 bp, Homo sapiens
  misc_feature 1..116: note = U/M: U (0.25:0.88) in Blood Monocytes + Macrophages
  misc_feature 1..116: note = source = chr4:1220762-1220877; Gene: CTBP1 (intron)
  source 1..116: mol_type = genomic DNA
cgctggccaactgtgggcaagggcagggtacaacctcgcctgttaccagcatcgagaggaggagaaaaaacagaccgagcctggcagaaaacagaaagtgcgctccaagcaggacg

SEQ ID NO: 3970 - DNA, 389 bp, Homo sapiens
  misc_feature 1..389: note = U/M: U (0.3:0.93) in Blood Monocytes + Macrophages
  misc_feature 1..389: note = source = chr1:3759631-3760019; Gene: CEP104 (intron)
  source 1..389: mol_type = genomic DNA
cgtgcgacataacgctcagcctaaaaaacatttcaattcctctttttttctcactgcggcaactatggcagcccttcccttctttcctttagaccaggcacctctggaatggagtcccctcattgtcatccacagcaggcaggtggcaagggaaccactgtcccaaagaggtgcccaggacagagagggtgaccgaggatggcacagcggggccctttagctccccaaaagtggattcacccccggttcttacactgctaaaaaaaaaaaaaaagaggaagcggcaacagcagcagaaaaatatgtataattttttttttttttttttgagacagggtctcactctgtcacccaggctggaatacagtggcatgatctcggctcaagcg

SEQ ID NO: 3971 - DNA, 121 bp, Homo sapiens
  misc_feature 1..121: note = U/M: U (0.25:0.87) in Blood Monocytes + Macrophages
  misc_feature 1..121: note = source = chr7:76615403-76615523; Gene: DTX2P1-UPK3BP1-PMS2P11 (intron)
  source 1..121: mol_type = genomic DNA
cgattgataacctctgaggttccgtccacccctaggggcccctatcttgggaacctctggatccttgtacggttcagttcctagaggtcacagcagggacacacaccggggaggaactgcg

SEQ ID NO: 3972 - DNA, 220 bp, Homo sapiens
  misc_feature 1..220: note = U/M: U (0.21:0.83) in Blood Monocytes + Macrophages
  misc_feature 1..220: note = source = chr19:47262540-47262759; Gene: FKRP (TTS)
  source 1..220: mol_type = genomic DNA
cgacccacagttcagcacggctggggaggcctcatgaaacttacaatcatggcagaaggggaagcaaacacatcttgtgatggcaggaagaagaagttccaagcaaaaggggaaagttccttataaaaccattagatctcatgagaactcactatcacgagaatagcatgggggtaactgcccccatgattcaattacctcgcacccagtccctcccacg

SEQ ID NO: 3973 - DNA, 264 bp, Homo sapiens
  misc_feature 1..264: note = U/M: U (0.29:0.91) in Blood Monocytes + Macrophages
  misc_feature 1..264: note = source = chr4:103514429-103514692; Gene: NFKB1 (intron)
  source 1..264: mol_type = genomic DNA
cgcttcttgaaatttaccatctcttcctctttgagtgctttctatttccctttaagatgtttaaaaataccattagaatcagtggtctttctgtggctagtggtgggaccaaatcaatcttttctcctctggtttctcttcctttaaatacagataaagaagaagtgcagaggaaacgtcagaagctcatgcccaatttttcggatagtttcggcggtggtagtggtgctggagctggaggcggaggcatgtttggtagtggcg

SEQ ID NO: 3974 - DNA, 291 bp, Homo sapiens
  misc_feature 1..291: note = U/M: U (0.32:0.94) in Blood Monocytes + Macrophages
  misc_feature 1..291: note = source = chr12:402268-402558; Gene: KDM5A (intron)
  source 1..291: mol_type = genomic DNA
cgtttccgtttcttctctgaagagtcctttcctttcacttttagtggtttctcttccatgctgtcatccttcaaaaatataaatttaggaacaattttaaagcaagacagttaaaaaacagtattactctcttatatgaggtacctagaatagacacattcggagagacagaaagtcgaacagaggttaccagaggctgaagggaagaagaaatggagatttgtttagtgggtatagtttctgttggggataactaaaaaattcaggaaatgaatagtggtgacagttgcg

SEQ ID NO: 3975 - DNA, 335 bp, Homo sapiens
  misc_feature 1..335: note = U/M: U (0.22:0.84) in Blood Monocytes + Macrophages
  misc_feature 1..335: note = source = chr18:10797425-10797759; Gene: PIEZO2,PIEZO2 (exon,intron)
  source 1..335: mol_type = genomic DNA
cggagaccatggcatgaactttgatacttcttttttcctcacggctcctttcttcttcaaattcttctttctcttcctcttcctcctctcgcttttctagatggacgaatactttatttaactatttatgcaaacatgtgacatttgtataaatgttccaagcaatgcagcacatgtatggttttggtatagccttttatttaagatttcagaaattgtttcccattcataaagcccttaaaattcaaacagaatcagtaagttctgcatggtcagtgtaatgggatctagcatgtgataattgagaaaggaaaatttccatgtaagaagatacg

SEQ ID NO: 3976 - DNA, 139 bp, Homo sapiens
  misc_feature 1..139: note = U/M: U (0.32:0.93) in Blood Monocytes + Macrophages
  misc_feature 1..139: note = source = chr10:73851195-73851333; Gene: SPOCK2 (Intergenic)
  source 1..139: mol_type = genomic DNA
cgagtttcgctcttgcccaggctggagtgcaatggcgcgatctcagcttactgcaacctctgcctcccaggttcaaaagcaaatctcctgcctcagcctcccgagtagctgggattacaggaacgcaccaacacacccg

SEQ ID NO: 3977 - DNA, 164 bp, Homo sapiens
  misc_feature 1..164: note = U/M: U (0.24:0.85) in Blood Monocytes + Macrophages
  misc_feature 1..164: note = source = chr1:26711952-26712115; Gene: ZNF683 (Intergenic)
  source 1..164: mol_type = genomic DNA
cggtgaaaccccgtctctactaaaaatacaaaaaattagccgggcatggtggcgggctcctgtagtcccagctgctagggaggatgaggcaggagaatggcgtaaacctgggaggcggagcttgcagtgagccgagatcgcgccactgcactccagcctgggcg

SEQ ID NO: 3978 - DNA, 274 bp, Homo sapiens
  misc_feature 1..274: note = U/M: U (0.29:0.9) in Blood Monocytes + Macrophages
  misc_feature 1..274: note = source = chr9:140538629-140538902; Gene: EHMT1 (intron)
  source 1..274: mol_type = genomic DNA
cgtggtctctgggaagctgctcagctttcttatggcaggaaagcagccacgggcaatacgtaaacaagtgggggtggttgtgtgctggtaaaactggaagtgtttggaaactggaatttgagtttcatatcactcttgaaacagtcacatacttttttttttttttgagatggagtctcatttggttgcccaggctggagtgcagtggcgtaattttggctcactgcaacctctgcctcccgggttcaagcaattctccttcctcagcctcccg

SEQ ID NO: 3979 - DNA, 293 bp, Homo sapiens
  misc_feature 1..293: note = U/M: U (0.25:0.86) in Blood Monocytes + Macrophages
  misc_feature 1..293: note = source = chr17:19514244-19514536; Gene: ALDH3A2 (Intergenic)
  source 1..293: mol_type = genomic DNA
cgaatttttcctttttattttaaaattttatgtattcttaaaaatgttttattataaaagcaaattatattaagcaacacataacacattctgaacacatagcatagttcagaagttaacacaactgaaagtgagcacttcttctatttaggctagttccccagagctgtcccacttctttttttttttttttttgagacggagtcacccaggctggagtgtagtggcctgatctcggctcactgcaacctccgcctcctgggttcaagcaattttcctgcctcagcttcccg

SEQ ID NO: 3980 - DNA, 335 bp, Homo sapiens
  misc_feature 1..335: note = U/M: U (0.29:0.9) in Blood Monocytes + Macrophages
  misc_feature 1..335: note = source = chr10:95146992-95147326; Gene: MYOF (intron)
  source 1..335: mol_type = genomic DNA
cggtgatttgcaacccagcaaggagggccgcgggcagaggggcatccatgagctggctgtgctggcaaatgattcagatttgtggaacacacaggcatcgacctggattctcagaaatggttggggaagtcaactgggaagatttcctgtcttcaaggaggaagcggggttcacagccattgcagtgtgggccctcagcacacctgccctcctgtgctgggaagcctgaggcccaccagccacctctgaaaatggaaatgagtagaggtggcacctacagctcttggtgccagcaagaagtggctgttatggccacttccccatgacccccaacg

SEQ ID NO: 3981 - DNA, 355 bp, Homo sapiens
  misc_feature 1..355: note = U/M: U (0.28:0.89) in Blood Monocytes + Macrophages
  misc_feature 1..355: note = source = chr11:16812551-16812905; Gene: PLEKHA7 (exon)
  source 1..355: mol_type = genomic DNA
cgctcaccctggaatccccattcacacactgccccagctcccggtctcgcttcctctcgtctgactgccgcttgaggccccgcacagatgtgtgccggatgatggtggcctctcttggcagaggcggcacagccgggggctggtcctctgggctgtagagttcggggagtgggggcctgggaggtgcttcatcttcctgctgagaaagagaaccagaccagtggtcagcgagacggagctggagggaggactgctaggtactgccacagtggaggtttaaagggtaggaacaggccacatcagagccacagaacatgactgcctcagccaaggagcactcacacttcccctggcg

SEQ ID NO: 3982 - DNA, 228 bp, Homo sapiens
  misc_feature 1..228: note = U/M: U (0.25:0.85) in Blood Monocytes + Macrophages
  misc_feature 1..228: note = source = chr1:117040473-117040700; Gene: CD58 (Intergenic)
  source 1..228: mol_type = genomic DNA
cgcccatgactcattgttcgagttcgtagagaactcagaagttccatatggaagcacagcctcacaggctagagacaattcaggaaacgaaagccccattcacttgattattggttcattttctgatggaagctttgctgatcctctttcataaggaccatctgaaatagacaactgaaaagagaactagggggccatttcccttccctcctctagcccctgagctcg

SEQ ID NO: 3983 - DNA, 250 bp, Homo sapiens
  misc_feature 1..250: note = U/M: U (0.32:0.92) in Blood Monocytes + Macrophages
  misc_feature 1..250: note = source = chr6:149591904-149592153; Gene: TAB2 (Intergenic)
  source 1..250: mol_type = genomic DNA
cgacgtacacatggtcaactcgcccagctttgtctttcagtttcttctcttttttggatctagaggaagtgtatcacataaaagagtggtgaagatgacatagaggaggtactgtcttgaaggattctggtcttgaagagtgagaagtattactgatccactgctgttgcaaaaaactgggtagtcagagggttacggggtggtataataatgaaagccctgaagttggaatgaatctgctgccatgtcg

SEQ ID NO: 3984 - DNA, 338 bp, Homo sapiens
  misc_feature 1..338: note = U/M: U (0.27:0.87) in Blood Monocytes + Macrophages
  misc_feature 1..338: note = source = chr17:45149888-45150225; Gene: RPRML (Intergenic)
  source 1..338: mol_type = genomic DNA
cgtccctgtctgtgctgctcaagccagaccctcgaagcctaaaggagaagcagaagtgtttccctttcaaagtcattccagtcgtactttttaactactgaggtgacagatgttggactgggacaggaatgaggggtggggggagggtgctgcaggactcagcccctgaatgtgacttgtgaacccctgcttcctggtcccagtgggttcctgccaccttcagctgcagcctccacctcgaacccacagctctgtatttgaatcagcctgtcattccctgcttacgggtttagatcctacagggccctggctttctgggcagcatttgatgtgaagcg

SEQ ID NO: 3985 - DNA, 392 bp, Homo sapiens
  misc_feature 1..392: note = U/M: U (0.3:0.9) in Blood Monocytes + Macrophages
  misc_feature 1..392: note = source = chr18:60244241-60244632; Gene: ZCCHC2 (exon)
  source 1..392: mol_type = genomic DNA
cgacacttcctccccagccagcctcactctgtctccggcccgcagcaggagcagccagcagtgcattcaccccacttttgtaaactgctctgcatataaaccaagggcagaatgtttcaccctgatcttatgggaggaatcaaactcccaaaatagtgtgtatatatgtaataaacagcgtcacgtaaatacatatatgcagtgcttgttgtccaaatagaaatgaaaataagtggaagagagaggaagaagtcaaaccatatgaaactgaaaaaatatgacgtacgaaatggacaaaaagctttttctgaaaccaactttttacttccatcatccttttttagcctgttgcttcagagagacacaaagtgaacacactggtgtgaatgtcg

SEQ ID NO: 3986 - DNA, 227 bp, Homo sapiens
  misc_feature 1..227: note = U/M: U (0.3:0.89) in Blood Monocytes + Macrophages
  misc_feature 1..227: note = source = chr12:125204469-125204695; Gene: SCARB1 (Intergenic)
  source 1..227: mol_type = genomic DNA
cgctgagaaaggagtcattgcacctgaaacagggaaggttacgagcaatggggcatctaggggagaaggaacaggcaacacagaggtctggaggccggaccacgcctgtagcaactttgaggaactgcaaggaagccagcatggctgatgctaagtgcgcaaagaggtcagtggtgggagatgaggacacagaggacagatgctccaggagggccagagtgtgtgcg

SEQ ID NO: 3987 - DNA, 384 bp, Homo sapiens
  misc_feature 1..384: note = U/M: U (0.34:0.93) in Blood Monocytes + Macrophages
  misc_feature 1..384: note = source = chr1:179310040-179310423; Gene: SOAT1 (exon)
  source 1..384: mol_type = genomic DNA
cgtattaacgttgtggtgtttcctaaggttgaaagtttggtgtttgaaacttttaaattctgtgaactcagtgtatattaaaaattcacctctatgttctttttctgtaccttttctccccaggctggtgcttgagttcagcctcctgtcttatgcttttggcaaatttcctaccgttgtttggacctggtggatcatgttcctgtctacattttcagttccctattttctgtttcaacattgggccactggctatagcaagagttctcatccgctgatccgttctctcttccatggctttcttttcatgatcttccagattggagttctaggttttggaccaacatatgttgtgttagcatatacactgccaccagcttcccg

SEQ ID NO: 3988 - DNA, 475 bp, Homo sapiens
  misc_feature 1..475: note = U/M: U (0.26:0.85) in Blood Monocytes + Macrophages
  misc_feature 1..475: note = source = chr7:6395854-6396328; Gene: FAM220A (Intergenic)
  source 1..475: mol_type = genomic DNA
cggtgaaaccccgtctgtactaaaaatacaaaaaaaaagattagctgggtgtggtggcgggtgcctgtagtcccagctactcgggaggctgaggcaggagaacggcatgaacccgggaggcggagcttgcagtgaggcgagatcacgccactgcactccagcctgggcgacagagcgagactctgtctcaaaaaaaaaaaaaaaaaaaaaaaaaaaaaaaaaaaaaaaaagggaagagaaagagtggaagggaacccatgaatttaaaaagacttgagatgtaattttaaaaagagaggaaggcttgagaaatgtatctgccaagtccatcgtatggactttatttttaaaaagttaactgtaggctgggtgtggtggctcacacctataatcccagcactttgggaggctgaagtgagaggatcaactgagcccaggagtttgagatcagcctagactacgtggcaaaaccccg

SEQ ID NO: 3989 - DNA, 78 bp, Homo sapiens
  misc_feature 1..78: note = U/M: U (0.2:0.78) in Blood Monocytes + Macrophages
  misc_feature 1..78: note = source = chr7:157562675-157562752; Gene: PTPRN2 (intron)
  source 1..78: mol_type = genomic DNA
cgacctcggctaccgcatccacgcttggccccagcagcccgtccggcctggggttctctgtggcttccttggtctccg

SEQ ID NO: 3990 - DNA, 399 bp, Homo sapiens
  misc_feature 1..399: note = U/M: U (0.34:0.91) in Blood Monocytes + Macrophages
  misc_feature 1..399: note = source = chr18:48356987-48357385; Gene: MRO (Intergenic)
  source 1..399: mol_type = genomic DNA
cgggggcaggactaaggcgagaccagaaagacacatgtcctaggagaattttaggaggtgttcactctcggggttgcacaggcctgccagtgtcctaacccagccacatggctgccccacatcatatctgcttcccttctgctgtcctcccagctcagagacatcacagactcacactttcattacagtcagctcctttcacttcctcgaaaatgtctacattttgtgtctattttctttttttcttttttttttgagacagagtcttgctctttcacccaggctggagtgcagtggcactatctcggctcactgcaaccactgcctcctggcctccagcaattctcctgcctcagcctccccagtagctgggattacaggcacccgccaccacacacg

SEQ ID NO: 3991 - DNA, 358 bp, Homo sapiens
  misc_feature 1..358: note = U/M: U (0.34:0.9) in Blood Monocytes + Macrophages
  misc_feature 1..358: note = source = chr5:132098766-132099123; Gene: SEPT8 (intron)
  source 1..358: mol_type = genomic DNA
cgttttttacaataaaaatgaactcctgagatgggagggcagtcacgtgagagctgacaagggatgtggggtcacatgcccttcaagatgcacagcacttccagtccttcccatgaagctgcctcccttctctacccctacagtacccacccctcattcacatcccatttctgggccttaactctcctctccctgatgggctcagaaggaaccaaaggacatttatgtcagggaggaagggggaagtgaaaggaggagctagaaattaggaattgagagatagaaaatgagcagagaagaggctgagatgggaagggaggttccctggagcgaaggggaacaaacactatcgggagcg

SEQ ID NO: 3992 - DNA, 378 bp, Homo sapiens
  misc_feature 1..378: note = U/M: U (0.36:0.92) in Blood Monocytes + Macrophages
  misc_feature 1..378: note = source = chr6:53448157-53448534; Gene: GCLC (Intergenic)
  source 1..378: mol_type = genomic DNA
cgccgccatgcttcctgtacagcctgcagagccatgagccaattaaaccacttttcttataaattacccagtctcaggtatttctttatggcaatgcaagaaaggactgatacaggtaataaatcattcattcattcaaataaagttaccatagtgttggggatacagaaaagagacagccccttaaggagctcaaagtcctcagaatacccttcctttattgtgatttagtgccacttttgaagacaaaaaagaagtaagagtcttatttcgtgaacatgtggcaaatgtatgactcattacgtttatggttccactaagtttaaattaggaggaagttcctaataagtatttttaagcaaaaaatagttgtgatcg

SEQ ID NO: 3993 - DNA, 186 bp, Homo sapiens
  misc_feature 1..186: note = U/M: U (0.37:0.92) in Blood Monocytes + Macrophages
  misc_feature 1..186: note = source = chr15:67159291-67159476; Gene: SMAD6 (Intergenic)
  source 1..186: mol_type = genomic DNA
cgtgctgctctgcctgtagagtagccgttgttttattcctttactttcttcataaacttgcttctgctttactctgttgactcgctgatttttctttcttgagacagagtctggctctatcgcccgggctggagtgcagtggcgcaatctctgcttattgcaaccttcacctcccaggttcaagcg

SEQ ID NO: 3994 - DNA, 239 bp, Homo sapiens
  misc_feature 1..239: note = U/M: U (0.27:0.8) in Blood Monocytes + Macrophages
  misc_feature 1..239: note = source = chr22:45687903-45688141; Gene: UPK3A (intron)
  source 1..239: mol_type = genomic DNA
cgcccctcccgtggcattcccacgcagtgtggtttcaccgaaacagccttggaacccttgggactaagagtcctgagcccaagccccgcctctgcccctcactgcggtgtgagccgttatggacctcggtttcctcatctgagaagagggaagaagaattcttgatgggcctctgcagcagggttcctttggggaacccaggcagaagcacaaggcccagtttttttgggggaggaccg

SEQ ID NO: 3995 - DNA, 264 bp, Homo sapiens
  misc_feature 1..264: note = U/M: U (0.3:0.83) in Blood Monocytes + Macrophages
  misc_feature 1..264: note = source = chr5:169792078-169792341; Gene: KCNIP1 (intron)
  source 1..264: mol_type = genomic DNA
cgagctctgtgagggcagggaattttgcctggccttgactacttccccagcacctggtgcagggcctaccacatggtaggccctcattgggagttgagaggttgagctggcagatgaggaacctgaggcctggggaaggccacccagcaagccagacgcagagctggccttgaatctgggcttcctcctctttccattccctacaggctcggcactgcatgccctttaaaggttccagttctgtatccaccatttccacgtccg

SEQ ID NO: 3996 - DNA, 77 bp, Homo sapiens
  misc_feature 1..77: note = U/M: U (0.34:0.86) in Blood Monocytes + Macrophages
  misc_feature 1..77: note = source = chr5:154403647-154403723; Gene: KIF4B (Intergenic)
  source 1..77: mol_type = genomic DNA
cgtgagccaccccgcctggccttctaagcctacgtctttaagcattgcgtgctttcacttcttctcttggaacctcg

SEQ ID NO: 3997 - DNA, 339 bp, Homo sapiens
  misc_feature 1..339: note = U/M: U (0.37:0.85) in Blood Monocytes + Macrophages
  misc_feature 1..339: note = source = chr1:27315925-27316263; Gene: TRNP1 (Intergenic)
  source 1..339: mol_type = genomic DNA
cgggtaacttttttgtatttttagtagagatgtttcaccatcttggccaggctgatcttgaactcctgacctcgtgatccacccgcctctgcctcccaaagtgctgggaatacagaagtgagccaccgcacccggcctacccttgtgttatttttatttttcttccttccttccttccttctttcctaccttctctctctctctctctctttccttccttccttccttccttccttccttccttccttccttctttctttctttcttcttttaatggagtcttgctctgttgcccaaactggagtgcagtggtgtgatcttggttcactgcaatctccg

SEQ ID NO: 3998 - DNA, 86 bp, Homo sapiens
  misc_feature 1..86: note = U/M: U (0.1:0.88) in Blood Monocytes + Macrophages
  misc_feature 1..86: note = source = chr2:25503391-25503476; Gene: DNMT3A (TTS)
  source 1..86: mol_type = genomic DNA
cgcccttcagctcgcgctggacagcccaggccaactcaggttcttcgttgcagttcccctggacatgtttcacttcccttagagcg

SEQ ID NO: 3999 - DNA, 161 bp, Homo sapiens
  misc_feature 1..161: note = U/M: U (0.12:0.86) in Blood Monocytes + Macrophages
  misc_feature 1..161: note = source = chr20:57493774-57493934; Gene: GNAS (Intergenic)
  source 1..161: mol_type = genomic DNA
cgagactccatttcaaaaaaaaaaaaaaaagaagaagaagaagaagaaaatacaagagactactgcttgcgtacggtccccatgttacatttggctgattcatctcctaaatcccgtgtcatctgtgggttacctcttctctttttctcgccccttatacg

SEQ ID NO: 4000 - DNA, 259 bp, Homo sapiens
  misc_feature 1..259: note = U/M: U (0.27:0.86) in Blood Monocytes + Macrophages
  misc_feature 1..259: note = source = chr3:37814257-37814515; Gene: ITGA9 (intron)
  source 1..259: mol_type = genomic DNA
cgattgaagtgattcccatgtaaccacagtcgggagcacaactggccaagattttcattcaccgcagactcagtcctcatttcccctttccagatcccaccaggggcagatgaggtgtcacattgcatcacatcacgccatcgccattaccctgttcacaggccaccccagaaactcccggcgggagacagaaactaacttctgagctgtgactctgccccttggggttgacactgaggcttaggctgtttctcactcg

SEQ ID NO: 4001 - DNA, 182 bp, Homo sapiens
  misc_feature 1..182: note = U/M: U (0.17:0.91) in Blood Monocytes + Macrophages
  misc_feature 1..182: note = source = chr6:26545988-26546169; Gene: HMGN4 (exon)
  source 1..182: mol_type = genomic DNA
cgtgtcagccactttggcacggaagccttacagtgtggggaaccaaaacttcgtgtctcccctttccccgatgccatcagcatagacttgacttccttaaaccgagagttttgatgtggccttggcaaccctaaaatcagctgtgttaggtaacaaaactcaggctttctgttgatgacatc

SEQ ID NO: 4002 - DNA, 149 bp, Homo sapiens
  misc_feature 1..149: note = U/M: U (0.26:0.92) in Blood Monocytes + Macrophages
  misc_feature 1..149: note = source = chr9:112918684-112918832; Gene: AKAP2 (exon)
  source 1..149: mol_type = genomic DNA
cggaacccagcggcccaagaatctgatgcagaccctcatggaagactatgagacacacaaatctaaaaggcgcgagagaatggatgatagtagtgtaagtttttcctcctttcctctttcacttctctgagcgcggccatcggtgtggc

SEQ ID NO: 4003 - DNA, 287 bp, Homo sapiens
  misc_feature 1..287: note = U/M: U (0.12:0.9) in Blood Monocytes + Macrophages
  misc_feature 1..287: note = source = chr12:26513019-26513305; Gene: ITPR2 (intron)
  source 1..287: mol_type = genomic DNA
cgtttctttgcaagggcattctgtggtcaggtttcctaaggggtgatgcctacacagtcagagctgacccatttgtgtatctggactgctacttggaaagcaagctctgaggctttgttccagcgtatctgtagcccttccttgttttactaaacacaccacgaatcctctctcgcttcctccttcattatttctcttaccggggggctcagagaaccacttcgagagggaagttcatctcttctcgctcctattctggccttgttgtttcccgtcttcgaggtccg

SEQ ID NO: 4004 - DNA, 41 bp, Homo sapiens
  misc_feature 1..41: note = U/M: U (0.16:0.91) in Blood Monocytes + Macrophages
  misc_feature 1..41: note = source = chr14:77984470-77984510; Gene: SPTLC2 (exon)
  source 1..41: mol_type = genomic DNA
cgacaccgatgttccgcttcagcatctcccgtccaaaggcg

SEQ ID NO: 4005 - DNA, 364 bp, Homo sapiens
  misc_feature 1..364: note = U/M: U (0.19:0.89) in Blood Monocytes + Macrophages
  misc_feature 1..364: note = source = chr14:65675233-65675596; Gene: MAX (Intergenic)
  source 1..364: mol_type = genomic DNA
cgtcatctttgttttaaactataaactacatttctcccagttagttcagcctacgcccaggaatgaacaaggacagtttggaggttagaagcaagatggagacagataagttagatctttctcactgtctcagtcataattttggaaaggcagtttcacttccctaccaccaaccacgggagtgagccccttgctggactctgggaagggtggcttccttgctggcctccctgagcgtcacagaagaagctgaggaccagagttcccattggaaggggggcagttgcccaactcaggttcaagaaggatccgttaggccgggcgtggtggctcacgcctgtaatcccagcactgtggggggccg

SEQ ID NO: 4006 - DNA, 138 bp, Homo sapiens
  misc_feature 1..138: note = U/M: U (0.21:0.89) in Blood Monocytes + Macrophages
  misc_feature 1..138: note = source = chr6:2375895-2376032; Gene: LOC100508120 (intron)
  source 1..138: mol_type = genomic DNA
cgctgagcagccctgctgaacgtctcccggtgtgccgtctctctgtttctctgttcccctttccgtcttctctcttatgttcctacttgtcctttcttcttgacttcctcctttgttccaatgtgatgattatggacg

SEQ ID NO: 4007 - DNA, 261 bp, Homo sapiens
  misc_feature 1..261: note = U/M: U (0.18:0.85) in Blood Monocytes + Macrophages
  misc_feature 1..261: note = source = chr22:39725254-39725514; Gene: RPL3 (Intergenic)
  source 1..261: mol_type = genomic DNA
cgtttatgaattgtagcatgctcttccccctctaattactcgaacaaatagtgcacaaaaccttcttcctttttttttttttttttttgagatggagtttcacttttgtcacccaggctggagtgcaatggcgcaatctcagctcaccacaacatctgcctcctgggttcaagcgattctcctgcctcagcctcccaagtagctggaattacaggcatgcaccaccacacccagctaatttttgtatttttagtagagacg

SEQ ID NO: 4008 - DNA, 275 bp, Homo sapiens
  misc_feature 1..275: note = U/M: U (0.28:0.92) in Blood Monocytes + Macrophages
  misc_feature 1..275: note = source = chr19:4666898-4667172; Gene: C19orf10 (intron)
  source 1..275: mol_type = genomic DNA
cgaaacccatctcaaggtgttgaccgggctaggctcttactggtagctcaaggtcctcttccaagctcttgtggttgtggcagatttcagttcctcttggttgcgggactgaagtcttcatttccttgctgccagccagaggctgttctcagctcctagaggccgcgtgtattccctgccctgcagttccctcaagggcagcagtggcgtatgtgtccatgtgcttcaaatcaccctttttttttttttttttttttttttgagacagagtctcg

SEQ ID NO: 4009 - DNA, 120 bp, Homo sapiens
  misc_feature 1..120: note = U/M: U (0.26:0.88) in Blood Monocytes + Macrophages
  misc_feature 1..120: note = source = chr6:15223330-15223449; Gene: JARID2 (Intergenic)
  source 1..120: mol_type = genomic DNA
cgcccggctaattttttatttttagtagagaaggggttacaccatgttggtaaggctggtctcaagctcccgacctcaggtgatccgcctcagcctcccaaagtgctgggattacaggcg

SEQ ID NO: 4010 - DNA, 171 bp, Homo sapiens
  misc_feature 1..171: note = U/M: U (0.26:0.88) in Blood Monocytes + Macrophages
  misc_feature 1..171: note = source = chr22:18243005-18243175; Gene: BID (intron)
  source 1..171: mol_type = genomic DNA
cgttcaagaccagcctggccaacatctctactctacatcccagctctactaaaaatacaaaaacttagccaggtgaggtgatgggcaactgtagtcccagctactcgagaggctgaggcagaagaatcgcttgaacccaggaggcgggggttgcagtgaggtgagatcgcg

SEQ ID NO: 4011 - DNA, 356 bp, Homo sapiens
  misc_feature 1..356: note = U/M: U (0.31:0.91) in Blood Monocytes + Macrophages
  misc_feature 1..356: note = source = chr22:40830751-40831106; Gene: MKL1 (intron)
  source 1..356: mol_type = genomic DNA
cgtgggtcttaaggagatgcagcccatgatctgtctagggggattatcttcccatgattttatgtgaaaggaaaaagtaaagggagtgtgagggggaagcaagttctggtgacttccccatctctacccacactgggcagcagaatattcctcaggggcccctggggaaccgaaacagagttgggatggggacgcaagtaaggtgctgtggcagaaaacttgggcttggagtgtgggccagtttctgctttccacaagagtcaagtggataccacctactctgggcagatggagaccaagaaggtttcctgccccttggaatgcccgtcctgtgaggtgtggccagtgtaaccccg

SEQ ID NO: 4012 - DNA, 371 bp, Homo sapiens
  misc_feature 1..371: note = U/M: U (0.31:0.9) in Blood Monocytes + Macrophages
  misc_feature 1..371: note = source = chr20:20380706-20381076; Gene: RALGAPA2 (intron)
  source 1..371: mol_type = genomic DNA
cggacagagtgggagatcagagagctgtctgggctattcagaccccttggaatggctctgaggaagggaacaggtgcaggcagtggatggggtaagcccacacactcaacactggcaacccaaggccagtgggaattagccagcctaattaacatctccaaatggcccaaggatggcttccagtatttccaatccagcagcagtggctgtgtcctggccctggctctgactctgggtttggcttcctctttctggttgttggtcttgcccatcacccttggttcagaagccgaaagctgggacagctggacaggaagggagggaggaagggaaagtgcatggagcgtgtgcctgtatacgtgctgctcccg

SEQ ID NO: 4013 - DNA, 152 bp, Homo sapiens
  misc_feature 1..152: note = U/M: M (0.72:0.16) in Blood Monocytes + Macrophages
  misc_feature 1..152: note = source = chr6:36564952-36565103; Gene: SRSF3 (intron)
  source 1..152: mol_type = genomic DNA
cgctccccgcaacctcggcctccggggttcaagtgattctcctgcctcagccttctgagtaactgggactacaggcgtgtgccatcatgcggggctgatttttgtatttctagcagagatggggtttcaccatgttggccaggctggtctcg

SEQ ID NO: 4014 - DNA, 153 bp, Homo sapiens
  misc_feature 1..153: note = U/M: M (0.75:0.2) in Blood Monocytes + Macrophages
  misc_feature 1..153: note = source = chr8:22734960-22735112; Gene: PEBP4 (intron)
  source 1..153: mol_type = genomic DNA
cgacccaagtactacattcttgggcagagccagccagagccaggaggcactgactttgtctctccgtagccaaatggctgggaaactagctgggaggagaggaggtgaggccagcagcttgtgaacacacgggcgggctcactgttggcagcg

SEQ ID NO: 4015 - DNA, 301 bp, Homo sapiens
  misc_feature 1..301: note = U/M: M (0.7:0.19) in Blood Monocytes + Macrophages
  misc_feature 1..301: note = source = chr2:242810850-242811150; Gene: CXXC11 (promoter-TSS)
  source 1..301: mol_type = genomic DNA
cgggtggccgggagcctcccgggggcagatctgtgctgaggttttgcagggatcagctggctgtctccgcccctgcacgtcccggctccttctcagctcaccctttcttgttgtgccatgacaggtggctgccacgcacagcaatgctgttgaatctcagaaattaaacaacctgaaaaggcgtgagaagctgggcacatgcatgaattgtttatgtaaagctcagaagctgcacagctaaagggctcggtgagggaggcatcataggtgttgaagcctcaacgttgtctgtgcaggcacg

SEQ ID NO: 4016 - DNA, 246 bp, Homo sapiens; identical to SEQ ID NO: 3863
  misc_feature 1..246: note = U/M: M (0.6:0.12) in Blood Monocytes + Macrophages
  misc_feature 1..246: note = source = chr19:17185295-17185540; Gene: HAUS8,HAUS8 (intron,promoter-TSS)
  source 1..246: mol_type = genomic DNA

SEQ ID NO: 4017 - DNA, 205 bp, Homo sapiens; identical to SEQ ID NO: 3719
  misc_feature 1..205: note = U/M: M (0.57:0.1) in Blood Monocytes + Macrophages
  misc_feature 1..205: note = source = chr7:99868422-99868626; Gene: GATS (intron)
  source 1..205: mol_type = genomic DNA

SEQ ID NO: 4018 - DNA, 229 bp, Homo sapiens
  misc_feature 1..229: note = U/M: M (0.53:0.06) in Blood Monocytes + Macrophages
  misc_feature 1..229: note = source = chr6:143167094-143167322; Gene: HIVEP2 (intron)
  source 1..229: mol_type = genomic DNA
cgcaggacgatcactaggactgtcaggctgtcgaaatgtatattgcagacaggacatccctcctggcatccagtgtgagcgaagtccaggccacggcaacaacagcctggcctgaggacagcctgcaccacacatcaaagccagaggccctgggaggctggccagccgccaaagacgcctgagagcggcaggggagtgtgttgccttaggacaatagcaaactgggacg

SEQ ID NO: 4019 - DNA, 291 bp, Homo sapiens
  misc_feature 1..291: note = U/M: M (0.66:0.19) in Blood Monocytes + Macrophages
  misc_feature 1..291: note = source = chr17:1300733-1301023; Gene: YWHAE (intron)
  source 1..291: mol_type = genomic DNA
cgtactgttaaataatccatataaattgattccaacgccccaggatagaattaaatgaggatacaaagaagtttaggcactaattcaacacagcaagcaaaataaaataagcctgctgcagtaacagagagataaaagggcagctggaaacccagcatttgggtacaagtacccaacaaagaaatcctgccaatacactgtcttaccttcttccacccccgacacctgctaagttctgtttggtgaccagaactccgggaaaactttgccaccagaaacaaaaaaataccg

SEQ ID NO: 4020 - DNA, 470 bp, Homo sapiens
  misc_feature 1..470: note = U/M: M (0.6:0.14) in Blood Monocytes + Macrophages
  misc_feature 1..470: note = source = chr4:186950939-186951408; Gene: TLR3 (Intergenic)
  source 1..470: mol_type = genomic DNA
cgggagtgcatgtctgaaacgtgtcactggcaggtcaccctcctgggagtgcacgcctgcacgaagcccatgtttggctgtgcctggagtgtctccattagcgctggcacataatgctgcagcctgcgccagctgcttttcaaacagattcactggcaacagaaaaggaagaaaaaaaaaatccaaggtcttagggtacatttttttcattctctttctacagctaaaaggaagctggaagcttgagaaggattcacagtagctgaataatagccagaaagggagattagcaaggagcattgtgagagctgggagatttttcttgggtttagcacgagaagaatgtaatgctgtgtgtgtttgacttgctcgttctgttggtgtcccccctcccttggctccagagcccctgtacgccttccctcttcctttgccagtaagggattgacatggggtcagtcatgaagacg

SEQ ID NO: 4021 - DNA, 134 bp, Homo sapiens
  misc_feature 1..134: note = U/M: M (0.64:0.19) in Blood Monocytes + Macrophages
  misc_feature 1..134: note = source = chr17:7588787-7588920; Gene: WRAP53 (promoter-TSS)
  source 1..134: mol_type = genomic DNA
cggagtttcgttcttgtcgcccaggctggagtgtagtggcacgatcttggctcactgcaacctctgcctcccgggttcaagcgattctcctgcctcaccctcccgaatagctgggattacaggcacccaccacg

SEQ ID NO: 4022 - DNA, 251 bp, Homo sapiens
  misc_feature 1..251: note = U/M: M (0.62:0.18) in Blood Monocytes + Macrophages
  misc_feature 1..251: note = source = chr20:60204143-60204393; Gene: CDH4 (intron)
  source 1..251: mol_type = genomic DNA
cgcaggttcagctgcagtccccagagcagctgccactttgcatagctgcgccgtggagagcagagaggggctgggaggaggcacgtgcttgtcttgtgaagcaggtcagaaatggccactggaaggccaggcggtgcaggccagggagccccctgtggctctgtgcacccagcccagccccccagccggagccctccaggaagcctctggccaaaagctttgactccagccagagtccctgggagcagccg

SEQ ID NO: 4023 - DNA, 59 bp, Homo sapiens
  misc_feature 1..59: note = U/M: M (0.63:0.2) in Blood Monocytes + Macrophages
  misc_feature 1..59: note = source = chr11:66104563-66104621; Gene: RIN1 (promoter-TSS)
  source 1..59: mol_type = genomic DNA
cgcatccaccctccccgccgaggcactctcccggtgccatatgttgactctgcccagcg

SEQ ID NO: 4024 - DNA, 132 bp, Homo sapiens
  misc_feature 1..132: note = U/M: M (0.57:0.14) in Blood Monocytes + Macrophages
  misc_feature 1..132: note = source = chr2:167350575-167350706; Gene: SCN7A (Intergenic)
  source 1..132: mol_type = genomic DNA
cggatctctcgggttttctgagctctagttgtacagaagctgctgttaggctggcgtctgtcctcaccagctgtggctctgcagtaaatgggccccactaaatggccagttagacaccgactcactggggcg

SEQ ID NO: 4025 - DNA, 141 bp, Homo sapiens
  misc_feature 1..141: note = U/M: M (0.57:0.15) in Blood Monocytes + Macrophages
  misc_feature 1..141: note = source = chr10:133879665-133879805; Gene: JAKMIP3 (Intergenic)
  source 1..141: mol_type = genomic DNA
cgcacacgtatgtggctggaaagttgacagtttggggtctgtcctctgaggggtgcagggacgatcacagaggaagatgcttcatttatccgttttcacgttcatgctcatgcacacatttggaggaggcttgggcctgcg

SEQ ID NO: 4026 - DNA, 172 bp, Homo sapiens
  misc_feature 1..172: note = U/M: M (0.55:0.13) in Blood Monocytes + Macrophages
  misc_feature 1..172: note = source = chr9:140023480-140023651; Gene: GRIN1 (Intergenic)
  source 1..172: mol_type = genomic DNA
cgttccctgcttagaatcaagaagaggtcttagttcatctcactttgtcgtggtgtctgcgtggcgcttcatgcctcacagaacatgggctggctacgagggtcaaaccaggccacagcaacgcgtcaggggccgcttgctttcttaggagcaacaggtccagaggcttccg

SEQ ID NO: 4027 - DNA, 219 bp, Homo sapiens
  misc_feature 1..219: note = U/M: M (0.56:0.15) in Blood Monocytes + Macrophages
  misc_feature 1..219: note = source = chr10:43760488-43760706; Gene: RASGEF1A (intron)
  source 1..219: mol_type = genomic DNA
cgctctcctccctggctggcccctcccaccgctgggggccactgtgtgcgtggctctccccaccgcagccactgtccagcacaaatgccatttctccctcctcctcctcctcccctgcctgcagttgctaagttacaccaaaaaacccctctgctctgtgtgaactgttccatttccacgatttgccaggtggaagggagccatccggctggcagctcg

SEQ ID NO: 4028 - DNA, 296 bp, Homo sapiens; identical to SEQ ID NO: 3874
  misc_feature 1..296: note = U/M: M (0.58:0.17) in Blood Monocytes + Macrophages
  misc_feature 1..296: note = source = chr16:21059351-21059646; Gene: DNAH3 (intron)
  source 1..296: mol_type = genomic DNA

SEQ ID NO: 4029 - DNA, 206 bp, Homo sapiens
  misc_feature 1..206: note = U/M: M (0.55:0.15) in Blood Monocytes + Macrophages
  misc_feature 1..206: note = source = chr2:73496873-73497078; Gene: FBXO41 (promoter-TSS)
  source 1..206: mol_type = genomic DNA
cgcccgcggcctggggcgaggaggctggaagagacgcgatgagtcttaggaagagggtatcgctgctcccaccctggctcccagcccggagccctcatcccccagccatgaggaaatcagcattgaggggcaaggggagacctcccagaggaggctggcctgctctggcacctgtgcgagggcctgtatgtgtgcaagagacagcg

SEQ ID NO: 4030 - DNA, 108 bp, Homo sapiens
  misc_feature 1..108: note = U/M: M (0.54:0.16) in Blood Monocytes + Macrophages
  misc_feature 1..108: note = source = chr10:13425670-13425777; Gene: SEPHS1 (Intergenic)
  source 1..108: mol_type = genomic DNA
cgcgcaggtagcggggtgcgccctcttcactcggagcaccctgtcgagcagagcagctctaagcaaggccaggctggagggaaaagtgcaggactgtgcttctgggcg

SEQ ID NO: 4031 - DNA, 111 bp, Homo sapiens
  misc_feature 1..111: note = U/M: M (0.59:0.21) in Blood Monocytes + Macrophages
  misc_feature 1..111: note = source = chr19:17712257-17712367; Gene: UNC13A,UNC13A (exon,TTS)
  source 1..111: mol_type = genomic DNA
cgtttgtgttaaacatttgttccaagtcacatatttacagagaaatgaaggcgtctgtgcagacactggaccgacggggtagaatcaaaacaaaacaaaaaacaaacaacg

SEQ ID NO: 4032 - DNA, 253 bp, Homo sapiens
  misc_feature 1..253: note = U/M: M (0.55:0.19) in Blood Monocytes + Macrophages
  misc_feature 1..253: note = source = chr3:161632615-161632867; Gene: OTOL1 (Intergenic)
  source 1..253: mol_type = genomic DNA
cgattttacttggatgtttatcatctctctccttctgtgcaccgcaatgcgaagggggaggggagacggctgtagttcagcttacaggctgctggtgtcatcccattaccacagaatgaagatggtgcatggcgtgttgctattcaagcatttaatacattagtctgtaatttttgtcttggaggtaatgaggcctgacagcttcggctggtgcatgataacaaacccacactggtatctttcaaattcttcg

SEQ ID NO: 4033 - DNA, 99 bp, Homo sapiens
  misc_feature 1..99: note = U/M: M (0.62:0.27) in Blood Monocytes + Macrophages
  misc_feature 1..99: note = source = chr19:13413607-13413705; Gene: CACNA1A (intron)
  source 1..99: mol_type = genomic DNA
cgggaaactctctctccctcctgccagggccggcagatggagcgttggcaacgtctgcttggtttggttcaatttcacaaacatgtcctgaatacctcg

SEQ ID NO: 4034 - DNA, 135 bp, Homo sapiens; identical to SEQ ID NO: 3883
  misc_feature 1..135: note = U/M: M (0.55:0.2) in Blood Monocytes + Macrophages
  misc_feature 1..135: note = source = chr19:32329465-32329599; Gene: THEG5 (Intergenic)
  source 1..135: mol_type = genomic DNA

SEQ ID NO: 4035 - DNA, 275 bp, Homo sapiens
  misc_feature 1..275: note = U/M: M (0.67:0.33) in Blood Monocytes + Macrophages
  misc_feature 1..275: note = source = chr13:46219611-46219885; Gene: FAM194B (Intergenic)
  source 1..275: mol_type = genomic DNA
cgccattgcccaggcttgcttaggtaaacaaagcagccaggaagcttgaactgggtggagcccaccacagctcaaggaggcctgcctgcctgcctccgtaggctccacctctgggggcagggcacagacaaacaaaaagacagcagtaacctctgcagacttaaatgtccctgtctgacagctttgaagggagcagtggttctcccagcacgcagctggagatctgagaaccggcagactgcctcttcaagtgggtccctgacccctgacccccg

SEQ ID NO: 4036 - DNA, 26 bp, Homo sapiens
  misc_feature 1..26: note = U/M: M (0.68:0.35) in Blood Monocytes + Macrophages
  misc_feature 1..26: note = source = chr19:55877489-55877514; Gene: IL11 (exon)
  source 1..26: mol_type = genomic DNA
cgccagcgggggcgccggcgggtccg

SEQ ID NO: 4037 - DNA, 267 bp, Homo sapiens
  misc_feature 1..267: note = U/M: M (0.68:0.14) in Blood Monocytes + Macrophages
  misc_feature 1..267: note = source = chr22:19949901-19950167; Gene: COMT (promoter-TSS)
  source 1..267: mol_type = genomic DNA
cgtcaggcaactgaggcacaaggctggcatttctgaaccttgcccctctgcaaacacaagggggcgatggtggcactccaagcaaaggggcgtgtgggtgctgcaggaggagcacagagcactggcgcccctcccctcccgccctgcagatgccggaggccccgcctctgctgttggcagctgtgttgctgggcctggtgctgctggtggtgctgctgctgcttctgaggcactggggctggggcctgtgccttatcggctggaacg

SEQ ID NO: 4038 - DNA, 133 bp, Homo sapiens
  misc_feature 1..133: note = U/M: U (0.04:0.93) in Blood NK cells
  misc_feature 1..133: note = source = chr15:91370195-91370327; Gene: FURIN (Intergenic)
  source 1..133: mol_type = genomic DNA
cggtaacttacccaccttactccacggttactgtgaagcgcccagaagagaagccatggatgtgggcgacgcattcgaggttagcttcagaagcagcgggcgctgggtagccacattgacacccggtactagc

SEQ ID NO: 4039 - DNA, 363 bp, Homo sapiens
  misc_feature 1..363: note = U/M: U (0.07:0.93) in Blood NK cells
  misc_feature 1..363: note = source = chr17:72464526-72464888; Gene: CD300A (intron)
  source 1..363: mol_type = genomic DNA
cggtggtgcaatcacggttcactgtagcctccacctcccgggctcaagtgatcctcccacctcaacctccccagtagctgagactacaggtgtgtgccaccacacccagctggattcttaattttttttagggacagggtcttaccatgttgcccaggctggcctccacctcctgggatcaagggatcctcccatcttgtcctcccaaaatgcagggattacaggcatgaaccaccacacctggcccctacaaaacattttttattttatttttatttatttttttggagacagaatctcactctatcacccagggctggagtgcagtggcttgatctcagctcactgcaacctccgcctccc

SEQ ID NO: 4040 - DNA, 222 bp, Homo sapiens
  misc_feature 1..222: note = U/M: U (0.07:0.92) in Blood NK cells
  misc_feature 1..222: note = source = chr3:17196544-17196765; Gene: MIR3714 (Intergenic)
  source 1..222: mol_type = genomic DNA
cgtgggaaaatgcaactgcctggctgctgtaagtccacccctcagctcggtttctaccatttgctgagcaggaagtgggagtgctccaccgctcaccgcagagggctggacggcaggctcacgctgggccccgctcaccccactcacctctgtggtctcctggcacccctcccaggctgcatagaggatttcttctgggctaccttagtatttaattttgtc

SEQ ID NO: 4041 - DNA, 393 bp, Homo sapiens
  misc_feature 1..393: note = U/M: U (0.07:0.92) in Blood NK cells
  misc_feature 1..393: note = source = chr12:9983597-9983989; Gene: KLRF1 (intron)
  source 1..393: mol_type = genomic DNA
cgctctgtcgcccaggctggagtgcagtggcgcgatctcagctcactacaacctgtagtgcttaggagaaataattcagtctgagttgaatttcaaccaccttccacaactttttttcctaatgttttctgataattattttttaagttttaaaataaatatatgacttttttaagacacatgcttgatttcttggaatttattgcttatcaatattaatatatcaaaaattcaaaaataatctcagaaatgtggagtattcattaaatgaattctgataaaattattttaatatctttgacaatgttatgataagagaaaccctgcgaactatttatctaaaatatcattctatagggttcatcatgtgctttcttgacagggcttgacagc

SEQ ID NO: 4042 - DNA, 99 bp, Homo sapiens
  misc_feature 1..99: note = U/M: U (0.04:0.89) in Blood NK cells
  misc_feature 1..99: note = source = chr6:170426268-170426366; Gene: LOC154449 (Intergenic)
  source 1..99: mol_type = genomic DNA
cgcggcaatgttgggattaatgtggcattgaccacagaggcgtgagggttacagcttacagcttctgccacgtgcttagcactgagaacaccagtgggc

SEQ ID NO: 4043 - DNA, 219 bp, Homo sapiens
  misc_feature 1..219: note = U/M: U (0.09:0.91) in Blood NK cells
  misc_feature 1..219: note = source = chr17:72464234-72464452; Gene: CD300A (intron)
  source 1..219: mol_type = genomic DNA
cgcgatcttggctcactgcaacctacgcctcccaggttcaagtgattctcctgcctcagcctcccgagtagctgagattacaggcatgtaccaccatgcctggttaattttgtatttttagtagagatgggctttctccatgttggtcaggctggtctcaaactcccaacctcaggtgatccactcaccttggcctcccaaagtgctgggattgcaggc

SEQ ID NO: 4044 - DNA, 325 bp, Homo sapiens
  misc_feature 1..325: note = U/M: U (0.08:0.9) in Blood NK cells
  misc_feature 1..325: note = source = chr18:77391680-77392004; Gene: CTDP1 (Intergenic)
  source 1..325: mol_type = genomic DNA
cgttgagttaaagccattttaggaaaaaaaagaaaaaacttgttttgaatgatgtccatgcccttcaaaactgaacacaaaattaagaaataactgagtacccagaatggcagcctgtctcagagtggtaataaggtcaactgcaaaccacacggcctggtgccctacatgcactgggcggccgagccctgctccagggcctgtagggcctgggaggtgtcggatgtggcttgctggctgcagggcctggtctgtggctgagagaccgtggcggtctgtggacaggtgagtgctgggcccacaggatgtagactgtgaggctggc

SEQ ID NO: 4045 - DNA, 188 bp, Homo sapiens
  misc_feature 1..188: note = U/M: U (0.09:0.89) in Blood NK cells
  misc_feature 1..188: note = source = chr17:72460470-72460657; Gene: CD300A (Intergenic)
  source 1..188: mol_type = genomic DNA
cggagtcttgctcttgtcacccaggctggggtgcaatggcacgatcttggctcaccgcaacctttgcctctcgagttcaagcgattctcctgcctcagcctcccgagtagctgggattgcaggtgcccgccacattttttttatttttagtagagacagggttttgccacgttggcccggctggtctc

SEQ ID NO: 4046 - DNA, 202 bp, Homo sapiens
  misc_feature 1..202: note = U/M: U (0.1:0.9) in Blood NK cells
  misc_feature 1..202: note = source = chr19:30167085-30167286; Gene: PLEKHF1 (TTS)
  source 1..202: mol_type = genomic DNA
cgagtgcagattctgattcggcaggtcgaagcccagctcccagggcctgccgctaccaccacccacagaccacccttgaggtgacaaggcctgctggtggcctgtgggcaccctgtgagggaggcgggagggtcagtatttttgtttgtttgtttttgagacagagtctcactctgttgcccaggctggagtgcagtaatgc

SEQ ID NO: 4047 - DNA, 245 bp, Homo sapiens
  misc_feature 1..245: note = U/M: U (0.15:0.94) in Blood NK cells
  misc_feature 1..245: note = source = chr7:2039945-2040189; Gene: MAD1L1 (intron)
  source 1..245: mol_type = genomic DNA
cgtctcccaccccggcctgccacttcccacccattgcggccctgcacagagcagccaggcatcctttacgaatggacaccaggttgtgtcaccacctcctccacccatgaaaccacagccctgccgtgaccacacagggcccacaaggttggactaccaaccaccgcggaccccgcttctgtcacccctaacctcactgttgggtccgggacctgcctgccccaccatttccaccaccaacagtc

SEQ ID NO: 4048 - DNA, 259 bp, Homo sapiens
  misc_feature 1..259: note = U/M: U (0.15:0.93) in Blood NK cells
  misc_feature 1..259: note = source = chr6:166748511-166748769; Gene: SFT2D1 (intron)
  source 1..259: mol_type = genomic DNA
cgtgcctctgacaaccacgacgctgtggacaagactgtcactcagaaataccatactgtgaatggccaaaactgtgaagttagggaagtcctgtgaaagcaagagatggctagtgctttatccagccaaagaggtcgaagtgcttctggaaactttggtggtggttgtggaggtggttttggtgggaatgacaacttcggtcatggaggaaatttcagtggtcatgatggctttggtggcagctgtccacagcggtggc

SEQ ID NO: 4049 - DNA, 260 bp, Homo sapiens
  misc_feature 1..260: note = U/M: U (0.14:0.92) in Blood NK cells
  misc_feature 1..260: note = source = chr17:20601541-20601800; Gene: LOC100287072 (Intergenic)
  source 1..260: mol_type = genomic DNA
cgccaggggagcactcaaaagtcagggctgtgcctgggagcaagagggactccaaagacccagagcagatctggagcactgtgagttggaggagttggggtcggacggcagcctacaagggtgagggtggtgagaaagcagggtgaacagagaaggacagatgtggcccgctcagggatccacaccagtgtatggaaactgaggcccagagaccaccagccagtaaatagctggacccagggaggccaactccacagtac

SEQ ID NO: 4050 - DNA, 156 bp, Homo sapiens
  misc_feature 1..156: note = U/M: U (0.13:0.9) in Blood NK cells
  misc_feature 1..156: note = source = chr13:110411405-110411560; Gene: IRS2 (intron)
  source 1..156: mol_type = genomic DNA
cgctcagagccaggcatgggggtgtcagctgtgcagcgtttcacacacatctacatgcacacacgtgcaccagagcaagcacaacgtgcatgtgtctcacctagcctgtctcctgttaggttaatacaaccgctttcaacggccgcctcctttcac

SEQ ID NO: 4051 - DNA, 96 bp, Homo sapiens
  misc_feature 1..96: note = U/M: U (0.16:0.88) in Blood NK cells
  misc_feature 1..96: note = source = chr7:1983823-1983918; Gene: MAD1L1 (intron)
  source 1..96: mol_type = genomic DNA
cgactggtggctgagggtttgagggcacgggagacagcagggtgatggataactagagggttcgggcttccttgagaggggatcaaaacgttctgc

SEQ ID NO: 4052 - DNA, 139 bp, Homo sapiens
  misc_feature 1..139: note = U/M: U (0.23:0.95) in Blood NK cells
  misc_feature 1..139: note = source = chr17:9465579-9465717; Gene: STX8 (intron)
  source 1..139: mol_type = genomic DNA
cgggcatggtggcgggcgcctgtagccccagctacttgggaggctgaggcaggagaatggcgtgaacccgggaggcggagcttgaagtgagccgagatcgcgccaccgcactccagcctgggcgacagagcgagactcc

SEQ ID NO: 4053 - DNA, 152 bp, Homo sapiens
  misc_feature 1..152: note = U/M: U (0.22:0.94) in Blood NK cells
  misc_feature 1..152: note = source = chr1:46386901-46387052; Gene: MAST2 (intron)
  source 1..152: mol_type = genomic DNA
cgtgattcacccacctcggactcccaaagtgctgggattacaggtgtgagccaccgtgcccagcctatgtctgtggtcttaacccctcagctgttgttacgggatcctgggaggtgttgcttttctagctagaaacctctgtggctggtgac

SEQ ID NO: 4054 - DNA, 334 bp, Homo sapiens
  misc_feature 1..334: note = U/M: U (0.22:0.93) in Blood NK cells
  misc_feature 1..334: note = source = chr3:32945527-32945860; Gene: CCR4 (Intergenic)
  source 1..334: mol_type = genomic DNA
cgctttttgggtccacgctgcttttatgagctgtaacattcactgtgaagatctgcaacttcactcttgagcccagcaagaccacgagcccccccaggaggaatgaacaagtccagacgcggtacctcaagagctgtaacgctcaccgcaaaggtctgcagcttcactcctgaaccagtgagaccacaaacccaccagaaagaacaaactccaaacacatctaaatatcagaagggacagactccagactcaccatcttaagagctgtaacactcaccgcgagggtctgcggcttcattgttaaagtcagtgagaccaagaacccgccgattcc

SEQ ID NO: 4055 - DNA, 129 bp, Homo sapiens
  misc_feature 1..129: note = U/M: U (0.26:0.93) in Blood NK cells
  misc_feature 1..129: note = source = chr17:55652681-55652809; Gene: MSI2 (intron)
  source 1..129: mol_type = genomic DNA
cgtcctatcttgtcggtggaagtggcaaaaccacatttgacaccgctctaggtggcggctcaatgggagtggagtgctgcgcatctcctgtttgacctttcagtcgctgcatggctcttccaagctgcc

SEQ ID NO: 4056 - DNA, 332 bp, Homo sapiens
  misc_feature 1..332: note = U/M: U (0.22:0.89) in Blood NK cells
  misc_feature 1..332: note = source = chr17:81012325-81012656; Gene: B3GNTL1 (Intergenic)
  source 1..332: mol_type = genomic DNA
cgagctcttggcctcccaaactgctgggattacaagtgagagccattgcagatagccagttttctttatttttaattgttgtttgtgcaaaaggttttggcgaatactggctatattcagaggactcagtaccagttgccaggggcctggagtaggtgctgtggtctcaatgtgtgtgtccccccaaaccatatgttgacacctaacccccaaggcgatgtggttaggagatggagctttaaggaggtgactgggccgtgagggctgtcctctcatgacggacgagtgcccttcaacgagacttgaaggagcccttctgtcccttcctccac

SEQ ID NO: 4057 - DNA, 428 bp, Homo sapiens
  misc_feature 1..428: note = U/M: U (0.27:0.94) in Blood NK cells
  misc_feature 1..428: note = source = chr3:32604098-32604525; Gene: DYNC1LI1 (intron)
  source 1..428: mol_type = genomic DNA
cgggagccactgagcatggctattttcactttatcttcttacctttttttaaatttctctggcaagaaacatgcattactttcataatttaaaatagtgatttccaattttgagaggaaagtgttttagacataatttcttttggttcttttaatcccatgatgcatgaaataatctcagtttacaggtcaggaggttctaatttgtccacaactccaccacttcaaaggatagggaggctgactcttaagatcttgtggctttcgtcaggactccttccgccatatctaaactgcctcggcccttttctctgcgttttaggcccttttcacaggttgttctcccctcacccttcttagcaaaattgtactcagataccacctcatccgcaaaatatttcgtgacctatttagcaattatttcatacc

SEQ ID NO: 4058 - DNA, 424 bp, Homo sapiens
  misc_feature 1..424: note = U/M: U (0.3:0.92) in Blood NK cells
  misc_feature 1..424: note = source = chr12:53762133-53762556; Gene: SP1 (Intergenic)
  source 1..424: mol_type = genomic DNA
cgggcatggtggtgggtgcctgtggtcccagctgctcaggaggctgaggcaggagaatggcgtgaacccgggaggtggagcttgcagtgagctgagatcacgccaccccactccagcctgggtgacagagtgagactccatctcaaaaaaagaaaaagaaaaattagctgagtgcaggggcgagtgcctgtagtctcagctagttaggagactgaggtgtgaggatcacttgagcccagaagttggaggctgcagtgagctatgatcatgcaactgcactccagcctgagtgacaaagtgagatcctgtctcagaaaaaaaaaaaattgaaaaatttaaccatttgtactgttaaaaaatcatttagggctggctgggcgcagtggctcacgcttgtaatcccagcactttgggaggccgaggc

SEQ ID NO: 4059 - DNA, 230 bp, Homo sapiens
  misc_feature 1..230: note = U/M: U (0.29:0.9) in Blood NK cells
  misc_feature 1..230: note = source = chr2:68596508-68596737; Gene: PLEK (intron)
  source 1..230: mol_type = genomic DNA
cgtactgcagtgacattcttttccaaagcactgtcaccatgatgaggggtacccaggggaacattatgccagagcgactccacagtgttgcctacaaaaccgtactcttttttttttttttttttgagatggagttttgctcttgttgcccaggctggagtgcaatggtacgatctcggctcactgcaacctccgcccccaaaaccgtacttttacctgtttctatggtc

SEQ ID NO: 4060 - DNA, 108 bp, Homo sapiens
  misc_feature 1..108: note = U/M: U (0.34:0.93) in Blood NK cells
  misc_feature 1..108: note = source = chr2:225961049-225961156; Gene: DOCK10 (Intergenic)
  source 1..108: mol_type = genomic DNA
cgccggtgctggagtgcagtggcgcggttgcgcctcactgcaacctccgcctcctgggttcaagcaattctgtcttagcctcctgagtagctgggattacaggcgccc

SEQ ID NO: 4061 - DNA, 458 bp, Homo sapiens
  misc_feature 1..458: note = U/M: U (0.36:0.92) in Blood NK cells
  misc_feature 1..458: note = source = chr19:16483480-16483937; Gene: EPS15L1 (intron)
  source 1..458: mol_type = genomic DNA
cgtcccggtccctgtgccgcagggtggggatgggggctacagaccacatacagcacgtcaccgtgcaaggcgcttcacccacacacccacctgctaggcctgagtgggtcccatggtcaggcaggaaaactgaggctcagggaggttaagtgacccacccggggcctccctttcctccaatgtccagaaaccagcctgatcaagcagtcccctggattctagcagaattggctgcccagaggacagaaggaagcggcctcagttctcctgtcctggcctcacacatcagccatttcctggcacagaggcctagcagggttctagaaacctctgggtgccctgggatggacaaaccctggatgggagcatgggacatcagacatgttccatgtgccaggcggagagatgacagaaaagcttgttccttcattgtgatttccatgagtgcaggtgtcaac

SEQ ID NO: 4062 - DNA, 61 bp, Homo sapiens
  misc_feature 1..61: note = U/M: U (0.05:0.95) in Blood NK cells
  misc_feature 1..61: note = source = chr7:100734328-100734388; Gene: TRIM56 (TTS)
  source 1..61: mol_type = genomic DNA
cgacggatagaggtgtcaaaccagaagggaggaacccgtcggaggtgggctgtgaccaccg

SEQ ID NO: 4063 - DNA, 100 bp, Homo sapiens
  misc_feature 1..100: note = U/M: U (0.03:0.92) in Blood NK cells
  misc_feature 1..100: note = source = chr2:8423040-8423139; Gene: LINC00299 (intron)
  source 1..100: mol_type = genomic DNA
cgtatgtaagttcctcatggcagatgggcgcgtggcctgtgcacgcatgcaggcctgcacactcacatgcacgcacacacaccggacaggttaatccccg

SEQ ID NO: 4064 - DNA, 132 bp, Homo sapiens
  misc_feature 1..132: note = U/M: U (0.06:0.93) in Blood NK cells
  misc_feature 1..132: note = source = chr2:8595989-8596120; Gene: LINC00299 (Intergenic)
  source 1..132: mol_type = genomic DNA
cgcttaggcaacagcgcctgtcttctgaggatgcttagaatattttttcccaagttctttgaaactaggacaggctctctccgacagtgcgatggcacacggaggggacgctgccatctcagaggccattcg

SEQ ID NO: 4065 - DNA, 180 bp, Homo sapiens
  misc_feature 1..180: note = U/M: U (0.05:0.92) in Blood NK cells
  misc_feature 1..180: note = source = chr6:35491881-35492060; Gene: TULP1 (Intergenic)
  source 1..180: mol_type = genomic DNA
cggccaggcgcgatggctcacgcctgtaatcccagcactttgggaggccgaggcaggcagatcacgaggtcaggaaatcgagaccatcctggttaacacggtgaaaccccgtctgtactaaaaaaaatacaaaaaaattagccgggcgttgtggcgggcgcctgtagtcccagctactcg

SEQ ID NO: 4066 - DNA, 140 bp, Homo sapiens
  misc_feature 1..140: note = U/M: U (0.04:0.89) in Blood NK cells
  misc_feature 1..140: note = source = chr1:167416088-167416227; Gene: CD247 (intron)
  source 1..140: mol_type = genomic DNA
cgggcgtggtggcaggcacctgtggtcccagctgctcaggaggctgaggcaggagaatggtgtgaacccaggaggtggagcttgcagtaagcggagattacgccactacactccagcctggacaacagagtgggactccg

SEQ ID NO: 4067 - DNA, 166 bp, Homo sapiens
  misc_feature 1..166: note = U/M: U (0.06:0.91) in Blood NK cells
  misc_feature 1..166: note = source = chr1:178380889-178381054; Gene: RASAL2 (intron)
  source 1..166: mol_type = genomic DNA
cgagatgaatcctcgccatgtgctgcttttttggctgcccaggatgtggcccagaggtgcaaggagccaggtatcactgccctacacgtcaaactctgggccacaggaggaaataggaccaagacccctggacctggggccagtcggccttcagagcccttgcccg

SEQ ID NO: 4068 - DNA, 295 bp, Homo sapiens
  misc_feature 1..295: note = U/M: U (0.08:0.93) in Blood NK cells
  misc_feature 1..295: note = source = chr1:44059026-44059320; Gene: PTPRF (intron)
  source 1..295: mol_type = genomic DNA
cgactctggcctgatcctgtaaccgtatttgtgggtctcggtagccccccagacagtagactgtgtgtgtgtgtgactctgtggttgctgctgggcgtcctgtgtgtggtcacacagccacagtcagctgctgcgtgagactctgtgtgatagggtgtcatggatgtgactggctgggtagcattgtgggattgagatggtgaccacatctgatgtggccatgtgatgaccagaaacatggcggtgtctgaagtggtccttatgaagtgggttatggtcacaaggtaagccaccg

SEQ ID NO: 4069 - DNA, 65 bp, Homo sapiens
  misc_feature 1..65: note = U/M: U (0.11:0.95) in Blood NK cells
  misc_feature 1..65: note = source = chr13:110386260-110386324; Gene: IRS2 (Intergenic)
  source 1..65: mol_type = genomic DNA
cgggcggcgcaggtgccggaagcagcgccatccgtgctatggacgggtccccccaattggcagcg

SEQ ID NO: 4070 - DNA, 131 bp, Homo sapiens
  misc_feature 1..131: note = U/M: U (0.09:0.93) in Blood NK cells
  misc_feature 1..131: note = source = chr2:240617639-240617769; Gene: LOC150935 (Intergenic)
  source 1..131: mol_type = genomic DNA
cgctgttcacgccccacactcagatgtcgccagtgtcacacgcacttgcctgtgtgtgggttaattctgtgttggttcgcgtatccaccgccacagtgaaggcacagaaccatccatccaggacccctgcg

SEQ ID NO: 4071 - DNA, 109 bp, Homo sapiens
  misc_feature 1..109: note = U/M: U (0.08:0.91) in Blood NK cells
  misc_feature 1..109: note = source = chr10:7285284-7285392; Gene: SFMBT2 (intron)
  source 1..109: mol_type = genomic DNA
cggtaacggatggggaaactcctgtggacagaagtgagaagcccaaggccactcgcctcgccaggggatggagctgtaactgacacctatgtcaagctgatgaagaacg

SEQ ID NO: 4072 - DNA, 126 bp, Homo sapiens
  misc_feature 1..126: note = U/M: U (0.08:0.9) in Blood NK cells
  misc_feature 1..126: note = source = chr11:333161-333286; Gene: IFITM3 (Intergenic)
  source 1..126: mol_type = genomic DNA
cgcattagtgctgttcatcagacaccttcagctgtcctctgggcagatggcagggttgtgtcttcctgtggagttccttcctttcgcctcagtgaccacggagacgcatgtcgaggtgtgacctcg

SEQ ID NO: 4073 - DNA, 144 bp, Homo sapiens
  misc_feature 1..144: note = U/M: U (0.04:0.86) in Blood NK cells
  misc_feature 1..144: note = source = chr11:119767286-119767429; Gene: PVRL1 (Intergenic)
  source 1..144: mol_type = genomic DNA
cgcggggtgggggtcagtgttttaacaagtttcccaggtgattcttaggttcacaaaagttagaaagccactaaaccgctggccagcaggcatgggctcagcacgagaaatacacttaagaaagactggttgctgccctcaccg

SEQ ID NO: 4074 - DNA, 170 bp, Homo sapiens
  misc_feature 1..170: note = U/M: U (0.07:0.89) in Blood NK cells
  misc_feature 1..170: note = source = chr11:1019378-1019547; Gene: MUC6 (exon)
  source 1..170: mol_type = genomic DNA
cgtggccctggttgtggcctgggtcactgtgggttttgtggctgtcgatctcagtgtggctgtgggaggcagccctgatgtggcttgtggggtgacggccgtggttggtctaggtggttctgcagaggacagccgcccggaacatccccttgctgtgggcctgcatttcg

SEQ ID NO: 4075 - DNA, 224 bp, Homo sapiens
  misc_feature 1..224: note = U/M: U (0.07:0.89) in Blood NK cells
  misc_feature 1..224: note = source = chr11:113945043-113945266; Gene: ZBTB16 (intron)
  source 1..224: mol_type = genomic DNA
cgaccataatggcccttagcgtgatccatcgggcccacagtgctggggcaaccattattagtgttaatttgggggagctttttatggtagctgggggaaatgtggagggattgttggaaatttatttaagctgttcagcaggttaggtgctgctggggtctactatggcaaaaccctcagctcccccaacccatctctttaaggaacgtccctccccaacaccg

SEQ ID NO: 4076 - DNA, 246 bp, Homo sapiens
  misc_feature 1..246: note = U/M: U (0.06:0.88) in Blood NK cells
  misc_feature 1..246: note = source = chr9:139853947-139854192; Gene: LCN12 (Intergenic)
  source 1..246: mol_type = genomic DNA
cggtggcagagggggcctttccccgaaggccagctgtggtccctctcagccttgtccagggcccaccacagccacacagagcctgtgcctgcgacggtgaccacaggagactgtgacagtgacggtgaccacagacaggccacccagggctcaggctgggtatggtgggctctggtgggaagcagctcccgcacggctcacggtggggagggtcccttccggtcctcaccccgcgataccccttcg

SEQ ID NO: 4077 - DNA, 273 bp, Homo sapiens
  misc_feature 1..273: note = U/M: U (0.11:0.93) in Blood NK cells
  misc_feature 1..273: note = source = chr9:127387483-127387755; Gene: NR6A1 (intron)
  source 1..273: mol_type = genomic DNA
cgaatctgtctagttttagtttcctcttttgacaaatggagtcatctctttactctggtaacctcacaagagctgctgtgaagatcggttgagataatgcatgtgaaaatactttagaaagagcaatagtgttattattattgagatagtgtctcgctttgccacccaggctgaagtgcagtggcatgatcacagctcacggcagcctcaacctcacaggctcaagcgagcctcctgctcatcctctcaagtagctgggaccaaaggtatgcg

SEQ ID NO: 4078 - DNA, 274 bp, Homo sapiens
  misc_feature 1..274: note = U/M: U (0.07:0.89) in Blood NK cells
  misc_feature 1..274: note = source = chr1:167448709-167448982; Gene: CD247 (intron)
  source 1..274: mol_type = genomic DNA
cgattacatgatgtgacatatccgcctccatctgccacacactacggcccagcggtggccatgcctccccctgttcaaaaatcaccccaggagttcaggtttgtttttgcatcacatcacagacctccccgctccccatcatgtggcttttagggcctcatattctggtcacctcactttccacctgtgtccccagtccacatctcttccatccagccaggtccacacctttgggaactcaccaacacctaccctctccctgtctggactgccg

SEQ ID NO: 4079 - DNA, 274 bp, Homo sapiens
  misc_feature 1..274: note = U/M: U (0.06:0.88) in Blood NK cells
  misc_feature 1..274: note = source = chr7:80505151-80505424; Gene: SEMA3C (intron)
  source 1..274: mol_type = genomic DNA
cgtgaaaaggtgaaacttcacaataagaaaagaaaaaaaaattatatgctgagattgctaagacctacagtaagaacacatcttctatcggtgaaactgggaaggaagttaaaaaaaaaaatgtgctagttttgctgtcacacctcaaactgcaaaacttatggccaccgtgcatgataactacttagcacggagaaggtattaaatttgtgggtggaagatgtgaacagaaaaatattcctactgatggaaatcgagtttgccaccatgcacg

SEQ ID NO: 4080 - DNA, 466 bp, Homo sapiens
  misc_feature 1..466: note = U/M: U (0.07:0.89) in Blood NK cells
  misc_feature 1..466: note = source = chr16:88719942-88720407; Gene: MVD (intron)
  source 1..466: mol_type = genomic DNA
cggcaggtggctgctgtggggacaggtttcttttaggggtgatgaaaaagttaaggaggtggcttgaggtggtgctcacatgaccctgtgaatgtcctcaacaccgcaggattatatgctctcgaatggctgagacaggaaattttaggttatgtggtaaacagctatgcccaggctggacccacatctggccaagggtgctgccaagccccatggggtaacagctcagggaagcgcccaattcaagctggtgcgttcgtcaccgtgttctgcagaacagcggaagcctgcaagccccacccggagcagcagccacgagcctggtgcttcccaggcgggcagtcctggggtgtgggtctgagtccaccccacagggcaggcccctgaccattagaaggtgttattgctcccacccgggacagacgcacatccccacacgcttccagacacccttaaatgggaggcg

SEQ ID NO: 4081 - DNA, 127 bp, Homo sapiens
  misc_feature 1..127: note = U/M: U (0.12:0.93) in Blood NK cells
  misc_feature 1..127: note = source = chr14:99917863-99917989; Gene: SETD3 (intron)
  source 1..127: mol_type = genomic DNA
cgctctgtcgctggattagggttaggggtggagtacagtggtgtgatcacggctcactgcagcctcaacttcctgtgtttaagcgattctcctgcctcagcctcccaagtagctggaactacaggcg

SEQ ID NO: 4082 - DNA, 209 bp, Homo sapiens
  misc_feature 1..209: note = U/M: U (0.09:0.9) in Blood NK cells
  misc_feature 1..209: note = source = chr20:50122196-50122404; Gene: NFATC2 (intron)
  source 1..209: mol_type = genomic DNA
cgttcagctctcccacatcccagatgcttggccttgaggaagtcctttgacctcaagagtatcagtttcccaggctgcaggctgggtgtcgttgtcgtggcatcgtttgaggacaagagctgcgcacagaacacataagaaatggtgagagggaacgccctccacaccgtctgcccctaactcacacccatgccagctcagaggtcgcg

SEQ ID NO: 4083 - DNA, 416 bp, Homo sapiens
  misc_feature 1..416: note = U/M: U (0.09:0.9) in Blood NK cells
  misc_feature 1..416: note = source = chr6:170771086-170771501; Gene: PSMB1 (Intergenic)
  source 1..416: mol_type = genomic DNA
cgctgttccccaggtgcagagcagggtggaggtggacctgagtctgggagctgaaggaagtgggaaggggctgaggctcctggagaggaagaaagtgtcctctgagagatgctggcacacatcctccagaaagtcccaggctggctagggccggctgcttggtgacacaggctcctgggtcctgggaccagccctgaccactgctggcacagcaaagctggtcacccgacggctgccctgtggagaggaccaggcagacaaaatggaaaccaccatccagcaggtggtccggccacagccccagtcaccgagactcctgaagacggtcaaggccaggagcccaggccagcccccaccttccacctccctgcagctggttgtggccacaaggtaagtccaccaatgagcatcaaccg

SEQ ID NO: 4084 - DNA, 120 bp, Homo sapiens
  misc_feature 1..120: note = U/M: U (0.09:0.89) in Blood NK cells
  misc_feature 1..120: note = source = chr9:126308447-126308566; Gene: DENND1A (intron)
  source 1..120: mol_type = genomic DNA
cgctttacatttacacattcgtgatgtggtgtttgtgtggcttattcctctcaggttctaagatgaagctgcagctgatacgttttaaaactaagtattggccgggcgaggtggctcacg

SEQ ID NO: 4085 - DNA, 147 bp, Homo sapiens
  misc_feature 1..147: note = U/M: U (0.15:0.95) in Blood NK cells
  misc_feature 1..147: note = source = chr8:28639413-28639559; Gene: INTS9 (intron)
  source 1..147: mol_type = genomic DNA
cgccaagggaacccctactgtaaactctgggctttgggcgagagtgacgtgtcaatgtgggttcatcagccgtagcaaacgcacctctctggtgtgggatggtgcagtgggcaactgcgtgtgtggggcaggggcatatgattgccg

SEQ ID NO: 4086 - DNA, 236 bp, Homo sapiens
  misc_feature 1..236: note = U/M: U (0.1:0.9) in Blood NK cells
  misc_feature 1..236: note = source = chr17:3608369-3608604; Gene: P2RX5 (Intergenic)
  source 1..236: mol_type = genomic DNA
cggtacctcttagagctacgcacatcttgttctaactccagttcccggcgctggcttcccccacagcatgtgtgaactttctcacacgcatccgctcctctccactcccaagttccaggactgtggtgatgcaatgagaatgagtgtgagaatggtggcaatgcaatgagtgtgaaacccacgtatcaaataccacgaatgcccgtgtcttcccatagttccctgtacacgattcg

SEQ ID NO: 4087 - DNA, 242 bp, Homo sapiens
  misc_feature 1..242: note = U/M: U (0.12:0.92) in Blood NK cells
  misc_feature 1..242: note = source = chr12:68063326-68063567; Gene: DYRK2 (Intergenic)
  source 1..242: mol_type = genomic DNA
cgatccccagggactgacataaagtttgggacaaaacagggcctcagtaaaagtttgtgagtgagtaaattgcttggggagggtggttcaagagagatgtgcacaaaggaaggcatctttgagatggctttgagaaggagttttggagagagtgcaggaaatggaacgtattacccagtgcctggaggctggtggtgaggaaatggtgtggtgggtacaggcccgctcatgaacgtcggccg

SEQ ID NO: 4088 - DNA, 270 bp, Homo sapiens
  misc_feature 1..270: note = U/M: U (0.12:0.92) in Blood NK cells
  misc_feature 1..270: note = source = chr2:30517023-30517292; Gene: LBH (Intergenic)
  source 1..270: mol_type = genomic DNA
cgataatcccaaggcacaattatctttattttataagtgaagaaactaagccacaatgaagttaagtaaattgttcaaggccccagaactagaaagtggtagaaccacaattttccgccactcaaaagtgggctgaccctcttcgtatttacatcaggggttctcagaatgtggtcttcaggccagcagcagcagcagcggcagcagtagaaacttgttagaaatgatctcaggacccacccagagctacagacagaaattccaggggcg

SEQ ID NO: 4089 - DNA, 117 bp, Homo sapiens
  misc_feature 1..117: note = U/M: U (0.04:0.83) in Blood NK cells
  misc_feature 1..117: note = source = chr14:93006257-93006373; Gene: RIN3 (intron)
  source 1..117: mol_type = genomic DNA
cgtggtgggagccaccaccagaagggcctgcggctgaagctggctgcctctgccggcaccaccaggcctccacacgttggggtcagtgtgggcaggtggagcccagtagggacagcg

SEQ ID NO: 4090 - DNA, 408 bp, Homo sapiens
  misc_feature 1..408: note = U/M: U (0.14:0.93) in Blood NK cells
  misc_feature 1..408: note = source = chr16:358740-359147; Gene: AXIN1 (intron)
  source 1..408: mol_type = genomic DNA
cgcacacacgcacgcacccacacacagcctacagtgtcagccactttttgttaagtagacaccatcagtgcctagttttagccaaacctgagtcaagggttggctggcatcttctcagaagtgataacaaaccaacatcctttcttttcaaccataaagaaattcctgacttggaaactgatgtctgcagaaaagctaaaaggctaagaaatcctgaccaagactgtgtcagtgctctcaaaatgcctacttccctgcacagacactcagatggtcacgtggtttaacctcagacaccgcggctaacagtgcgttgcgcagtggctcacacctgtaatcccagcactttgggaggctgaaacgggcggatcacgaggtcaggagatcgagaccatcctggctaatacg

SEQ ID NO: 4091 - DNA, 102 bp, Homo sapiens
  misc_feature 1..102: note = U/M: U (0.1:0.88) in Blood NK cells
  misc_feature 1..102: note = source = chr16:85676577-85676678; Gene: GSE1 (intron)
  source 1..102: mol_type = genomic DNA
cgcctcttaaagaccgatgactcttcagggggtgccggtggtttttgcctggcggggtgggcctgagcctgggtggctgacaggtgctgctgtggcgctgcg

SEQ ID NO: 4092 - DNA, 294 bp, Homo sapiens
  misc_feature 1..294: note = U/M: U (0.1:0.88) in Blood NK cells
  misc_feature 1..294: note = source = chr16:57682411-57682704; Gene: GPR56 (intron)
  source 1..294: mol_type = genomic DNA
cgcagggaactggctctcagtcgaaggggccaggtttatttgagggaggactggcccaggaaggagacattgagctcctgcctgggacaccccttcttttaatgctgctctcaatgatttggttcaaaagccacctcttcctgaaagtcctccttggtttctcttaaactcagactccacgtgtgttctccggcttgtggccgatgactgcctctgtcactgtggccagctgccgcgccacgcaggatgaggttctgtctgtgtctgtgagcacccagctctgccacagggccg

SEQ ID NO: 4093 - DNA, 132 bp, Homo sapiens
  misc_feature 1..132: note = U/M: U (0.18:0.95) in Blood NK cells
  misc_feature 1..132: note = source = chr11:87009956-87010087; Gene: TMEM135 (intron)
  source 1..132: mol_type = genomic DNA
cgtctttagtaaaaatacaaaaaaattagctgggtgtggtgatgggcgcctgtaatcccagcgacttgagaggctgaggcaggagaattgcttgaaaccagaaggcagaggttgcagtgagccgagattgcg

SEQ ID NO: 4094 - DNA, 135 bp, Homo sapiens
  misc_feature 1..135: note = U/M: U (0.07:0.84) in Blood NK cells
  misc_feature 1..135: note = source = chr22:43651426-43651560; Gene: SCUBE1 (intron)
  source 1..135: mol_type = genomic DNA
cgagacacacatgtgcacacacacacacaagtgcaagtacgacaaaggaagtggaagaaaagtgttacccatgagtagccgccgtttcacccgcttgtccacatcagctactgacgtggcattgaactgagagcg

SEQ ID NO: 4095 - DNA, 174 bp, Homo sapiens
  misc_feature 1..174: note = U/M: U (0.18:0.94) in Blood NK cells
  misc_feature 1..174: note = source = chr1:42362308-42362481; Gene: HIVEP3 (intron)
  source 1..174: mol_type = genomic DNA
cgatctcgggtcaccgcaacctctgcctcccgggttcaagcgattctcctgcctcagcctcctgagtagctgagaccacaagtgcgtgccaccacacccggctaattttttgtatttttagtagagatagggtttcaccatggtagccaggatagtctcaatctcctgacctcg

SEQ ID NO: 4096 - DNA, 188 bp, Homo sapiens
  misc_feature 1..188: note = U/M: U (0.19:0.95) in Blood NK cells
  misc_feature 1..188: note = source = chr5:10377133-10377320; Gene: MARCH6 (intron)
  source 1..188: mol_type = genomic DNA
cgggtaggagctttagagcgagagtgcgaaggatccgtcgcggttcctctgccgtcgtgctgctttggggccactccaggcagaagacagacaaatatgcccctagagtcttgtagtgctgggcatgaggggtgggctgcggtccaaggaccccttagcgctgtcccttctgcttaaggtggcttccg

SEQ ID NO: 4097 - DNA, 487 bp, Homo sapiens
  misc_feature 1..487: note = U/M: U (0.16:0.92) in Blood NK cells
  misc_feature 1..487: note = source = chr17:45777414-45777900; Gene: TBKBP1 (intron)
  source 1..487: mol_type = genomic DNA
cgcaatctcggctcactgcaagctccgcgtcctggttcacgccattctcctgcctcagcctcctgagtagctaggactacaggcgctcgccactacgcctggctaatttttttttgtatttttagtagagatggggtttcactgcgttagccaggatggtctcgatctcctgaccttgtgatccgcccgcctcggcctcccaaagtgctgggattataggagtgagccactgcgcccggacctttttttttttttttttttttttttttggatttttagtagagatggggtttctccatgttggtcaggctggtctcgactcctgggaggtggggttcttgagtgtttgggatctgggacattccctttgctttcctctggggcccaaacccatctcttctggagatgccagggctaagtgacacttactcggctgctttgtcgctgtgtccagtgtaatgtcccctgctgagcttttgggcctccg

SEQ ID NO: 4098 - DNA, 126 bp, Homo sapiens
  misc_feature 1..126: note = U/M: U (0.13:0.88) in Blood NK cells
  misc_feature 1..126: note = source = chr16:88720466-88720591; Gene: MVD (intron)
  source 1..126: mol_type = genomic DNA
cggggcgtaaggaggctgggccaagctgtgcaccgaggagggcgtacatgggggctctgtggcacccccacagagcagcgcaggggaagaggcggttcagggccaagctgtgcaccgaggagggcg

SEQ ID NO: 4099 - DNA, 214 bp, Homo sapiens
  misc_feature 1..214: note = U/M: U (0.15:0.9) in Blood NK cells
  misc_feature 1..214: note = source = chr16:297118-297331; Gene: ITFG3 (intron)
  source 1..214: mol_type = genomic DNA
cgatgttttgttctgttttgttttgttttgagacagagctttactctgtgtcaccaggctggagggcagtggcgtgatcaccactcattgcagcctccacttcctggcttcaagtgaccctcccacctcagctcctgggtagctaagaccacaggcgtgtgccaccacaccgggctgattttttttttctttctttttagaaacggtctcaccg

SEQ ID NO: 4100 - DNA, 160 bp, Homo sapiens
  misc_feature 1..160: note = U/M: U (0.1:0.84) in Blood NK cells
  misc_feature 1..160: note = source = chr16:85676406-85676565; Gene: GSE1 (intron)
  source 1..160: mol_type = genomic DNA
cgagctcggctggggagtctttacctctccgggtgccctgccctcccctttccttccatgctcgctgctggcctggtcagggcctgtggctttggggcctgaccacggtgaggccacgcccgcctcggtctacagtgcgctggagagtggtcctgtggcg

SEQ ID NO: 4101 - DNA, 163 bp, Homo sapiens
  misc_feature 1..163: note = U/M: U (0.19:0.93) in Blood NK cells
  misc_feature 1..163: note = source = chr17:45817373-45817535; Gene: TBX21 (intron)
  source 1..163: mol_type = genomic DNA
cgtcaccaaacctctcggagcgtcagtttcttcaaatataaaattggaaataacattttattttttattttttctttgagatggagtctcacactgttgcccaggctggagtgcagtggcgccatctcgggtcaccgcaaccttcgcctcccaggttcaagcg

SEQ ID NO: 4102 - DNA, 245 bp, Homo sapiens
  misc_feature 1..245: note = U/M: U (0.17:0.91) in Blood NK cells
  misc_feature 1..245: note = source = chr17:80264260-80264504; Gene: CD7 (Intergenic)
  source 1..245: mol_type = genomic DNA
cgcccagttaatttttgtattttttgtagagactgggtttcgccatgttgcccaggctggtctggagctcctgggctcaagtgatccactcaccccggcctcccaaagtgctgagatgacaggcgtgagccaccgcgcccggcctcgttctcattttcttgcttagttcctgatgacagtaaatgagcatttaaacaaggtttcatgtacactgatgctagtgtctgttttctgtttcacaagcg

SEQ ID NO: 4103 - DNA, 231 bp, Homo sapiens
  misc_feature 1..231: note = U/M: U (0.22:0.95) in Blood NK cells
  misc_feature 1..231: note = source = chr1:10585743-10585973; Gene: PEX14 (intron)
  source 1..231: mol_type = genomic DNA
cgtggtctcagctcactgcaacctccgcctcctgggttcaagcgattctctcatttcagcttcccgagtagctgggactgcaggcacatgccaccacacccggctaatttttgtatttttagtatagatggggtttcactaaattggccaggctgatctcgaactcttgaccttgtgatccgcccgccttggccccctaaagtgttgaggttgcaggcgtgagccactgcg

SEQ ID NO: 4104 - DNA, 181 bp, Homo sapiens
  misc_feature 1..181: note = U/M: U (0.21:0.93) in Blood NK cells
  misc_feature 1..181: note = source = chr8:124111382-124111562; Gene: WDR67 (intron)
  source 1..181: mol_type = genomic DNA
cggagtctcgctctgtcacccaggctggagagcagtggcatgatctcggctcactgcaagctccgcctcccaggttcacgccattctcctgcctcagcctcccgagtagctgggactataggcgcctgccaccacgcccggctaattttttgtattttttagtagagacggggtttcaccg

SEQ ID NO: 4105 - DNA, 216 bp, Homo sapiens
  misc_feature 1..216: note = U/M: U (0.18:0.9) in Blood NK cells
  misc_feature 1..216: note = source = chr11:3161061-3161276; Gene: OSBPL5 (intron)
  source 1..216: mol_type = genomic DNA
cgcgccctgaaggagcacaagctcctagggtgcgtttactcgcagaggctgaagctggtggtggggtggggcgctcacagcctggcctgtggttggccaaggacaccaacaggagctcttccctgcagctcctggcaggcctgcagaggtgccccccctgctctgagaagccagcctcacaagatcattcatcgcaagctctgggcccactgctcg

SEQ ID NO: 4106 - DNA, 343 bp, Homo sapiens
  misc_feature 1..343: note = U/M: U (0.21:0.93) in Blood NK cells
  misc_feature 1..343: note = source = chr3:57639835-57640177; Gene: DENND6A (intron)
  source 1..343: mol_type = genomic DNA
cggctaattttttttttttttgtatttttagtagagacggggtttcaccgtgttagccaggatggtctcgatctcctgacctcgtgatccacctgccttggcctcccaaagtgccgggattacaggtgtgagccaccgtgcccagccagaaattcacttctaagaattaaacagtggtttcaaccttttgagaaagatatagtatgttattataatctgaaacctaaacccaaaggaaatcaacatgtgtcagatagcatcagatacattttatgtggtgacaggctttctcaatctctgaaacatagaaacagctataactgttgtctactcagccaatgcg

SEQ ID NO: 4107 - DNA, 407 bp, Homo sapiens
  misc_feature 1..407: note = U/M: U (0.21:0.93) in Blood NK cells
  misc_feature 1..407: note = source = chr2:239314826-239315232; Gene: ASB1 (Intergenic)
  source 1..407: mol_type = genomic DNA
cgcgcccctgcagggtaaattttgcccattcttgaggtggtgtggaagaacacagagtgtgggtcaggacaccttcctgtcaggcgtggatgtgtgatttggggtgctcctatctgtctctcctttgagcctcagttgtccactgacaggtcatcttagccacggggagcacacgtggctcatgggtgcctggtgattgttggtgtgcggtgcgctggcagtgtgtgctgtgctgtccctcacctcggcggttggctggcggggcctgggggctcctgctcagctccgacccttcaggaccagctgcctgtggccctgtcttggtggatggtcttacatctcctaggcagagaagctgatggctgaaatgtgccataaagacacagtgacattgagaaatgcctccg

SEQ ID NO: 4108 - DNA, 107 bp, Homo sapiens
  misc_feature 1..107: note = U/M: U (0.12:0.83) in Blood NK cells
  misc_feature 1..107: note = source = chr15:26047563-26047669; Gene: ATP10A (intron)
  source 1..107: mol_type = genomic DNA
cgtgttgtgttccgaccactaggcccatgaactcgcttcctggggctgcagtaacaggtcaccacaaacctagtggctgaaaaccacacacgtttatgatgttatcg

SEQ ID NO: 4109 - DNA, 178 bp, Homo sapiens
  misc_feature 1..178: note = U/M: U (0.19:0.9) in Blood NK cells
  misc_feature 1..178: note = source = chr22:46635122-46635299; Gene: PPARA (exon)
  source 1..178: mol_type = genomic DNA
cgttgtctggaggttccagggacagggcagcctcccagagccgagcaagagctcaaggtacaaatgagagatttgctataccgtgagaagtcaacaacttagccaccacttccccgcaatggaccatgtaacaaatacctcagcaggccctgcaaaaggccatgctagagctgaggcg

SEQ ID NO: 4110 - DNA, 184 bp, Homo sapiens
  misc_feature 1..184: note = U/M: U (0.2:0.91) in Blood NK cells
  misc_feature 1..184: note = source = chr17:65238302-65238485; Gene: HELZ (intron)
  source 1..184: mol_type = genomic DNA
cgggcagatcacctgaggtcaggagctcgagaccagcctgaccaacatggtgaaaccctctctctactaaaaatacaaaattagccgggtgtggtggcgtaagcctgtaatccctactcgggaagctgaggcaggagaattgcttgaacctggaaggtagaggttgcagtgagctgagatcgcg

SEQ ID NO: 4111 - DNA, 288 bp, Homo sapiens
  misc_feature 1..288: note = U/M: U (0.16:0.87) in Blood NK cells
  misc_feature 1..288: note = source = chr7:3208603-3208890; Gene: CARD11 (Intergenic)
  source 1..288: mol_type = genomic DNA
cgcctcccagggctagcggatccccagagatagtaaatgactcacttgtgagtatagctttcatctgcaaaccaaccaacccatctctgaccacttcctctgtagggctcttacactctggtcacccatccaacctgccctgaccaccccagggccaggtactggataacaaggggcagctcctgtgccccggagcccgctgaaatgatccaaacagccaacctgaagcctgctcgccctgcctcacctgtgctttccctcggaaaccaccacaaaggctctcacacg

SEQ ID NO: 4112 - DNA, 65 bp, Homo sapiens
  misc_feature 1..65: note = U/M: U (0.21:0.91) in Blood NK cells
  misc_feature 1..65: note = source = chr19:12663796-12663860; Gene: ZNF564 (Intergenic)
  source 1..65: mol_type = genomic DNA
cgcggtggctcacgccagcactttgagaggcccaggcgggcggatcacctgaggtcaggagttcg

SEQ ID NO: 4113 - DNA, 96 bp, Homo sapiens
  misc_feature 1..96: note = U/M: U (0.19:0.89) in Blood NK cells
  misc_feature 1..96: note = source = chr7:1983944-1984039; Gene: MAD1L1 (intron)
  source 1..96: mol_type = genomic DNA
cgtggacataaaagtcgctgaactgcccccttcaaagggacgaggtacgtggaatgtgcgtcgcatttcaatagagctgttagaaatggcgggccg

SEQ ID NO: 4114 - DNA, 204 bp, Homo sapiens
  misc_feature 1..204: note = U/M: U (0.22:0.92) in Blood NK cells
  misc_feature 1..204: note = source = chr16:81885018-81885221; Gene: PLCG2 (intron)
  source 1..204: mol_type = genomic DNA
cgaaatcttgtcacgtgtaggtgggtatgtctaccaccgtacatgcacaggatgtagatgacgtgctgtttttttactcttttcacatggcctttttgttgttgttgttgttgttgttgaggcgaagtctcactctgtcacccaggctggagtgcagtggcgtggtctcggctccctgcaacctccgcctcccgagttcaggcg

SEQ ID NO: 4115 - DNA, 311 bp, Homo sapiens
  misc_feature 1..311: note = U/M: U (0.21:0.91) in Blood NK cells
  misc_feature 1..311: note = source = chr16:4530035-4530345; Gene: HMOX2 (intron)
  source 1..311: mol_type = genomic DNA
cggcttttttattttttattttttatttttttgaaacagagtctggctctttcacccaggctggagtacagtgatctgatctgagctcactgcaatctctgcctctggggttcaagcagttctcctgcctcagccttccaagtaactgggactacaggcatgcaccaccatgcctggctaatttttgtacttttggtagagatggggtttcgccatgttggccacgctggtctccagctcctgacctcaagcgaaccaccctccttggcctcccaaagtgctagtattacaggcgtgagccacagcacccg

SEQ ID NO: 4116 - DNA, 357 bp, Homo sapiens
  misc_feature 1..357: note = U/M: U (0.22:0.92) in Blood NK cells
  misc_feature 1..357: note = source = chr2:420847-421203; Gene: FAM150B (Intergenic)
  source 1..357: mol_type = genomic DNA
cggcctgtggctggacgaggttcacgtgggtttgcctggaggcgttgctgcgcgcggcctgtggctggacgaggttcacgtgggtttgcctggaggcgttgctgcgcgcggcctgtggctggacgaggttcacgtgggtttgcctggaggcgttgctgcgcgcggcctgtggctagacgaggttcacgtgggtttgcctggaggcgttgctgcgcgcggcctgtggctggacgaggttcacgtgggtttacctggaggcgttgctgcgcgcggcctgtggctggacgaggttcacgtgggttttgctgtgaagaggtctgtccagaagcgggggtagagaaagggtgatttttatcg

SEQ ID NO: 4117 - DNA, 394 bp, Homo sapiens
  misc_feature 1..394: note = U/M: U (0.25:0.95) in Blood NK cells
  misc_feature 1..394: note = source = chr6:161680430-161680823; Gene: AGPAT4 (intron)
  source 1..394: mol_type = genomic DNA
cgcagcgcgtatgctttgagttgctggtgatcacggacttttgtagagccacccggtcttttgcagggcggtctggagttggttgagtctagagttagtgagttttcacacatgtgccacactaccagcacgtgtgaaaactcactaactctatactcaatgcaggaaaggctacagcatttgccaggcctggtcaaaatgagaatgtggggttccttcttcaaaaactatcaagaatttcaacaagggagagcagagccttaccccaactgtggggtcccaggtcaccgcacagttcacatgcccaggaggactctctggctgagtggcaccttgagcttaccaacagggcaactcctcaaatgtgaccaaggaagagagttaagaactgccg

SEQ ID NO: 4118 - DNA, 407 bp, Homo sapiens
  misc_feature 1..407: note = U/M: U (0.22:0.91) in Blood NK cells
  misc_feature 1..407: note = source = chr17:72468723-72469129; Gene: CD300A (intron)
  source 1..407: mol_type = genomic DNA
cgtcagcaagccttctgcgtttgtgactctttttttttttttttgagacagagtctcaccctgtcactcaggctggagtgcagtggtgccatctcagctcaacataacctccgcctccagggttgaagcgattcttgtgcctcagcctccccagtagctgcaattacaggcgcatgccaccacgcccagctaatttttgtatttttagtagagacagggtttcaccatgtcggccaggctagtctcgaactcctggcctcaagtgatccacccaccttagcctcccaaagtgctgggattacaggcataacccactgtacccagccagtattcttgtcaaaatggcttgacaaccctattactgcccgggtttgccccttggtgggaccagatcagtgtgtgggccg

SEQ ID NO: 4119 - DNA, 461 bp, Homo sapiens
  misc_feature 1..461: note = U/M: U (0.23:0.92) in Blood NK cells
  misc_feature 1..461: note = source = chr11:60891585-60892045; Gene: CD5 (intron)
  source 1..461: mol_type = genomic DNA
cggaggcttcttgatgggctgatggctgagcggtttctaccgctgaagcctcagagtgtagaaacatctcatggtatcctttctgtccctcgccccatctctagggtccccagcagccctcacctcctccagcagtattccccaacacagtagccagtggatgttaacaggcagcactcacaagaggcctccctgatcaacagatctggaaaaccatgagttaggcacagctaagcatagctatttcaggacttatcagaaccttaatgggcatttttgtattgcccatctccaaagcaaggatccattaagaagggctgtccaagttattttcatcatggaacaacttacagggccagtattaggacattttggtgcagccagcccaacaccatccctggtcttcatcctccctccttccagccacagtcagagacaccctaatggatggagacatggcg

SEQ ID NO: 4120 - DNA, 169 bp, Homo sapiens
  misc_feature 1..169: note = U/M: U (0.14:0.81) in Blood NK cells
  misc_feature 1..169: note = source = chr15:20817606-20817774; Gene: GOLGA8CP (Intergenic)
  source 1..169: mol_type = genomic DNA
cgctatttcccaggaggaaggacctgtggctcaagtgtcaatgaaagtgagcggagagggctgaagtcggggtaacagggccagcctgtgtgcagccccctggatgtgggcgagggagttgtctctgccgtgtgagaggaacagccacaggagggctttcaggagagcg

SEQ ID NO: 4121 - DNA, 260 bp, Homo sapiens
  misc_feature 1..260: note = U/M: U (0.23:0.9) in Blood NK cells
  misc_feature 1..260: note = source = chr3:9898214-9898473; Gene: RPUSD3 (Intergenic)
  source 1..260: mol_type = genomic DNA
cgtgtagacttcaacggctgtgggtgagaactgggcaagatgccgatgctgccatttgcccagcacatctggcccagaggcattcagcagaggacgcagatgtccaagctgctaccagggtcagtggaacaggattcaaaagtcaagagggcatctggcaaccctgtggcctccaaaggcctatcaaaagctataggtgagctgaagggcagcctagagactcctggagaccagagggcccctccaccccacctggcccg

SEQ ID NO: 4122 - DNA, 284 bp, Homo sapiens
  misc_feature 1..284: note = U/M: U (0.2:0.87) in Blood NK cells
  misc_feature 1..284: note = source = chr16:29121968-29122251; Gene: RRN3P2 (intron)
  source 1..284: mol_type = genomic DNA
cgaaggcagagctgtgtgctgtactcaagggacacccccacctcagcccctgagtagctgggactatcgaggctaatagcttaaagtttttaacagtaataccagtgtgtgaccagtgtgtcataggtgctgataatcaaaactgtctcaaccttaacacactaagtgacagaaccccgaccctcccaggcacagctgagaccagctgcccccatcacacagcaagcgtcaggtgatcatcacggcttcccacaggataagcaactcggccccagctcagggcg

SEQ ID NO: 4123 - DNA, 360 bp, Homo sapiens
  misc_feature 1..360: note = U/M: U (0.24:0.91) in Blood NK cells
  misc_feature 1..360: note = source = chr21:45430004-45430363; Gene: TRAPPC10 (Intergenic)
  source 1..360: mol_type = genomic DNA
cgcttcctggtaaacccatagagtcgtcccacacgtgtagtccagcctaggccaaggactttcagggaaccctacatcgacttcggctccccactcttgctaagcttcttcccctccagtgccctgccttgccggcctgctgctttagctgcccagaagtctggtctcttgcctctcacaccattacagtgcaccacactacactatgttcacacatttagcagctgtgttcacacccaaactatctcatatatacattttgttaaaaaaaacttcaggactctctaaacttatgatgccaagggtgaagttaagccctggagactgagtcagtagcaagtttgcaattctgcttcttcg

SEQ ID NO: 4124 - DNA, 444 bp, Homo sapiens
  misc_feature 1..444: note = U/M: U (0.21:0.88) in Blood NK cells
  misc_feature 1..444: note = source = chr3:15316508-15316951; Gene: SH3BP5 (intron)
  source 1..444: mol_type = genomic DNA
cgacaggagatttgggagggagcacagacccaaaccttatcaggaagtaattagggttagatgaggtcctgagggtgggaccctcatgaggagatcagtgcccttgtaagaaggggaagagagggagatctctccctctggtgcactgaggaagcaccatgctgtcaaaaggtctcctagggaagattctgcaaagcaggagtgtatcaggcagcaggccaggccaagacaggaagcaccaaagagtttacacacttatctaactgaggaaagtttaactgcgacattgcttctcagtgtcatcacaaaacacaggacttccaaagtcagaaaccaatcaatttcacaatcccggagagagctggctatctggttctcaccatcatatgaaagatgacacctagaaatctttggtacaaccgataacattttaccttcacatcg

SEQ ID NO: 4125 - DNA, 110 bp, Homo sapiens
  misc_feature 1..110: note = U/M: U (0.27:0.93) in Blood NK cells
  misc_feature 1..110: note = source = chr5:78839248-78839357; Gene: HOMER1 (Intergenic)
  source 1..110: mol_type = genomic DNA
cgcagtggcgtgatctcggttcaacgcaacctccacctcctgggttcaagcaattctccagcctcagcctaccaagtagctgggaccacagccacgtgccaccacacccg

SEQ ID NO: 4126 - DNA, 145 bp, Homo sapiens
  misc_feature 1..145: note = U/M: U (0.26:0.92) in Blood NK cells
  misc_feature 1..145: note = source = chr12:102444277-102444421; Gene: CCDC53 (intron)
  source 1..145: mol_type = genomic DNA
cgggtgtggtgacacatgcctatagtccaagcttctagggaggctgaggtgggaggatcacttgagcccaggaagttgaggttgccctgagctgtgatcacgccactgcactccagcctcggtgatacagcaagaccccgtctcg

SEQ ID NO: 4127 - DNA, 162 bp, Homo sapiens
  misc_feature 1..162: note = U/M: U (0.26:0.92) in Blood NK cells
  misc_feature 1..162: note = source = chr17:77977543-77977704; Gene: TBC1D16 (intron)
  source 1..162: mol_type = genomic DNA
cgctatccacatttatattcatcagggccgggcacgcggctcatgcctgtaatcccagcactttgggaggtccaggcaggagggtcacttgagcctaggagtttgagaccagcctaggcaacagagcaagagtctgtctctaaaaaataaaataaatgaacg

SEQ ID NO: 4128 - DNA, 402 bp, Homo sapiens
  misc_feature 1..402: note = U/M: U (0.28:0.94) in Blood NK cells
  misc_feature 1..402: note = source = chr16:11331723-11332124; Gene: SOCS1 (Intergenic)
  source 1..402: mol_type = genomic DNA
cgcagtggctgatgcctgtaatcccagcactttgggaggccaaggcaggtgcatcacttgaggtcaggagttccagaccatcctggccaacatagtgaaaccccatctctacaaaaaatacaaaaattagctggacgtggtggtacacgcctgtaatcccagctcctcgggaggctgaggcaggagaatcgcttgaacccggaaggcacaggttgcagtgagccgagatcgcgccacggcactccagcctgggtgacagagagactccatttcaaaactaactagctaaataaagcaaccacaaatcagggggtgtgaaagtgtagaagccctgcgttccacttgctctccctcaagctttccttgaccacagacatcagcaagtgacgggggccactgtcg

SEQ ID NO: 4129 - DNA, 417 bp, Homo sapiens
  misc_feature 1..417: note = U/M: U (0.21:0.87) in Blood NK cells
  misc_feature 1..417: note = source = chr5:159701203-159701619; Gene: CCNJL (intron)
  source 1..417: mol_type = genomic DNA
cgtttgtaatcccagcactttgggaggccgaggcaggcagatcatttgaggtcaggtgtttgagactagcctggccaacatggtgaaaccccgtttctactaaaaataaaaaaatgagctggatgtggtggtgtgtgcctgtaatcccagctactcaggaggctgaagcacgagaatcacctgaacccaggaggcagaggttgcaatgagccaagatcatgccactgcactccagcctaggtgacagagtgagacctcgtctcaaaaaaaaaaacaatctgtagtaaggagatgggccttttcacaggtaagctcagcacagcatgactgactcacagagctaagggaccctgctctgcaggaggaccagagccagagacgggggctttcccacccccctgaaagaaaggccatgcg

SEQ ID NO: 4130 - DNA, 94 bp, Homo sapiens
  misc_feature 1..94: note = U/M: U (0.19:0.84) in Blood NK cells
  misc_feature 1..94: note = source = chr12:295321-295414; Gene: SLC6A12 (Intergenic)
  source 1..94: mol_type = genomic DNA
cgcctctgaagaggggccacgcctgactctcaaagagggtgactctcgcgctctgggaagtggccacgacagcacccacaggccacagtgcacg

SEQ ID NO: 4131 - DNA, 180 bp, Homo sapiens
  misc_feature 1..180: note = U/M: U (0.27:0.92) in Blood NK cells
  misc_feature 1..180: note = source = chr19:19638077-19638256; Gene: NDUFA13 (exon)
  source 1..180: mol_type = genomic DNA
cgggctttcacaggcgcctacaaatcgaggacttcgaggctcgcatcgcgctgttgccactgttacaggcagaaaccgaccggaggtagcaccgcaggggccaaggttgggaggtcactggccggaaggccccaggctgcagggcctgacctgcatccccgaaggtggccagaatgcacg

SEQ ID NO: 4132 - DNA, 194 bp, Homo sapiens
  misc_feature 1..194: note = U/M: U (0.23:0.88) in Blood NK cells
  misc_feature 1..194: note = source = chr19:2551962-2552155; Gene: GNG7 (intron)
  source 1..194: mol_type = genomic DNA
cgtgagccacggcgcctgactgcttgtgtgttcacagctgccccccaacgcttgcattcccgcctgagctccgcctcctgtcccatcagcagtggcatcagattctcatagaagcgtgaacccaattgtgaactgtgcatgtaagggatcttggttgcacgctccttatgagaatctaatgcctaatggcctcg

SEQ ID NO: 4133 - DNA, 247 bp, Homo sapiens
  misc_feature 1..247: note = U/M: U (0.26:0.91) in Blood NK cells
  misc_feature 1..247: note = source = chr19:3799711-3799957; Gene: MATK (intron)
  source 1..247: mol_type = genomic DNA
cgcctgtggtcccagctacttgggaggctgaggcaggagaatcacttgaacccaggaggcagaggttgcagtgagctgagatcacaccattgcacttgagcctgggtgacagagcgagaccttgtctcaaagaaaaataagatgtgtcagccgggcgcggtggctcacgcctgtaatcccagcactttgggaggctgaggcgggaggatcacgaggtcaagagatcgagaccatcctggctgacacg

SEQ ID NO: 4134 - DNA, 249 bp, Homo sapiens
  misc_feature 1..249: note = U/M: U (0.3:0.95) in Blood NK cells
  misc_feature 1..249: note = source = chr8:123959972-123960220; Gene: ZHX2 (intron)
  source 1..249: mol_type = genomic DNA
cggttctcggggtgggatgttctggcagaggtgctgtgaggggagtgaggtcctgacagagccactggagtgtgaagggcggcgggagaggggagccggggccggagcctgccaggtcttggtggtgccattgctggagatgaactctggaggcgtgaaaagtatttgagaggtgagatcaagactctgaagatcatggcaggcggaggctggaggtggcggtttgggcatggtcaataaaaagaaacg

SEQ ID NO: 4135 - DNA, 367 bp, Homo sapiens
  misc_feature 1..367: note = U/M: U (0.22:0.87) in Blood NK cells
  misc_feature 1..367: note = source = chr17:45792622-45792988; Gene: TBX21 (Intergenic)
  source 1..367: mol_type = genomic DNA
cggtaatgaccccagctctacctaactggggagttgtctctgccagtgttctcagtctgtgtcctgccttccccatcagactgggcatttcccagggccaaggtctgaacctcccctgccaatctgggaccagctcagtggaccattctacatgggaaataggccacacaatagagcagaagagcttgcgatgagattctaaaaatggcatgaggtaaatccgggtccggtgtgagactgtggctgtgtggtggggcaaaggtagacccccgtccccgcaaccccagggactcccagctctgttagaggcctctgagtgtcaggcaatgggatcctggaagaaaaggatcaggaccgtggcagcgcg

SEQ ID NO: 4136 - DNA, 423 bp, Homo sapiens
  misc_feature 1..423: note = U/M: U (0.27:0.92) in Blood NK cells
  misc_feature 1..423: note = source = chr11:128670964-128671386; Gene: FLI1 (intron)
  source 1..423: mol_type = genomic DNA
cgacggccacatttttacacactgggcctttggctgccacctcaagtttgtcagttctcaggaggcagactccaggcaccacattcgagagggcctccatgcacgctcaggcttcttctcatagcaggcacaccctgcctgagccccactccatgcgctgacggagagtcggggcaggagctctcatgcagccaggtgttgggctctgcaagggggtttgtgtggggatgtgagccactgggtcagctccctggttcaggcttctgcattcaggttatagacatatctctgtgtgtatgttggggactagagatgaccacactgctaaattcttcttgagtgacttttagtaggaaaaaaatatgaaccctcacttcaacaatgacattgttaaaaacacataaaatgcacaccacttcaccg

SEQ ID NO: 4137 - DNA, 470 bp, Homo sapiens
  misc_feature 1..470: note = U/M: U (0.3:0.94) in Blood NK cells
  misc_feature 1..470: note = source = chr18:74830766-74831235; Gene: MBP (intron)
  source 1..470: mol_type = genomic DNA
cgcacaccacacacacactccacagacactacagacacacaccacacacacactccacagacacttcacacacaccagacacacaccacacacacagccacaacacaccacacacccatgtgcacacacactaccacacatggtgctccttcctgctgtcccagggcgctggaaggacacactcacactacccttggctgtgagacgctgcccggcagacacactttcccttgcaccctgtctgtgagggcagctgacaggggaaagcgaagaccacagttggtcccacaggtccctgaggtggagctggggcagccatggcttggagctgtgtagtggaggtgtcacttgccccagcccagaacaggcaggggcttggggacctggaagcctcgggagagggccggaggtgtcctggaagccaccaggaccctgtggggtgctgagaagagccactgtgtcactgcccg

SEQ ID NO: 4138 - DNA, 487 bp, Homo sapiens
  misc_feature 1..487: note = U/M: U (0.3:0.93) in Blood NK cells
  misc_feature 1..487: note = source = chr19:18805212-18805698; Gene: CRTC1 (intron)
  source 1..487: mol_type = genomic DNA
cgtctctttattttattagaacatgggcacaaccatttattccttttttgtggctgcttttgtgggacatcagcatagtcccatgcaacagagatcatgcggtccactgtggctttgacctcctgggctctagcgatcctcccacctcagccccctgagtagctgggaccacaggtgttagccaccatgcccggctaatttttttattttttgtagagacagggtcttctccctgtgttgtccaggctggtctcaaactcctgtgctcaagcaattgtcccatcttggcctcccagagtgttgggattacaggtgtgagtcactgcgccaggcgcatctggcccttcacagaagggattggctggcctctgggactcacacacagtttgaaacccactgacctcaagtgttaaggaagatcagctgcaggggctgggggtggttagcaaggagagtgaggttggcggcagttctcccactttcagcg

SEQ ID NO: 4139 - DNA, 405 bp, Homo sapiens
  misc_feature 1..405: note = U/M: U (0.34:0.96) in Blood NK cells
  misc_feature 1..405: note = source = chr2:105691355-105691759; Gene: MRPS9 (intron)
  source 1..405: mol_type = genomic DNA
cgggatgattcaagctcattacatttattgtgagctttatttctattattacattgtaagatataatgaaataattatacaactcaccgtaatgtagaatcagtgtgaggcctgggcttgtttttctgcaactacattgtcccatgtggtgttgatgggagacagtgacagatcgtcaggccttagattctcataaggagcatgcaacctagatccctcgcatgtgctgttcacaatagggttcacgctcctatgagaatctaatcgcactgttgatctgacaggatgtggcactcaggcggtaatgtgagcaatggggaatgtctataaatacagatgaagctatgctggtctgtggtctaggggctggggacccctactgtagaaccaagtgctcttactgcg

SEQ ID NO: 4140 - DNA, 186 bp, Homo sapiens
  misc_feature 1..186: note = U/M: U (0.31:0.92) in Blood NK cells
  misc_feature 1..186: note = source = chr18:54240473-54240658; Gene: TXNL1 (Intergenic)
  source 1..186: mol_type = genomic DNA
cgctcactgcgaaggtctgcagcttcacccctgaagccagcaagaccacgaacccaccgggaggaactaacaactccagacgcgccgccttaagagctgtaacactcaccgcgaaggtccgcagctttactcctgagccagcgagaccacgaacccaccagaaggaagaaactcagaacacatgcg

SEQ ID NO: 4141 - DNA, 395 bp, Homo sapiens
  misc_feature 1..395: note = U/M: U (0.21:0.82) in Blood NK cells
  misc_feature 1..395: note = source = chr15:23484990-23485384; Gene: GOLGA8EP (Intergenic)
  source 1..395: mol_type = genomic DNA
cgctatttcccaggaggaaggacctgtggctcaagtgtcaatgaaagtgagcggagagggctgaagtcggggtaacagggccagcctgtgtgcagccccctggatgtgggtgagggagttgtctctgccgtgtgagaggaacagccacaggagggctttcaggagagcgcatggtgtgaggtttttcagactcactgtggctactgtgggaagagtgttttaggtgcctcccctttaccccactgggtgagcagggtttctgccctaggcctagggggatggctgcacacacacgcacgacacttgacagaggagatgagcactggcttattagccacatagacagactcataccccgaggaggagaaccccaggccatgcagggggaatccgcg

SEQ ID NO: 4142 - DNA, 327 bp, Homo sapiens
  misc_feature 1..327: note = U/M: U (0.33:0.93) in Blood NK cells
  misc_feature 1..327: note = source = chr7:132942682-132943008; Gene: EXOC4 (intron)
  source 1..327: mol_type = genomic DNA
cgaacagctttgaggttcgtgacacagtttgtggcaggaaaggaaagtagtcactctgttctgagccgagtcttggaagttgggtgaggtgttaatgttctttccatcaccatctcttcttttcatttgagcccatcacataatggtgtttggtttctagctctctttgtaccctgggacatcttggccctactgatgctgtgttgtttgaaaattactactagaatacccagaaacagtgctttcaggaagtcctgggatgtctggcagcatatgtgaacgtaaggggcaacacaattaccgtactctggctcagaattagtgtcg

SEQ ID NO: 4143 - DNA, 94 bp, Homo sapiens
  misc_feature 1..94: note = U/M: U (0.31:0.89) in Blood NK cells
  misc_feature 1..94: note = source = chr21:34575182-34575275; Gene: IFNAR2 (Intergenic)
  source 1..94: mol_type = genomic DNA
cgcagtaccgggtcgcaatgtcacgatggtggaaatgcagggtactgtgggctttattggagggtcacctaacccacactggggtgtgagatcg

SEQ ID NO: 4144 - DNA, 208 bp, Homo sapiens
  misc_feature 1..208: note = U/M: U (0.35:0.93) in Blood NK cells
  misc_feature 1..208: note = source = chr18:74828467-74828674; Gene: MBP (intron)
  source 1..208: mol_type = genomic DNA
cgcttactatgggctaggtgctcatgcaacaggtcagaagtatagcttcttagtcctgtctactgtacaaggaggcaagtgctattattatgctccccactttacagacgttgaaactcatgaggtttagaaagcccgagtaatgcgtgaccagcctggccaacacggcgaaaccccgtctctgctaaaaatacaaaacttcaccgcg

SEQ ID NO: 4145 - DNA, 129 bp, Homo sapiens
  misc_feature 1..129: note = U/M: U (0.33:0.89) in Blood NK cells
  misc_feature 1..129: note = source = chr15:69088450-69088578; Gene: ANP32A (intron)
  source 1..129: mol_type = genomic DNA
cgttcttgtcacctaagctggcgtgcagtggcgtgatctcggctcactgcaacctctgccacccagattcaagcgattctcttgcctcagcttctcaagtagctggaattacaggcgcccaccaccacg

SEQ ID NO: 4146 - DNA, 496 bp, Homo sapiens
  misc_feature 1..496: note = U/M: U (0.35:0.9) in Blood NK cells
  misc_feature 1..496: note = source = chr7:104995335-104995830; Gene: SRPK2 (intron)
  source 1..496: mol_type = genomic DNA
cgccccatatttccccctccccaccagctctaggtaaccataaatctactttctgtctctatgagtttgcttattccagatatttgatataaattaaatcatattaataagtggtctttcatgactgacttctttgatccagtataatgttttcaagatatatccatgttgtagcatgtaacagtacttcattatttttactgctgaataatattccattgtaaggatatgctacattttgtttattcatcaactgacatctgagttgtttccatctggctgtgatcaacaatgttgctctttcagttttaagtaacagaaaatacagcagggcacagtggctaacgcctataatcctagcactttgggaggccacagcaggaggagtgctagagaccaggagttcaagactagcctgcgcaacacggcaagacctcatctctacgaaaaaaaaaaaatttttttttcattagcaagcaaggcacagtggctcacg

SEQ ID NO: 4147 - DNA, 419 bp, Homo sapiens
  misc_feature 1..419: note = U/M: U (0.09:0.92) in Blood NK cells
  misc_feature 1..419: note = source = chr3:25502772-25503190; Gene: RARB (intron)
  source 1..419: mol_type = genomic DNA
cgtctgccaggacaaatcatcagggtaccactatggggtcagcgcctgtgagggatgtaaggtgagtattcacacttctgtgcctgatgaactctcattctccatgtactttatggaggtgacctacccagttccaaaaatgggctggatgtgtaacatcacctcccataagtgtggtgaattcagttatattcagtggtttttattacttccttatatatctttggtttaaaattcagaaacttctgcaaatgactgatgagggtcaaaggttctaaggcccttaaattacccccacataataattccttttagataataagaactggctaggccaggtgtgatggctcacgcctgtaatcccagcactttgggaggccaaggtgcgcaatcacttgaggttaggagtttgaggcccg

SEQ ID NO: 4148 - DNA, 453 bp, Homo sapiens
  misc_feature 1..453: note = U/M: U (0.33:0.9) in Blood NK cells
  misc_feature 1..453: note = source = chr1:3278151-3278603; Gene: PRDM16 (intron)
  source 1..453: mol_type = genomic DNA
cggcccaactgtgagctcctcggatcgggagcagatggggaatcggaaggatggtgttgtggggcttttggagaagaccccacatgggctggggtgaagagtggaacagaaggctatgtgaccaggtggtgagaagtgactgtgacccgggagcgagggcaggtggtgagaagtgacgcggtctgggagggcaggaggtgagaagtgactgcggtccaggagggcaggtggtgagaagtgactgtggcccaggagggcaggtggtgagaagtgactgtggcccaggagggagggcaggtggtgagaagtgactgcggtccaggagggcaggtggtgagaagtgaccgcggcccaggagggcaggtggtgagaagtgaccgtggcccaggagggcaggtggtgagaagtgaccgtggcccaggagggcaggtggtgagaagtgactgtggcccg

SEQ ID NO: 4149 - DNA, 124 bp, Homo sapiens
  misc_feature 1..124: note = U/M: U (0.11:0.93) in Blood NK cells
  misc_feature 1..124: note = source = chr20:5977891-5978014; Gene: CRLS1 (Intergenic)
  source 1..124: mol_type = genomic DNA
cgcgatcttggttcaccgcaacctccgcctcctgggttcaagcgtttctcctgcctcagcctcccaagtagctgggattataggcatgtgccaccatggctaattttgtatttttagtagagac

SEQ ID NO: 4150 - DNA, 72 bp, Homo sapiens
  misc_feature 1..72: note = U/M: U (0.06:0.89) in Blood NK cells
  misc_feature 1..72: note = source = chr14:25147832-25147903; Gene: GZMB (Intergenic)
  source 1..72: mol_type = genomic DNA
cgcttgatcctcccagggtggtcggggtgagctgtgatcacgccactgcactccagcccgggtgtcacagcg

SEQ ID NO: 4151 - DNA, 108 bp, Homo sapiens
  misc_feature 1..108: note = U/M: U (0.03:0.86) in Blood NK cells
  misc_feature 1..108: note = source = chr6:15505860-15505967; Gene: JARID2 (intron)
  source 1..108: mol_type = genomic DNA
cgccattttcatcgtcttaggacctaggtctctgcttacgtgcaggggctgcctacactgtgtaccctgggtgcggctgttgaatgccacgcagtggcctgacacccg

SEQ ID NO: 4152 - DNA, 128 bp, Homo sapiens
  misc_feature 1..128: note = U/M: U (0.02:0.83) in Blood NK cells
  misc_feature 1..128: note = source = chr6:15505986-15506113; Gene: JARID2 (intron)
  source 1..128: mol_type = genomic DNA
cgtgctgcagccgccactgcctcacccaccaccagccacgatgtcagctgaaccgtggtctaggacacgtgtggcttccgcagctgcttccagagcacgcgttgcgtttgtggtagagatgtcaggcg

SEQ ID NO: 4153 - DNA, 200 bp, Homo sapiens
  misc_feature 1..200: note = U/M: U (0.11:0.9) in Blood NK cells
  misc_feature 1..200: note = source = chr19:13997072-13997271; Gene: C19orf57 (intron)
  source 1..200: mol_type = genomic DNA
cgcccgtcctttccccttggaaagagaaaggccacagccaaccctggtgtccgctcctaggcccgggcctcccacaggctgatctgggcagtgggggcaccactgtgccatgatctctggccctgacaccactgcagtctcctgcatgcccctcactgtctttacgggtacagagaaaacacaaagcgggggcaactgcg

SEQ ID NO: 4154 - DNA, 484 bp, Homo sapiens
  misc_feature 1..484: note = U/M: U (0.1:0.87) in Blood NK cells
  misc_feature 1..484: note = source = chr14:56677405-56677888; Gene: PELI2 (intron)
  source 1..484: mol_type = genomic DNA
cgaaaaggctaaggttccatttggccaccacatgtgttgaagtttcccacaataatggcatgatttgaagtgctaggcaggcagtgcttgtggtcagccttcagtctgggtccctgtggtcggtaagttgagggggatgggactcagctatttctgtctgacctatggctgaacatcctcagagttttcccttgacataaatgaaaagagaatcctcttttctctaaataactaaaaataacttttgaataacttttgctgttccttttggtggtaggtattgctcccacccttggtcttaagtaactaccaagagcatttgggtgcagctcacacattctgggcatattgtatatgcaagatttctaagccatcccaaagctgttttagcccaccggtggtactttgtcttgctacgctgtcaactgagaagtgcccataaggacagataaaatctcatctgtggtcatttgctccatcaccg

SEQ ID NO: 4155 - DNA, 69 bp, Homo sapiens
  misc_feature 1..69: note = U/M: U (0.13:0.88) in Blood NK cells
  misc_feature 1..69: note = source = chr14:35210909-35210977; Gene: CFL2 (Intergenic)
  source 1..69: mol_type = genomic DNA
cgttgtgattctcctgccttggcctccgaaagtgctggggttacaggcgtgagccaccgtgcctggccg

SEQ ID NO: 4156 - DNA, 280 bp, Homo sapiens
  misc_feature 1..280: note = U/M: U (0.18:0.91) in Blood NK cells
  misc_feature 1..280: note = source = chr14:25101099-25101378; Gene: GZMB (exon)
  source 1..280: mol_type = genomic DNA
cgcacaactcaatggtactgtcgtaataatggcgtaagtcagattcgcactttcgatcttcctgcactgtcatcttcacctcttgtagtgtgtgtgagtgttttcccaggggggccgtctgcccccagccggccacactgcatgtctgccctggcttcacctgggccttgttgctaggtagcctgaggggctgcacagctctggtccgcttggcctttctctccagctggtggggaagaggcaagaaagtccaggtcagccaacgaacttctgggccccg

SEQ ID NO: 4157 - DNA, 279 bp, Homo sapiens
  misc_feature 1..279: note = U/M: U (0.2:0.88) in Blood NK cells
  misc_feature 1..279: note = source = chr9:27676350-27676628; Gene: C9orf72 (Intergenic)
  source 1..279: mol_type = genomic DNA
cgagctagcagcggaacccacgagggtccccttccacgctgtggaaactttgttctttcactctccacgataaatcttgctgctgctcactctttgggtctgcactacctttatgagctctgtaacactcactgtgaaggtctgcggcttcactgcttaagtcagcgagaccacgaacccactgggagaaacaaacaactccagaggcgccacctttgagagctgtaacactcactgcaaaggtctgtggcttcactcctgaggtcaagcgagaccacg

SEQ ID NO: 4158 - DNA, 380 bp, Homo sapiens
  misc_feature 1..380: note = U/M: U (0.25:0.93) in Blood NK cells
  misc_feature 1..380: note = source = chr20:25327048-25327427; Gene: ABHD12 (intron)
  source 1..380: mol_type = genomic DNA
cgaaatctcataaaatgcacaacatcaagagtgaaccctacttaatgcaaactatggatttggggtgatgatgtgtcaatgcaggttcactgattctagcaaatatgccattgcagtgcaggatgtggatagtgtggcataccatgtgtggtaggggcggggcaggagtgtatgggaaattctgtactttccactcaattctgctgcagacctaaaactgctctaaaaaataaagtttatttatttattttgagacggagccttgctctgtcgcccaggctagagtgcagtggcgtgatctcggctcactgtaagctctgcctcctgggttcacaccattctcctgccctcagcctcccgagcagctgggactacaggcg

SEQ ID NO: 4159 - DNA, 290 bp, Homo sapiens
  misc_feature 1..290: note = U/M: U (0.26:0.93) in Blood NK cells
  misc_feature 1..290: note = source = chr2:45926949-45927238; Gene: PRKCE (intron)
  source 1..290: mol_type = genomic DNA
cgggaggtgtgattctcttggaatcccggaaggcaccagtgtggatgccgccgcttgtgtctgatgagtggagaaatgggtgctcgttttgcacactgatgagatcaaggaagtgtggggagctgaggggtgcagggggtagcaggtggggtgatagctctctggttttcctgtgatttctaggtgtaaattgggctgttgaggggaggcagtggccaggcccagcccaccagtggaaggcagaaggcacgagccacaagatgaacgggggcagttaactaaccaggccg

SEQ ID NO: 4160 - DNA, 236 bp, Homo sapiens
  misc_feature 1..236: note = U/M: U (0.28:0.94) in Blood NK cells
  misc_feature 1..236: note = source = chr20:43612904-43613139; Gene: STK4 (intron)
  source 1..236: mol_type = genomic DNA
cggctcagtgcaagctccgcctcccaggttcatgccattttcctgccttagcctccctggtagctgtactccctagtacaggcgcccgccaccacgcctggctaatttgttatgtatttttagtagagacgtggtttcaccgtgttagccaggatggtctcgatttcctgacctcgcaatctgcctgcctcggcctcccaaagtgctgggattacaggcgtgagccaccgttcccg

SEQ ID NO: 4161 - DNA, 251 bp, Homo sapiens
  misc_feature 1..251: note = U/M: U (0.25:0.88) in Blood NK cells
  misc_feature 1..251: note = source = chr9:113684077-113684327; Gene: LPAR1 (intron)
  source 1..251: mol_type = genomic DNA
cgccacagacagaagctaatggccagccacatgaaaggcatgccattagggcaggttatgatggacgtaatgctccctggagttgtgaactgaagaagtcctgtagaatttagaacacatcaattgacctacagccagctaccaaaccacatcagagcctacggggctgcatctaggtctgcaaaggtccagaagttacagagactgctgctgcttgatggtgagtatgcagagagcggacctgagcagcg

SEQ ID NO: 4162 - DNA, 116 bp, Homo sapiens
  misc_feature 1..116: note = U/M: U (0.29:0.91) in Blood NK cells
  misc_feature 1..116: note = source = chr14:25096504-25096619; Gene: GZMB (Intergenic)
  source 1..116: mol_type = genomic DNA
cgcctatagtcccagctactcaggacgccaaggcaggagaatggtgtgaacccggaaggcggagcttgcggtgagtcgagattgcgccactgcactccagcctgggcgacagagcg

SEQ ID NO: 4163 - DNA, 188 bp, Homo sapiens
  misc_feature 1..188: note = U/M: M (0.68:0.16) in Blood NK cells
  misc_feature 1..188: note = source = chr3:126193438-126193625; Gene: ZXDC (intron)
  source 1..188: mol_type = genomic DNA
cggagtgtgcaccccgtaaacaaatgacgagactgaggaaaataaagacctgacacatagctccgtgccactctgtgaagatgcgtgccgctttcatcaagcacaagcaggttaaggatatctgttgccgccacctttgggaagcgcagctgtggtgatctgcgctacctgccatcggaatccctgcg

SEQ ID NO: 4164 - DNA, 470 bp, Homo sapiens; identical to SEQ ID NO: 4020
  misc_feature 1..470: note = U/M: M (0.64:0.13) in Blood NK cells
  misc_feature 1..470: note = source = chr4:186950939-186951408; Gene: TLR3 (Intergenic)
  source 1..470: mol_type = genomic DNA

SEQ ID NO: 4165 - DNA, 240 bp, Homo sapiens
  misc_feature 1..240: note = U/M: M (0.59:0.09) in Blood NK cells
  misc_feature 1..240: note = source = chr12:50497589-50497828; Gene: GPD1 (exon)
  source 1..240: mol_type = genomic DNA
cgatgagcccaggagaaaaagctgggcctagtctctgccccattcctgttccacacctgtctgtacccctgtctctcctttccctggctctgccagactctctatctccctgggcgccagcctccccacccacccctggagggcggggcttggctgcacccacgtgtggtggagttaaatgctcctagccggcagaggagctagggagtgtggcactgagccggctcaggcagagacgcg

SEQ ID NO: 4166 - DNA, 249 bp, Homo sapiens
  misc_feature 1..249: note = U/M: M (0.64:0.14) in Blood NK cells
  misc_feature 1..249: note = source = chr19:1860062-1860310; Gene: KLF16 (intron)
  source 1..249: mol_type = genomic DNA
cggcaaaccctctggaggtgcaggctgacggtgtgccgggcactggcatgccgggggcggggggggggccctccggggatgcagggggtttggagagcagggagccgacagccagcctctcctcccgcccccgccccaactcgctggctcgctcactctccgtaaccatagcaacggcgtcaacatcacccacagcttccaaagtccttccccgccccacgcaggggagagagagccgagagctggccg

SEQ ID NO: 4167 - DNA, 375 bp, Homo sapiens
  misc_feature 1..375: note = U/M: M (0.55:0.06) in Blood NK cells
  misc_feature 1..375: note = source = chr9:130741664-130742038; Gene: FAM102A (intron)
  source 1..375: mol_type = genomic DNA
cgaacaacacaaaaccaaactcaacggagcctctttcagagagggcagcagcctcctcgacaagggtatttgcaatgcaaagcagcccagctccagccagaggaggatagtcactcggagggggctgggtaggccaaaatccagccacctccctccagccagactagggagtgcctgcgatcgggccttcccaggcgcctgggggtgccggggaacccgtggctggcctggactcttgaatcatatgacagccccagtggccagttcgggtgcaaggtggcctgaacacccctcccctgcacaatcgctcagggtacaaatccctgataggctgtacatgcaagtctgcagaatggacctactgcaggcggcacg

SEQ ID NO: 4168 - DNA, 367 bp, Homo sapiens
  misc_feature 1..367: note = U/M: M (0.62:0.14) in Blood NK cells
  misc_feature 1..367: note = source = chr1:93249291-93249657; Gene: EVI5 (intron)
  source 1..367: mol_type = genomic DNA
cgcaggaggtggaggttgcagtgaaccaacgtcgccactgcactccagtctggcgacagagcgagactccctgtcaaaaaaaaaaaaaaaaaagaaaagaaaagaaaaagaaaaagagcttctggtacactggtgaaattctactaacaaaattttaaaacaaaaaaagttacttacatcagctcagaacaaagattaaaaactaccagcagatcacttttctttaacttcagtaagcactggaattcattctttcggcaaagaaaggagtttattattcaacactgtaacccaaagaaaagataccacttcaagaaaatacttcttttcgaaagcagctctaccagcaatagataggaggaaagcg

SEQ ID NO: 4169 - DNA, 147 bp, Homo sapiens
  misc_feature 1..147: note = U/M: M (0.59:0.12) in Blood NK cells
  misc_feature 1..147: note = source = chr19:49371794-49371940; Gene: PLEKHA4,PLEKHA4 (exon,promoter-TSS)
  source 1..147: mol_type = genomic DNA
cgtttcctcccttttctctttccgatttcccttctcactttctcccttcctccctctcccagtttctctttcctctctgctggtctttccctgcctctgccagccgcccacgctgctgttctcccctcccaatcccggctgtccccg

SEQ ID NO: 4170 - DNA, 90 bp, Homo sapiens
  misc_feature 1..90: note = U/M: M (0.7:0.24) in Blood NK cells
  misc_feature 1..90: note = source = chr3:49396303-49396392; Gene: GPX1 (promoter-TSS)
  source 1..90: mol_type = genomic DNA
cgccgaggccaaggaaacgctgccggagtcctccctccctggcctcctcaggctgcattcaccctacccccaaatctgaaccagaatgcg

SEQ ID NO: 4171 - DNA, 278 bp, Homo sapiens; identical to SEQ ID NO: 3875
  misc_feature 1..278: note = U/M: M (0.59:0.13) in Blood NK cells
  misc_feature 1..278: note = source = chr11:72392383-72392660; Gene: PDE2A (Intergenic)
  source 1..278: mol_type = genomic DNA

SEQ ID NO: 4172 - DNA, 173 bp, Homo sapiens
  misc_feature 1..173: note = U/M: M (0.6:0.15) in Blood NK cells
  misc_feature 1..173: note = source = chr16:790134-790306; Gene: NARFL (intron)
  source 1..173: mol_type = genomic DNA
cgggaaacaagtggatttctctctcttctccttgagaaccctggcagcccagaaagccgcctcccagctcatccctgccggaagcgctcccagcagcccgcctctcgccctgctcagctctggccccgcggggctgttggacatggacaggcaggtgcacccagaaaagggcg

SEQ ID NO: 4173 - DNA, 278 bp, Homo sapiens
  misc_feature 1..278: note = U/M: M (0.63:0.18) in Blood NK cells
  misc_feature 1..278: note = source = chr12:50017659-50017936; Gene: PRPF40B (exon)
  source 1..278: mol_type = genomic DNA
cgcggagaaagatcgggaaagaagagagagggcggagatgaggggactgaggggaccaggggacaggtggggaccagtttcccctcctgggatatttggtgtgcgacatgcccttcccccagccccagcgcccgttccctttggaagcctgggtgctcctcagaccacttggggactccctgcttcaccttcctgcatttgcaagagcttgtctcctgaggtggagagggggcctctgaagaaaggggctcccagcccaggccatcaacaaactaacg

SEQ ID NO: 4174 - DNA, 386 bp, Homo sapiens
  misc_feature 1..386: note = U/M: M (0.53:0.08) in Blood NK cells
  misc_feature 1..386: note = source = chr2:88925612-88925997; Gene: EIF2AK3 (intron)
  source 1..386: mol_type = genomic DNA
cgggtgtgataagattggctgtcccccaaatttactgttaacatgccttacattgtgtctagactttgaaaagtgctttaaaacaatcaccttgaagtaacattttttgaatgctgagaaactcaaagaaaaccctatattaaatgtttatacagtaaaccccttattcaagaacctaaccatggctcttaggttcaagaaccaatattcaagaatctgactatagctcttaaactttagcgtgcaagaattatccggcgtgcttgttaaacacgcagatgccaggctcttacccagggaatgtctcattcagtaaaactggggtagggcctagaaaactgtagatttcaccagcaaccccaggtgattcggatgcaggtgttccg

SEQ ID NO: 4175 - DNA, 160 bp, Homo sapiens
  misc_feature 1..160: note = U/M: M (0.53:0.09) in Blood NK cells
  misc_feature 1..160: note = source = chr7:100304423-100304582; Gene: POP7 (exon)
  source 1..160: mol_type = genomic DNA
cgcgtccctttcccacgccagggcacacagcatggcagaaaaccgagagccccgcggtgctgtggaggctgaactggatccagtggaatacacccttaggaaaaggcttcccagccgcctgccccggagacccaatgacatttatgtcaacatgaagacg

SEQ ID NO: 4176 - DNA, 304 bp, Homo sapiens
  misc_feature 1..304: note = U/M: M (0.67:0.23) in Blood NK cells
  misc_feature 1..304: note = source = chr16:11034436-11034739; Gene: DEXI (intron)
  source 1..304: mol_type = genomic DNA
cgttcctgcctgccctgtgaccctcaccagacctggcagctgcctgacagcttgtctggctcacgtgttctctctaattgagtctagctgcctctcttccttgtgactatgaccaagtcttactccttcctggaccttcatttccctacctctcacatacacagtgggctggatgctggatgcaaagctccctcgtcacagccccaaagacaggacttgaccatctcagtgcaatgaccctgtggtgccttctcccgaggacctaagagccccctgagcgcttgcaaacactgcagacaaagcg

SEQ ID NO: 4177 - DNA, 58 bp, Homo sapiens
  misc_feature 1..58: note = U/M: M (0.59:0.16) in Blood NK cells
  misc_feature 1..58: note = source = chr17:20811492-20811549; Gene: CCDC144NL (Intergenic)
  source 1..58: mol_type = genomic DNA
cgggaggctgagacacgagaatcgcttgaacccaggagacggaggttgcagtgaaccg

SEQ ID NO: 4178 - DNA, 255 bp, Homo sapiens
  misc_feature 1..255: note = U/M: M (0.6:0.18) in Blood NK cells
  misc_feature 1..255: note = source = chr3:10053303-10053557; Gene: LOC401052 (promoter-TSS)
  source 1..255: mol_type = genomic DNA
cggggtggggctaagccagagcccagaggttagcccctggggcacggatcccccaggtcactcacttcccacgggctgcagtgaaggaggctctgaggggaggatggccggtttttcccctgcaagggaaggcattcctgctctggggactgcctccctctccctcttctgccagccaccgcagaaacttggccaagctgaccactctgtcagtgatctctgccagggaggctgaaaaacatccagccccacccg

SEQ ID NO: 4179 - DNA, 230 bp, Homo sapiens; identical to SEQ ID NO: 3731
  misc_feature 1..230: note = U/M: M (0.56:0.15) in Blood NK cells
  misc_feature 1..230: note = source = chr7:101448278-101448507; Gene: CUX1 (Intergenic)
  source 1..230: mol_type = genomic DNA

SEQ ID NO: 4180 - DNA, 377 bp, Homo sapiens
  misc_feature 1..377: note = U/M: M (0.53:0.12) in Blood NK cells
  misc_feature 1..377: note = source = chr17:7740472-7740848; Gene: KDM6B (Intergenic)
  source 1..377: mol_type = genomic DNA
cgcccccatagaaaaagctacctagccgtcattttactttcccacctgctgcatggccaagtgtcctattgcccccttccccagattgatttgaagtgggagtggttgaaagacggaagagttgtgtgtagtatgggggggggttcactacacaccagcttatccctgaaatccccataatggcacacccccatctgcaaacaatgaaaggaaaagggtcaagaaacagtattaggctgaaaagtcagggtctttattgtgtgtatgcgggtgaatcggtttgtagcctctcacttggtggagggggactcagttgattgctatggttgttcttctctattaagtcccagggttggtgatggtattggaatgaatcg

SEQ ID NO: 4181 - DNA, 70 bp, Homo sapiens
  misc_feature 1..70: note = U/M: M (0.52:0.12) in Blood NK cells
  misc_feature 1..70: note = source = chr1:45451434-45451503; Gene: EIF2B3 (intron)
  source 1..70: mol_type = genomic DNA
cgactatggctgacgggaatcatggcaacgagtctcgctgcctcccaagctttggagagggtgttcaccg

SEQ ID NO: 4182 - DNA, 332 bp, Homo sapiens
  misc_feature 1..332: note = U/M: M (0.56:0.16) in Blood NK cells
  misc_feature 1..332: note = source = chr7:156744110-156744441; Gene: NOM1 (intron)
  source 1..332: mol_type = genomic DNA
cgtagcaatcaaggcattcatgggctgtcatcttgcatattttatctcagcgttcctttgcatgtagctcatggttggaggcagctgtgtggaattgcctgcatttccttctccccacatcgcactagttctatgtatgtaaatattcagcttctatgtatacaaatattctttattgaaccaggtttaaactacctagcagtgaggatcgtgccttgcaaatgtttgtgtccttaatgatttgcaaacaccaccaccccccttgataatttaggaaatagcagtgagttggttttgattttttttttttgagactgagtcttgcactgtcg

SEQ ID NO: 4183 - DNA, 117 bp, Homo sapiens
  misc_feature 1..117: note = U/M: M (0.59:0.2) in Blood NK cells
  misc_feature 1..117: note = source = chr11:73358873-73358989; Gene: PLEKHB1 (promoter-TSS)
  source 1..117: mol_type = genomic DNA
cggcaagaggaacagacaaggctgggccttccagcccaggtgtgccagcccttgttacgcagcaacaggtgtgagcaggtgggggaggggcggaggcacccgctggcaagtgagtcg

SEQ ID NO: 4184 - DNA, 222 bp, Homo sapiens
  misc_feature 1..222: note = U/M: M (0.6:0.25) in Blood NK cells
  misc_feature 1..222: note = source = chrX:47508721-47508942; Gene: ELK1 (intron)
  source 1..222: mol_type = genomic DNA
cgtacagtgctccatcacaaggaaaagaggatcagcacgttctcttctgggaagggaaaaaaaaagagaaggaaattgaaagtacacggccgatcttcccccaattacaaagcactggactcacgggagggtatgcgggggactgtgcaagcatacaggggtgtgggggaggaaggccaatgaacagatccactgcaaagggaggggtgatgaggctcatcg

SEQ ID NO: 4185 - DNA, 123 bp, Homo sapiens
  misc_feature 1..123: note = U/M: M (0.68:0.17) in Blood NK cells
  misc_feature 1..123: note = source = chr14:35590322-35590444; Gene: PPP2R3C (intron)
  source 1..123: mol_type = genomic DNA
cgtctgtaattccagcactttgggaggccgaggtgggcgaatcacaaggtcaggagtttgagaccagcctggccaatatggcgaaaccccgtctctactagaaatacaaaaattaaccggccg

SEQ ID NO: 4186 - DNA, 246 bp, Homo sapiens; identical to SEQ ID NO: 3886
  misc_feature 1..246: note = U/M: M (0.62:0.11) in Blood NK cells
  misc_feature 1..246: note = source = chr22:39919480-39919725; Gene: ATF4 (TTS)
  source 1..246: mol_type = genomic DNA

SEQ ID NO: 4187 - DNA, 99 bp, Homo sapiens
  misc_feature 1..99: note = U/M: M (0.59:0.21) in Blood NK cells
  misc_feature 1..99: note = source = chr20:62340144-62340242; Gene: ARFRP1 (promoter-TSS)
  source 1..99: mol_type = genomic DNA
cgggccgccaggaagatgctgagtaccaggctttccgggaggccatcactgaggcggtggaggcaccagcagcggcccgtgggtccggatcagagaccg

SEQ ID NO: 4188 - DNA, 249 bp, Homo sapiens
  misc_feature 1..249: note = U/M: U (0.02:0.91) in Blood T cells
  misc_feature 1..249: note = source = chr5:118635509-118635757; Gene: TNFAIP8 (intron)
  source 1..249: mol_type = genomic DNA
cgggcgcccttcccccagcctcgctgctgccttgcagtttgatctcagactgctgtgctagcaatcagcaagactccgtgggcgtaggaccctctgagtcaggtgcgggttataatctcttggtgcaccgttttttaggcccgtcggaaaagcgcagtattagcgtgggagtgacccgattttccaggtgccgtctgtcacccctttctttgcctaggaaggggaactccctgaccccttgtgcttccc

SEQ ID NO: 4189 - DNA, 294 bp, Homo sapiens
  misc_feature 1..294: note = U/M: U (0.06:0.92) in Blood T cells
  misc_feature 1..294: note = source = chr7:3501574-3501867; Gene: SDK1 (intron)
  source 1..294: mol_type = genomic DNA
cggcatttaagcatgttcaagactcttctgtattaaaaaagaaccacgacctcccctaacccttccctaatctaactactgcaccctacctcttctctttgcatttacagcaaagctcccggaaagagttgtctgctcgctgcctcagcccacacctttttcatgtggtttccgcttctgtcattctatcagaattgctctgcagaggctgatcagtgacttcagtgaaaccaggcctaaaggatgctcttcagttcacatctcactcctcagcagcattcttcaccgcttgcc

SEQ ID NO: 4190 - DNA, 291 bp, Homo sapiens
  misc_feature 1..291: note = U/M: U (0.03:0.88) in Blood T cells
  misc_feature 1..291: note = source = chr1:32718447-32718737; Gene: LCK (intron)
  source 1..291: mol_type = genomic DNA
cgtaggacatgaagccaaggtcactatccctggattctgttccttgggtaccacgagggcagagacctcagagcaagaccaaaggccagagagcccacaggtgtggtgtggagcagagaatgtgcatttcagagacaggccgacccagtcacaattccgctggaccatttccttgagcaagtggcttcatctctctctctgagcttcagtttacttatctgtaaagaggcaataatcaagctgggcacggtggctcacacctgtaatcccagcactttgggaggctgaggc

SEQ ID NO: 4191 - DNA, 386 bp, Homo sapiens
  misc_feature 1..386: note = U/M: U (0.05:0.89) in Blood T cells
  misc_feature 1..386: note = source = chr11:118176757-118177142; Gene: CD3E (intron)
  source 1..386: mol_type = genomic DNA
cgcatgtctagtacgctctcaagtttattaatctgctgctggtcctaggaacatattgagtagcgaggggcaggatgtgactcctgtaaggagtggccaggcattttcttagagacctgtgttataaagtatgcttttccttaaaaaaaagaagaaggaggaggaggagaagggccaggtgcagtggcttacgcctgtaagcccagcattttgggggaccaaagtgggaagatcacttgagctcaggagttcaagaccagcctgggcaaagtagtgaaaccccatttctacaaaaaattaaaaattagccaggcaaggtggcacacacctatagttccagctacttgggaggctgaggtggaaggatcacttgagcccaggaggtc

SEQ ID NO: 4192 - DNA, 435 bp, Homo sapiens
  misc_feature 1..435: note = U/M: U (0.09:0.92) in Blood T cells
  misc_feature 1..435: note = source = chr16:68244845-68245279; Gene: NFATC3 (intron)
  source 1..435: mol_type = genomic DNA
cggctaatttttttgtatttttagtagagatggggtttcaccatattggccaggctggtctcgaactcctgacctcgtgatccacccaccttagcctcccaggtgtaagccactgtgcctagccttttcttttcttatagtatctttttctggctttgtgtcagagtaaattctggcctcataatgagttaggaagtgtttccttttctttaatctttttaagagtttcaaaagaatcgaaactcttttttctttgttttgttttgagatggagtctcgctctgtcgccaggctggagtgcagtggcgcgatctcagctcactgcaacctccacctcccgggttcacgccattctcctgcctcagcctctcgagtagctgggattacaggcactcaccactatgcccagctaatttttgtatttttagtagagac

SEQ ID NO: 4193 - DNA, 128 bp, Homo sapiens
  misc_feature 1..128: note = U/M: U (0.03:0.86) in Blood T cells
  misc_feature 1..128: note = source = chr11:60739310-60739437; Gene: CD6 (exon)
  source 1..128: mol_type = genomic DNA
cgcgtagcagccagagacagctccagacatgtggctcttcttcgggatcactggattgctgacggcagccctctcaggtaggcccccttccctcatctcctgccactggtgctggaggagccgggtcc

SEQ ID NO: 4194 - DNA, 76 bp, Homo sapiens
  misc_feature 1..76: note = U/M: U (0.09:0.9) in Blood T cells
  misc_feature 1..76: note = source = chr19:6362839-6362914; Gene: CLPP (intron)
  source 1..76: mol_type = genomic DNA
cggtaatcccaacactttgggaggctgaggcgggcggattgctcgagctcaggagttcaagaccagcctgggtaac

SEQ ID NO: 4195 - DNA, 484 bp, Homo sapiens
  misc_feature 1..484: note = U/M: U (0.06:0.87) in Blood T cells
  misc_feature 1..484: note = source = chr11:118213527-118214010; Gene: CD3D (promoter-TSS)
  source 1..484: mol_type = genomic DNA
cggtgtaaattgctctatctctgagcagggagctggcagagaatatggaaaaggtggcctgaactttagcgtccctattgacaatgcaaccacatttacacacaacctaaacactgccacatctcgaagccccttgagagaagccgtcggccccatagcgcaagccgtagcagctagatttctcatggaggctgatctttctcaggacccttcactaggcagccagggacaccagatctagcagcttcttgtcagtgggaggttgggctttagagaccccagccagagatttgaatcctgggtccaatactgcctacctgtggggcctgggccagccataaaatttttcagagtcttattccattagtaccattattaggattcaaacaagatatttgcatggtgcctcacgcatcatatgtgctcattaaggggtagttattaataataatataattgactgacaggcaatattgagcctccc

SEQ ID NO: 4196 - DNA, 136 bp, Homo sapiens
  misc_feature 1..136: note = U/M: U (0.08:0.86) in Blood T cells
  misc_feature 1..136: note = source = chr1:12237782-12237917; Gene: TNFRSF1B (intron)
  source 1..136: mol_type = genomic DNA
cggagtttgcagtgaaccgagatcgcgccattgcactccagcctgggtgacagggtgagattctgtctccaaaaaaaaaaaaaaaagaagagctgacatttagcgggtgcttcttgggtgcaatgcgcaagagacc

SEQ ID NO: 4197 - DNA, 346 bp, Homo sapiens
  misc_feature 1..346: note = U/M: U (0.15:0.92) in Blood T cells
  misc_feature 1..346: note = source = chr10:129131921-129132266; Gene: DOCK1 (intron)
  source 1..346: mol_type = genomic DNA
cgggacctcctccagaaccttcatgctgcagagaggcttggaccttggcaggtgcctcctgcaggcagagcctcgccggccacaccagcctgtctcccaaagacgcgcagaactgcagaattcacagggcttgtctttctcttttaccaaatgcgactttacattttgtaaggtgtcagtggagatcatatcagtgttcagataactttgtatcatgtggtgatgcctcttccttacctttaatctcaaaaataaaaaaacaaaacctgtaggttcaaagttccagggagcttagaggcactggggttgagtgctttcatttgtcagtggagaagatgagggtctc

SEQ ID NO: 4198 - DNA, 103 bp, Homo sapiens
  misc_feature 1..103: note = U/M: U (0.13:0.89) in Blood T cells
  misc_feature 1..103: note = source = chr2:205108059-205108161; Gene: PARD3B (Intergenic)
  source 1..103: mol_type = genomic DNA
cgcagtctcgctctgtcacccaggctggagtgcagtggcgcaatctcggctcactgcaagctccgcctccaggattcatgccattctgttgcctcagcctccc

SEQ ID NO: 4199 - DNA, 208 bp, Homo sapiens
  misc_feature 1..208: note = U/M: U (0.05:0.81) in Blood T cells
  misc_feature 1..208: note = source = chr19:7225929-7226136; Gene: INSR (intron)
  source 1..208: mol_type = genomic DNA
cggccccaccccagagaacaatccagccccagtatccgcaggccccaggtggagaaaccccgtcccggaatgagaagcccctctcctccaccacatcaaagccaagatgacaacgtctctgagtttgacacaaggttagggggaagtctcatttttcaaatggctggctgtaacactaaaaaaggaaaattaaaaatgtctgaggatc

SEQ ID NO: 4200 - DNA, 187 bp, Homo sapiens
  misc_feature 1..187: note = U/M: U (0.1:0.85) in Blood T cells
  misc_feature 1..187: note = source = chr22:48475730-48475916; Gene: MIR3201 (Intergenic)
  source 1..187: mol_type = genomic DNA
cggctgcaagaaacgcatccacctgctcacgaggaaggcaaccaaatgcaagatactcgacgaaaccttgggtttttagagcaaaagaacagaaacagctgtatgtgatgttttgagggagaatggggacacttgcctccagattgtatctcgcggtcactgtgcccattttcagtgccccaggcgc

SEQ ID NO: 4201 - DNA, 135 bp, Homo sapiens
  misc_feature 1..135: note = U/M: U (0.17:0.9) in Blood T cells
  misc_feature 1..135: note = source = chr12:69285539-69285673; Gene: CPM (intron)
  source 1..135: mol_type = genomic DNA
cgctttgttgttttgtcccccaggctggagtgcattagagtaatcgcggctcactgcagcctccacttcctgggttcaaacgactctcatgtctcagtctccagagtagctgggactacagatgtgtgccaccac

SEQ ID NO: 4202 - DNA, 352 bp, Homo sapiens
  misc_feature 1..352: note = U/M: U (0.18:0.91) in Blood T cells
  misc_feature 1..352: note = source = chr17:71818566-71818917; Gene: LINC00469 (intron)
  source 1..352: mol_type = genomic DNA
cggcctcaaatgaatttcaagatgaataagaacagtcgcaattaaaatcaaatttctgagacaggatttgatctctttcaaggagagagcgggcctggccttgcccacagccacagatgccccttaatggggtttgagatgctaggatgtgggactcgggaggaaacacctggggaacgccgcacctttgaagctcattttgtcaaggttctttcacggcggtatcaccggagaccaaataccatttttaattactcacgaaagcacgagatggttgcctcttctcaggcacactcctcgctcttcacttcaatcctttttttttctttctttgagacggagtcactctgtc

SEQ ID NO: 4203 - DNA, 410 bp, Homo sapiens
  misc_feature 1..410: note = U/M: U (0.23:0.94) in Blood T cells
  misc_feature 1..410: note = source = chr12:47605685-47606094; Gene: PCED1B-AS1 (intron)
  source 1..410: mol_type = genomic DNA
cgtctctactaaaaatacaaaaaattagccgggcgtagtggcgggcgcctgtagtcccagctacttgggaggctgaggcaggagaatggcgtgaacccgggaggcggagcttgcagtgagccgagatcgtgccactgtactccagcctgggagacagagcgagactccgtctcaaaaaaaaaaaaaaaaaaaacccaatctctaccaaaaatacaaaaaactagcagggcatggtggctcactcctgtggtcccagctactgggggtaggtgggagactgaggtgtgaggatcacttgagcccggaggtggaggtttcagtgagctgagatcatgccactgcactccagcataggtgacagagcaagagactctgtctcaaaaaacaaaaagaaaaaaggagagaggacc

SEQ ID NO: 4204 - DNA, 454 bp, Homo sapiens
  misc_feature 1..454: note = U/M: U (0.21:0.91) in Blood T cells
  misc_feature 1..454: note = source = chr2:85667088-85667541; Gene: SH2D6 (Intergenic)
  source 1..454: mol_type = genomic DNA
cgccactgcactccagcctgagagacagagcaagactccgtctcaaaaagaaaaaaaaaaaaagtgccttttggtgaagaagcccgtgtattacaaacagacagtgggttacctgtctccagaggccggggagggtctgtagcacagggaagctgaaggagtgtgcagctgagaagggcatgaaagcctcagcaaaaccatacctgccggggctcagagcatggtctaagcaaccttctgccaggctttcagctttggtttctgaagaggcagtctgatctttggtgaaaacacgggcagaaggacccaagtttcattctggctcaaccactcacttcctgcgtaaccttagcctcagtctctccacttttatgtttttgaaaccgagtattactctgtcacccaggctggagtgcagtggcataatcttggctcactgcaacctccacctccc

SEQ ID NO: 4205 - DNA, 242 bp, Homo sapiens
  misc_feature 1..242: note = U/M: U (0.26:0.94) in Blood T cells
  misc_feature 1..242: note = source = chr3:197596061-197596302; Gene: LRCH3 (intron)
  source 1..242: mol_type = genomic DNA
cgatgcactgtacctgcaggaagtagaaagcgatgcactgtacctgcaggaagtagaaagcgatacactgtacctgcaggaggtagaaagcgatgcactgtacctgcaggaggtagaaagccatgcactgtacctgcaggaagtagaaagcggtgcactgtacctgcaggaagtagaaagcggtgcactgtacctgcaggaagtagaaagcggtgcactgtacctgcaggaggtagaaagcc

SEQ ID NO: 4206 - DNA, 345 bp, Homo sapiens
  misc_feature 1..345: note = U/M: U (0.04:0.89) in Blood T cells
  misc_feature 1..345: note = source = chr3:111261184-111261528; Gene: CD96 (intron)
  source 1..345: mol_type = genomic DNA
cggatgggccgctttaggggcggatggggcctctgttcatttaaaatgccttgtgactgctgctgaaattgatcaccaaaggacaaatcattactaagggtttcagttatgtatttaagcggcaggtataagagagatgctagaatctagaaatgattactaatgaacactaaaaataagaagggaatgggtcatttgtgccactgctctgaggcattttcacccatttcctttctaacaggatctctggagtaattggcaaattgtgtttcttggaaatgaaatgctctccaaatggtagccaaaacaactgcggaaaaattaaaaattacaaagccatcaacg

SEQ ID NO: 4207 - DNA, 327 bp, Homo sapiens
  misc_feature 1..327: note = U/M: U (0.01:0.85) in Blood T cells
  misc_feature 1..327: note = source = chr1:206976573-206976899; Gene: IL19 (intron)
  source 1..327: mol_type = genomic DNA
cgctgttgctgctgagagaacttggggtgccaggaagtcggggttggatgccttccagttccctgccctaatcagaggcattgacctggaggccctgtgtaggagtccccatctttcggaattagtgatgtggttagagtagcaacgtgactctctgtggacggaagaaggtaggtcggatgtgagagtctccctccatgaacatgtgtgcgtcatctgagtcaaagcttgtatctttactctcaaaaacaagtcatttttgttcctgtcagcatcttggccagcccacaacaaagagtacaagctggatgcttgtactgtgctgcg

SEQ ID NO: 4208 - DNA, 329 bp, Homo sapiens
  misc_feature 1..329: note = U/M: U (0.04:0.88) in Blood T cells
  misc_feature 1..329: note = source = chr13:40761258-40761586; Gene: LINC00332 (intron)
  source 1..329: mol_type = genomic DNA
cggtctgcactcagggatacccgccaaggcagaaggccaaattccccccatgttccttcccaagccacccactggcccctatgaaggctctgggagtgactgaaaaactggcatttttggtcctacagagacgtcaaagagaggaaacgttgaagacagaaacccaaaactctcagtttataactttgaactggggccggggaggggggggtggggaatagctttcattggctacagctaccacatcaaaaataagtaaaacatgagaactgtgaaccacatgaagagagagcgcgccaacctcagtgaatctcttaacacttaagacg

SEQ ID NO: 4209 - DNA, 373 bp, Homo sapiens
  misc_feature 1..373: note = U/M: U (0.05:0.89) in Blood T cells
  misc_feature 1..373: note = source = chr1:32718801-32719173; Gene: LCK (intron)
  source 1..373: mol_type = genomic DNA
cgttaaaaatgcaaaattagccgagcgtggtggcaggtgcctgtaatcctagctactcagggggctgaggcagaattgcttgaacccgggatgcacaggttgtaatgagcagagatcgagtcattgcactccagcctaggcaacagagcgaaaccccatctcaaacaaaaatgcctcccgggttcaagtgattctcctgcctcagcctcccaagtgctaggattaacaggcgcgccaccatgcccagctaatttttgcatttttagtagagatggagtttcactatattggccaggatggtttcgatctcctgacctcgtgatccgcccacctcggccccccaaagtgctgggattacaggcatgagccaccg

SEQ ID NO: 4210 - DNA, 448 bp, Homo sapiens
  misc_feature 1..448: note = U/M: U (0.01:0.85) in Blood T cells
  misc_feature 1..448: note = source = chr5:156620811-156621258; Gene: ITK (intron)
  source 1..448: mol_type = genomic DNA
cgggaccagcaggcttgctccagattgcccagcagacttacccgaaagacagcagaaacatcatcaacagcaacaattttttttaaaaaaccacaatagttagcatcactacaagaagaggactgaacactttgttaagtattttctcatttcctccttacaattctttgaacaagataaaagtaaaattttgttttggtgaggaagcaatggagctacgaggacggtaagtaatttacccaaggaagcaaagtgaaaagtgtaaaggcaacagcatgccttaggacataaggattccctatactttgctcctacatacattagtgtgacctgtcctgatatctctgtggttacccaagtagaattacattttgcaagaaggtaattctacttaccttcacgactgcgagcatctcagccagtttctcgctgcgagtttgtgaattcg

SEQ ID NO: 4211 - DNA, 405 bp, Homo sapiens
  misc_feature 1..405: note = U/M: U (0.04:0.87) in Blood T cells
  misc_feature 1..405: note = source = chr11:60870283-60870687; Gene: CD5 (intron)
  source 1..405: mol_type = genomic DNA
cgccaggagcacaaccttgcctctctcatgcgctgttgagaaccctgctttacccttccagtgcaagagagactgcaggggggacccgcatttgatggggcccagacaacttgattcctaggctaagttggattttagcagagcattcaggcctccctctgcgaggtcccccactgacagcccagcctttacttggtcgcctccagagacatggaaactcgccgtctccgaggcagctctgatgatgctctggacagacagtgggccgaggcagggtggagccgcctctgaggacgatgtctgagcaaatgtcaaggactcatagcggaagtcctaggccctctcatgcccagtcctgggtcagtcccagaggggcccagccaggccggctgggatgagtacacg

SEQ ID NO: 4212 - DNA, 130 bp, Homo sapiens
  misc_feature 1..130: note = U/M: U (0.07:0.89) in Blood T cells
  misc_feature 1..130: note = source = chr15:38945624-38945753; Gene: C15orf53 (Intergenic)
  source 1..130: mol_type = genomic DNA
cgctagctcctccccgggcctggaagatcctgagagcttcttctagtgttcaggctttgaatcatcgaagatcttttaaactctgattgtgaagagctccaggggaaatcaatgaacagaccctacggcg

SEQ ID NO: 4213 - DNA, 195 bp, Homo sapiens
  misc_feature 1..195: note = U/M: U (0.09:0.91) in Blood T cells
  misc_feature 1..195: note = source = chr2:175354316-175354510; Gene: GPR155 (Intergenic)
  source 1..195: mol_type = genomic DNA
cgggaggcagaggttgcagtgagctgagatcgtgccattgcactccagcctggtgacagagcaaaacttggtctttaaaaaaaaaaaaaattagcggggtgtggtggcacacacctgtggttccagcaacccaggcagctgagatgagaagattgcttgagcccaggaggcgaaggctgcagtgagccaagatcg

SEQ ID NO: 4214 - DNA, 311 bp, Homo sapiens
  misc_feature 1..311: note = U/M: U (0.04:0.86) in Blood T cells
  misc_feature 1..311: note = source = chr2:234176989-234177299; Gene: ATG16L1 (intron)
  source 1..311: mol_type = genomic DNA
cggctactcaggaggctgagacaggagaatcgcttgaacacaggaagcggagattgcagtgagccgagatgatgtcactgccctccagcctgggtgacagagagagactctgtttgagctattaaagacctttcctttcagctatagtgatgaatccctgataacaggtggtgttttcctctccctgtgaccctaagtcaagtttttatctccaccttgcagaactgggacctgaagttatagaaagtagatttcagacagtcaacaagtgctttaatcatagagtagtggtactcacacaccttataccg

SEQ ID NO: 4215 - DNA, 111 bp, Homo sapiens
  misc_feature 1..111: note = U/M: U (0.11:0.92) in Blood T cells
  misc_feature 1..111: note = source = chr11:77914232-77914342; Gene: USP35 (intron)
  source 1..111: mol_type = genomic DNA
cgccttctcaaccccgcgccttgagaagatcctggaaagcttcatagagaagggatacaggagtttgatcttactgtacggggactgaaaaaggacactctggatgcatcg

SEQ ID NO: 4216 - DNA, 188 bp, Homo sapiens
  misc_feature 1..188: note = U/M: U (0.12:0.93) in Blood T cells
  misc_feature 1..188: note = source = chr5:118635098-118635285; Gene: TNFAIP8 (intron)
  source 1..188: mol_type = genomic DNA
cggtggctgcagaacagtggattttcgtgaaccgcgaatgctgctgtctgatcgttcctctggaagttttgtctcagaggagtacccggccgtgtgaggtgtcagtctgcctctactggggggtgcctcccagttaggctgcttgggggtcaggggtcagggaccctcgtgaggaggcagtctgtccg

SEQ ID NO: 4217 - DNA, 339 bp, Homo sapiens
  misc_feature 1..339: note = U/M: U (0.07:0.88) in Blood T cells
  misc_feature 1..339: note = source = chr4:873212-873550; Gene: GAK (intron)
  source 1..339: mol_type = genomic DNA
cgccttctcttgacaaggtttatgttttccttttacttcctgttgacttcttaattacagcaccgaagaaaaacccttactgtttgttctaggctttctgacgagaaccttgcggctgacatctttctttttgtacctgatgcatcttcttctggccacctccaacacttcctctgtgctcggtttgcaggagttctgaccggtatgcacccgagtgggttttcatgtgttcatcttgctttcatcctgcttggtgacctctgagcttcttgaacctgtggactggtatctgttactcattctgggaaattctcagccatgatttcttcactgctcccg

SEQ ID NO: 4218 - DNA, 410 bp, Homo sapiens
  misc_feature 1..410: note = U/M: U (0.08:0.89) in Blood T cells
  misc_feature 1..410: note = source = chr1:39443248-39443657; Gene: AKIRIN1 (Intergenic)
  source 1..410: mol_type = genomic DNA
cgcttcctaagtagctgggactacaggaagtcccaccacaccgggccctgggtattttatattattgagaattttttttttttttttttttttttttttttttagtgacaggtgtgtctggaattggttccttccggtgggtttgtggtcttgctgacttcaggagtgaagccacagaccctcccggtgagtgttacagcccttaaaggtggcatgtccgcagttgtttgttcctcccggtgggtttgtggtctcactgacttcaggagtgaagctgcagaccttcgcaatgagtgttacagctcttaaaggtggtgctcctcctcaaagagtgaggagcagcaagatttattgtgaagagtgaaagaacaaagcttccacagtgtggaaggggacccgagtgggttgcg

SEQ ID NO: 4219 - DNA, 126 bp, Homo sapiens
  misc_feature 1..126: note = U/M: U (0.08:0.88) in Blood T cells
  misc_feature 1..126: note = source = chr2:86159584-86159709; Gene: ST3GAL5 (Intergenic)
  source 1..126: mol_type = genomic DNA
cgttgtttttgagacagggtcttgctgtcgctcaaatgcagttgtgtgatcacaggtaactgcagcctcaacttcctgggctcaaacgatcctcccaccttagcctaccgtgtagctgggactacg

SEQ ID NO: 4220 - DNA, 250 bp, Homo sapiens
  misc_feature 1..250: note = U/M: U (0.13:0.93) in Blood T cells
  misc_feature 1..250: note = source = chr5:118635784-118636033; Gene: TNFAIP8 (intron)
  source 1..250: mol_type = genomic DNA
cggctcgcgcacggtgcgctgcacccactgtcctgtgcccactatctggcactccctaatgagatgaacctggtacctcagatggaaatgcagaaatcacctgtcttctgtgtcgctcacgccgggagctgtagactggagctgttcctaatcagccatcttggctgccacccccagtaccttcttagcaggaacttgagaaaatcatggtaatcacatcctcagaaagaaggttaaatttggttcagcg

SEQ ID NO: 4221 - DNA, 280 bp, Homo sapiens
  misc_feature 1..280: note = U/M: U (0.1:0.9) in Blood T cells
  misc_feature 1..280: note = source = chr5:39198919-39199198; Gene: FYB (intron)
  source 1..280: mol_type = genomic DNA
cgatcacaagtcaaggaatatctgcatatatattctatataaataaataatacacttatgctttaaacataaacatgcaaacatacatacaggggcacgatggtacatggagaaagtattaaacttgcaatctgaagacttggattttagcctcagatatatgatttggttatgtcacatctcaacactcatttgtgaaatgggggcgataattacacttaataaagaattttcccatctaaagactgtacgtacaatataccacatgtttatgtatacg

SEQ ID NO: 4222 - DNA, 344 bp, Homo sapiens
  misc_feature 1..344: note = U/M: U (0.06:0.86) in Blood T cells
  misc_feature 1..344: note = source = chr10:27390494-27390837; Gene: ANKRD26 (Intergenic)
  source 1..344: mol_type = genomic DNA
cgtctttattgccaagtgagaaatgagcaaaaacaaaacaacacttctcaggcctctccagcttagctagatcaaatggttttgatgtgggagagtggtttccactatcgtcaccaagaattttcctcctacactaccccagctagaaagttatgttgtctcctcaacactccccaaggtgatctatgaagctagtcaagtcccagcactttaggaggccgaggtgggtggattacctgaggtcaggagttcgagaccaggccaacgtggtgaaaccccgtctctactaaaaatacaaaaattagctgggtgtggtggtgcatgcctgtagtcccagctactcg

SEQ ID NO: 4223 - DNA, 105 bp, Homo sapiens
  misc_feature 1..105: note = U/M: U (0.08:0.87) in Blood T cells
  misc_feature 1..105: note = source = chr13:48760259-48760363; Gene: ITM2B (Intergenic)
  source 1..105: mol_type = genomic DNA
cgggaagccgaggcagggagaatcacttgaaaccgggaggcaaagtttgcagtgagctgagatggtgccactgcactccagtctgggcgacagagtgagactccg

SEQ ID NO: 4224 - DNA, 308 bp, Homo sapiens
  misc_feature 1..308: note = U/M: U (0.09:0.88) in Blood T cells
  misc_feature 1..308: note = source = chr22:50232991-50233298; Gene: ZBED4 (Intergenic)
  source 1..308: mol_type = genomic DNA
cggattatccgaaaatgattgtaaagcagccctcacaaaaatgcttcaacaagcatttacaaactatcttgaaacaactgaaaaatagagaaaaaaagtttttggttttttttttttaatgaaatcggggtgtggggaatgagggtaggcggctgaggcaacagaatcgcttgagcctgggaggctgaggctgcagtgagtcatgatcgcaccgctgtaccccagcctgggtaacagagagagactctgtctcagaaataaagaaagaaaagaaaagaaaaaagaaccagatggaaattgtagtgtcg

SEQ ID NO: 4225 - DNA, 226 bp, Homo sapiens
  misc_feature 1..226: note = U/M: U (0.09:0.87) in Blood T cells
  misc_feature 1..226: note = source = chr1:117280299-117280524; Gene: CD2 (Intergenic)
  source 1..226: mol_type = genomic DNA
cggccaccctcaccatcacgatgctgtcctgaaatttccggcattcggtgtaggtgttttcttggtgacctcatctagtcttcaccacaaacttttgagtataagtgagcaggccagattgtaactccttcccacagatcatcatttttttttttaaattttcatttttatagagacagggtctcactatgttgcccaggctggtcttgaactctggcctcaagcg

SEQ ID NO: 4226 - DNA, 231 bp, Homo sapiens
  misc_feature 1..231: note = U/M: U (0.04:0.82) in Blood T cells
  misc_feature 1..231: note = source = chr11:60870871-60871101; Gene: CD5 (intron)
  source 1..231: mol_type = genomic DNA
cgtgactctgggctggaaacaggaggatgcgagcagcttccaggctggcagggagagggtccggaggccttgcctgcctgagcagggagcctcagcagccttctagggaaaccgggtgtgcaggtgtgagtgtgggggaatgcatgtgtgtgtgtctgtgtgcatgtgtgtgagaactgtgtgtgggggaatgtgtgagtctatgtgtgtctgtgtgagtctgtgtgtacg

SEQ ID NO: 4227 - DNA, 280 bp, Homo sapiens
  misc_feature 1..280: note = U/M: U (0.13:0.91) in Blood T cells
  misc_feature 1..280: note = source = chr10:128899365-128899644; Gene: DOCK1 (intron)
  source 1..280: mol_type = genomic DNA
cgaaaacccaaggcaggggcagaggttgggagctggagtcttgtgtttggtttgggtggttggaagcttagcgagttcctttcttgtggtggcttttgtttttctctgaaggaggtggtgacatgagatgggaggggtgggggtcaggcttgagaagagcaaagaaagactgagtcagccacaggggagagtggagaaggagaggaaacccggcccttcaggagaacaggtggacccacagtgtaagacgtgcctctcctcatgtttcttctgaattccg

SEQ ID NO: 4228 - DNA, 334 bp, Homo sapiens
  misc_feature 1..334: note = U/M: U (0.13:0.91) in Blood T cells
  misc_feature 1..334: note = source = chr3:45984836-45985169; Gene: CXCR6 (promoter-TSS)
  source 1..334: mol_type = genomic DNA
cgcgttacacaggggcgggttggtcatatggattctgatctgaaggacgggagtagggggtgggtctcttatagtaaccagctgagggctcttaaaaaatgttcagcggaaacatgaaccacatcacagaagtagaggcagaccttgcttcatgagcaagctcatctctggaacaaactggcaaagcatctctgctggtgagtcatttgttttactctttatattgaaaagaagacagggaggactaaccccaggtattgttggtattctcagattcctgtctgtagtagggtacagtgcaaaatgccaggctatggagctcagctgctcttcg

SEQ ID NO: 4229 - DNA, 137 bp, Homo sapiens
  misc_feature 1..137: note = U/M: U (0.08:0.84) in Blood T cells
  misc_feature 1..137: note = source = chr7:150695400-150695536; Gene: NOS3 (exon)
  source 1..137: mol_type = genomic DNA
cgtctctctcctcaccctcctctcccgctgcctcggctggctcaggtgttcgatgcccgggactgcaggtctgcacaggaaatgttcacctacatctgcaaccacatcaagtatgccaccaaccggggcaaccttcg

SEQ ID NO: 4230 - DNA, 249 bp, Homo sapiens
  misc_feature 1..249: note = U/M: U (0.14:0.89) in Blood T cells
  misc_feature 1..249: note = source = chr3:195336331-195336579; Gene: APOD (Intergenic)
  source 1..249: mol_type = genomic DNA
cgcaatgccatggtctccatgaactgattttttttgtgcagtgggcaggaagaacccatggggcagttacacatcttgaaagagaagctcttcctgtgaggtacatcaactgtggttaagaatcttacgtacttatcattttttgttgttgtgagaacatttaacatctactcttttctttttcttttcttttttctttttttttgaggtggcgtcttactctgttgcccaggctggagcgcaatggcg

SEQ ID NO: 4231 - DNA, 347 bp, Homo sapiens
  misc_feature 1..347: note = U/M: U (0.12:0.87) in Blood T cells
  misc_feature 1..347: note = source = chr4:114604657-114605003; Gene: CAMK2D (intron)
  source 1..347: mol_type = genomic DNA
cggagttacttattaagtgctacggaaacacagatgagagaaaatacaattttacaacaatgcataaaagagttgtgaaggctgatatgggctttgaagaataaataggcgttttctgggtagaaaaagatgaagtaaatttcagataaaaggaatagcatgattaacatcacagagtcagaaaactatctggaaggtttggagaacagcaatagtttgatatacttgtctgtggataacaacctcaaatgtgagcagggaaaaacataaaaagctaacaaattaatcctgtgctaatatgttaagattttctgctgcaggaaatatcggttttgatcagaggcacg

SEQ ID NO: 4232 - DNA, 141 bp, Homo sapiens
  misc_feature 1..141: note = U/M: U (0.16:0.9) in Blood T cells
  misc_feature 1..141: note = source = chr20:48819424-48819564; Gene: CEBPB (Intergenic)
  source 1..141: mol_type = genomic DNA
cgatgttatgttcttctcctcgtcccattgctgatggtgcactctttgatgacttgattgaggagatagctgccagacttcgcatctgtagggttactttccccgctctttgtagttaatcagcatttgagaggaggcacg

SEQ ID NO: 4233 - DNA, 151 bp, Homo sapiens
  misc_feature 1..151: note = U/M: U (0.09:0.83) in Blood T cells
  misc_feature 1..151: note = source = chr12:66788079-66788229; Gene: GRIP1 (intron)
  source 1..151: mol_type = genomic DNA
cgtagcgtttaagctccacggtgtaaataattgctccggaactttcttgctcatctgtaataaatgccaaggaatcataattgatttctttggaaaaagcaaaagagtaagatgcatagattcatacataaaagaattcaaaacatcctcg

SEQ ID NO: 4234 - DNA, 362 bp, Homo sapiens
  misc_feature 1..362: note = U/M: U (0.17:0.91) in Blood T cells
  misc_feature 1..362: note = source = chr2:64205129-64205490; Gene: VPS54 (intron)
  source 1..362: mol_type = genomic DNA
cgttgtattctcattattcaagcaccccactgatgtggtggtaatgcgtgaagggaggggaagcattctatgatcttatgattaggtttcagtcttagtgagcctgtgcccctgggctgcgaccttcacaggtgcttctcagttgttgattttcagtttgctaaggttttttgttgtgagaacggaagtgacaacttccaagctccttacatgacagatcagaagtatgtttagctttttaagaaactgccaaacttttttccaaaggggttgtagcactttaaattcccaccagcggtatatgagagttccagttactccatgaaggctggcagtaggatgaagcaagcaagaagcatacg

SEQ ID NO: 4235 - DNA, 481 bp, Homo sapiens
  misc_feature 1..481: note = U/M: U (0.14:0.88) in Blood T cells
  misc_feature 1..481: note = source = chr10:11887167-11887647; Gene: PROSER2 (intron)
  source 1..481: mol_type = genomic DNA
cggtaggataaatttccccaaatggaattgctaggtgcgtgggaatatattttacattttgatagatactatgcggttgccccctgaggggttatgccagtttacacccccaccagcggaacctcggagcaccttgtttccccacagccttttaactacggttttgaggctgctttcaagatttgtagctgcttttaactttttcttgttttcggtgttctgtggtttcattgtgattgtctaatagtacatttaaaatttgtattctgtttgggattcatcagaattcctctgtctgtgacttgatgtctttatcagtaagcaggatatagaggatacacacaaaaatgaataattgaggaaagtttaatacttagattatttacaaaaaatacaggcagggttagggaaagcaacagaggatggttcggtacctagaggacagcaacactcggtagctgttagcacccctaggccctcg

SEQ ID NO: 4236 - DNA, 124 bp, Homo sapiens
  misc_feature 1..124: note = U/M: U (0.14:0.87) in Blood T cells
  misc_feature 1..124: note = source = chr20:62270221-62270344; Gene: STMN3 (TTS)
  source 1..124: mol_type = genomic DNA
cgcccaggctggagtgcagaggcgcgatctcagctcactgaaagctccgcctcctgggttcacgccattctcctgcctcagcctcccgagtagctgggattacaggcatgagccaccgcgcccg

SEQ ID NO: 4237 - DNA, 217 bp, Homo sapiens
  misc_feature 1..217: note = U/M: U (0.13:0.86) in Blood T cells
  misc_feature 1..217: note = source = chr5:80303344-80303560; Gene: RASGRF2 (intron)
  source 1..217: mol_type = genomic DNA
cgggatgtcattttttccttcatggtgagggttagttggccatatactccctcgctttcttttttccattaagaaaaattcacgccaacaaactcaactttctcagggtggtccttgcatttatggtaaatattgaaggctgatttaggacgaggaaagtgaactattcagatcagctgcccctccacgataactgcttgacttgctcacctaatcg

SEQ ID NO: 4238 - DNA, 292 bp, Homo sapiens
  misc_feature 1..292: note = U/M: U (0.09:0.82) in Blood T cells
  misc_feature 1..292: note = source = chr5:169740386-169740677; Gene: LCP2 (Intergenic)
  source 1..292: mol_type = genomic DNA
cgaatccacagcactcagaaccagaagaggttccgggagcccaggagcatgagcactgagcttttataggctgaacatggaaacaaagcagataaatcacctgattggctacagctagacatctgtcttatttgggcctggtgcgatgaattggttgtccgtgattggctgaaactcagctgtttgtgattggctgaaaccagctatttgttaccaaaagtattctcctaagtttcagtttgtttatatactaagttagggtgtaatttgttatggaggaattcaaagtgcg

SEQ ID NO: 4239 - DNA, 377 bp, Homo sapiens
  misc_feature 1..377: note = U/M: U (0.16:0.89) in Blood T cells
  misc_feature 1..377: note = source = chr12:27654980-27655356; Gene: C12orf70 (TTS)
  source 1..377: mol_type = genomic DNA
cgcaccacatgggacctacgggagatgagagagcctttcttgaatttggaagtggaagccttgttaccctcctaaagatacagaagttactgtcaccctactgactttctcaccagtaaacattgtggctgttcctgtattgtggtggctaacttatttttcaaaaaataacgtacaaggtttttgtaaagaacgttgtaattacacagaagttgattgatcacggaaaaaaaatgaaaacagcttatctttacctttatgaatcacaatcccttcttgaatcattccacactttgttgaaaacattttcttcaaaccactaaccttccttctcccccaacatggggtacattgagaccacaaagtattatctcccg

SEQ ID NO: 4240 - DNA, 106 bp, Homo sapiens
  misc_feature 1..106: note = U/M: U (0.1:0.82) in Blood T cells
  misc_feature 1..106: note = source = chr19:1079557-1079662; Gene: HMHA1 (intron)
  source 1..106: mol_type = genomic DNA
cgaactcctggcctcaagcaagtctcccactgtggcctcccgaggcgctgggatgacaggcgtcagccccgcctccctgaggtttctgtctgagtcctgcaccccg

SEQ ID NO: 4241 - DNA, 109 bp, Homo sapiens
  misc_feature 1..109: note = U/M: U (0.17:0.89) in Blood T cells
  misc_feature 1..109: note = source = chr1:11965595-11965703; Gene: KIAA2013 (Intergenic)
  source 1..109: mol_type = genomic DNA
cggggtttcaccatgttggccaggctggtctcgaactcctgatctcaggggatccgcccgccttggcctcccaaagtgctgggattacaggcctgagccactgcgcccg

SEQ ID NO: 4242 - DNA, 120 bp, Homo sapiens
  misc_feature 1..120: note = U/M: U (0.17:0.89) in Blood T cells
  misc_feature 1..120: note = source = chr9:139005420-139005539; Gene: C9orf69 (TTS)
  source 1..120: mol_type = genomic DNA
cgatcttcaaactttttttttttttttttgagacagagtctcactctgtcaccaggctggagtgcagtggtgcaatcacggctcactgcagcctcgatctcgtaggcgcacaccaccacg

SEQ ID NO: 4243 - DNA, 197 bp, Homo sapiens
  misc_feature 1..197: note = U/M: U (0.14:0.86) in Blood T cells
  misc_feature 1..197: note = source = chr4:7856825-7857021; Gene: AFAP1 (intron)
  source 1..197: mol_type = genomic DNA
cgtggcagaatgggtgcagcccaagagcatcaaagactaaggaagtgggggctgtagcacgcacccaaaaaatataccacaaagagccatttctcttccgcactgctgatacctgttgccacagcaataagctttcactacctctgagtcacaaggaagacagcaatcggaagagaggcttgtgtgtgaggcactcg

SEQ ID NO: 4244 - DNA, 225 bp, Homo sapiens
  misc_feature 1..225: note = U/M: U (0.18:0.9) in Blood T cells
  misc_feature 1..225: note = source = chr5:133455511-133455735; Gene: TCF7 (intron)
  source 1..225: mol_type = genomic DNA
cggcctccacacgccccagagcgagctgtgggccttgctgggaagcgtcagttattggtgttgagcaccagccctggttgcagtgaagcctgttaggagggaatttggcaccaagcttggtaccaggtactgggcccccagactggaaccaggctctaccccgggagtgcccagctgagccgaggagacagatagagacctgaagcagagctggcgagaggagcg

SEQ ID NO: 4245 - DNA, 434 bp, Homo sapiens
  misc_feature 1..434: note = U/M: U (0.14:0.85) in Blood T cells
  misc_feature 1..434: note = source = chr11:11171265-11171698; Gene: CSNK2A3 (Intergenic)
  source 1..434: mol_type = genomic DNA
cggttaaaaaaaaaacaacctagttcaaatgtgaactcttgtggggaactcccatacttcctgtgttttcctctgcagctgaggattcagacaaacctcaaaggtatttgcagacatgtctgcaggtgtctggcttcccaacaccttagagtaaagctctcatggtgacctataagaccccacgtcatccacctttcattatctctctgggctccagcaacattgactgccttactgttcttcaaacgccggccaccattgccccccaccccacccaggttccttgcatatgcagttccctctgcctgggatgctgctgttccccacagcagaggtggaagaagctgttctcacagaggggacatggaggtcacattttaggtctccaggtgagtgtgttgcagcaggggcagggtgtggggttcttctgctcg

SEQ ID NO: 4246 - DNA, 143 bp, Homo sapiens
  misc_feature 1..143: note = U/M: U (0.13:0.83) in Blood T cells
  misc_feature 1..143: note = source = chr6:37177349-37177491; Gene: PIM1 (Intergenic)
  source 1..143: mol_type = genomic DNA
cgggcagcactgacgtcatcgtcttctgtaacctaaccttagaaaggacaacccatcgcttttgctatgttctctttgctagaagaggatcactgggtcctgcccacatctaagaagaggtgatgaatgtgaatatcagttcg

SEQ ID NO: 4247 - DNA, 218 bp, Homo sapiens
  misc_feature 1..218: note = U/M: U (0.19:0.89) in Blood T cells
  misc_feature 1..218: note = source = chr11:117823370-117823587; Gene: TMPRSS13 (Intergenic)
  source 1..218: mol_type = genomic DNA
cgaatgttggcgttattacctccccacttcaaacggacagtgcgcaggtgactgagtagttacataacaaggttttcttttcattcatgttttcacattatacagatggtatgtagtagtgtatagaggctaagcacacaggctctgatccaaactgttcgatcctacctctgccgcttactagctatgtagccggggcaaatgacttaacatccccg

SEQ ID NO: 4248 - DNA, 479 bp, Homo sapiens
  misc_feature 1..479: note = U/M: U (0.15:0.85) in Blood T cells
  misc_feature 1..479: note = source = chr11:67688194-67688672; Gene: UNC93B1 (Intergenic)
  source 1..479: mol_type = genomic DNA
cgcagagacagaaaacccacaatcgagcatcatcgacccgcagggtgaacaaaatggtgatatcagaagaacagataaagttaccatccaccaagaaaacagcacatgtggagagccagggagaagaatagaaagaaaaagagacagagatcagagacagacacagaaagtgagattggggagagagatagtgtaaaagagagagagagagagaccataagagaagggagacaaagagataaaaggtgcgagtcagtaggtgaggagaaagactgaaaactatgagaaacagcaactaagacacaaaggaggtgggagactgcccgggtgccgcagcacccacaccgtcctcttgccccctgtcacttgggttaaaaccaccggaaattccactattgcaaattttatattaatccttgtatgtctgacttttctattgttagtctacaggtgtatccagcagctccagagagacagcg

SEQ ID NO: 4249 - DNA, 329 bp, Homo sapiens
  misc_feature 1..329: note = U/M: U (0.2:0.89) in Blood T cells
  misc_feature 1..329: note = source = chr7:99221780-99222108; Gene: ZSCAN25 (intron)
  source 1..329: mol_type = genomic DNA
cgcaggactgcagggtctctccaggtaagactgtctccacccacaggtgaggaactggggagttctgaaagctcaggtcaggggtcctgccgtagctctggcgctcctggcaaaggaaggggacttcatggcaggcgggtaaatgggtccagcacggaccatggggcacgaggagctgctttcctgtgtcaatagaggagccaaatgatggagcaggaaaacatgaggccattattctggctgtatggagacaggtcggtcatgaggacccccaaacacctacattgtgtccatgattaaagacactgagggcttgagaacaagatacg

SEQ ID NO: 4250 - DNA, 68 bp, Homo sapiens
  misc_feature 1..68: note = U/M: U (0.19:0.87) in Blood T cells
  misc_feature 1..68: note = source = chr15:78914218-78914285; Gene: CHRNA3 (promoter-TSS)
  source 1..68: mol_type = genomic DNA
cggagtcaaaagaatgagaaaagacaagagagaaagcgggaccaggcggccaacgtatggaggctacg

SEQ ID NO: 4251 - DNA, 102 bp, Homo sapiens
  misc_feature 1..102: note = U/M: U (0.21:0.89) in Blood T cells
  misc_feature 1..102: note = source = chr11:69153814-69153915; Gene: MYEOV (Intergenic)
  source 1..102: mol_type = genomic DNA
cgttgggatttttctgctcaccctgaacttgcacgtacttggctttatactttgccgcgtgggtttgtgggagcccagggtgctccccaagcctctctgacg

SEQ ID NO: 4252 - DNA, 429 bp, Homo sapiens
  misc_feature 1..429: note = U/M: U (0.25:0.93) in Blood T cells
  misc_feature 1..429: note = source = chr5:14221750-14222178; Gene: TRIO (intron)
  source 1..429: mol_type = genomic DNA
cggcaagagaactagagctacaagtggagcctgaagatgggactgaattactgcagtctcgtgattaaactcctcagggatgaagcgttgcttctcatgaatgagcaaagaaagtggttttttgagatggaatctacacttggtgaagatgctgtgaacttggttgaagtgacaacaaaggatttccaatgtgccacaaacttagttgataaagcagcagcaggggttgagaagcttgactctaatttcgaaagaagttctgctgtggataaaatgctgtcaaacagcatcacatgctacagagaagtttttcatcacaggaagagtcgatagatgcagctgcatcactgtcttattttaagaaattgccgcagccaccccagccttcaagcagccaccaccctgagcagtcagcagccatccacatcg

SEQ ID NO: 4253 - DNA, 375 bp, Homo sapiens
  misc_feature 1..375: note = U/M: U (0.22:0.89) in Blood T cells
  misc_feature 1..375: note = source = chr5:156616441-156616815; Gene: ITK (intron)
  source 1..375: mol_type = genomic DNA
cgcactttgggaggccaaggcgggcggattacctgaactcaggagtttgagacaagcctagccaacatggcgaaaccctatctctactaaaaatacaaaaaattagtcaggcgtggtggcatatgcctgtaatctcagctacttgaaaggctgaagcaggagaattgcttgaacccaggaggcagaggttgcagtaggctgagatcgcaccactgcactccagcctgggcgacacagcaaggtgctgtcacaaaacagaaaaaaaggaaaagaagaagagctcagtttcttgaactacaagctccatgtaaaacaagacatgtaaatatcaaacgtggaaatcgtgtctacaaaaaactattttaaagctcttcg

SEQ ID NO: 4254 - DNA, 489 bp, Homo sapiens
  misc_feature 1..489: note = U/M: U (0.21:0.88) in Blood T cells
  misc_feature 1..489: note = source = chr3:128507160-128507648; Gene: RAB7A (intron)
  source 1..489: mol_type = genomic DNA
cgaggttgctaaaatttgtgagaacatattttctatctttgaaattgtgaagaaggaaaaagaaaatcatgctaattttgctgtgacacctcatactgcaaaaggtaaaagccacagtatatgatgagtggttagttacaatggaaaaagcattaaatttgtaggtggaaaacatgaacatcatcaatgtgtcctgacggatgacaagtttggtacttgctgtgtttcaggcattcactgggggtcttggggcctaccccccatggataagtgggtactactatactttgctttcaattcctgcaacaccataaagccttcacctccacgtgagctgttatcctacctgcaagaattcagactttcgaattgctaactgacccccaacttcctagcccttccctgctgtcctcattttcaccatagcagtcctttgcccttcccctaggtacccctgtgtattcctggttaacctctttctgaccaccg

SEQ ID NO: 4255 - DNA, 216 bp, Homo sapiens
  misc_feature 1..216: note = U/M: U (0.17:0.83) in Blood T cells
  misc_feature 1..216: note = source = chr17:2465833-2466048; Gene: PAFAH1B1 (Intergenic)
  source 1..216: mol_type = genomic DNA
cgctattttgtgcctttggtctcaggaccttcctcagccgtcccttcttccaggcagactttgctcagtgcctcactcagtgtgaatcccgtgccttctacctccccgcataatgtcccccaaacttcgtcagagtacaaattcagctgcactgtggttctcatttagtcatctttgttcttcactagatcaaaaattcttgaggacagaaaagcg

SEQ ID NO: 4256 - DNA, 309 bp, Homo sapiens
  misc_feature 1..309: note = U/M: U (0.24:0.9) in Blood T cells
  misc_feature 1..309: note = source = chrX:16907400-16907708; Gene: RBBP7 (Intergenic)
  source 1..309: mol_type = genomic DNA
cgcttacatccctaagcctcactcacctcagcctagtctggaccctgcaggtagatccccacagatgacatcacaaagggaaattagtaacattatcatgataacctgacagacactagacagcatcttacccaagtgatcaaagcaaacatcaccagcaatcgggcaagttgacgtcatgaaccttctgatgtggttccccgagaagaacacatcatctcttatgtggtatccccatccaaaaatgtataactcggttgggcgcggtggctcacgcctgtaatcccagcactttgggaggccgaggcg

SEQ ID NO: 4257 - DNA, 305 bp, Homo sapiens
  misc_feature 1..305: note = U/M: U (0.24:0.89) in Blood T cells
  misc_feature 1..305: note = source = chr17:75449254-75449558; Gene: SEPT9 (intron)
  source 1..305: mol_type = genomic DNA
cgcctggggggtggcgtggggcactctgggatgagaagatgcgacttctgccctgagagccctgctttaatggaaggcgggggcatagttgcaggcagaagccatcaagcactgtggtcagaccagcattccatgtcaaaaatggccttgttggccgggcgcagtggctcatgcctgtaatcccaacacttcaggaggccaaggcaggcagatcacctgaggtcaagagttcgagaccagcctggccaacatggtgaaaccctgtctctactaaaaatactggctaatccgggcatggtggcgcg

SEQ ID NO: 4258 - DNA, 149 bp, Homo sapiens
  misc_feature 1..149: note = U/M: U (0.24:0.88) in Blood T cells
  misc_feature 1..149: note = source = chr1:224906543-224906691; Gene: CNIH3 (intron)
  source 1..149: mol_type = genomic DNA
cgggatccctctccatgtgtgcctgccaggtcgcgtgtctgctctggtttccccactacctgtagctcacaggctgtggcttttgacccctttgcctactcaccagtgtgtgagtgctggctgcggcatggtccagtgttcagctgtcg

SEQ ID NO: 4259 - DNA, 352 bp, Homo sapiens
  misc_feature 1..352: note = U/M: U (0.2:0.84) in Blood T cells
  misc_feature 1..352: note = source = chr7:99816908-99817259; Gene: PVRIG (intron)
  source 1..352: mol_type = genomic DNA
cgttggaagtgaaagggaagaggcactggtggctgtgctttgggcccgagcagccagaagccagttgccatcacctatgacgaggagacagcgcctggggcagagcccagtatggggtgcgttcagggtagatcaggaggtatgagtgggtagtgggcgagccaggctgggggttgtgggggaggcctgcattgcaggtgtaagcgtgggacccacatcagattggtagtgggtcatgcatgctgggctggctctcaggtcctccctgctggcttcccactcccaggggctttctcctccgattccttagctgggtgaggggcgggacagagccctttcttagggaagcccg

SEQ ID NO: 4260 - DNA, 465 bp, Homo sapiens
  misc_feature 1..465: note = U/M: U (0.24:0.88) in Blood T cells
  misc_feature 1..465: note = source = chr6:39890453-39890917; Gene: MOCS1 (intron)
  source 1..465: mol_type = genomic DNA
cgtggggtgttctgcagcacctctcaaaggctgacagagcttcagacatggacctgaggtgaacgggacctcaggctcggcagaaactgtaacctgcaatccttttgctctgcctccaggtgggggcccctcaaaaccctcacgtgagagggtaggcacaagtgttcgtgaacatcctggccctgacttctgttctctctcttcccccatccctccttcctccaccagcacccatctgccctgcccttcaaggctgctttgctctgaagcagctcctctggggaagatcagaggctagcccctgagggatgtcagagtgctcacaggcacagcgccacaggaagtgagggggtgcagccaccattctttttgaagcactgggagaggggcaaggggaggtgtttcacccacccccaccacctgggaggcaggaggtaaatcctcagaagcaggtcactgcaagcg

SEQ ID NO: 4261 - DNA, 123 bp, Homo sapiens
  misc_feature 1..123: note = U/M: U (0.25:0.88) in Blood T cells
  misc_feature 1..123: note = source = chr1:2949671-2949793; Gene: ACTRT2 (Intergenic)
  source 1..123: mol_type = genomic DNA
cgcgtgtgtaaggcgtggggagtgggtgagtttgcgcgtcaccttggctgggccacctccacccaacttcaccagatgttgtggtgaagatgtgtttagatgtgggcacacctgacatccgcg

SEQ ID NO: 4262 - DNA, 435 bp, Homo sapiens
  misc_feature 1..435: note = U/M: U (0.27:0.9) in Blood T cells
  misc_feature 1..435: note = source = chr2:197020991-197021425; Gene: STK17B (exon)
  source 1..435: mol_type = genomic DNA
cgaggctatacatttagtcttatgaaaatatctgaatataaattaggtcccttttacattttattaacaggaatctttacaagttcttgtcacacctttatcattcttattcttgacattttaatcatcttttcataccaactaaaataggtactatttagtatatacttactattccaatatcaaaatgatttcacttgtattttcatagacctcatgaagattaataacacggggacaagactttgccaattcaagcacagcaatctcgtgtaaaatttctgctcgacaatcctgtcctcttcttctcttttttagaaattttgcagcatattcttggccagtagattttgatatacattgtctaaccacagcaaattttcctctgggggaagatgagaacaatcaattttaatttttctgcagagaacaacg

SEQ ID NO: 4263 - DNA, 344 bp, Homo sapiens
  misc_feature 1..344: note = U/M: U (0.27:0.88) in Blood T cells
  misc_feature 1..344: note = source = chr6:91182911-91183254; Gene: MAP3K7 (Intergenic)
  source 1..344: mol_type = genomic DNA
cggtttcctttttattttattttattttagagatggagtcttcctctgtcacctaggctggagtgcagtggtgtgatctcggctcactgcaaccatcacctcctaggttcaagcagttctcctgcctcagcctcccgagtaagtagctgggattacaggcacctgataccacactgagcttctttgtgtgtgtgtgtgtgtgtgtgtgtgtgtgtgtgtgtgtgtacttttagtagagacagggtttcaccatattggccagactggactcgaactcctgacctcaggtgatctgcccgtctcagcctcccaaagtgctgggattacaggtgtgagccaccgcg

SEQ ID NO: 4264 - DNA, 422 bp, Homo sapiens
  misc_feature 1..422: note = U/M: U (0.27:0.88) in Blood T cells
  misc_feature 1..422: note = source = chr6:141887894-141888315; Gene: NMBR (Intergenic)
  source 1..422: mol_type = genomic DNA
cgcagctggagatctgagaacgggcagactgcctcctcaagtgggtccctgacacctgacccccgagcagcctaactgggaggcaccccgcagcaggggcacaatgacacctcacacggcccggtactccaacagacctgcagctgagggtgctgtctgttagaaggaaaactaacaaacagaaaggaaatccacaccaaaaacccatctgtacatcaccatcatcaaagaccaaaagtagataaaaccacaaagctggggaaaaaacagaacagaaaaactggaaactctaaaacgcagagcgcctctcctcctccaaaggaacgcagttcctcaccagcaacggaacaaagctggatggagaatgactttgacgagctgagagaagaagacttcagacgatcaaattactctgagctacg

SEQ ID NO: 4265 - DNA, 483 bp, Homo sapiens
  misc_feature 1..483: note = U/M: U (0.28:0.89) in Blood T cells
  misc_feature 1..483: note = source = chr19:9919947-9920429; Gene: FBXL12,FBXL12 (TTS,exon)
  source 1..483: mol_type = genomic DNA
cgagtcccaggcttaagcaatcctcccacctcagcctcctgaatagctgggataccagctgggtagatgcacaccaccacacctggctaattttttctgtagagacagggtttcaccatgttgcccaagctggtctcaaactcctgaactcaaagtgattcacttgcctcagatgtcccaggttggccttaaactcctgggctcaagtgatccacccacctcagcctcccaaagtgctgggtttacacatgtgagccaccatgcccggccctgacctcaacttcgacagctcttacccctgctcactctgccacacaaccttctttctgtttctggaaaatgccaagttcattctcatcttagcagtgctggcctttcctcttctgccctagctcttctgatctttgctttctcttcacctctcagatctcagcacagaggcctaccgtgctcactcaaccatgcaagtatgcctccatcacg

SEQ ID NO: 4266 - DNA, 470 bp, Homo sapiens
  misc_feature 1..470: note = U/M: U (0.28:0.88) in Blood T cells
  misc_feature 1..470: note = source = chr4:10163370-10163839; Gene: WDR1 (Intergenic)
  source 1..470: mol_type = genomic DNA
cggcaaaaggagccaaacatgacctggcagtgtagttgggtcctctggaagtatctggagctacactgtctaggtctgctttggacctacgtttgggaagtaaatgccttctaaactcactatccggggtcattgtgggtaataagggagaagcatcagagaacagttgttggtttaaagtaggtactgcaactggagtgcattgtgcttgtcataggttgtttcctggcagcaaactgtctcttgaaactgctggtaaactgaggcaggctacggaagaggctcttgcaagcctgactgttcgctcctttgaaccaggctgagactacttccgtgggtggtttgtggtggggtagttgagcgcttggggaaggacactttaagccaacactaagtttgtataaaatattcagattaaaacccatgaagagagaaaggaggcaggatggggctgaagtcagactgggacg

SEQ ID NO: 4267 - DNA, 135 bp, Homo sapiens
  misc_feature 1..135: note = U/M: U (0.29:0.87) in Blood T cells
  misc_feature 1..135: note = source = chr16:29033092-29033226; Gene: LAT (Intergenic)
  source 1..135: mol_type = genomic DNA
cgctctgttgcctaggctggagtgcagcagtggtgtgatctcggcacgctacaacttctgcctcctgggttcaagcgattctcctgcctcagcctcccgagtagctgggagtacaagcacccaccaccacgcccg

SEQ ID NO: 4268 - DNA, 189 bp, Homo sapiens
  misc_feature 1..189: note = U/M: U (0.25:0.83) in Blood T cells
  misc_feature 1..189: note = source = chr15:58108937-58109125; Gene: POLR2M (Intergenic)
  source 1..189: mol_type = genomic DNA
cgagcagagtgccctttatcttattgtatgaagggaccccacatcaaaggacgtaccactgtcaaagtgcacctggcaagttacacttgaaaagttttctaggcattctgtgattctcacagagattcccaagaagtgattgtcagcgagggtaggagtcgtccccagtgtggtgagccctgatccccg

SEQ ID NO: 4269 - DNA, 238 bp, Homo sapiens
  misc_feature 1..238: note = U/M: U (0.33:0.91) in Blood T cells
  misc_feature 1..238: note = source = chr9:132653217-132653454; Gene: FNBP1 (intron)
  source 1..238: mol_type = genomic DNA
cgaggtcaggagttcaagaccagcctggctaacatggtgaaaacccatctctattaaaaatacaacaattagcctggcgtggtggcaggtgcctgtaatcccagctacttgggaggctgaggcagaagaatcgcttcaacccaggaggcggaggttgcagtgagctgagatcgggccactgcactccagcctggacaacagagcaagactccgtcttaaaaaaaaaaaaaaggaaacg

SEQ ID NO: 4270 - DNA, 301 bp, Homo sapiens
  misc_feature 1..301: note = U/M: U (0.33:0.9) in Blood T cells
  misc_feature 1..301: note = source = chr15:22992596-22992896; Gene: CYFIP1 (intron)
  source 1..301: mol_type = genomic DNA
cgtgctgttagttagctgcaggcttcctagatgccctttctcagattaggtgcggccccttccatgcctgcgaagagagattgcattttgtcaaataccttgtctgcccccactggggatgtggtgcagtctttgttcttgtcatgtggtgacgtttcctatcatcatagccttccctaaagatatgaggttgagttgaaaagaggcttcagagccaaggcccggggtcacatggtgtgtggagaacgtgcccaggtggcgaataaaccaccgctgcagggaagatgctggggatgggacg

SEQ ID NO: 4271 - DNA, 145 bp, Homo sapiens
  misc_feature 1..145: note = U/M: U (0.22:0.78) in Blood T cells
  misc_feature 1..145: note = source = chrX:20372817-20372961; Gene: RPS6KA3 (Intergenic)
  source 1..145: mol_type = genomic DNA
cgctacatctaaagcgtttagaacagtactttgcacacagcaaggctttgatacgtgagaggtattactgctaacgctgctgctgtttttatttgagggtatgagagtgggtgaagtgaggaaggagggaagaagaagcatagcg

SEQ ID NO: 4272 - DNA, 291 bp, Homo sapiens
  misc_feature 1..291: note = U/M: U (0.33:0.89) in Blood T cells
  misc_feature 1..291: note = source = chr20:4359556-4359846; Gene: ADRA1D (Intergenic)
  source 1..291: mol_type = genomic DNA
cgccttggtttcttgaatagctgggaccacaggtgcacaccaccgtgcccacaaaaatattctcccaccgtattagtttttctagggctgctataataaactgggtggcttaaacaatagaatttcattctttcatagttctagaagctagaagtcaaggtgttggtggggacttgctctctctgaagattttaggggagactcagttccaagccctcctcttgggttccgatgttgtgagcaatctgagtgttttttgttgtagacgcatcacttcagtctttgcctccg

SEQ ID NO: 4273 - DNA, 487 bp, Homo sapiens
  misc_feature 1..487: note = U/M: U (0.29:0.85) in Blood T cells
  misc_feature 1..487: note = source = chr9:135699314-135699800; Gene: AK8 (intron)
  source 1..487: mol_type = genomic DNA
cgactctccaaagaggtagtgatcaaagaggtcacaggagtggccagatgtagctgcatggccctggcctgtggtgtgcccctggcatttggtgaacaaagaagtgaggagatggggtgagtgtctccaacaatgaggccacctgcaccatggggggcaccggatgccaagaagccacagggcaaagctactgaacatcaaaccaggtcacctcccgctggagctcagaaacagggagctgtgagaaaaggctaatgaggctgtaaaggcagcatttcgggcacctgaggcaggagagatgcccacagatgaggcacggacctgtgccagcccccaccccagcgttcaaaacagggcatccttccccagggagaccttccccctcctgccaaggccccagactgtcctgtgcaaactcagccaggggtggccccgttacaccttcctgccagtctgcctttaccaatgtgccttgcggtgggtgccg

SEQ ID NO: 4274 - DNA, 251 bp, Homo sapiens
  misc_feature 1..251: note = U/M: U (0.23:0.77) in Blood T cells
  misc_feature 1..251: note = source = chr1:9252942-9253192; Gene: MIR34A (Intergenic)
  source 1..251: mol_type = genomic DNA
cgacttctggcctctggggacctaaagaagccaagtggcaaagcggtatgaaaactaaaccagttctaggtccaggtgcacatcaaggcagtttgtggggcacgtggcaggtctgctgaaacacagtgcctgcccctcgccaaccttctctctctggcaggaaccccctcctttgagttaaaagtgttgcagaccccaggaaatgcctgagagaccttgtgccttaacagagagagatgttatgtgcaccg

SEQ ID NO: 4275 - DNA, 75 bp, Homo sapiens
  misc_feature 1..75: note = U/M: U (0.07:0.89) in Blood T cells
  misc_feature 1..75: note = source = chr11:133928201-133928275; Gene: JAM3 (Intergenic)
  source 1..75: mol_type = genomic DNA
cgcataggtctgctgggtcccacctgtcacatagatccgctggctcccgcgtgtcacatagatacgctggctccc

SEQ ID NO: 4276 - DNA, 375 bp, Homo sapiens
  misc_feature 1..375: note = U/M: U (0.11:0.9) in Blood T cells
  misc_feature 1..375: note = source = chr1:226919824-226920198; Gene: ITPKB (intron)
  source 1..375: mol_type = genomic DNA
cgaaggaaacaaaattccaatggcctttaaaaaacagtaagcaccatgaagccaagggttttgtattacacttctttatacaccccacaggtaattaggccagtgttttttgtttttgttttttgttttgttttgaaacggagtctcactctgtagcccaggctgcagtgcagtggtacaatctcgcctcattgcaacctctacctccagtgttcaagcaattctcctgccttagcctcccaagtagctgggattacaggcgcccgcgaccacgccagctaatttttgtatttttagtagagacggggtttcaccatgttggccaggctggttttgaactcctgacctcaagtgatccacccgccttggcctccg

SEQ ID NO: 4277 - DNA, 221 bp, Homo sapiens
  misc_feature 1..221: note = U/M: U (0.06:0.92) in Blood T cells
  misc_feature 1..221: note = source = chr8:28918821-28919041; Gene: HMBOX1 (Intergenic)
  source 1..221: mol_type = genomic DNA
cgaagcactgggagcttgggcagggcgtcccgactgcccctcagttttgccggagcactcggaagggcctcctcttttcctagtagttgcctcatggtgactctagaaagcaagtgtgtgcagcctgtgcctccccgacccatggcgggcgtctagatcaggccctaggagcctccccatccctgcctcttctagccacttcccggggggctgtagagcac

SEQ ID NO: 4278 - DNA, 417 bp, Homo sapiens
  misc_feature 1..417: note = U/M: U (0.06:0.89) in Blood T cells
  misc_feature 1..417: note = source = chr9:92096477-92096893; Gene: SEMA4D (Intergenic)
  source 1..417: mol_type = genomic DNA
cgagagggcagcagacacccgtggcggatataaatgtgcctaaattgtggcagacacacacaccggaatacgtggtggcaaggcaagagaagaagaccctgggtgagctcaagccaaatgtcacagacggatgctgagtgacacgcacgaggatgtgctgcagaacccaaggcacacagactcaagccagccaagattaacctgcgctgtgatcagctggggagtggtgagcagggggccccagggccctgtgctctgctcctcttcccaggcatcgcagggctggctccatttgtgaagattcaagggccgcacactgaggctaggtgtgcttcacagtaaattctgcaaatatctcactgcagaaggaaggaggagatggaaagatgaaaacagcaaacctggtgagagggtttc

SEQ ID NO: 4279 - DNA, 353 bp, Homo sapiens
  misc_feature 1..353: note = U/M: U (0.1:0.92) in Blood T cells
  misc_feature 1..353: note = source = chr17:80084861-80085213; Gene: CCDC57 (intron)
  source 1..353: mol_type = genomic DNA
cgaagcagcatctgtttccctccccccttctcgctacatcacagacccatgcagtcctcacaaggtgcacccttcaaacagacttttctgaaaacttcctgagaccagtagcaggagctggcactgtgacctgctgagtttaccaggcctatgacttaggtgcagagaagagtctcagggcggcaacgtccgcgcagcaaagcaggacgaggatgaggatgcggctgacacttgtctggcccgtgaggctgagcatcactggggtcggcctggctcttccccgggagcatcgctggggtcgacctggctcttccccaggagcagggccgtctaaagtgcaccaatgcccacgc

SEQ ID NO: 4280 - DNA, 106 bp, Homo sapiens
  misc_feature 1..106: note = U/M: U (0.13:0.94) in Blood T cells
  misc_feature 1..106: note = source = chr14:22973391-22973496; Gene: DAD1 (Intergenic)
  source 1..106: mol_type = genomic DNA
cgggcacggtggctcacgcctgtaatcccagcactttgggaggccgaggcgggtggatcacgaggtcaggagttcgagaccatcctggctaacacagtgaaacccc

SEQ ID NO: 4281 - DNA, 237 bp, Homo sapiens
  misc_feature 1..237: note = U/M: U (0.09:0.89) in Blood T cells
  misc_feature 1..237: note = source = chr11:118214295-118214531; Gene: CD3G (promoter-TSS)
  source 1..237: mol_type = genomic DNA
cgcctctttcatgatctcaaaagaatagtgaaaccaggtgccgtgtctcacgcctgtaatcccaacactttgggaggctgaggcaggtggatcacaaggtcaggagttcgagaccagcctgaccaacaaggtgaaaccccgtctctactaaaaatacaaaaattagccgggcttgctggcacgcacctgtaatctcagctactcaggaggctgaggcaggagaatcgcttgaacccc

SEQ ID NO: 4282 - DNA, 108 bp, Homo sapiens
  misc_feature 1..108: note = U/M: U (0.28:0.91) in Blood T cells
  misc_feature 1..108: note = source = chr8:144543703-144543810; Gene: ZC3H3 (intron)
  source 1..108: mol_type = genomic DNA
cggccacacaaaggctggagcgcggacattcgaggcagtattattcacgacagcccccaactggcaaccacccgaacggacaaagaaagtgtggagagcctctgcagc

SEQ ID NO: 4283 - DNA, 146 bp, Homo sapiens
  misc_feature 1..146: note = U/M: U (0.02:0.9) in Blood T cells
  misc_feature 1..146: note = source = chr22:40297780-40297925; Gene: GRAP2 (intron)
  source 1..146: mol_type = genomic DNA
cgcatttttgttacctgtacaaaggacaccagttttcattcctttacgaaaagaaaactttatgttgaagtgtattttggaagggtattgtctctcttcgtactagccgttaggctccatccctatgactgtctctggtttaggcg

SEQ ID NO: 4284 - DNA, 204 bp, Homo sapiens
  misc_feature 1..204: note = U/M: U (0.02:0.9) in Blood T cells
  misc_feature 1..204: note = source = chr17:80084613-80084816; Gene: CCDC57 (intron)
  source 1..204: mol_type = genomic DNA
cgtacacgtgtgttttcacacacactgcagcctgtaaggttactattctaacagtatctgtgacggtaaaggactggaaatagcctaaaatgcgcatgaaggagagaatgattaaatgaatgaggcacaccctcatgacggaagacagaagctgtaaggtaagaaggggacgccctccatgcaggcacacaggaaggacgcacg

SEQ ID NO: 4285 - DNA, 132 bp, Homo sapiens
  misc_feature 1..132: note = U/M: U (0.07:0.94) in Blood T cells
  misc_feature 1..132: note = source = chr17:80084450-80084581; Gene: CCDC57 (intron)
  source 1..132: mol_type = genomic DNA
cgctgatgccaatcctgctgccaccggcaaaagttccgtgtggctacaggactctcagacactgctgctgggagcagcctctgggtgggtggcggaggctgaggcgatgctgtccaccacacgtggcacgcg

SEQ ID NO: 4286 - DNA, 229 bp, Homo sapiens
  misc_feature 1..229: note = U/M: U (0.04:0.9) in Blood T cells
  misc_feature 1..229: note = source = chr7:138588277-138588505; Gene: KIAA1549 (exon)
  source 1..229: mol_type = genomic DNA
cgcaagcgctgtctctctccctctctctccttcccctcctcctttgatgtggagtacctgcaccacactgttccctgcagctacagtggcccttctccacatccgccttctggtggaaacctcgctgagcagctgggccagcttgcgttccatctcggcttgaaacacttcattctggagttgcttctccatgacgcccaggagaactacatttaaatgaaaacatacg

SEQ ID NO: 4287 - DNA, 462 bp, Homo sapiens
  misc_feature 1..462: note = U/M: U (0.02:0.87) in Blood T cells
  misc_feature 1..462: note = source = chr14:61799217-61799678; Gene: PRKCH (intron)
  source 1..462: mol_type = genomic DNA
cgtataagttttacccttgcacgcctttgacctcacagggagataaatgcttaaaagttaccaaagatgtttagtttgtgcttgtggtaaaaaattaagaaatttgccagagcataaaaccatggtcaacatgatccctgtcataattgcattaataagtcatataggccagagtgagcatattctatacctcgtcctgtatttccaatttcagacctagcctctgttctccatgcacttagacaaaaaccgcaaagctgcatatttattcgtaagtcacatctgtcccttgtactagcatagctctgtctctccacctctcgtgtcgcaagcccttaaatatgatacactctttccttacaatggactttggtttttgcgtctgtgatgttggagggctgggccccttgagctctgtggtccttccggtgtcagagttttgtggttctggtaatggttccg

SEQ ID NO: 4288 - DNA, 217 bp, Homo sapiens
  misc_feature 1..217: note = U/M: U (0.1:0.94) in Blood T cells
  misc_feature 1..217: note = source = chr1:8212967-8213183; Gene: ERRFI1 (Intergenic)
  source 1..217: mol_type = genomic DNA
cgcattgatgtcggttaattgatatacctgaccccgctactagtgcacaattactgccctgcgtcaggccaaatcaggggcatggatcatcatgttggggacactaccccaaaggaggagatgacatggctgtccacaaaccgggagcccagttgtgcccagaattggttccttctggttggttcttggtctcgctgacttcaaaaatgaagccgcg

SEQ ID NO: 4289 - DNA, 270 bp, Homo sapiens
  misc_feature 1..270: note = U/M: U (0.07:0.91) in Blood T cells
  misc_feature 1..270: note = source = chr7:623458-623727; Gene: PRKAR1B (intron)
  source 1..270: mol_type = genomic DNA
cgcacacacacccccatgtgcacactcacccccacacacctgcacggttctgcctgctctagcccaaggagcccccactggcccagctggcgccatcgcgtataactcaggcttcagcagcgtctttcctgccaggccgttaagcaggctcacccgaaggtgaaagggccctgggcacacctgaaaccccagcctgccgttatccttcccggaactgagagcaatgatggcggcgtagaaagggcagaggcggctcccagagaaactgcg

SEQ ID NO: 4290 - DNA, 180 bp, Homo sapiens
  misc_feature 1..180: note = U/M: U (0.07:0.9) in Blood T cells
  misc_feature 1..180: note = source = chr8:144543841-144544020; Gene: ZC3H3 (intron)
  source 1..180: mol_type = genomic DNA
cgctgaggtgctgcaggacagacctccaaacatgatgcaaaatcaaagatgccaaacaaccatgtactgtatgattccagcaacacgaaaggcccacagaagaaacttaccgagacagaagtggatgagtgttaggggccgggactgatgatgaaaagagtgagggaattctggggggcg

SEQ ID NO: 4291 - DNA, 168 bp, Homo sapiens
  misc_feature 1..168: note = U/M: U (0.11:0.93) in Blood T cells
  misc_feature 1..168: note = source = chr21:43825682-43825849; Gene: UBASH3A (intron)
  source 1..168: mol_type = genomic DNA
cggtgcccacccaaatagcagcattcggcatcatgtggtgggttcctcatggacgcccgctgtttccagtctgcattcctgataaattacctttgctatattccattctgtttcatttggtccagttctgcccaattcaatgcaatgtacttacgtcccgggttaccg

SEQ ID NO: 4292 - DNA, 269 bp, Homo sapiens
  misc_feature 1..269: note = U/M: U (0.1:0.91) in Blood T cells
  misc_feature 1..269: note = source = chr22:40720366-40720634; Gene: TNRC6B (exon)
  source 1..269: mol_type = genomic DNA
cgttagtttgaaatgggaacggaagataacttttgatgatgcgatgtctcaaaaacagagaaactttgttccctctttccttatgatcaggtttgagaaattcttcaaaaaattaggtgaagttgagttacatatttctgttggttggttctctttttcattttatgaaaacagaaaagaataagtggtgagcagcctcctgaaagcatctgcagctactccctctgctcctttctcgccgagcgttacctgtgccaggccgtggcgcg

SEQ ID NO: 4293 - DNA, 152 bp, Homo sapiens
  misc_feature 1..152: note = U/M: U (0.11:0.9) in Blood T cells
  misc_feature 1..152: note = source = chr6:548666-548817; Gene: EXOC2 (intron)
  source 1..152: mol_type = genomic DNA
cggctgtgtgtgcacgcgtgcatgcacaaagcagcaaagcaaaagcatccttgaggtcatacagaaagggagagaggaaggagaggtgtgaatacgcaggaagaggtttttctgcaggctcagggagtttgctgctggctgtatctaaagcg

SEQ ID NO: 4294 - DNA, 233 bp, Homo sapiens
  misc_feature 1..233: note = U/M: U (0.08:0.87) in Blood T cells
  misc_feature 1..233: note = source = chr9:132631612-132631844; Gene: USP20 (intron)
  source 1..233: mol_type = genomic DNA
cggaggcggaaggagcagcgctaccgcagcgtcatctcagacatctttgacggctccattctcagccttgtgcagtgtctcacctgtgaccgggtgggtgccccagggatggggggagctgggccaggctgccagtggcctcagcagctcttgccctgactgggtgcagggtgggctctccacgggtgctccctgcttttatccaggggagggccctgcctgcgtggatcccg

SEQ ID NO: 4295 - DNA, 265 bp, Homo sapiens
  misc_feature 1..265: note = U/M: U (0.15:0.94) in Blood T cells
  misc_feature 1..265: note = source = chr14:22965217-22965481; Gene: DAD1 (Intergenic)
  source 1..265: mol_type = genomic DNA
cgggtgcggtagctcactcctgtaatcccagcactttgggaggccgaggcgggaagatcatgaggtcaagagatgcagaccatcctggccaacatggtgaaaccccatctctactaaaaatacaaaaaattagctgggcatggtggcatgcgccggtagtcccagctactcaggaggctgaggcaggagaatcgcttgaacccggaaggcggaggttgccgtgggccgagatcgtgccactgcactccagcctggcgacagagcg

SEQ ID NO: 4296 - DNA, 382 bp, Homo sapiens
  misc_feature 1..382: note = U/M: U (0.13:0.89) in Blood T cells
  misc_feature 1..382: note = source = chr14:69248340-69248721; Gene: ZFP36L1 (Intergenic)
  source 1..382: mol_type = genomic DNA
cgggctgagaggagaaattctcctccatgactatgggtccccaggggagggtgaacatcggaacctggacctgttaagtggcccatgccatttgacatctgcctccttttaaaagtggaggctgagagcctgggtgttgcagcccaacagacctgggtcccggctcagtggtatacagctgtgcaattgggaatagcgagttctccctgagcctgaccttccccatctgtaaaatggggctaatgatagcactgactcgcaggtactatcaaacgtaaccatgtgacggaggcccagcccccagtgtgcatggtaagtcttcacaaatgctggttcatgttattatttttactatataaattcaagagaaccacctataacg

SEQ ID NO: 4297 - DNA, 149 bp, Homo sapiens
  misc_feature 1..149: note = U/M: U (0.16:0.91) in Blood T cells
  misc_feature 1..149: note = source = chr9:97384575-97384723; Gene: FBP1 (intron)
  source 1..149: mol_type = genomic DNA
cgagagccttgatgtgggaaggggaaaagatgggtctttgaagacaccagcaagcctctgaaagtgggtggtaagggcacacccgcgcccttggccatgatggcgatgtgcgctcgcctgggaactgacggtccctgatccagtggccg

SEQ ID NO: 4298 - DNA, 364 bp, Homo sapiens
  misc_feature 1..364: note = U/M: U (0.11:0.86) in Blood T cells
  misc_feature 1..364: note = source = chr21:43825906-43826269; Gene: UBASH3A (intron)
  source 1..364: mol_type = genomic DNA
cgtgggtgcaaggggactgtgtaagccgtaacaagtgcctgcctgggtgctttggaaagggctgtttcccagcagagaggtgtgggaggcgagcctggggatcagggtcgctgatgctggggtgaggaaagcgtgtgtccgagccaggggcacgttccgcagggtgggtccatttgatctaggcagtggggggggggggggcaggccagggagagggattgcaggagcgggcggaggtcaggtcctcagccctgagaccccgtgccaagggctgaagcgggtagccagggaaggacagtgagggggaggtgtgagctggtcagcattgtccaaaaccacgatggcagcactcaggggacaggcg

SEQ ID NO: 4299 - DNA, 482 bp, Homo sapiens
  misc_feature 1..482: note = U/M: U (0.12:0.87) in Blood T cells
  misc_feature 1..482: note = source = chr14:22983921-22984402; Gene: DAD1 (Intergenic)
  source 1..482: mol_type = genomic DNA
cgtggtggcaggcacctataatcccagctactcaggaggctgaggcaggataatcacttgaacccgggaggttgaggttgccatgagccgagatcgtgccactgcactccagcctgggtgacagagtgagactccatctcaaaaaaaaaaaaaaaattacagataaaaccagcattcaccttggccacttccttcagtatcagtttcctcctccccaaaagtgaccactgaaaccagcttggtgtgttgtgatgagtttctctgtggaatatgtttatgtgaaatcccatcttcaaccaggaaagcttgagagggaaagggctcagactgcagtttgcaggatttcaattagatataaggaacagttgattagatgtaagagctgttagcaaaggaaaaccttataaaaactaggagctcttaataactagacaggtctttggtcagacaacacactgactgaggacaggaggatggattcg

SEQ ID NO: 4300 - DNA, 271 bp, Homo sapiens
  misc_feature 1..271: note = U/M: U (0.2:0.94) in Blood T cells
  misc_feature 1..271: note = source = chr14:91712322-91712592; Gene: GPR68 (intron)
  source 1..271: mol_type = genomic DNA
cgggaagctgaggcaggagaatcacttgaacctgggaggcagaggttgcggtgagctgagatcatgccattgcactccagactgggcgacaaaagcgaaactccgtctcaaaaaaaaaaaagtttcctacgtcagttgcttcttgcaggccttatgttacgagcaaaggcttcagcttgttgtggtgcagtagcgtgcatttagacacacgtgctacttctgagttgcggaagtgtggctggctttccctgatgtcatataggaggacgcg

SEQ ID NO: 4301 - DNA, 193 bp, Homo sapiens
  misc_feature 1..193: note = U/M: U (0.2:0.93) in Blood T cells
  misc_feature 1..193: note = source = chr7:138778366-138778558; Gene: ZC3HAV1 (intron)
  source 1..193: mol_type = genomic DNA
cggcccctgcccgccagagaacaaccccctttgactataattttccactacctacccaaatcctataaaacggccccaccctcatctcccttcgctgactctctttccggactcagcccgcctgcatccaggtgaaataaacagccttgttgctcacacaaagcctgtttggtggtctcttcacacggacgcg

SEQ ID NO: 4302 - DNA, 330 bp, Homo sapiens
  misc_feature 1..330: note = U/M: U (0.17:0.9) in Blood T cells
  misc_feature 1..330: note = source = chr22:37634189-37634518; Gene: RAC2 (intron)
  source 1..330: mol_type = genomic DNA
cgcattaagatgagttttaagtgtgaagggagccacaggagagatttaggccaggttaactttcagttgttttttgggaggctctttttattttattttattttttgagacagggtctcactttgttgcccaggctggagtgcagtagcacaatcacagctcaatgcagccgcaccctcctaggctcaagcgatcctcccacctcagtctcccgagtcgctgggactacaggcatgcaccaccatgcccggctaatttttgtattttttgtagagatggggtttctgctccatgttgcccaggctggtctcgaactcatgggctcaagcg

SEQ ID NO: 4303 - DNA, 76 bp, Homo sapiens
  misc_feature 1..76: note = U/M: U (0.17:0.89) in Blood T cells
  misc_feature 1..76: note = source = chr13:114776475-114776550; Gene: RASA3 (intron)
  source 1..76: mol_type = genomic DNA
cgggacggggacgctcaggtcctgggtttcaagagaggatgtggtgccggctttgattcttgatctttatcttacg

SEQ ID NO: 4304 - DNA, 471 bp, Homo sapiens
  misc_feature 1..471: note = U/M: U (0.18:0.9) in Blood T cells
  misc_feature 1..471: note = source = chr22:40721118-40721588; Gene: TNRC6B (exon)
  source 1..471: mol_type = genomic DNA
cgacattttgtaccagcaaatacctgcccattccaacccttggtgggagcagacctctactgtcctctgtaacttgctgctattgaggacaagggagtttttctttctttagcgtcttcagtgaaggatacaatacaacaatgcctaatgtatttgactttttagcttgtgtctgtgtgtaggtgggtgggtgggtgtgtataggaaaagcctaaaacaagttatttgcatttcagtggttttgtgagacaaagaatgggaaattctgtagcccttctggcttaccctgttgattataaacctagcctcaaaagagattgacaggcatgactcaagtgagtgttcacatatacaagcctgcatgagccctctgtgggtaggtggtcacacttggcatctgcagcattgacgtggccccgctgggtgccttgagcatgccctcttcctgctctgcaatttgaatcaccaccg

SEQ ID NO: 4305 - DNA, 156 bp, Homo sapiens
  misc_feature 1..156: note = U/M: U (0.13:0.84) in Blood T cells
  misc_feature 1..156: note = source = chr7:1864297-1864452; Gene: MAD1L1 (intron)
  source 1..156: mol_type = genomic DNA
cgtgcctggatggcatctgccggggcagccataggtccctgtgaacctcgcttgtagaatacacctgctctcaaagccagcgaaggggagatttttttttgtcttgaggctgtcaggaaatcaaagtgttttcaacttcaaaagactctccgggcg

SEQ ID NO: 4306 - DNA, 270 bp, Homo sapiens
  misc_feature 1..270: note = U/M: U (0.2:0.89) in Blood T cells
  misc_feature 1..270: note = source = chr16:89163357-89163626; Gene: ACSF3 (intron)
  source 1..270: mol_type = genomic DNA
cgcaggagaacagcagtttcttctcagcctgcactttgagtttgcccagcccagctgtgcacgtcagcatcaccagctctgctgagctctgggttttgtggggaatccactcttattcttccgtggcttcgccctgcggggtgactcaggaatttgtagaaatgccaaaaggggggctgtgctctggtagtgtgtgctgtgtgtgctcagcgtgtggttagcgtgtgctcagcgtgtggttaccgtgtgcacagcacgagcttgaactcg

SEQ ID NO: 4307 - DNA, 103 bp, Homo sapiens
  misc_feature 1..103: note = U/M: U (0.26:0.94) in Blood T cells
  misc_feature 1..103: note = source = chr19:1079683-1079785; Gene: HMHA1 (intron)
  source 1..103: mol_type = genomic DNA
cgccccgcccccaccgcaggcggaggaagctatggccacctaccgcacctgcgtggccgacgcgaagacgcagaagcaggagctggaggataccaaggtgacg

SEQ ID NO: 4308 - DNA, 479 bp, Homo sapiens
  misc_feature 1..479: note = U/M: U (0.23:0.91) in Blood T cells
  misc_feature 1..479: note = source = chr20:35273540-35274018; Gene: SLA2 (intron)
  source 1..479: mol_type = genomic DNA
cgagaccagcctgggcaacatagtgagaacccccacccccacccccaccaccgcctgccatctctacaaaaatataacgaattagctgggcatggtggtacatgcctgtagtctcagctacttgggaggctaaggcaggaggatcacttgagcccagtggttcaagtctatagttagtcataattacgccgctgcactccagcctgggtaacagaatgagaccccaactcaaaaaaaaaaatgaatttggattgagttaaagggagacctctccctctcttccaattgagaaatatcacccctttgagagtgagagtgcactgtaggctctacagctgaaatgtcttgagagatggtagccctcacgttcctgactttggagtctgactgcagcgcagagaggggcccaaagtcacacagcaagtgcgcacctgagatgggactaggacgggcgtgaagacaagctgcacggaagagcg

SEQ ID NO: 4309 - DNA, 405 bp, Homo sapiens
  misc_feature 1..405: note = U/M: U (0.22:0.89) in Blood T cells
  misc_feature 1..405: note = source = chr14:23017482-23017886; Gene: DAD1 (Intergenic)
  source 1..405: mol_type = genomic DNA
cgggtcacagggccttctaggccatgagagggtagacagtattctaagtacgccagaaagctgttgatcggcttcaagcagggaagggacacctaatttgcttttcttttctttttttttttttttttttttttttttttgagatggagttttgctcttgttgcccaggctggagtgcaatggtgcatcttggctcactacaagcctctgcctcccaggttcaagtgattctcctgcctcagcctcccaagtagctgggattacaggcacccaccaccatgcccggctaattttttgtatttttagtagagacagggtttcactatgttggccaggctggtctcgaactcctgacctcaggtgatccacccgcttcagcctcccaaagtgctgggattacaggcg

SEQ ID NO: 4310 - DNA, 391 bp, Homo sapiens
  misc_feature 1..391: note = U/M: U (0.28:0.93) in Blood T cells
  misc_feature 1..391: note = source = chr14:22983517-22983907; Gene: DAD1 (Intergenic)
  source 1..391: mol_type = genomic DNA
cgtccggctaattttttgtatttttttttagtagagacagggtttcaccgtgttggccaggatgatctcgatctcccgacctcgtgatccacccgcctcagcctcccaaagtgctgggattacaggcgtgagccaccgtgcccagccccaaaagccatttttaaatacattgcaggtttctatttaatgttgttattcattttgatttgcccaagtaatacattaaaatttctcattgtaaaccattcaaattacagataaagtccaggcacggtggctcacacctgtaatcccagcactttagaaggctgaggtgggcaaatcacctgaggtcaggagtttgagaccagtctggccaacatgatgaaatcccatctctactaaaaatacg

SEQ ID NO: 4311 - DNA, 144 bp, Homo sapiens
  misc_feature 1..144: note = U/M: U (0.24:0.88) in Blood T cells
  misc_feature 1..144: note = source = chr12:133443726-133443869; Gene: CHFR (intron)
  source 1..144: mol_type = genomic DNA
cgaacaggagaggtgtggctgcccgtgtgaagacagagcaacggcatacaacggagtaaaaaccacatcaacagaagtggaaacaggcccagagagcgtgagaggtttctggtttcaagaaggcacactgagtccctgcacccg

SEQ ID NO: 4312 - DNA, 194 bp, Homo sapiens
  misc_feature 1..194: note = U/M: U (0.23:0.86) in Blood T cells
  misc_feature 1..194: note = source = chr22:37627299-37627492; Gene: RAC2,RAC2 (exon,intron)
  source 1..194: mol_type = genomic DNA
cgggtaggtgatgggagccagcttcttctccttcagtttctcgatggtgtccttgtcgtcccgcaggtccagcttggtgcccaccaggatgatgggtgtgctggggcagtggtgccgcacttctgggaaccactgggcaggtgggtggggggacacaaggttgtatgggtcaagagggggcgcgaggctgtgcg

SEQ ID NO: 4313 - DNA, 313 bp, Homo sapiens
  misc_feature 1..313: note = U/M: M (0.89:0.07) in Blood T cells
  misc_feature 1..313: note = source = chr5:169407439-169407751; Gene: FAM196B (exon)
  source 1..313: mol_type = genomic DNA
cgtaggaataaataaaaagccgaacaaactgctcggcagctaccatgtgaaaagaaaagacctctagtggccacaggctgaattctttaaggaagggagaggagagatggagcagaggaaacacacgctcctgtgtgtgtatagacacacacacacacacatatgcaggcacacacacatgcatatacacacactcctacaccccacaaatgctaaggtttctcctttcttgcatttggcctggctggaggtagaaacgagaataatggttatttcttgatttaagtgggagctggttaaattagcagtgacg

SEQ ID NO: 4314 - DNA, 188 bp, Homo sapiens
  misc_feature 1..188: note = U/M: M (0.92:0.14) in Blood T cells
  misc_feature 1..188: note = source = chr10:92794681-92794868; Gene: LINC00502 (Intergenic)
  source 1..188: mol_type = genomic DNA
cggccctagaggctgggaaatgggggaggatgacgggaactgtaaaggggatttaaactcttccaccacagttctgctttcattcacttccccggaaggttctggctggctgcccttactgctcacgtggctttcattccaaaacgcaattcctcacttcagctttttaaattctgatgacattggcg

SEQ ID NO: 4315 - DNA, 236 bp, Homo sapiens
  misc_feature 1..236: note = U/M: M (0.85:0.08) in Blood T cells
  misc_feature 1..236: note = source = chr19:18268001-18268236; Gene: PIK3R2 (intron)
  source 1..236: mol_type = genomic DNA
cgacgctggccccagcctccaggcatctggtatctccagggcccaggcctgcgtcctgcctcggcctgaaggagcaggaggtggccccgtctgggctcccagccagaatctgcctctccccctggtaacagccacctccctcctctgcctggcctctgtccagccaccatacacggccccacgtggggcggctgcccagccccaccctctgaatcttccagggttatgtgacctcg

SEQ ID NO: 4316 - DNA, 299 bp, Homo sapiens
  misc_feature 1..299: note = U/M: M (0.84:0.08) in Blood T cells
  misc_feature 1..299: note = source = chr6:108883848-108884146; Gene: FOXO3 (intron)
  source 1..299: mol_type = genomic DNA
cgtttgggaggaggtttgggggctgggccgggccgtaatggcttctacctgtaaatgaacccgaagagagactctctaccgttccttatcatcctcttggggcacgggacacgtggtagggagagaggtgtggaaaggcctatgatgtaatgacttcctgcagttgggtatccaaagagattaactcctctgcccctgctgggctgctgatatccagctgctttcctcttcctaggcacctccctggccccttcccccaagacagtgtgtgtcagtaccaggccaaagagtcctgtgcg

SEQ ID NO: 4317 - DNA, 463 bp, Homo sapiens
  misc_feature 1..463: note = U/M: M (0.81:0.09) in Blood T cells
  misc_feature 1..463: note = source = chr22:43390988-43391450; Gene: PACSIN2 (intron)
  source 1..463: mol_type = genomic DNA
cgtttagactggaaattccatttaggctgcctcctggactccctctcaggaccctgcttccaacaatcacatagtcaaaggggacaatgtcccccctccccgcctcggggctgctccgggccccaactgccaggaagcaagactggacactgcaacgtttaactcacattgagctgaagcagccgagttcttcctctataaagtgagctgactgcagagaaactgcaccctggcattcagtcatgtttcacaataactccagaggaggagctctgcttctgacatgaagtgtggcaagccttagaaggaagcagagctacaaagttattcaatgcaaatatttaaagaacaggctgcttttggtgccaggaggacggcagcttgcaaacctccagtcacaataaaggttctgcttggttgggactgagtcaggatgacaaatgttgtttcattgcaccctccg

SEQ ID NO: 4318 - DNA, 343 bp, Homo sapiens
  misc_feature 1..343: note = U/M: M (0.88:0.22) in Blood T cells
  misc_feature 1..343: note = source = chr17:33825598-33825940; Gene: SLFN12L (Intergenic)
  source 1..343: mol_type = genomic DNA
cgcttccatggaatgtttctgcagaaagctagccagaagggcgtcattgagcagctacagaccactcaaaccatccaggacatcctatctaacttcaagcttcgagcattcctagataacaattacgtggtccatctccaagaagacagctacaactaccttatccactacctccaaagtgacagctatactgccctgtgcaaaatgtttatcttacttattcatcttgatgtgcagcctgccaagacaacagactaacagctgtatgcaagtggcagctcctcccgcagtgagaacaattacttggaggcccctgatatgcccagccctattctgcagaacg

SEQ ID NO: 4319 - DNA, 132 bp, Homo sapiens
  misc_feature 1..132: note = U/M: M (0.64:0.04) in Blood T cells
  misc_feature 1..132: note = source = chr1:27855041-27855172; Gene: WASF2 (Intergenic)
  source 1..132: mol_type = genomic DNA
cgagcgtacctgtgcctctgtatctgtgtctgtacgagcccaaggggtgtgtgtgtgtccgtgtgcgcgtccatgtctctgggttttccccaggaggaacgccctgggtgtgtcggcgactctggatgtccg

SEQ ID NO: 4320 - DNA, 195 bp, Homo sapiens
  misc_feature 1..195: note = U/M: M (0.65:0.06) in Blood T cells
  misc_feature 1..195: note = source = chr12:51610762-51610956; Gene: POU6F1 (intron)
  source 1..195: mol_type = genomic DNA
cgggcccattattatgactatttattaataataatatcgatattaaatatttatgaagtgctcatgctctgctagaaggtggccctcccatcactgacccacccttccagcaacgcctgggtccctacccccgggtcccaccggtcgtcccggagtttgttcattcgggagaaccgtgacaggtcaccctggccg

SEQ ID NO: 4321 - DNA, 73 bp, Homo sapiens
  misc_feature 1..73: note = U/M: M (0.69:0.11) in Blood T cells
  misc_feature 1..73: note = source = chr11:48001422-48001494; Gene: PTPRJ (promoter-TSS)
  source 1..73: mol_type = genomic DNA
cgtcctagtacgatctttatttcacacgggaggagaggagggtgggtggggtcggccagagaggagaaatgcg

SEQ ID NO: 4322 - DNA, 352 bp, Homo sapiens
  misc_feature 1..352: note = U/M: M (0.58:0.08) in Blood T cells
  misc_feature 1..352: note = source = chr1:9352196-9352547; Gene: SPSB1 (promoter-TSS)
  source 1..352: mol_type = genomic DNA
cgttttcaatggacactacacagcgaggggtggggaatgccaggagattttgctctcaaaacagcaaagtctttaaaatcttcccagtcccaagtgactgctctgttcggggaagggggaggaaaattccttgaacgagctagagccacaggacaagtccccagaggctgggacctgttcagggagcagccctgcggatgccaggtgcccgcgccctcagggtctcgaggtccgaggcccccgtccccgtgggcaccgaaacgcgagcggccgaaacagcgctgcaggaggctccctggacccccggcggctgcccactcgtccccgctgggcacttcagaggaggccggcg

SEQ ID NO: 4323 - DNA, 264 bp, Homo sapiens
  misc_feature 1..264: note = U/M: M (0.66:0.03) in Blood T cells
  misc_feature 1..264: note = source = chr5:10695232-10695495; Gene: DAP (intron)
  source 1..264: mol_type = genomic DNA
cgtctcactcgattgcacccagacatttctggataacatcattcttcagagtgtgacagtcgaggctgtctccctccttcagcctggcttcagcactgacaacatttccacaagatggcactgctggtcctctcagcccgcgaacgctccggccagctcagccacctcaaggagaaatggaagccggccaggcactgcgggcgagggctgctggcacctgggcacgagggtgccccttctccccaggagtggctaattgtcacg

SEQ ID NO: 4324 - DNA, 213 bp, Homo sapiens
  misc_feature 1..213: note = U/M: M (0.91:0.07) in Blood T cells
  misc_feature 1..213: note = source = chr6:108883005-108883217; Gene: FOXO3 (intron)
  source 1..213: mol_type = genomic DNA
cgacagcaacagctctgccggctggaaggtgcgtacccaccccgggctggcagcaggacccgccgggcctcctgcgcagcgcgagacgcgtctcggattcgtcggagtgcgcttgcgggctccagggcaaggggttggcagggggagcctccgctgcgaggctttgggggttatctttgatccccggagtcggggcacctggggacggtctcg

SEQ ID NO: 4325 - DNA, 221 bp, Homo sapiens
  misc_feature 1..221: note = U/M: M (0.85:0.09) in Blood T cells
  misc_feature 1..221: note = source = chr6:108882762-108882982; Gene: FOXO3 (exon)
  source 1..221: mol_type = genomic DNA
cgggctgagcgggggtacacaggcgctgctgcagcctcagcaaccgctgccaccgccgcagccgggggcggctgggggctccgggcagccgaggaaatgttcgtcgcggcggaacgcctggggaaacctgtcctacgcggacctgatcacccgcgccatcgagagctccccggacaaacggctcactctgtcccagatctacgagtggatggtgcgttgcg

SEQ ID NO: 4326 - DNA, 298 bp, Homo sapiens
  misc_feature 1..298: note = U/M: M (0.87:0.11) in Blood T cells
  misc_feature 1..298: note = source = chr6:108883281-108883578; Gene: FOXO3 (intron)
  source 1..298: mol_type = genomic DNA
cgccggcgagggaagggcgaacggacaggagtacatttgctggattctccggacagcaccgaggaggtaggtccgcagccaactttggagtagagtttaccgtagtgggggtctggtgcgggcgctgtggctggagtgagaggtgtgggggtgtttgggacgcagtgtctggaggaggggttggatgtgtggtttccagtctgtcgcaggagcatgttgcgtcgtcactagctgaatgagaaccttcgggtccaagtttcagcttgtgggtgttaacacctacaggcacatcgatccg

SEQ ID NO: 4327 - DNA, 298 bp, Homo sapiens
  misc_feature 1..298: note = U/M: M (0.85:0.11) in Blood T cells
  misc_feature 1..298: note = source = chr3:170073717-170074014; Gene: SKIL (Intergenic)
  source 1..298: mol_type = genomic DNA
cgcagatgctgtttttcccccactggctctgcacagaacatcattatctttgccacgcttctgtctctatggcaataacagatggaaagtgctgtggaattattcatgttcaggaaaggaggcagtcaagaaggaagaaaaggtgggggggcggggtggagagggggcacgacctgggagctcggcggtggaggcctaaggaagggaacttgggtgggggtgcggggagtggtggggattgagaggcttgtgagcctttcggaggcctgttgtgaggaaaaaaaaaataaaaagtacg

SEQ ID NO: 4328 - DNA, 106 bp, Homo sapiens
  misc_feature 1..106: note = U/M: M (0.77:0.09) in Blood T cells
  misc_feature 1..106: note = source = chr1:24229215-24229320; Gene: CNR2 (intron)
  source 1..106: mol_type = genomic DNA
cgcgcagcgtgggggaccgcgccatttggggctctccgggtggttgttgccaagtgtgggctgcgcgggcgcgggcgcgggggcgcggtgcaggctgcgctgcccg

SEQ ID NO: 4329 - DNA, 158 bp, Homo sapiens
  misc_feature 1..158: note = U/M: M (0.7:0.04) in Blood T cells
  misc_feature 1..158: note = source = chr6:12013731-12013888; Gene: HIVEP1 (intron)
  source 1..158: mol_type = genomic DNA
cggggtagcagaaagcctttacggacagggaatgtgcatattttacatttatgctccggatcccatgggatcacatgattggattacagtcagagttcacgctttaaaaacttccaaatatcgttaccatttaaaagctttaagtttaacaacgaacg

SEQ ID NO: 4330 - DNA, 384 bp, Homo sapiens
  misc_feature 1..384: note = U/M: M (0.73:0.07) in Blood T cells
  misc_feature 1..384: note = source = chr10:88295324-88295707; Gene: WAPAL (Intergenic)
  source 1..384: mol_type = genomic DNA
cgggacctgggcgaggcctgcgacctgggcggggccagggttgggctctgccagagctgcgccgcagccgccctgcccgggcctccccgcccccacctgtgacctggattccgcggttcctgcgcgggggtggagggcgtaaaggacacgcgcaaataaaggtctgtggcccaggaaaacttcaagtcctgaaatcggtgcaccaaggatactttaaggcgaggggtcggggctgtgtaatcatttacccggttcgtccgtgtacaccggcctctctagcttacaccaacacatgtttactgggttcgcacccaagccagagtcggtttgtttagtaatcccacagacgcttctgcccgttttctaggagacggatctgggccg

SEQ ID NO: 4331 - DNA, 492 bp, Homo sapiens
  misc_feature 1..492: note = U/M: M (0.69:0.04) in Blood T cells
  misc_feature 1..492: note = source = chr1:27928352-27928843; Gene: AHDC1 (intron)
  source 1..492: mol_type = genomic DNA
cgggcacatgcccccgcccagccggcggcgacagcagcagcggacaaaatgtggccaccctgacccggaggcaaagcttgtcctcacaccctgagctctgcccagggagctggggccaagtcccgcctgacaccaactggtccggcgggaaacgcctgcccagccagacaggcacaggccccccaagggtccctccttgtgctcagggaccaggctggtacagtccggccctgcctcccagggtgacgcctgggcccaaattcagctggccctgccagtcaggcactggtgcagaaccgagggcaccaggctcagcccctcccagcccagccccagggcccccaagctgggagggaggggagactccccacccctccacatctggccctggcccccagggtctgcggtagagaattcccgcccccgcttctctccctcctcccgctctgtgcccgctgcccgcctcagggacagccccagctcccgcctccg

SEQ ID NO: 4332 - DNA, 66 bp, Homo sapiens
  misc_feature 1..66: note = U/M: M (0.68:0.04) in Blood T cells
  misc_feature 1..66: note = source = chr18:46067903-46067968; Gene: CTIF (intron)
  source 1..66: mol_type = genomic DNA
cgcgaggagatggcctggctttcaagaaaacccaattatacgtgaacagaatgcaccgaacagacg

SEQ ID NO: 4333 - DNA, 350 bp, Homo sapiens
  misc_feature 1..350: note = U/M: M (0.64:0.03) in Blood T cells
  misc_feature 1..350: note = source = chr1:24229334-24229683; Gene: CNR2 (intron)
  source 1..350: mol_type = genomic DNA
cggcggcgccggcgttgctgtgggctaggaccgcggccgcggcgctggcggggacgtagagctccgccgccatcctcgagggcggggcgtcgggggcagcctcggagcctgtggacccccgccccgcgccctcgcgccgcgccggggcctcgggagcggctctgcaagcaaaagcagggaggtcgggcgctgagcgacgcggcggtgatggcaggccaggggcagcaccattcatgggcggcggcggcggcggcgctgcgacccgcggggctgccacccgtgcccctaccacccccgcccctgcgatcctgccagagcctagcctagcgcagccgggccaggcctggccg

SEQ ID NO: 4334 - DNA, 97 bp, Homo sapiens
  misc_feature 1..97: note = U/M: M (0.65:0.06) in Blood T cells
  misc_feature 1..97: note = source = chr9:132806098-132806194; Gene: FNBP1 (promoter-TSS)
  source 1..97: mol_type = genomic DNA
cgtgaaatcacgttaccgcctagtgggtaaaagcaaaggcgtggggtacacagataacttgtttggttcaaatccagcctcccgcacgtgctggccg

SEQ ID NO: 4335 - DNA, 208 bp, Homo sapiens
  misc_feature 1..208: note = U/M: M (0.62:0.03) in Blood T cells
  misc_feature 1..208: note = source = chr13:41364227-41364434; Gene: SLC25A15 (intron)
  source 1..208: mol_type = genomic DNA
cgcctggccggtccttggcggcgaaactgatttgcatctccacgctttacctaaagcccgggctctggggactggatggcgagctggcctgcggctcctttagccagaagctgggatcttcccgcagcagttcgtgttccctggtggaaaatgcagcctcatctactgactctcccttccaaaaaaaagttattttccccaagggtcg

SEQ ID NO: 4336 - DNA, 248 bp, Homo sapiens
  misc_feature 1..248: note = U/M: M (0.64:0.05) in Blood T cells
  misc_feature 1..248: note = source = chr8:90770736-90770983; Gene: RIPK2,RIPK2 (promoter-TSS,intron)
  source 1..248: mol_type = genomic DNA
cgttctggctccgtactccaaaaatcagcaatcactgcctaactctaaacgctgggtttactgaaattgatgtgtgtttatatatagtgggtgtgggttttgtttgctttgttttttccttatttttgaaattgggctgtagggctgcactgtccagtaggtagctcttagccacaggtggctattgagcacttgaaatgtgcccgtccgaattgaagtgtgacctaagtgtaaaataccagagttcg

SEQ ID NO: 4337 - DNA, 160 bp, Homo sapiens
  misc_feature 1..160: note = U/M: M (0.66:0.08) in Blood T cells
  misc_feature 1..160: note = source = chr22:21239949-21240108; Gene: SNAP29 (intron)
  source 1..160: mol_type = genomic DNA
cgccactaggaggtgctgagggtgcacagttggcactgtggacgagcagctgggcagttaccggcaggacgcagtctagagtaggaggtgggcctgggcagaagggcgagtggctagttcagagctcagccctctggccctgctgacacaggccaggccg

SEQ ID NO: 4338 - DNA, 33 bp, Homo sapiens
  misc_feature 1..33: note = U/M: U (0.01:0.96) in Erythrocyte progenitor cells
  misc_feature 1..33: note = source = chr6:135513150-135513182; Gene: MYB (intron)
  source 1..33: mol_type = genomic DNA
cgcgaccggtcagaataaacatgaagcgttatc

SEQ ID NO: 4339 - DNA, 211 bp, Homo sapiens
  misc_feature 1..211: note = U/M: U (0:0.95) in Erythrocyte progenitor cells
  misc_feature 1..211: note = source = chr16:31089524-31089734; Gene: ZNF646 (exon)
  source 1..211: mol_type = genomic DNA
cgccactcaggcagccttatcaaccacaggcagacccaccagacaggagacttcagttgtggggcctgtgccaagcacttccacaccatggctgccatgaagaaccacttgcgccggcacagtcggcggcggagcaggcggcatcggaagcgggctggcggtgccagcggtgggagagaagccaaactcctggcagcggagagctggaccc

SEQ ID NO: 4340 - DNA, 90 bp, Homo sapiens
  misc_feature 1..90: note = U/M: U (0:0.94) in Erythrocyte progenitor cells
  misc_feature 1..90: note = source = chr19:13830749-13830838; Gene: CCDC130 (Intergenic)
  source 1..90: mol_type = genomic DNA
cgacaaccttttttatttttttgagacggagtctcactctgtcgcccaggctggagtgcggtggcactatctcagctcactgcagcctcc

SEQ ID NO: 4341 - DNA, 162 bp, Homo sapiens
  misc_feature 1..162: note = U/M: U (0:0.94) in Erythrocyte progenitor cells
  misc_feature 1..162: note = source = chr5:145224022-145224183; Gene: PRELID2 (Intergenic)
  source 1..162: mol_type = genomic DNA
cgacagagtgagaccttgtcttaaaaaaaaaaaaagattgacccatgcggatgcgccttcagagcagtaaaacaagtaagtgaatacataagattaacctcattcatcgtttggagcttgagataaaacaaaattttttaaaaagatttacctcaagcaacc

SEQ ID NO: 4342 - DNA, 199 bp, Homo sapiens
  misc_feature 1..199: note = U/M: U (0:0.94) in Erythrocyte progenitor cells
  misc_feature 1..199: note = source = chr6:34583467-34583665; Gene: C6orf106 (intron)
  source 1..199: mol_type = genomic DNA
cgaggggtagaacaaggttgtagcagggcaaaaagggaaccatcatgcgcccaagtcctttagaagcctcaaaaacaccgttttatcagctgaagacagaagccagtcctatctgcagggaaacgctccctttcccagtagagcattacagatcagttaacagtcttcaaactagggttacatcaatgactgtacaacc

SEQ ID NO: 4343 - DNA, 243 bp, Homo sapiens
  misc_feature 1..243: note = U/M: U (0:0.94) in Erythrocyte progenitor cells
  misc_feature 1..243: note = source = chr1:52541390-52541632; Gene: BTF3L4 (intron)
  source 1..243: mol_type = genomic DNA
cggtggcgcgatcttggctaactgcaacccccacctcctgggttcaagtgattatcctgcctcagcctcctgagtagctgggattacaggcaggcgccaccacacccagctaattttttgtatttttagtagagacggggttttatcatgttggccaggctggccttgaactcctgacctcaggtgatccacccgcctcagcctcccgaagcgtagggattacaggagtgagccactgtgctc

SEQ ID NO: 4344 - DNA, 165 bp, Homo sapiens
  misc_feature 1..165: note = U/M: U (0.01:0.94) in Erythrocyte progenitor cells
  misc_feature 1..165: note = source = chr16:566478-566642; Gene: RAB11FIP3 (intron)
  source 1..165: mol_type = genomic DNA
cgccaaagctggaacagtttaacaaactcatagtgacagccttggattacaatccaaagcataaagtgcgtgagtccatatgacacagataaattatcatcaacgaacagaaaagagggccgggcgcggtggctcacgcctgtaaccccagcactttgggaggcc

SEQ ID NO: 4345 - DNA, 266 bp, Homo sapiens
  misc_feature 1..266: note = U/M: U (0.01:0.94) in Erythrocyte progenitor cells
  misc_feature 1..266: note = source = chr15:34946822-34947087; Gene: GOLGA8B (Intergenic)
  source 1..266: mol_type = genomic DNA
cggatatgttctctctatttcgaaagcgaagtaacatctcagtagttaactgacttgcccaagttcacatagctagataatgacagagtagaactatctctcctgttggctgattcagttctttttaccaccgtatctataaggcaaagtggcaagtgcgaagagttctggggttggagatttgtgaccttgaaaaccacaactttactgttgttccaaatataaaaactacagttggaggtagggatgctgcgttactacagtcc

SEQ ID NO: 4346 - DNA, 325 bp, Homo sapiens
  misc_feature 1..325: note = U/M: U (0.03:0.96) in Erythrocyte progenitor cells
  misc_feature 1..325: note = source = chr19:19396535-19396859; Gene: SUGP1 (intron)
  source 1..325: mol_type = genomic DNA
cggctaatttttgtggttttttgtagagacagggttttctcatgttgcccaggctggtctcaattcaggcctcaagcgatccgcccacctcggcctcccaaagcactgggattacaggcatgagctaccgtacccggccaagcaccagaacttaaggcaggataacgctactgttttgtgcaaatgcagttgggtttatgatcggggctgcccttatctatgaagctgctaacccctgagtcttaaagggaaaagataaacaccagctgcccgtcttctggttatacaacaagaaggccagggcaggacagccatggtggctcac

SEQ ID NO: 4347 - DNA, 55 bp, Homo sapiens
  misc_feature 1..55: note = U/M: U (0.01:0.93) in Erythrocyte progenitor cells
  misc_feature 1..55: note = source = chr19:56045142-56045196; Gene: SBK2 (intron)
  source 1..55: mol_type = genomic DNA
cgtgttcacagcgctcctgatcactgccgccacggccacgccacccggtgttggc

SEQ ID NO: 4348 - DNA, 87 bp, Homo sapiens
  misc_feature 1..87: note = U/M: U (0.01:0.93) in Erythrocyte progenitor cells
  misc_feature 1..87: note = source = chr8:41910906-41910992; Gene: KAT6A (Intergenic)
  source 1..87: mol_type = genomic DNA
cgttgacatggacgtgtatcctgctgcctgacctttatctgccctgtccccaaccccatacgacacaccccgcctagactgtcgccc

SEQ ID NO: 4349 - DNA, 224 bp, Homo sapiens
  misc_feature 1..224: note = U/M: U (0.02:0.94) in Erythrocyte progenitor cells
  misc_feature 1..224: note = source = chr12:113629175-113629398; Gene: C12orf52 (exon)
  source 1..224: mol_type = genomic DNA
cgccagcttcggggccccgcggatggcgaagggggatgccgcaaagctccgtgctctcttgtggacgccaccacctacccccaggggtagccactcgccccgccccagggaggcaccactgcgagccattcacccagctggtccctccaagacagagccggggccagcggcagactcccagaagttatctatgggtgggttacactcttcacgccccctgaagc

SEQ ID NO: 4350 - DNA, 197 bp, Homo sapiens
  misc_feature 1..197: note = U/M: U (0.03:0.93) in Erythrocyte progenitor cells
  misc_feature 1..197: note = source = chr9:140283588-140283784; Gene: EXD3 (intron)
  source 1..197: mol_type = genomic DNA
cgtctctggtctcagattccacccacatctgcctgtgctcagctgcaggcagggcgggggacgtgataaggacagaggcggcaacgagaccccaagcccggcggacagcgtgtgccctccacctcggctcgccgcagaggaccgcccgtgtctggggagtgaggtgaaggggctcccggaggtccagcatctggcac

SEQ ID NO: 4351 - DNA, 304 bp, Homo sapiens
  misc_feature 1..304: note = U/M: U (0:0.9) in Erythrocyte progenitor cells
  misc_feature 1..304: note = source = chr16:449350-449653; Gene: NME4 (intron)
  source 1..304: mol_type = genomic DNA
cggctcctccttacctcaatgccacccaggcaccagagagcgtccttgccgagcactaccaggacctgcggaggaagcccttctaccctgccctcatccgctacatgagctctgggcctgtggtggccatggtacggcagggcaggggtggtggaagggcctgtgggtaaagggcgtgtgggtgtgtctttccccccagcaaagggaggggccctggattgagcccaggggcccttggtgttccccacttctccccaaccattatctctcgctgcaggtctgggaagggtacaatgtcgtccgc

SEQ ID NO: 4352 - DNA, 61 bp, Homo sapiens
  misc_feature 1..61: note = U/M: U (0.05:0.95) in Erythrocyte progenitor cells
  misc_feature 1..61: note = source = chr9:139122369-139122429; Gene: QSOX2 (intron)
  source 1..61: mol_type = genomic DNA
cgctgcccaaaaacacatgagcctcagtactcggcctccgtgacggcatccttatcacgtc

SEQ ID NO: 4353 - DNA, 97 bp, Homo sapiens
  misc_feature 1..97: note = U/M: U (0.06:0.96) in Erythrocyte progenitor cells
  misc_feature 1..97: note = source = chr15:85160527-85160623; Gene: ZSCAN2 (TTS)
  source 1..97: mol_type = genomic DNA
cgtgttggcgtgcgcctgtagtaccagctactcaggaggctgaggcaggagaattgcttgaacctgggaggcggagcttgccctgagccaggatcgc

SEQ ID NO: 4354 - DNA, 154 bp, Homo sapiens
  misc_feature 1..154: note = U/M: U (0.05:0.95) in Erythrocyte progenitor cells
  misc_feature 1..154: note = source = chr7:2369007-2369160; Gene: SNX8 (Intergenic)
  source 1..154: mol_type = genomic DNA
cgtcttatcacccacagtcagcaccctattgccggcctagtcggcacacagttgtggtgttatgaactacgttgtttttcgtgcgggggctcttggctcctaactccatggtccttgctacagtgttttgtgatgatgttgtctgttaggcctc

SEQ ID NO: 4355 - DNA, 209 bp, Homo sapiens
  misc_feature 1..209: note = U/M: U (0.06:0.96) in Erythrocyte progenitor cells
  misc_feature 1..209: note = source = chr10:46070843-46071051; Gene: 44263 (intron)
  source 1..209: mol_type = genomic DNA
cgtcttttaatacctgtttttctcctcttattctgtttagtttttcaattcatacaaaaccatatccaggccatcaccaataattctatacgacaaatgctccttcaaacaaccccacaatatcacctcttaccacaaaatcttccttcagcttaatctctcccactctaggttcccatgccgctcctaatcccgccctgagaaacatc

SEQ ID NO: 4356 - DNA, 122 bp, Homo sapiens
  misc_feature 1..122: note = U/M: U (0.04:0.93) in Erythrocyte progenitor cells
  misc_feature 1..122: note = source = chr2:233922626-233922747; Gene: INPP5D (Intergenic)
  source 1..122: mol_type = genomic DNA
cgctctatcacccaggctggagtgcagtggcacgatctcgactcactgcaatcttcgcctcctgggttcaagtgattatcctgctcagcctccaaagtagctgtagctgcgattataggcac

SEQ ID NO: 4357 - DNA, 296 bp, Homo sapiens
  misc_feature 1..296: note = U/M: U (0.05:0.94) in Erythrocyte progenitor cells
  misc_feature 1..296: note = source = chr1:1197516-1197811; Gene: UBE2J2 (intron)
  source 1..296: mol_type = genomic DNA
cgtgagccaccgcgcccggccgaccactactcactcggtggtatatattcttcagatcagctgaaggcacacacacgcatcgtaacaagtactttaacacgccctggacacctgctcccgggccttatctcaccacggcctgctggcatccccaacgctggtcatgggcaatgacacgatgatggagggcccaccctacagatgtactcccgcactctggctgccctagttgcagatgatccagaactgggattcctgggccaaaggagagtccacaggtgtggctgtgttaactc

SEQ ID NO: 4358 - DNA, 157 bp, Homo sapiens
  misc_feature 1..157: note = U/M: U (0.06:0.94) in Erythrocyte progenitor cells
  misc_feature 1..157: note = source = chr7:100132911-100133067; Gene: AGFG2 (Intergenic)
  source 1..157: mol_type = genomic DNA
cggcgggtgggagttgggggatgattttgggatgatctgagcacattaagtttattgtgcacttttttttttttaaacggagtctcgctctgtcaccaggctggagtgcagtggcacgatcttggctcactgcaacctccacctcctgggttcaagc

SEQ ID NO: 4359 - DNA, 327 bp, Homo sapiens
  misc_feature 1..327: note = U/M: U (0.06:0.94) in Erythrocyte progenitor cells
  misc_feature 1..327: note = source = chr2:171834299-171834625; Gene: GORASP2 (Intergenic)
  source 1..327: mol_type = genomic DNA
cggccatctggatgtgtacgtgcaggtcacaggggatatgatggcttagcttgggctcagaggcctgacattcctgtcttcttatattaatgagaaaaataaaacgaaatagtggtaaagtgttgggacggtgacaatttttggggggtggcatggagagataatgggcaatgtatctcagggctgcttcgagcgggattaggggcggtgtgggaacctagagtgggagagattaagctgaaggaagattttgtggtaaggggtgatattgtggggttgttagaagaaacatttgtcgtgtagaattattggtgatggcctggatac

SEQ ID NO: 4360 - DNA, 132 bp, Homo sapiens
  misc_feature 1..132: note = U/M: U (0.11:0.95) in Erythrocyte progenitor cells
  misc_feature 1..132: note = source = chr16:21548067-21548198; Gene: SLC7A5P2 (Intergenic)
  source 1..132: mol_type = genomic DNA
cgactcggtcagcggcggggtggtgagcgagcccacataggtccagtaatcccagcaggtgggcagcagagcggaggggtcgaaggggcgcatggccgcctgcgcgtcctgagagaccgagaagcacaggcc

SEQ ID NO: 4361 - DNA, 344 bp, Homo sapiens
  misc_feature 1..344: note = U/M: U (0.12:0.95) in Erythrocyte progenitor cells
  misc_feature 1..344: note = source = chr11:43385285-43385628; Gene: TTC17 (intron)
  source 1..344: mol_type = genomic DNA
cgtggcaatagtaagtaaaaatggattagtctgcagtagcatgcaagtgagcaccttgtactcagtagattttttttcctctcataacacttacaaatgaaggactacaaagaaacataaaagcaaaaatgaaaataatgaagtaaaggtatcttcttttccagtttgctttatctccatagaatgttttgtggtaacttaagattcagggtaagtgggtgtggaagggtcctaaataagtgtgagttcattcggcatttacttaatcgttttgtcccccggtcaggccggtatcttcggagtacagatcctcttttttttttttttttttttttttttgagac

SEQ ID NO: 4362 - DNA, 139 bp, Homo sapiens
  misc_feature 1..139: note = U/M: U (0:0.94) in Erythrocyte progenitor cells
  misc_feature 1..139: note = source = chr12:10854582-10854720; Gene: CSDA (intron)
  source 1..139: mol_type = genomic DNA
cgttaggaggacgcgggcgacgccggtaattgtagggacgccggtatccacggcgaacagacggctggtttggaccactggtggcttgctgattttctttatcttcagcctctccaactgctggggcaggtcgtgggcg

SEQ ID NO: 4363 - DNA, 157 bp, Homo sapiens
  misc_feature 1..157: note = U/M: U (0:0.93) in Erythrocyte progenitor cells
  misc_feature 1..157: note = source = chr19:14253916-14254072; Gene: LOC100507373 (intron)
  source 1..157: mol_type = genomic DNA
cgttggtatctatgtctccttgaacacatgtaggagttactctgggagataaacctaggagttgaagtgctggacggggggttgcggaagtattcatcttttcaagatactgctaatctgctcttcggaatcatggtactggttctcactcccctcg

SEQ ID NO: 4364 - DNA, 236 bp, Homo sapiens
  misc_feature 1..236: note = U/M: U (0.01:0.93) in Erythrocyte progenitor cells
  misc_feature 1..236: note = source = chr2:37642469-37642704; Gene: QPCT (Intergenic)
  source 1..236: mol_type = genomic DNA
cgtttcccttctttatcttgcaggcgcagtgtctgctagaggctacaagaaagaaagaggaaaggtgggggctcattggtggggctgagtcaaggggataaggggatctcagcacagaggaaacagtggaaggttgctgcgtggcggattctgctaccactgggcccttgtgggctgcggccaccttaaacctggcttagatcatgggctgattggatatggcctatctctggacg

SEQ ID NO: 4365 - DNA, 249 bp, Homo sapiens
  misc_feature 1..249: note = U/M: U (0.01:0.93) in Erythrocyte progenitor cells
  misc_feature 1..249: note = source = chr3:43719906-43720154; Gene: ABHD5 (Intergenic)
  source 1..249: mol_type = genomic DNA
cgccacaccctgggcctggtagttaaagatcgacccctgacctaacaggttatgttatctatagattccagacattgtatgggaaagcactgtgaaaacccatcctgtcctgttccattctgattaccggtgcatgcagcccgcagtcacataccccctgcttgctcaatcgatcaggaccatctcacatgaacccctttagagttgtgagcctttaaaagggacagaactgctcacttggggagctcg

SEQ ID NO: 4366 - DNA, 249 bp, Homo sapiens
  misc_feature 1..249: note = U/M: U (0.01:0.93) in Erythrocyte progenitor cells
  misc_feature 1..249: note = source = chr19:6387724-6387972; Gene: GTF2F1 (intron)
  source 1..249: mol_type = genomic DNA
cgtcaatttccacatctggggaacagggccggcgcacctaccctgcaaagtgctgggcgtgtgcacatcgggatcatttctggaaagactgtgtgagattatctcaggagagcccaaccctgcagtcaaactgtctacatttgcctccagctctgctatctgtgggccacacccgggaaactgaggagccaagtgagaagatggggcgggaaggcatggccaaatttttttttttgagatggagtctcg

SEQ ID NO: 4367 - DNA, 262 bp, Homo sapiens
  misc_feature 1..262: note = U/M: U (0.02:0.94) in Erythrocyte progenitor cells
  misc_feature 1..262: note = source = chr6:142733020-142733281; Gene: GPR126 (intron)
  source 1..262: mol_type = genomic DNA
cgagtgatctccctcctagagattgcagtttgttaggacagactagtgactagggttagaatggagacttcagagctgcaagagagataatggttatgatgtttctgtcactcttaggcctctatatcattctttccttccttcttccatgcccctgttttatcttattagccagcttgccaaacagttttaaacaaaattagattgcgtcaatgtgtttttcttatcccaccaaattttaagacgcaccacgcatccagcg

SEQ ID NO: 4368 - DNA, 264 bp, Homo sapiens
  misc_feature 1..264: note = U/M: U (0:0.91) in Erythrocyte progenitor cells
  misc_feature 1..264: note = source = chr8:41654193-41654456; Gene: ANK1 (intron)
  source 1..264: mol_type = genomic DNA
cgcgactaaaccagactccttttcacttactaccctttcagcgtgtgtgtggcctgatgtccaactctgggctctgaatccatcactaaactaagaaccgtacccaacaaaggacactgacacatggcacaggctggccgtgctgccaggcagagataggacgggttctatctacacagggagaacaagaaggctggagtggccttgctaacgcgccattatcacttgaaaaatatccatgagagcctatctccccaggccacg

SEQ ID NO: 4369 - DNA, 135 bp, Homo sapiens
  misc_feature 1..135: note = U/M: U (0:0.9) in Erythrocyte progenitor cells
  misc_feature 1..135: note = source = chr16:449680-449814; Gene: NME4,NME4 (exon,intron)
  source 1..135: mol_type = genomic DNA
cgactcggctgaggctgccccaggaaccataaggggtgacttcagcgtccacatcagcaggtacgggggtcctgatacaccaggctgctgctgggggcaaggagggccatcacttggggtggtggcagatccacg

SEQ ID NO: 4370 - DNA, 201 bp, Homo sapiens
  misc_feature 1..201: note = U/M: U (0.01:0.91) in Erythrocyte progenitor cells
  misc_feature 1..201: note = source = chr8:41654461-41654661; Gene: ANK1 (intron)
  source 1..201: mol_type = genomic DNA
cgctctttcccttccttcgtagacatatttctctccatgaattaacaacataaattaaaagaaccgagcaggtgtgaccatgagaccaccggcctccgtgagtctttgagaaaacaagccaaagtccccttccaaatgacagtgacagccccctagccgggtggcccaccccgcagcctgtaataacacacctacaaaacg

SEQ ID NO: 4371 - DNA, 210 bp, Homo sapiens
  misc_feature 1..210: note = U/M: U (0:0.9) in Erythrocyte progenitor cells
  misc_feature 1..210: note = source = chr9:130603725-130603934; Gene: ENG (intron)
  source 1..210: mol_type = genomic DNA
cgaactaacagaggcagtcgtattttgaatatcattaccaaatttgaaaaaaaaaaatgacaatgcctatggaaaccacacaaagtgtgtttggcactatctatgatttggaaattatcaaagcccacagtcctcgtagagggcagggcggtggggagcagggtcccccgatattggtggtctgagcactttcttatcactgcacaaacg

SEQ ID NO: 4372 - DNA, 256 bp, Homo sapiens
  misc_feature 1..256: note = U/M: U (0.01:0.91) in Erythrocyte progenitor cells
  misc_feature 1..256: note = source = chr3:98302871-98303126; Gene: CPOX (intron)
  source 1..256: mol_type = genomic DNA
cgactttcagaatgatctgccatcaaacgatgtataaaaaacaaaacaaaaccgcaaaacaaaccattactcctgtctatgaagttttaaaggattcacctaattagtattgacaaaatctgccaagttttgccttcgaaatcttgtgcaaaactagaatactttactttgcacagagttctaaattgtcctcttgggtatgtcttccccactaaactatgaggttctttttggcaggtccatgttacagccaccg

SEQ ID NO: 4373 - DNA, 291 bp, Homo sapiens
  misc_feature 1..291: note = U/M: U (0.05:0.95) in Erythrocyte progenitor cells
  misc_feature 1..291: note = source = chr1:230380975-230381265; Gene: GALNT2 (intron)
  source 1..291: mol_type = genomic DNA
cgaggcaggcagatcacctgaggtcagaagttcaagaatagcctgaccaacatggagaaatcccatctctactaaaaatacaaaaattagctgggcgtggtggtgcatatctgtaatcccagctgcttgggaggctgaggcagtagaatcacttgaacccgcgaggcggcggttgtggtgagccaagatcacgccattgcactccagcctgggcaacaagagtgaaactccgtctcaaaaaaaaaacaaaacaaaaaaacaaaaaagatagaattacagatgaggcaaacg

SEQ ID NO: 4374 - DNA, 319 bp, Homo sapiens
  misc_feature 1..319: note = U/M: U (0.05:0.95) in Erythrocyte progenitor cells
  misc_feature 1..319: note = source = chr5:141487592-141487910; Gene: NDFIP1 (promoter-TSS)
  source 1..319: mol_type = genomic DNA
cgattccgcagatgaggctgttaaaatactaaaggatggcataaacatgaggatgctattataatcatccaccctaagtaggatttgagatccaagcagttctcaaggatttagggttagcaaactttttctgtaaaatgtcagatagcaagtattatagggtttgcaggccataccaaacaaatgggtgctgctgtgttccaataaaactttatttatggacactgaaacttgaatttcatgtacttttcacagtcatggtggcagaccggatttggccccctccctgtcgctggctgacccctggtttatgagtacg

SEQ ID NO: 4375 - DNA, 333 bp, Homo sapiens
  misc_feature 1..333: note = U/M: U (0.01:0.91) in Erythrocyte progenitor cells
  misc_feature 1..333: note = source = chr6:160107983-160108315; Gene: SOD2 (intron)
  source 1..333: mol_type = genomic DNA
cgaacaagaccatctagccctgtactctcctcattccctgaacactttttaaaaatacccagaaaacctaatttcctggaacaactgactttttatcagttaggaaagagtgaaaaatagcaaatgacactataatttaattctcaaaacaacaccattgttatccctgtatcacatagatgaaaaaaggtacagacggttaactatctaatccaggccctagaaactagtagacagaaagttcatcttttctagactggcgcggtggctcacatccataccacagcactttgggaggccaaggtgggtggatcacttgaggccaggagttcg

SEQ ID NO: 4376 - DNA, 365 bp, Homo sapiens
  misc_feature 1..365: note = U/M: U (0.03:0.93) in Erythrocyte progenitor cells
  misc_feature 1..365: note = source = chr6:604475-604839; Gene: EXOC2 (intron)
  source 1..365: mol_type = genomic DNA
cgtccattctctatacagatggcagattgctctttaaaaatctcctatcgttctgttaaacttctgcgatggctcactatttgtcttcagaataaagacagattccacactactgcacagccagttcgtcaggggcagacctcgtctaccctgcggccacacctctcctatctgcacacagccacactggaccctgcttcctgggctgcggcctatctcctctctgaactcacgcgctggccctgcggggacacacctgcctccctccactcagccacccaccgctggcctctgcttgtctctgaactcacgcgctggccccgcggggacacacctgcctccctccactcagccgcccaccgccg

SEQ ID NO: 4377 - DNA, 406 bp, Homo sapiens
  misc_feature 1..406: note = U/M: U (0.01:0.91) in Erythrocyte progenitor cells
  misc_feature 1..406: note = source = chr10:12067474-12067879; Gene: UPF2 (intron)
  source 1..406: mol_type = genomic DNA
cgggaggcaaaggttgcagtgagccaagaccatgacactgcattccagcctgggagacagtaagactccatctctaaataaataaataaataaataaataaataaataggctgtgacaatactaaggtcagtttacactatgtaagtaaacttctcaaataactgtggattaatagttctgtaacaaatggataaaagtttctaaggaaaagccacaaagctgtattcttaaccacatccttttcaaatttttatcaatgacttgaataataaaatagaagagctgcttatcaaagctgaatgtgaccagaagataagcactattcagtttttgtttcgagacagggtctctctctgtcgcccaggctagagtgcagtggtgcgatcatggcttactgcagtctcg

SEQ ID NO: 4378 - DNA, 475 bp, Homo sapiens
  misc_feature 1..475: note = U/M: U (0.04:0.94) in Erythrocyte progenitor cells
  misc_feature 1..475: note = source = chr1:155732093-155732567; Gene: GON4L (intron)
  source 1..475: mol_type = genomic DNA
cgagcccgacttccccgcttgttgcgagctcgatgattgttccggccttttccagcagctttgatgctctctccttgtagcacacatgaaaaggattgtttccctgtccctgcaacctgtgttcttcccattccaccacatgcaccaccccagccaaatcctattcaatattatggagcaattcaaggaaaaggtttttgggaaaatggtatgagaactaagtccgtcaagtcagttctacgcagagtctgcagtgtaactgccttaattgggatgacaacaagataatcagctacttcatattgagaaaggaagtctaaagagcaagtgtggcttctgtagtgcttttgagagactatgtcttgatgaggaacaagcagtgttttctgaaataaacatgggtcttagccccacacatgacagataaggtaacaatcagtttaacaaagtgaactgccaggcacagtggctcacg

SEQ ID NO: 4379 - DNA, 492 bp, Homo sapiens
  misc_feature 1..492: note = U/M: U (0:0.9) in Erythrocyte progenitor cells
  misc_feature 1..492: note = source = chr2:9138738-9139229; Gene: MBOAT2 (intron)
  source 1..492: mol_type = genomic DNA
cggggggcgggggttgggaatatatagaaaagatcagtcaatgaactgtccaaaaaggaaacaaggatctcgtaagcccacaatgctttctctcccttacacatcatcattttctctgtgtcaaccacaacccctagtccttcagtgtcgacttcagggaccttcagttgctctcctcctttccctccaaaaatatgatctaaaacaatgatctaccaaaaatatttgccacatattattaagaccataaactaaacctgaccttttttattcaaatggtaaatacatacgtgcacgcacacacacacccgtgaagctaaatacttcaggtcttgaactttatctgacttcaccaggtgttgtgaggatttgattaaataatataatctgtgtgaaacagctttgaaaactgtattaagtgttagacattataattattatctgactttgcaggattagtaacatataaccattcctccttccccttccccg

SEQ ID NO: 4380 - DNA, 122 bp, Homo sapiens
  misc_feature 1..122: note = U/M: U (0.01:0.9) in Erythrocyte progenitor cells
  misc_feature 1..122: note = source = chr2:97584676-97584797; Gene: FAM178B (intron)
  source 1..122: mol_type = genomic DNA
cgtacccacggcttgctcaatcgatcacgaccctctcacgcgggctctcttagagttgtaagcccttaaaagcgacaggaattgctgactcaagcagctcggtttttggagacgtgagcccg

SEQ ID NO: 4381 - DNA, 433 bp, Homo sapiens
  misc_feature 1..433: note = U/M: U (0.04:0.93) in Erythrocyte progenitor cells
  misc_feature 1..433: note = source = chr19:3194305-3194737; Gene: NCLN (intron)
  source 1..433: mol_type = genomic DNA
cggaaggcggaggttgtggtgagctgaggtcacaccattgcactccagcctgggcaacaagagcaaatgtccatctcaaaaaaaaaaagtttcatcctacacagccagatcagtggaattccagatgcagagttggctaacactggccaggggccacctgtttttgttgataaagttttattggcactgggccacattcatttatgcacagtccacggtggctttcccagcagcagaactgaattgccgtggctgcggcagagaccatccagcctgcaaagccgaaagtgttatctgatcctttgcagaaaacgttcccaacccctggtttagattaaaagtcttgacagtggccatttttgttgtggtaatagaagagtatagttctgcagatacctaagtatcctgttagagaagaaggaaagaggagtcg

SEQ ID NO: 4382 - DNA, 134 bp, Homo sapiens
  misc_feature 1..134: note = U/M: U (0:0.88) in Erythrocyte progenitor cells
  misc_feature 1..134: note = source = chr12:122640193-122640326; Gene: LRRC43 (Intergenic)
  source 1..134: mol_type = genomic DNA
cgattacgattaggattacgcagcccaggtcccagcaagaggagctctctgtggctactcaaccgcaccccacacttcttccctctgtgctgccgtgcattcccctccctggaaggcccagcgctctctctccg

SEQ ID NO: 4383 - DNA, 138 bp, Homo sapiens
  misc_feature 1..138: note = U/M: U (0.02:0.9) in Erythrocyte progenitor cells
  misc_feature 1..138: note = source = chr7:5878899-5879036; Gene: ZNF815P,ZNF815P (exon,intron)
  source 1..138: mol_type = genomic DNA
cgcctatagtgtaatcttacggtacagctgtcttcctgtgttcatctggcagcaacactcctaactaccttcagaacaggaacaattttgtgttcagccctcgaccccaagcgcctggtagaacaccagcagtgtgcg

SEQ ID NO: 4384 - DNA, 164 bp, Homo sapiens
  misc_feature 1..164: note = U/M: U (0.01:0.89) in Erythrocyte progenitor cells
  misc_feature 1..164: note = source = chr6:161686743-161686906; Gene: AGPAT4 (intron)
  source 1..164: mol_type = genomic DNA
cgaggagggcctgtctgcacagatctgggtgtggaaggggtcctatcaggccaccgagcctggcccatttcctcactgcaccgggctgccttggtgccagcatgacccccacgcagacttatcagggcagaaagcactaaatatttgaatactttacggccacg

SEQ ID NO: 4385 - DNA, 333 bp, Homo sapiens
  misc_feature 1..333: note = U/M: U (0.01:0.89) in Erythrocyte progenitor cells
  misc_feature 1..333: note = source = chr1:228333578-228333910; Gene: GUK1 (intron)
  source 1..333: mol_type = genomic DNA
cgccttgtaggctcctgcgccttcccagtggtgtgcttcactggctgcctgcatcctggggctcaagtgctgtcgggactgcaagggaaacgctgggtggggcattgggctccgagcagcccccgatgggtgacaggtctctctgctagataccacgaggaacccgaggcccggcgaggagaacggcaaaggtgagtggggtggggccctatggctggagcacccccagtgtgggcagggctgctgggccctgcagctgtgttggctgtgctgcccgtctcctgcccccatcaatccctaatctgtgagatgggtccttgcctccaagggccg

SEQ ID NO: 4386 - DNA, 345 bp, Homo sapiens
  misc_feature 1..345: note = U/M: U (0:0.88) in Erythrocyte progenitor cells
  misc_feature 1..345: note = source = chr2:149300655-149300999; Gene: EPC2 (Intergenic)
  source 1..345: mol_type = genomic DNA
cggagatccaaaaaggtttaatagctcattccaccagttagggagaatgctcactcagccttgggtttgttagaagagtcttggttacttacaaagatttatctctttgttgtaaaaaacacagtggcttgaaggatatgaaaatttatgacataggaggctgagttgggcttatcacttgaggtcaggagtttgagatcagcctggccaaaatgataaaacccatctctatgaaaaatacaaaaattagccaggcgtggtgttgggagcctgtagtcccagctactcgggagactgagacaggagaatcgcttgaatccgggaggtggaggttgcagtgagccg

SEQ ID NO: 4387 - DNA, 393 bp, Homo sapiens
  misc_feature 1..393: note = U/M: U (0.03:0.91) in Erythrocyte progenitor cells
  misc_feature 1..393: note = source = chr17:30626833-30627225; Gene: RHBDL3 (intron)
  source 1..393: mol_type = genomic DNA
cgtgcactgttctgtctgagtcagtgattaagaccagagggcactctggtcaccacacatgtcattgatctccatgattgagttgattgatctgtctctgctgtctaccctttcctgtcctcccaagctttcctctgagaggtgagccggtttacagccagccagccctagattggacgggtggcacttatcagtgcctaccatatgcaggccgtaattcatccacacagcaacgctacgaggtgggcactgctgctctcccccagcacagatatggaaaccaaggcttagatggctaagtggctcgcccaagaagacacagctagaaagtggtggagctgggcagggtctgacccccaaggctgtgatctcaaccactataatagtatgacg

SEQ ID NO: 4388 - DNA, 40 bp, Homo sapiens
  misc_feature 1..40: note = U/M: U (0.04:0.91) in Erythrocyte progenitor cells
  misc_feature 1..40: note = source = chr3:49510811-49510850; Gene: DAG1 (intron)
  source 1..40: mol_type = genomic DNA
cgccactgcagtccggcctgggcgacagagcgagactccg

SEQ ID NO: 4389 - DNA, 103 bp, Homo sapiens
  misc_feature 1..103: note = U/M: U (0.03:0.9) in Erythrocyte progenitor cells
  misc_feature 1..103: note = source = chr12:53704069-53704171; Gene: AAAS (intron)
  source 1..103: mol_type = genomic DNA
cgcagtggctcacgcctgtaatcccagcactttgggaggccgaggtgggcggatcacgaggtcaagagatcgagaccattctggccaacatggtgaaaccccg

SEQ ID NO: 4390 - DNA, 194 bp, Homo sapiens
  misc_feature 1..194: note = U/M: U (0.07:0.94) in Erythrocyte progenitor cells
  misc_feature 1..194: note = source = chr9:140283642-140283835; Gene: EXD3 (intron)
  source 1..194: mol_type = genomic DNA
cgggggacgtgataaggacagaggcggcaacgagaccccaagcccggcggacagcgtgtgccctccacctcggctcgccgcagaggaccgcccgtgtctggggagtgaggtgaaggggctcccggaggtccagcatctggcacggagccccttgctctatcaacacagcggcccacaaccccagcacagcaccg

SEQ ID NO: 4391 - DNA, 275 bp, Homo sapiens
  misc_feature 1..275: note = U/M: U (0.07:0.94) in Erythrocyte progenitor cells
  misc_feature 1..275: note = source = chr1:179277528-179277802; Gene: SOAT1 (intron)
  source 1..275: mol_type = genomic DNA
cgggcacggtggctcactcctgtaatcccagcactttgggaggccgaggcaggcagattgcttgaggtcaggagttcaagactagcctgaccaacatgataaaaccctgtctctactaaaaatacaaaaatcagctgggcgtggtggtgggtgcctgtaatctaagctactcaggaagctgaggcagtagaatcgcttgaacctgggagacggaggtttcagtgagccgagaccgcgccactgcactctagcctgggtgacagagtaagactccg

SEQ ID NO: 4392 - DNA, 314 bp, Homo sapiens
  misc_feature 1..314: note = U/M: U (0.04:0.91) in Erythrocyte progenitor cells
  misc_feature 1..314: note = source = chr2:74358977-74359290; Gene: BOLA3 (Intergenic)
  source 1..314: mol_type = genomic DNA
cgtcaattaaaaaaacctgtgattcctctcccaactttccttttaatttggggggaagaacaactgggtgggggggccctatttgtttccagatttagaagcatttaggggattacacatttcacaagcccgaagagttctctggttgcgggtggggtgaagcagaaggaagagtcccctgtcttctggtgtccggaggttcctaggcggcttggcccacaaagccacacttatcttttcctccagtcaagaacatctgctgctttgtcccagcccttctttgaagaatagaaccccctcttcttttggtaacg

SEQ ID NO: 4393 - DNA, 130 bp, Homo sapiens
  misc_feature 1..130: note = U/M: U (0.01:0.87) in Erythrocyte progenitor cells
  misc_feature 1..130: note = source = chr1:17044689-17044818; Gene: ESPNP (intron)
  source 1..130: mol_type = genomic DNA
cgcccaatcacacacagcacctggcatggcctgggagggggtcagggttccccagccccggagccctggagggcgttccacagcacagccagtcttcctaacacctgggatccagcccacggagggatcg

SEQ ID NO: 4394 - DNA, 163 bp, Homo sapiens
  misc_feature 1..163: note = U/M: U (0.01:0.87) in Erythrocyte progenitor cells
  misc_feature 1..163: note = source = chr2:220218868-220219030; Gene: RESP18 (Intergenic)
  source 1..163: mol_type = genomic DNA
cgggtagatcacttgaggtcaggagatcgagaccagcctggccaacatgataaaaccctatctctactaaaaatacaaaagttagcccggtgtggttgtgcatgcctgtagtcgtagctgcttgggagggtgaggtatgagaatcacttgaacccgggaagcg

SEQ ID NO: 4395 - DNA, 228 bp, Homo sapiens
  misc_feature 1..228: note = U/M: U (0.01:0.87) in Erythrocyte progenitor cells
  misc_feature 1..228: note = source = chr1:21680073-21680300; Gene: LOC100506801 (Intergenic)
  source 1..228: mol_type = genomic DNA
cgttatctgtgttaagaagctgaagccgaggggggacgtgggcactaatctagagaaggcagcttttaagttgtgggatttgaactgggcggttttttttttttgttttttttttgttttttttttctgaagaatcatacagaagctggaattactacggtgaggagtagggttgcatttcagttaccctggtacagattcacagaccctgaaggctggacctggacg

SEQ ID NO: 4396 - DNA, 461 bp, Homo sapiens
  misc_feature 1..461: note = U/M: U (0.04:0.9) in Erythrocyte progenitor cells
  misc_feature 1..461: note = source = chr4:79731105-79731565; Gene: BMP2K (intron)
  source 1..461: mol_type = genomic DNA
cgtttgaaataattgtaatgtggcaactctggaaactggattcctctactctcaggattttttgttgttgttgctgtttgtttactgactttcctgtactaattctgtgaagtctgatcccccactctgtgggttgccactgaagtctgctcagattagtggtcaactaatgattggacagaggtttccttaaacacctgggactaataagtcttctagcttttgctgagggtgtgtgttggggcatgaattcaatactccaatgcagtttatagctcctcgtgagccttctttcttttgcagagccttaaagacatccagaggtaagaggctaggtccttctcagttctttcctgggcgtgcacactctaccatacatgtgtgtggcctctagattactaggagctagagcttttcaaagagtttttcgaagcccctgtagatatctcattcctacttcg

SEQ ID NO: 4397 - DNA, 496 bp, Homo sapiens
  misc_feature 1..496: note = U/M: U (0.06:0.91) in Erythrocyte progenitor cells
  misc_feature 1..496: note = source = chr17:81079169-81079664; Gene: METRNL (Intergenic)
  source 1..496: mol_type = genomic DNA
cgcggcctgacagacagtaagtagggtggcaccaagcttcagaccccagggtcccatcaggcgccccactcctcctgcccctgtgttatcatcagggctccttcttcctctcattggtcatcgtcaggaatgactagaaggcacagcatccctgttgcttatctgtgagctcaaaccaaaaaggcaccaagttatctggggctcacagaggcgccgcatggtaccagtaggccttgatacttatccctggaaggaaccgttttctgttaaggaacttcactagatggttctctcactcgaggtggaagttcgaggcggtcattgtcttctgcttctcccacacccccgccagctgtctggacttgcacatctggggtgctgtttgtccctccttgctgggatttccccacccatcacccacatgtggacgcacagcacctgctccatgccagtcctctcggagaccctcctgaccctgcaggcagagtcgatgtcg

SEQ ID NO: 4398 - DNA, 126 bp, Homo sapiens
  misc_feature 1..126: note = U/M: U (0.1:0.94) in Erythrocyte progenitor cells
  misc_feature 1..126: note = source = chr2:106002785-106002910; Gene: FHL2 (exon)
  source 1..126: mol_type = genomic DNA
cgccggggacccgcagaggcccgcagcaggtaccttgcagtcacagccgatgggcttcccacactcctcgcaggtgttggcgaacagggtctcaaagcacaccacgcagtaggggctctcctcccg

SEQ ID NO: 4399 - DNA, 169 bp, Homo sapiens
  misc_feature 1..169: note = U/M: U (0.06:0.9) in Erythrocyte progenitor cells
  misc_feature 1..169: note = source = chr19:42911473-42911641; Gene: LIPE,LIPE,LIPE (intron,exon,intron)
  source 1..169: mol_type = genomic DNA
cgtgggatctggaggtctgggccacaaagccaccgccgtggaagtgcactatcagggaccgcgagcggggtgcctgctgggggcgcggccacagctccaggctccgttggccgttggactttatcaggctgctgagctcctcactgtcctgggggtgaggagggagacg

SEQ ID NO: 4400 - DNA, 245 bp, Homo sapiens
  misc_feature 1..245: note = U/M: U (0.02:0.86) in Erythrocyte progenitor cells
  misc_feature 1..245: note = source = chr14:101513595-101513839; Gene: MIR539 (promoter-TSS)
  source 1..245: mol_type = genomic DNA
cgaagcagtcaccatctaaccttgagccaaagacctggaggtggtggtccgtgctgctgtttcatacttgaggagaaattatccttggtgtgttcgctttatttatgatgaatcatacaaggacaatttctttttgagtatcaaatcttgcctcggcagacttcctggacgccatgacaagttctgtaaagggatgcacgcatcagcccttcccaggggctcacgcctgggtggggatgagggcg

SEQ ID NO: 4401 - DNA, 246 bp, Homo sapiens
  misc_feature 1..246: note = U/M: U (0.09:0.93) in Erythrocyte progenitor cells
  misc_feature 1..246: note = source = chr7:5500335-5500580; Gene: MIR589 (Intergenic)
  source 1..246: mol_type = genomic DNA
cggcctcccaaagccctgggattacagccgtgagccaccatgcccagactcaggcctaatctgatggcagaggcttgggacgtgcacccgggcctccatcccaagcccggcctcgctatctgcacattgccgcccctctgcagccccgaaacatttgttccaccagctgcaagggcgttctcacctcccttcatccctcaccatatttttttgttttgtggaagctgcacagttctgaagtaatcg

SEQ ID NO: 4402 - DNA, 247 bp, Homo sapiens
  misc_feature 1..247: note = U/M: U (0.11:0.94) in Erythrocyte progenitor cells
  misc_feature 1..247: note = source = chr3:186276568-186276814; Gene: TBCCD1 (intron)
  source 1..247: mol_type = genomic DNA
cgcccaggctggagtgcaatgatgcgatctcagctcactgcaacctccgccttcctggttcaagcgagattctcctgcctctgcctcctgagtagctgggattacaagcatgtgccaccacgcccaactaatttttttgtatttttagtagagatagggtttcaccatgttggccaggctggtcttgaactcctgacctcaggtgatctgcccgccttggcttcccaaagtgctgggattacaggcg

SEQ ID NO: 4403 - DNA, 132 bp, Homo sapiens
  misc_feature 1..132: note = U/M: U (0.15:0.97) in Erythrocyte progenitor cells
  misc_feature 1..132: note = source = chr16:74546117-74546248; Gene: GLG1 (intron)
  source 1..132: mol_type = genomic DNA
cgcgatctcgactcactgaagcctccgcctgggtgacagagcgagaatccatattaaaaaaaaaaaaaaaaatttttgcccaggctagaagtacagtgatgcaagtgtgatctcggctcactgcaacctccg

SEQ ID NO: 4404 - DNA, 274 bp, Homo sapiens
  misc_feature 1..274: note = U/M: U (0.08:0.9) in Erythrocyte progenitor cells
  misc_feature 1..274: note = source = chr3:156787192-156787465; Gene: LOC100498859 (Intergenic)
  source 1..274: mol_type = genomic DNA
cgttagtaattcacatgaatcacaatttggttttagaaaaactcatttttagtgcatatatttgaaaatatctcagaatcatggattccagagacggaagagatcttgagaaatgctcaggttcagttttgtctggtccaaccagataagctattttcgtcatcatttcacagatgagacaattaaacatctgcacattttagacagaaaataagcctacgttaagtggcaggatttttaaacctgatgcatttgctaagtggtgcagtactcg

SEQ ID NO: 4405 - DNA, 120 bp, Homo sapiens
  misc_feature 1..120: note = U/M: U (0.08:0.89) in Erythrocyte progenitor cells
  misc_feature 1..120: note = source = chr8:145276559-145276678; Gene: MROH1 (intron)
  source 1..120: mol_type = genomic DNA
cgttcagagctcttctccccaccgtacccctgacagggtcttttggtccttttggacaccacctgcaatgccaggtggctaaacgcacacagtctgggcagtctgagaccaaccggctcg

SEQ ID NO: 4406 - DNA, 145 bp, Homo sapiens
  misc_feature 1..145: note = U/M: U (0.09:0.9) in Erythrocyte progenitor cells
  misc_feature 1..145: note = source = chr7:1990001-1990145; Gene: MAD1L1 (intron)
  source 1..145: mol_type = genomic DNA
cgaggcccgcaagccctcatgaaagctcccctgacctcaggcctcatcagcagatgaaggactctcagcacagccaattacccggtgctggtaatcacccgctgacttccacccgagtccttcagaaggtaatctgcggagggcg

SEQ ID NO: 4407 - DNA, 160 bp, Homo sapiens
  misc_feature 1..160: note = U/M: U (0.13:0.94) in Erythrocyte progenitor cells
  misc_feature 1..160: note = source = chr7:1894920-1895079; Gene: MAD1L1 (intron)
  source 1..160: mol_type = genomic DNA
cgggccacaccctagggttctctccctagggttgctctcgttttctccagcagcgatgacagcgacaagctgagcattccccaggtgcttaagttccgcttccttctgcttgatgccatcctaggccgcccctctgtgcccgcatctgactataacagcg

SEQ ID NO: 4408 - DNA, 169 bp, Homo sapiens
  misc_feature 1..169: note = U/M: U (0.08:0.89) in Erythrocyte progenitor cells
  misc_feature 1..169: note = source = chr16:57758610-57758778; Gene: CCDC135,CCDC135 (exon,intron)
  source 1..169: mol_type = genomic DNA
cgggaggagacacccaggacaatgacagagtactatcaaggacgcccagacttcctctcctaccgccatgccagcttcggaccccgagtcaagaagctcactctgagcagtgcagagtcaaacccccggcccattgtggtaagagctcgcgggggctggggacaggtcg

SEQ ID NO: 4409 - DNA, 175 bp, Homo sapiens
  misc_feature 1..175: note = U/M: U (0.1:0.91) in Erythrocyte progenitor cells
  misc_feature 1..175: note = source = chr16:29666057-29666231; Gene: SPN (Intergenic)
  source 1..175: mol_type = genomic DNA
cgggcacggtggcgcacgcctataatctcagcactttgggaggctgaggtgggcgtatcatgaaaccctgtctctactaaaaatacagaaattagccgggtgtagtggtgggcacctatgatcccagctactcagaaggctgaggcaggaggaacgcttgagaaccccagaggcg

SEQ ID NO: 4410 - DNA, 274 bp, Homo sapiens
  misc_feature 1..274: note = U/M: U (0.13:0.94) in Erythrocyte progenitor cells
  misc_feature 1..274: note = source = chr17:80419253-80419526; Gene: NARF (intron)
  source 1..274: mol_type = genomic DNA
cgaggtgggtggattacctgaggtcaggagttcaagatcagcctgaccaacatagataaaccccatctctactaaaaatacaaaattagctgggcgtggtggtgcatgcctgtaatcccagctactcaggagcctgaggcaggagaattgcttgaacccgggaggcggaggttgaggtgagccgagatcacgccactgcactccagctggggcgacagagtgagactccgtctcaaaaaaaagaatgtcattttacatgcagtctcatttcacg

SEQ ID NO: 4411 - DNA, 308 bp, Homo sapiens
  misc_feature 1..308: note = U/M: U (0.09:0.9) in Erythrocyte progenitor cells
  misc_feature 1..308: note = source = chr5:180209010-180209317; Gene: MGAT1 (Intergenic)
  source 1..308: mol_type = genomic DNA
cgagccccggcctactcgattatgttatctgtagattccagacattgtatggaaaagcactgtgaaaacccttgtcctgttctgttccaatctgattaccggtgcatgcagcccccagtcgtgtacccgctggttgcacaatcgatcacgaccctctcacgtggacccccttagagttgtgagcccttaaaagggacaagaattgctcactaggggagctcagctcttcagacaggagtcttgccaatgctcctggctgaataaaccccttccttctttaactcggtgtctgaggagttttgtctgcg

SEQ ID NO: 4412 - DNA, 385 bp, Homo sapiens
  misc_feature 1..385: note = U/M: U (0.14:0.95) in Erythrocyte progenitor cells
  misc_feature 1..385: note = source = chr10:127504782-127505166; Gene: UROS (intron)
  source 1..385: mol_type = genomic DNA
cgataaaacagggatcaaagtggcttcaagtccatataatcctaattcctgaaatgaaagaatatagttctggattggctagggctgtttttaaaataagggaacattaacaatttattctgcgtcagttcctctgaggttttgcaaaacccatccctgcctgctccaggccccttgactcagtagaaaggacactgtgggataaggagtctcaggccacttaccctgatatacggatcctggccacagtcatcttccttcgcatccttcagtaaaagaaccttcattattgcctggcagtccttatagggcactgcgacagagcaaggaaacagatcttaattagatctcaaagactcttcctaagcaatttccgatggggacg

SEQ ID NO: 4413 - DNA, 184 bp, Homo sapiens
  misc_feature 1..184: note = U/M: U (0.13:0.93) in Erythrocyte progenitor cells
  misc_feature 1..184: note = source = chr16:449076-449259; Gene: NME4,NME4 (exon,intron)
  source 1..184: mol_type = genomic DNA
cgctttgagaggcggggcttcacgctggtggggatgaagatgctgcaggtagtgggactctgggcttgtgggtgtccctgtggggatggggttgggggatccttctcggcctttcacatcccagccagcgccggggcagggcctggctttggcagttgaaggggcaggagggatctattctgcg

SEQ ID NO: 4414 - DNA, 402 bp, Homo sapiens
  misc_feature 1..402: note = U/M: U (0.05:0.85) in Erythrocyte progenitor cells
  misc_feature 1..402: note = source = chr12:53703422-53703823; Gene: AAAS (intron)
  source 1..402: mol_type = genomic DNA
cgccccccactgggggcccaggccaagctggtaacaggtgtatgcccagggtgagacagcacttgggcacagccagaagagggtctggaggggaacacagaggatgtggagtcagaagatgacaagaagccatccccaaaattctatttctttgcctcctgctaaaacctcctatcctgatggcccactctgggctcaaatccaggttgtgaaaaaggaataaggattgtgaaagttaaaagaaaaaaacagcgaaggggaaaaacgaccaagtcaccacgagcaggtcaacagagaagaggtaatctgcaaggtctcaggccagggtgaaagagtgctttcacgagataggccatgaggcaaaacctaaccagtaacctagaaggtactgcccctggggcg

SEQ ID NO: 4415 - DNA, 429 bp, Homo sapiens
  misc_feature 1..429: note = U/M: U (0.12:0.92) in Erythrocyte progenitor cells
  misc_feature 1..429: note = source = chr3:197283517-197283945; Gene: BDH1 (promoter-TSS)
  source 1..429: mol_type = genomic DNA
cgacagagtgctccgtctcacaaaaacaaaaaaattaaagatttgcttctcagggtctttaaaaataaattaagaatagcagtttcccagagttttaataatagaacaacggagggccatcggccacagataagggtttcctcccaaccccaccccactgcgctatcgccctgcgccagcacacctcagtttccaggatgagaaacaggctgaggagagaagacaccaggacacattagtggcgaagctacgcgaaaggaaaataaaccttggggcccccaaatcactaggctaaaggggaaagtcaagctgggaacggcttagggccaacctgcccccattctactcaaaatcaccccctgctcactgagataaatgcatatctgattccccctttggagaggctcatcagaaactcgaaagaatgcg

SEQ ID NO: 4416 - DNA, 236 bp, Homo sapiens
  misc_feature 1..236: note = U/M: U (0.13:0.92) in Erythrocyte progenitor cells
  misc_feature 1..236: note = source = chr2:9508904-9509139; Gene: ASAP2 (intron)
  source 1..236: mol_type = genomic DNA
cgccactggtgggtggaagaccctggacttttcacctgtgctgtctgttctgttgagtcacttccccgtcttggtctctctgcataatcctgagccaccgagatggctggttgtggtagatatgtgattatgtagcgtccttcttgccaacgtccttgcctccttgcaaatgtggaatgtgttacttccttcaaaaaatgtttgtgtttgtgttattgttgatacacaacttgacg

SEQ ID NO: 4417 - DNA, 236 bp, Homo sapiens
  misc_feature 1..236: note = U/M: U (0.08:0.87) in Erythrocyte progenitor cells
  misc_feature 1..236: note = source = chr11:65613991-65614226; Gene: SNX32 (intron)
  source 1..236: mol_type = genomic DNA
cgtgccattgcactccagcctgggcaacaagagtgaaactctgtctcgaaaaaaaaaaaaaagaatacgccagaataatctatggtgatagaagtcagaatggtggttagttctggggtgggagataattgatgggtgtggggcaagaaggagccttccggagtgtttaaaaaaatgttttttgccaggcacggtggctcacgcctgtaatcccagcactttgggaggccaaggcg

SEQ ID NO: 4418 - DNA, 327 bp, Homo sapiens
  misc_feature 1..327: note = U/M: U (0.14:0.93) in Erythrocyte progenitor cells
  misc_feature 1..327: note = source = chr5:177604200-177604526; Gene: GMCL1P1 (Intergenic)
  source 1..327: mol_type = genomic DNA
cgcacttccaaaggagtccaatcagaggggctgggtggggtcttcaatttccctccgcagttccaaatgactccgcggactgctgagtcccatccgagtagagctctcttggcgccccacatgcagacgaacgcaaatgctcaaatgttatcactaacagccaaatctttcttttttattttttttgagatggagttccgctcttgttgcccaggctggagtgcagtggcatgatcttggctcactgcaacctccgcctcccaggttcaagcgattctctggcctcagcctcccaagtagctggaatcacaggcgcccaccaccacg

SEQ ID NO: 4419 - DNA, 440 bp, Homo sapiens
  misc_feature 1..440: note = U/M: U (0.12:0.91) in Erythrocyte progenitor cells
  misc_feature 1..440: note = source = chr13:114020135-114020574; Gene: GRTP1 (Intergenic)
  source 1..440: mol_type = genomic DNA
cggctccccttttccctaattcctgccttctggccatggagatggggttctaacctccctttcccaccactgccgtggaaagcagcgtggcaggcagcacggaccaggggccgccagctcccgagcctgagtgtgatggcgggactgccaccaagtgtatttttgggccagatgtagggagactgtgggggagcaggtcagataagagcggtgccctccaggaagagtggagaggagagatacagagaggccagagccccaggctctgtgcagggtgggcagccagaccgaggcagctagaaaggtctcccgctccagcccaggcctggccaagccccaacctgggacctgactgggagacagcagctcctatctggaacagctcccacctgggacagctcccacctgggactgtgtccctcaggtgcctccattcaccg

SEQ ID NO: 4420 - DNA, 466 bp, Homo sapiens
  misc_feature 1..466: note = U/M: U (0.15:0.94) in Erythrocyte progenitor cells
  misc_feature 1..466: note = source = chr17:57779656-57780121; Gene: PTRH2 (intron)
  source 1..466: mol_type = genomic DNA
cgggggtgagatgggaggcagtaacagatcatcagacattagattctcataagaagtacacaacacagatccctcgcatgggcagttcataacagggttcacactcgcatgagaatctaatgctgtcgctaattagacggagctcaggaggtaatgttagcgatggggagtggctgcaaatacagataaaacttcactcagttgcccaccactcacctcctgctgtgcggcccagttcctaacaggccacagggacgcctgttctaaaagatacctgagccttgactagcagttggcaatagatacagggagatcatttcagaggctgctataatgtagtaatagttaacatttatgaagtgttctgctacacactggctaaacactctataggaattgtcttctttaatgtgcctaacagcacttcaaggtaaatagagctggtcatggacttactgtagtttcg

SEQ ID NO: 4421 - DNA, 220 bp, Homo sapiens
  misc_feature 1..220: note = U/M: U (0.15:0.93) in Erythrocyte progenitor cells
  misc_feature 1..220: note = source = chr7:99892312-99892531; Gene: SPDYE3 (Intergenic)
  source 1..220: mol_type = genomic DNA
cgcctcctgggttcatgccattcttctgcctcagcctccccagtagctgggactacaggcgcccaccactatgcccagctaatttttttttattattttagtagagacggggtttcaccgtgttagccaggatggtctcaatctgctgatcttgatcttgtgatctgactgcctcagcctcccagagtgctgagattacaggcgtgagccaccgcacccg

SEQ ID NO: 4422 - DNA, 281 bp, Homo sapiens
  misc_feature 1..281: note = U/M: U (0.14:0.92) in Erythrocyte progenitor cells
  misc_feature 1..281: note = source = chr19:50376109-50376389; Gene: AKT1S1,AKT1S1 (intron,exon)
  source 1..281: mol_type = genomic DNA
cgacaaagcctcctgcgggcacctcaagcgctgggccgcacccgcccctgcccccaccctctcacctccattatcactaatgcccagctgctccccggaggtctctgtctctgtgggctcatcctcgtcctcctcgttgtcctctctggccagggtaggccggggtgggctgggtgtgggactgggtggctgtggtgctggtgggggcgcaggaggccgagcagcagtggcagccctgtgggccagtgcgatgtcgtggaggcaacggcgcgctgcctccg

SEQ ID NO: 4423 - DNA, 290 bp, Homo sapiens
  misc_feature 1..290: note = U/M: U (0.13:0.91) in Erythrocyte progenitor cells
  misc_feature 1..290: note = source = chr7:66104515-66104804; Gene: KCTD7 (exon)
  source 1..290: mol_type = genomic DNA
cgagaagttttgtcaccttcttgaccttgcaagagagtttctgcccattttagagccacgttaccaaatcgatgtaggcctaatcacttcctcaaccctgttcaagcgtccctcccttgtgctcagtatattggtgtgaacacggaacatgatgggggatttacctgaccagccaccccatagcccctggctgaagaagaaagagcatcttctctcccactgcaccccttctcctccaagaatagttgcccacattcccaaaatgtggaaagacttttcttttccttccg

SEQ ID NO: 4424 - DNA, 298 bp, Homo sapiens
  misc_feature 1..298: note = U/M: U (0.14:0.92) in Erythrocyte progenitor cells
  misc_feature 1..298: note = source = chr17:2823992-2824289; Gene: RAP1GAP2 (intron)
  source 1..298: mol_type = genomic DNA
cgaatatcggcacataatggacaccagtggttgttatcatggtcaatatgccaaacacgcatagggtggtttcattgataatcccgcccttctgctctgccaactgccatagactctactccactgagaccggctcagcagcgggatgctgccagattctgtgttctgccacccacccccatccgctaccctcttccatgagtgtcatttacccgacactcaagcctgctgtgtctgggacttcagaggccagtggatggtgggttctgtgttgcttcgtgaagggatgtcccctgcg

SEQ ID NO: 4425 - DNA, 387 bp, Homo sapiens
  misc_feature 1..387: note = U/M: U (0.13:0.91) in Erythrocyte progenitor cells
  misc_feature 1..387: note = source = chr1:228113376-228113762; Gene: WNT9A (intron)
  source 1..387: mol_type = genomic DNA
cgagaagggccttggccccctgcacacccatggcccccactccagcgagcatggtctcagtgaccacagggctgtctctgctgccgactcgacccccacagtttcagggagtctagctgactctggctgcactggacagataagacccccacaacacacacaacatacgcaagaggacagccccgcctagggctgtgggcagggaggaggctccggagcctgaatcccaaactatgcctgatgggcgtctgccacatcctccaccctctttggccccagctgacccgcaggatcccgcctgaggtccccctaccctctgccatgacctgctgggatgtctacagtcctgtggccccctgcagcttcccagcactcctgcagtctacg

SEQ ID NO: 4426 - DNA, 399 bp, Homo sapiens
  misc_feature 1..399: note = U/M: U (0.15:0.93) in Erythrocyte progenitor cells
  misc_feature 1..399: note = source = chr3:45563583-45563981; Gene: LARS2 (intron)
  source 1..399: mol_type = genomic DNA
cgagactctctctcaaaaaaataaaaataaaggcataattattccccatgctattgcaaagatggcagaatagacttttacacgccagtgataggtgtggttggtgtaaccttgccaggaagcacttcggctatcaggttgattgtgttatatcctctgatccaggagtgttcactgcagataatttataatcacagagactcggaaccccagtgtcctctgatgggggaattgtgaaatgacttatgtcatatcaataagaaaggaatgtgccaccaccattaacctcatgtcttgaagaatacttaatatcagaaactgtttatgatataatgttaagtaaaaacacatgacacaaggccaggcacagtggctcacgcctgtaatcccagcactgcg

SEQ ID NO: 4427 - DNA, 189 bp, Homo sapiens
  misc_feature 1..189: note = U/M: U (0.12:0.89) in Erythrocyte progenitor cells
  misc_feature 1..189: note = source = chr19:43948784-43948972; Gene: LYPD3 (Intergenic)
  source 1..189: mol_type = genomic DNA
cgggggtgtcgctatgttgaccaggctggtctcgaacccctgacctcaggtgaaccatccgcctcgaactcccaaagtgctaggatgacaagcataagccaccatgctggtagttgcattcttttcagtttctgattagcctctccaaatggggcaatgagatatgcatttatctcagtgagcagagcg

SEQ ID NO: 4428 - DNA, 380 bp, Homo sapiens
  misc_feature 1..380: note = U/M: U (0.07:0.84) in Erythrocyte progenitor cells
  misc_feature 1..380: note = source = chr15:78568978-78569357; Gene: DNAJA4 (intron)
  source 1..380: mol_type = genomic DNA
cgccaccgaagcagcctgggccccagcaccagccatttgcagtgttgctgtagtcccctcactggccgtggggctgggattacctttttctatggccatttgaggtttggtgcaaaaggggtaggttcagggcaggcagggaggtaaccaccaataagcctgcccccagggcagtggcagctggagataagactcaagtctggtggggtgactgaggcctggacttctgttccctccgtgtccctctcccccttcccctccttgtctgcttttctcttcccagccttgtgctctttttctctttcctctcttggattctttcaggttcctcctttcctggggatagtaggaagcagaattatatatccaagccttgatcg

SEQ ID NO: 4429 - DNA, 410 bp, Homo sapiens
  misc_feature 1..410: note = U/M: U (0.16:0.92) in Erythrocyte progenitor cells
  misc_feature 1..410: note = source = chr1:90363428-90363837; Gene: LRRC8D (intron)
  source 1..410: mol_type = genomic DNA
cgaggtgcagtggaggtagaggctgggacaaggtgcatcccggtgagtgcctggtacagggaaggagcagcatggtcatggtgtgataattggaggccacctctcctagcacagcagataacagaaggaattcccacctaaccgccatactcgctcctaagcagctgaataaagatgtctctgatatgtggctgaacctctgtatgtggtttagtgctcacaggcagccgatactgagaggaaaaaccttgggttcctaaaacttttaaaacattgaatacgagccagtaagcagtcattggtatactgcagttattgtaccagagttaactgatgctgtagaagtgaggccaccacatttatcaaatctaaaagcaattcatgggaggatggtgaaaaatggaaaaccg

SEQ ID NO: 4430 - DNA, 495 bp, Homo sapiens
  misc_feature 1..495: note = U/M: U (0.15:0.91) in Erythrocyte progenitor cells
  misc_feature 1..495: note = source = chr12:110533427-110533921; Gene: IFT81 (Intergenic)
  source 1..495: mol_type = genomic DNA
cgagactagcctggccaacacagtgaaactccgtctctactaaaaattaaaaaataaaaataaaaaatcttgtgtttgaatccctgtttccaattcttttgggtaaaaacctaagagtggaactgctgtgtcatatggtaattctatgtttaactttttgagggatggccaaactgttttctacagcagcagcatcattttacattcctatcagtgatatacaaaggctccaatgtctttatcttctcaccaatacttgttatttttgagagagagtctcgctgtgtcacccaggctggagtgcagtggtgcgatctcagctcactgcaacctccacctcccggattcaagtgattatagtgtctcctgagtagctgggattacagggacctgccaccacgcccagctactttttgtatttttagtagagaccaggtttcgccatgttggccaggctgtcttgaactcctgacctcaggtgatctgcccacctcg

SEQ ID NO: 4431 - DNA, 163 bp, Homo sapiens
  misc_feature 1..163: note = U/M: U (0.19:0.94) in Erythrocyte progenitor cells
  misc_feature 1..163: note = source = chr14:104197417-104197579; Gene: ZFYVE21 (intron)
  source 1..163: mol_type = genomic DNA
cgggcagatcacctgaggtcaggagttcgagaccagcctgggcaacatggtgaaaccctgtctgtactaaaaatacaaaaattagctgggtgtggtggtgggtgcctgtagtcccagctactcgggaggctgaggcaggagaatcgcttgaacccaggaggcg

SEQ ID NO: 4432 - DNA, 308 bp, Homo sapiens
  misc_feature 1..308: note = U/M: U (0.2:0.95) in Erythrocyte progenitor cells
  misc_feature 1..308: note = source = chr16:67615261-67615568; Gene: CTCF (intron)
  source 1..308: mol_type = genomic DNA
cgtctcccgtgctggagtgcagtggcatgatctaggctcactgctacctctgcctcctggggtcaagtgattcttgtgccttagcctcccaagtagctgggattacagacatgctccactaggcctggcttattttattttatttttattttatttatctttttcagacagagtcttcctctgttgtccagtctggagtgtggtggcacgatcttggctcgctacaacctccgcctcccaggttcaagcgattctccttcgttagcctccggagtagatgggattacagtcgtgcaccaccacacccg

SEQ ID NO: 4433 - DNA, 173 bp, Homo sapiens
  misc_feature 1..173: note = U/M: U (0.16:0.9) in Erythrocyte progenitor cells
  misc_feature 1..173: note = source = chr16:16248495-16248667; Gene: ABCC6 (exon)
  source 1..173: mol_type = genomic DNA
cgcctcggtcagcacacttgtactgcagctggccgggcaggctggccaccaaggctttgagctgcaccgtctccagggctgcccagatagcctcgtccgagtgctcctgcagcaggtcgaggttcatccgcagagagccagggaacaggatggggtcctggcggggaggggcg

SEQ ID NO: 4434 - DNA, 227 bp, Homo sapiens
  misc_feature 1..227: note = U/M: U (0.15:0.88) in Erythrocyte progenitor cells
  misc_feature 1..227: note = source = chr2:218931177-218931403; Gene: RUFY4 (intron)
  source 1..227: mol_type = genomic DNA
cgtgagccaccacgcccagccaactgtcaacgtttctacagcactctgctttatgctatttccaattcattttgtgattgcaggccaggaatctcacttcttttttattttaactttttattttaaaataattatgtgttaacagaagagattcaatgacggtacagacagtacaggtctcatataccctccaccagcttttcctaaagataacgtcttacattacg

SEQ ID NO: 4435 - DNA, 246 bp, Homo sapiens
  misc_feature 1..246: note = U/M: U (0.21:0.94) in Erythrocyte progenitor cells
  misc_feature 1..246: note = source = chr9:4850162-4850407; Gene: MIR101-2 (promoter-TSS)
  source 1..246: mol_type = genomic DNA
cggaaaacagcctatttgagtactgacattgtgtgtgtgtgttttcacgtgcttgcatacttggagatcatcatatggcccatctgaggttggtgagctgggtggcagggaatattcaggtagatatgagactgaactgtcctttttcggttatcatggtaccgatgctgtatatctgaaaggtacagtactgtgataactgaagaatggtggtgccatcacattgagaaagggttgaggactgcg

SEQ ID NO: 4436 - DNA, 282 bp, Homo sapiens
  misc_feature 1..282: note = U/M: U (0.15:0.88) in Erythrocyte progenitor cells
  misc_feature 1..282: note = source = chr16:31029177-31029458; Gene: STX1B (Intergenic)
  source 1..282: mol_type = genomic DNA
cgaactccgggaggctgaggtgggaggatcacttgagcccgggaggcggagattgcagtgagccaagatcacatcactgcactccagcctgggtgacagagcaagactctatctcaagaaaacacacacacaaaaatatgaatgcagctggggtggagcacaaacattgaacccctaacagaataccatgatcaaactttcattttgcaaagatcctgctggtggccgtgtgcgggaccaccacagatggctgtgccagagtgcactacgtgaagcagtacg

SEQ ID NO: 4437 - DNA, 393 bp, Homo sapiens
  misc_feature 1..393: note = U/M: U (0.16:0.89) in Erythrocyte progenitor cells
  misc_feature 1..393: note = source = chr21:46487394-46487786; Gene: SSR4P1 (Intergenic)
  source 1..393: mol_type = genomic DNA
cgtgcgctgagaggtgtaagagaaggttcacagaggcacaggttgatggatctcatgaacacagcgtcaagtggaagaatcaagacacgaaagaatacattctgtgtgatgtcacttatgtgaagcaaaaacaggcataaccaatctgcggaggtaggagtcagggtagagcttatctttaaggcccagaggcagctgtggctatggaggggcacgccggacactccgagttggtcacgttccgctgctcgccctggtggaggtttcacagctgtgtccactttgggctaatgtgttgagatgtacatttatgatatggatactttttggtgtatgtattatatctcaaaaaagtttgaaaatacatgatgatggccacttttcacaccaccg

SEQ ID NO: 4438 - DNA, 180 bp, Homo sapiens
  misc_feature 1..180: note = U/M: U (0.22:0.94) in Erythrocyte progenitor cells
  misc_feature 1..180: note = source = chr3:127303699-127303878; Gene: TPRA1 (intron)
  source 1..180: mol_type = genomic DNA
cgagcagagtgaggtctgctaatttcagatcatgccctcctcccttcccggtggctggaatatagatacgacagtgggagcaagagcagcctcctcagaccacgaggcagaaaccctgtacgagggtaacagagcaatgagaaagaaggtgtctgggtccccagcacaatgaggcctccg

SEQ ID NO: 4439 - DNA, 215 bp, Homo sapiens
  misc_feature 1..215: note = U/M: U (0.21:0.93) in Erythrocyte progenitor cells
  misc_feature 1..215: note = source = chr19:2421753-2421967; Gene: TMPRSS9,TMPRSS9 (intron,exon)
  source 1..215: mol_type = genomic DNA
cgatggctcccacccactgtaggaacgcaggagggtatggcagtgctgggaagagagggtccctggaggaccaaccagtgctctttccttcctttctagggtgactctgggggccccctggcctgcgaggaggcccctggcgtgttttatctggcagggatcgtgagctggggtattggctgcgctcaggttaagaagccgggcgtgtacacgcg

SEQ ID NO: 4440 - DNA, 365 bp, Homo sapiens
  misc_feature 1..365: note = U/M: U (0.21:0.93) in Erythrocyte progenitor cells
  misc_feature 1..365: note = source = chr2:96837551-96837915; Gene: DUSP2 (Intergenic)
  source 1..365: mol_type = genomic DNA
cgctgtctcggctcactgcaacctcccaggttcaagcgattctctcgcctcagcctccggagtagctgggactacaggcgtgcgcaccaccacacccagctagtttttgtattgttggtggagatagggtctcacgatgttacctaggctgatatccaactcctggtctccagtgctccacctatctaggcctcccaactgctgggattacgggcgtgagccaccgcgccagcgagggtggttagtggtaaggacacaacagggccaggcatggtggtaggtgcctgtagtcccagatactcaggagggtgaggcaggagaatcgcttgaatgcgggaagcagaggttgcagtgagccgagatcg

SEQ ID NO: 4441 - DNA, 175 bp, Homo sapiens
  misc_feature 1..175: note = U/M: U (0.18:0.89) in Erythrocyte progenitor cells
  misc_feature 1..175: note = source = chr19:12910879-12911053; Gene: PRDX2 (TTS)
  source 1..175: mol_type = genomic DNA
cgctgctagccacagggctgggggcagagaagacattgtacaggagtggtcccagcatcacaggaatggggggcagggcgctccctgagccgggctgagggtcccacagtacctgtaggcaatgccctcatctgttttcagcacgccgtaatcctcagacaagcgtctggtcacg

SEQ ID NO: 4442 - DNA, 151 bp, Homo sapiens
  misc_feature 1..151: note = U/M: U (0.21:0.91) in Erythrocyte progenitor cells
  misc_feature 1..151: note = source = chr7:129593580-129593730; Gene: UBE2H (promoter-TSS)
  source 1..151: mol_type = genomic DNA
cgggagttccagaccagtctggccaatatggtgaaaccccgtctctactaaaaatacaaaaattaaccaggcgtggtggcgggcgcctgtagtcccaactactcgcgaggctgaggcaggagaatcgcttgaacccgggaggcagaggtcg

SEQ ID NO: 4443 - DNA, 317 bp, Homo sapiens
  misc_feature 1..317: note = U/M: U (0.24:0.94) in Erythrocyte progenitor cells
  misc_feature 1..317: note = source = chr21:33940107-33940423; Gene: TCP10L (Intergenic)
  source 1..317: mol_type = genomic DNA
cgccaaagctgtccctagcacaaaggttcctggcgccatgcctgtggcagctctgtctctgtctaatctctgaagacatccacctaccagctcaaatgtccgtggcgcgtgtgaggtctccagtctccaagtcccttcacttaccctttcctcagacaccgctggaggccaggaagcagccttagcattcagttacccgcacggagtttccagcttcctccctcttcagcctcagggtctgcatcttttctacatccacattcagcatcttctttacaaagatctgttgaaattatgttgatttagtcaaaatctcg

SEQ ID NO: 4444 - DNA, 348 bp, Homo sapiens
  misc_feature 1..348: note = U/M: U (0.24:0.94) in Erythrocyte progenitor cells
  misc_feature 1..348: note = source = chr7:120648099-120648446; Gene: CPED1 (intron)
  source 1..348: mol_type = genomic DNA
cggtttttagaaaatactgcgattcaggtagtaaaagtctcgccttctgaaattctatcagggtactcatccatccagaaaacaaaacaagaaaagcactctttttctgtctatactaagtccagttttcctcatctgcctccttcctgacatggctttagtaaaccaaatcaaagttcttcaaagtcggacctacgtataaagaccagcatagagttatcaacctttaaattctccactactcaccgcatttaggtttcctactagctacttaacaagataataagtagcattgcattgctccatttttatcatcattgccagtcatttcttgtttcctatctgacg

SEQ ID NO: 4445 - DNA, 395 bp, Homo sapiens
  misc_feature 1..395: note = U/M: U (0.22:0.92) in Erythrocyte progenitor cells
  misc_feature 1..395: note = source = chr12:1600710-1601104; Gene: ERC1 (exon)
  source 1..395: mol_type = genomic DNA
cgatcttaaggtgtgttttctagaaaagttccctaatggaattcatgagtttgggggtctcagtcacccgcttgcctgtaggattccatttgatgattctggatttttgctgtttgttattgcccttagaggggctctgagtatctacttgtgggtggccatttcctgacatctgcatgtacctcgtggaattcagccagcttcatgttgcaaatcagaaagctgaccccaagactgcaaatcaatgaaggtattggcattgttaaggacgtagcgtagacaacagcagtcataaataattaggcaggaacttaacccaaatctagttctttgaccacctctaccaccagaacccagcagacactcacatctcctgataagagttgctggactcg

SEQ ID NO: 4446 - DNA, 225 bp, Homo sapiens
  misc_feature 1..225: note = U/M: U (0.25:0.94) in Erythrocyte progenitor cells
  misc_feature 1..225: note = source = chr8:128904792-128905016; Gene: PVT1 (intron)
  source 1..225: mol_type = genomic DNA
cgcctggaggctctgaggggccatgtaccttccccaaggttatttatccaggagaagacagagccagaagctgagaactgcctcgtgttttataccaaacaaggccccttcagctgaagacttttccttgcggtcttgggaagggtgtgtgtgacggtgagctgcagcaggtgctgggctgtgcttgactgtggtcacgtaggggcaggcagaggagccatttcg

SEQ ID NO: 4447 - DNA, 331 bp, Homo sapiens
  misc_feature 1..331: note = U/M: U (0.26:0.95) in Erythrocyte progenitor cells
  misc_feature 1..331: note = source = chr1:19439018-19439348; Gene: UBR4 (intron)
  source 1..331: mol_type = genomic DNA
cgagttaggaggcacatgagctggcggacctcctcccgcatggccgcagcccctcggcgaagattataatcaaagagctcccggataaggccctgggagacaaggatgtgcctcaaggctgggttggtggccagggcccgaagtagtgtgatacaatgttctgtgacagccgaggcgcagccatagcacttggtggaggatgtgtggccacagcccaggacggataaggcacggtactggctggcagtgaatgtgggctgcacggaggtccgggatgatttagtggctgcttccctctgctgtaggtcatattccaacaactctttgcgcg

SEQ ID NO: 4448 - DNA, 408 bp, Homo sapiens
  misc_feature 1..408: note = U/M: U (0.28:0.93) in Erythrocyte progenitor cells
  misc_feature 1..408: note = source = chr12:112170744-112171151; Gene: ACAD10 (intron)
  source 1..408: mol_type = genomic DNA
cggctgtcgggtggggctggatcttctgaagacttgctagcatgctggccctgggcagagaagatattaacagccgggctccttgggcctctctttctgtctctttgtggttcccacatggtctctccagcatggcaacttctgggtaactggactttttttttttgagacaggatcttgcactgtcacccaggctggagtgtagtggcaattcataggctggaacataactcactgcagccaccaactcctgggctcagtgatgctcccaccttagcctcctgagtagctgggactacaggcgtgcactaccacgctcagctaatttttaaatttttttttgtagagataggatcttgttatgttgcccgggctggtcttgaactcctgagcttaagcagtcctccg

SEQ ID NO: 4449 - DNA, 178 bp, Homo sapiens
  misc_feature 1..178: note = U/M: U (0.3:0.94) in Erythrocyte progenitor cells
  misc_feature 1..178: note = source = chr16:15790583-15790760; Gene: NDE1 (intron)
  source 1..178: mol_type = genomic DNA
cgcttcctgccggaacctcgtgtacgatcagtccccaaaccgaacaggtggcccagcctctgggcggagcagcaagaacagagatggcggggagagacggccaagcagcaccagcgtgcctttgggtgataaggggtcagtaccttctaataaacctctcgctggcggggagaacccg

(The sequence listing continues in the following parts.)
